United States Patent Application Publication US 2005/0228172 A9 - sequence listing, part 6

SEQ ID NO: 18067 - DNA, 1928 bp, Homo sapiens
tataaaattgcgtcctttgtaattaaattgccttttatttttctgagtgaaaatgagaactgcatgtagcattttccaaaatggaacacattttcccataattgggactctttggcattcactggaaaattaaataattttagaaatattgctattagtactttcaataaagaggggactatagaatgttatacaaatagatctttaaagaaatatccttttatgcactgctataggtaaatggacatactaatttgtgaagctgtacaaaagatacacattttatcctgggaatacaaaaccacagttttaaaaataatttctggctgggcacggtggctcacrcctataatcccaccactttgggaggccgaggtgagtggatcacaagatcaagagatctagaccatcctgcccaacgtggtgaaaccccgtctctactaaaaatacaaaaattagttggacgtgctggtatgtgcctgtaatctcagttacttgggaggctgaggtaggagaatggcttgaacccgagaggcagaggttgcagtgagccgagatcacgccacttcactccagcctggcgacagagcgagactccctctcaaaaaaaaaaaaaaaaaaaaaaaaaaaaaattccttcaagcacaaaataaattgaactatagagaaacatatgttttattaaactataaatacatggcatactaaaataattcttcaagctgcgaatgttcatgaaaattcacatcactattaagtgattattttattcgaatcctgaaagttatcatgatacttaattttgcctttgtcataggagagagatattcaagtagatttcaactccagcttggggaaaaaaaaaatcatgactcacagaaaacatcgactttcaactgctttcatcagctgtgaatttcagatcaaaaaaccaattcaaatgatttataagttcagtgcttactccatgatggtcagcattatattattcaggtgaaggacagagaaggacagagaaggcacataaactctagttgggggagaacaattactatacaaaagaattcccccccaaaatggtaattaaggactattataggtaagctagcctacaattaattttgagaaaatttacaaaaaatgaactaaaatatacagccaaggcagaacaagcttaaaatgtttattaagcattctgtttggcaaaactacatgcaaccaccaaccagtaaaaactgaaattcctaatactctgcagagcaagtagccaacttaataatcatttacaaatagaagatataacaggtattaaatatcaatattcctagaaaaagccccttcaaagtaaaatatatgtatcagaagtcatccaaacaattcacaataattagtattatcaaattagtgctatttaactagtactagttttgctcgttagcagttctatcagaaggcactcaaggcactttgaaagaaaatatctgaagttttttttgtctgcctggtaatgacatattataaaaaatttattactaaaagtgaatatactacaatttaactttttaaatgaaaatgtattttacatgtttctttttcttttttgggagggtggggggtagggggattaagtcttgctctgtctactccaagctggagtgcagtggtgcgctcttggctcactgcaacctttgcctccccgattcaacttattctctggccccagcctccccagtacgtgggactacaggtacgcaccaccacgcccagctaatttttgtatttttggtaaagaccaggtttcgccatattggccaggcttgtctccaactcctgagctcaggtgatcagcccgcctcagcctcccaaagtgctgggcatgagccacagcgcctggccaaaatttgtctatattcaatagtaaactttca

SEQ ID NO: 18068 - DNA, 1928 bp, Homo sapiens
tataaaattgcgtcctttgtaattaaattgccttttatttttctgagtgaaaatgagaactgcatgtagcattttccaaaatggaacacattttcccataattgggactctttggcattcactggaaaattaaataattttagaaatattgctattagtactttcaataaagaggggactatagaatgttatacaaatagatctttaaagaaatatccttttatgcactgctataggtaaatggacatactaatttgtgaagctgtacaaaagatacacattttatcctgggaatacaaaaccacagttttaaaaataatttctggctgggcacggtggctcacacctataatcccaccactttgggaggccgaggtgagtggatcacaagatcaagagatctagaccatcctgcccaacgtggtgaaaccccgtctctactaaaaatacaaaaattagttggacgtgctggtatgtgcctgtaatctcagttacttgggaggctgaggtaggagaatggcttgaacccgagaggcagaggttgcagtgagccgagatcacgccacttcactccagcctggcgacagagcgagactccctctcaaaaaaaaaaaaaaaaaaaaaaaaaaaaaattccttcaagcacaaaataaattgaactatagagaaacatatgttttattaaactataaatacatggcatactaaaataattcttcaagctgcgaatgttcatgaaaattcacatcactattaagtgattattttattcgaatcctgaaagttatcatgatacttaattttgcctttgtcataggagagagatattcaagtagatttcaactccagcttggggaaaaaaaaaatcatgactcacagaaaacatcgactttcaactgctttcatcagctgtgaatttcagatcaaaaaaccaattcaaatgatttataagttcagtgcttactccatgatggtcagcattatattattcaggtgaaggacagagaaggacagagaaggcacataaactctagttgggggagaacaattactatacaaaagaattcccccccaaaatggtaattaaggactattataggtaagctagcctacaattaattttgagaaaatttacaaaaaatgaactaaaatatacagccaaggcagaacaagcttaaaatgtttattaagcattctgtttggcaaaactacatgcaaccaccaaccagtaaaaactgaaattcctaatactctgcagagcaagtagccaacttaataatcatttacaaatagaagatataacaggtattaaatatcaatattcctagaaaaagccccttcaaagtaaaatatatgtatcagaagtcatccaaacaattcacaataattagtattatcaaattagtgctatttaactagtactagttttgctcgttagcagttctatcagaaggcactcaaggcactttgaaagaaaatatctgaagttttttttgtctgcctggtaatgacatattataaaaaatttattactaaaagtgaatatactacaatttaactttttaaatgaaaatgtattttacatgtttctttttcttttttgggagggtggggggtagggggattaagtcttgctctgtctactccaagctggagtgcagtsgtgcgctcttggctcactgcaacctttgcctccccgattcaacttattctctggccccagcctccccagtacgtgggactacaggtacgcaccaccacgcccagctaatttttgtatttttggtaaagaccaggtttcgccatattggccaggcttgtctccaactcctgagctcaggtgatcagcccgcctcagcctcccaaagtgctgggcatgagccacagcgcctggccaaaatttgtctatattcaatagtaaactttca

SEQ ID NO: 18069 - DNA, 503 bp, Homo sapiens
tgccttacaacaggaggctgtcctgccccccgctcctgatttgggggatttggaaatgtggggagagtcaggattgttatcacaacctgtgtgggtgcaactggcatttagggccaagttcccagggtgctgctattctttgatgcataagagtgttcgataatgaagtacgaaacgcagctgcttctgtaytgagaaatgctggtgggcgaaggagtcccatcatgaacacacagcctggctctggacatgccccttgctcttgttgaagcagggggaccagttggctccaggggctcccacagtatgtggttgtgtgtctggggtgggcaccagggctaatcccgcagttctgggtgtctggcacacttctgccctctggtggcagagccgagatccctcggtcaccctccccaatcccccatctttccaaagaactgttatcccgtgatacgtaacttttaggtgtgcctgtggcccatgatctagggctgcccctgaga

SEQ ID NO: 18070 - DNA, 579 bp, Homo sapiens
aggtgtgtggctggaagacagtgttctgctagctcgtggccctccttcccacttcatggtgcggggaatgggtggcggtcaggtgcacagcatctgcacccaggctgccactttactactcgctgtccaggtgaacctggccactggcctaagctctctgcacctcactttcctctttgagaagatggagtttctatagtacccgccacttcagagggtcataaggattcaataagccaatacgtgcagagagtgtagtgcagaatctgatctagatgagtaggtgataaatgaagcttccagattaataggattattggtcataggatgtttctgccgaaaggggatatacatctcatccagcagaactgtccccygcatttggatctctcccaacagagttccagccactcagtcattcattcatttctacaaatattccattcctcttacgtacaaagattattaaacctctgctttgtttttggcatgggccgaggtactagggatgcacagtggatttggagcttaaattttatattctagaagaagaggagacaaaataaacaagtaggcaaa

SEQ ID NO: 18071 - DNA, 523 bp, Homo sapiens
atgccttgaaattaaggaacctctcagttattatttggaaatcttattatcagagagaaacgtattacccggagcgatttgttctgataataccggtaaccccaggtcagggaagatataaaccagaaggtctaatacaggccagttctgccacttaccagccatgtgaatctgggcattatttaacttctctgagcttcaacttcctcacctgtaaaatggggataatagtagcgccctcctcacagagttcctgtggggcccagatgagttcatatatatgtgaagtgtttcaagtgagcctgggacagagtaactagtccataaatattatttgctgttgttaacaatactgttctaattgtgttattatagacccttttataaactattatagaccctattgtagtctatatgtagactctttccccaggaaaaggcttcacacatgtaattgtttatgcarcgttagggactctcagattctgtggtctctggaaggatctgagacccagggaagcca

SEQ ID NO: 18072 - DNA, 539 bp, Homo sapiens
gttaaagtttactttcacaggacataatctctaaagcgcagttatctttatataaataacatgcccaaaggcagtgcctggtttaataacaaaataaaactgttttcccataagtctccacactgaataagtgagtaaaacagatacttttgaggttcccactttattatgctgacaaaggagcacttctctgcagcacagagatagaacatttttcccttgtcctgagaggcggcccaaaggctagagcagatgtgmctcttctgaggcagtgcaccagaacccgagggatgggcagggcctgaaagctgcccgctctgaccgggtgcctctggctaggaattgtccatctccgagtctaggagtgcccccactaatcccacccgccaggtttgccaccagagctgtttaatagtccggggagtgtacagtgatatctgtgaggaccagggcccccatcttcttggagaaccacccacaggggcctcacaggcgttctggagcttccccacattggcagccaccttgcttggcttgcc

SEQ ID NO: 18073 - DNA, 581 bp, Homo sapiens
atatggtcttctacttttttcttgcatttatccaacttttagtatatcattacataaaagtaacgtgctagaaaatccactgccatcagggcttaagaagctgggtacttctggtatcatctgtactccactggctcttattttgcattgycacaccttagaaaagtgattctcaaatgaaaggtggtaggtagtacgcctgtatcattcgaagaaagtctccgaggggattttcatacatcttatttcaccctctgttgagactcacagactcatctataagcacttaatttagctcttcaagatcctagattctgaaatctgctaatagctctttatattcagataaagtcccttatctttgcccagtgcttcagtatatagtaattttacctctttacccaacctaaacccccaccatgatccattttaacaaagtacttccaatttagaaactcatcaacttaaccttcctacatctccaatttaaataaactcaagtagtatactacggttatgtgcttaaactctgagagcacacagattctagctggtatccaagctcaaatatgaaaacagta

SEQ ID NO: 18074 - DNA, 533 bp, Homo sapiens
gagggagtctcactctgtcgcccaggctggagtgcagtgacgcgatctcagctcactgcaagctccacctcccggattcacaccattctcctgcctcagcttcctgagtagctgggactacagacgcccaccaccacgcccagctaattttttgtatttttagtagagacggggtttcaccgtgttagtcaggatggtctcratctcctgacctcgtgatccacctgcctcagcctcccaaaggtaaatcactctttactgatgaaatgcagcccccttggatgttaaaaatagtggaaaaaatgtaacctgataagaatgtactaaaagtaagtaaaataaaaagtgactcacatcccactttaagcaaacaaaaatagtcaataagctttaatttttaatcaaagagataaataatagcactgagttaacacaagaaaaacgtcaagatccatgaggaatgtcaatatttctgagagctaggatgttaatggtttaaataataaaacctgttcttcattttctgcgaccaa

SEQ ID NO: 18075 - DNA, 631 bp, Homo sapiens
gtgggagatgacgtgccttgttaagtgcagatacgaagctaccctcaaggaccagatgggagcccaggctcctgacttgctcacccgtgccctcagcatcacacctggtgtctgccaggctcccaagctccgcagggatggtgattgaatacttagcgccttcaattggcacaatccccacctgattaaccctcacccaccaagtcctttgaatttttctttctactccttcccttataaacatcttcctataacaaacaaattttctttttttctccccccagatagattcatggaaataaaaagtttttaaaaaggactaatcactgacacrtacaaaagggaagaatgagcacacacaggatttaggtgtgtcccagggaagaatgagcacacacaggatttaggtgtgtcccagggaagaatgagcacacacaggatttaggtgtgtcccagggaagaatgagcacacacaggatttaggtgtgtcccagggaagaatgagcacacacaggatttaggtgtgtcccagggaagaatgagcacacacaggatttaggtgtgtcccagggaagaatgagcacacacaggatttaggtgtgtcccagggaagaatgagcacacacaggat

SEQ ID NO: 18076 - DNA, 590 bp, Homo sapiens
tgtgggtccttctccacactaaacaaatgcaagttctygcaataacttgtctttgttccatgttgacattccttaaattagctgaaaagatctgagagggaggctttttgcctgatttgggggcaggggctgtgggggatggaaatgtagttaaggataagcggactttaatttggcattgcagaagggagtttgtcattattcctattactagtaattatgtataaatttacatatatgtgtgtatatatttatactcaggtgcacacaagtacaaatgtgtgcatgtgtgtgtgtatatataaaacacagacacacacatatatacatacataaatcaggttatatacctttctttatattttatgtaagacagaaatcatctaatataaacatcaaagtgtattaggataggaatttcttgtaacattaattaaatttgatattcaaattcctgtgtaatgcttgggtgttatgctaaaacaagataaatatctaagagaaagagactgcatataaagctgttaaatcaaatgagaaaatatgtgggtattattcaggataaggtagggtatggtttaataagaaaa

SEQ ID NO: 18077 - DNA, 582 bp, Homo sapiens
tcctgtgaaaaccatggagggagggatgccaagattcagtctgagttcatctcactcatcaaacagctagagactttgccaatattctgggaatctgtttcaatacttgagtcaaagaatctctgacctattagtgattgtccctgcacttttaactcccaaggtttacattatcaataatgtcaaagaaaaagtcacagataggccgggagcggtggctcacgcctgtaatcccagcactttgggaggccgaggcrggcggatcacaaggtcaggagttcaagaccagcctgaccaaaatggtgaaaccctgtctcttctaaaaatacaaaaattagctgggcatggtggcaggtaactgtaagcctagccgctcgggagactgaggcaggagaattgtttgaacccaggagacggaggttgcagtgagccgagatcacgccattgcactccagcctgggtgacagtgcaagactccatctcaaaaaaaaaaaaaaaaaaaaaaaaaaaatcacagagtttagcaaaagtaataagaatattttaaaagaaaattacctgagctccaagggaaattacctg

SEQ ID NO: 18078 - DNA, 580 bp, Homo sapiens
atcccctcacagggtggagtgtgataatatagtattatccaccaacccctgtcaatcattgcttaagrgccctcccaggggagtgttcattgcctgcacttccaaactgccatgaaacaatagagcaaactccgatgaccataaatgccatcagacaaagagatgtgggaggtgtggaccaggtatcaatagcacctaatcttcttcctctctattgctttagtttctccatctgtagttgacagcatcagccattggtctaaatggctagctgaatcctgtttcacagaccaggtgacttagattcaaggaagccggaagaagaaaacctcatgtctacttcccaggctgagccccatcatcgagtccagcctatgccacagaagcccttttttgggagatgctggcatctttgggtgcttacctaatggttaattaaggtgacagtttgcagcccactgggttctttcaccttgtggatgcccctccctgggcaggtctcaggagcagtgaaggcagagagtgcagggtttggggtgatcaaaccgacttccaatccctggtatgtattttagccatc

SEQ ID NO: 18079 - DNA, 580 bp, Homo sapiens
atcccctcacagggtggagtgtgataatatagtattatccaccaacccctgtcaatcattgcttaagagccctcccaggggagtgttcattgcctgcacttccaaactgccatgaaacaatagagsaaactccgatgaccataaatgccatcagacaaagagatgtgggaggtgtggaccaggtatcaatagcacctaatcttcttcctctctattgctttagtttctccatctgtagttgacagcatcagccattggtctaaatggctagctgaatcctgtttcacagaccaggtgacttagattcaaggaagccggaagaagaaaacctcatgtctacttcccaggctgagccccatcatcgagtccagcctatgccacagaagcccttttttgggagatgctggcatctttgggtgcttacctaatggttaattaaggtgacagtttgcagcccactgggttctttcaccttgtggatgcccctccctgggcaggtctcaggagcagtgaaggcagagagtgcagggtttggggtgatcaaaccgacttccaatccctggtatgtattttagccatc

SEQ ID NO: 18080 - DNA, 567 bp, Homo sapiens
aaaagtaaatattatgaaaacatgtaactttattaaattctagccaaataattttgccttctgaaggcactaagtctgaggcccactctcaaacagaaagttcggaagggaggcaggtaagtgttagaaaggcgttaatgtcatgttyctatcaaactgagactgccgcctagatgccatcagaatgattgacagagaatgaaatgttatttgatactggggtgctgtgcccaccaagatctccccacgaatcccactggtatttgttctatactttggaagacccagcttcagaatcgctctaggggagtagagaaggaaactcagtgtctgagggagggatgataatgacagccacctgttaggggtgccgctatgttgcacagtttcatgaatggggcccctgaagttgtgcaacatggcggtcctggagagaatctctgcgggttacctcatttaattcccacctccgctctgccaggtaggcaggattacctccatttcgcagctgaaaaaactcagattcagggaagttcagtgcctggctcaggaccgcagctggagggg

SEQ ID NO: 18081 - DNA, 567 bp, Homo sapiens
aaaagtaaatattatgaaaacatgtaactttattaaattctagccaaataattttgccttctgaaggcactaagtctgaggcccactctcaaacagaaagttcggaagggaggcaggtaagtgttagaaaggcgttaatgtcatgttcctatcaaactgagactgccgcctagatgccatcagaatgattgacagagaatgaaatgttatttgatactggggtgctgtgcccaccaagatctccccacgaatcccactggtatttgttctatactttggaagacccagcttcagaatcgctctargggagtagagaaggaaactcagtgtctgagggagggatgataatgacagccacctgttaggggtgccgctatgttgcacagtttcatgaatggggcccctgaagttgtgcaacatggcggtcctggagagaatctctgcgggttacctcatttaattcccacctccgctctgccaggtaggcaggattacctccatttcgcagctgaaaaaactcagattcagggaagttcagtgcctggctcaggaccgcagctggagggg

SEQ ID NO: 18082 - DNA, 564 bp, Homo sapiens
ggcccccttgaggggcatgttgcccactgtcacacgtagctgcgggcagagccggtgccacttccagcccggcatcctcctgatccctgctcccctaggagtggccactcaccaggaccgactgagagagtgagggagggacaggctgatggacgttccccaaggttggkggccctagagtcggcccacacttcttgtcctttgaagcctcaggttcccacatgctgcctcgcactggagcagccaatgaaacttgaacaaatgctttcattttgggtatatcgaaccaaaaacaatggcacccagtgaatttattttgctactctagtagaatttttgtaggctttggaagtacacagacattattttctccttggcaggaatgggctatgtgaatgaaaaaaggtatccgttatgaaacttccagaaaaacgagctacatttttcaggtttgtctggggctctcagtagttgcccaagggacggagtttaaacctttcgaaaagtaaattgcctgaatagaagtataactgaggattgaaagactgaatcagatacgcgctt

SEQ ID NO: 18083 - DNA, 564 bp, Homo sapiens
ggcccccttgaggggcatgttgcccactgtcacacgtagctgcgggcagagccggtgccacttccagcccggcatcctcctgatccctgctcccctaggagtggccactcaccaggaccgactgagagagtgagggagggacaggctgatggacgttccccaaggttgggggccctagagtcggcccrcacttcttgtcctttgaagcctcaggttcccacatgctgcctcgcactggagcagccaatgaaacttgaacaaatgctttcattttgggtatatcgaaccaaaaacaatggcacccagtgaatttattttgctactctagtagaatttttgtaggctttggaagtacacagacattattttctccttggcaggaatgggctatgtgaatgaaaaaaggtatccgttatgaaacttccagaaaaacgagctacatttttcaggtttgtctggggctctcagtagttgcccaagggacggagtttaaacctttcgaaaagtaaattgcctgaatagaagtataactgaggattgaaagactgaatcagatacgcgctt

SEQ ID NO: 18084 - DNA, 556 bp, Homo sapiens
tctaaacatggatgttatatcaaaaaactctaaaccaagtcaaggctaatgcctacaaacaggaagaatgatgagcaaatgctgtgtcccttatattttcatcctaattaggaatttatgccttcataatactggcttacttattctagttcyctattgtaaaatgtctgacctaggaaaatcaatgcttgtgacaagtacacatatttcacttaaacccagtaataattattttagtcaagaaaaagcacactacctaaaataaatttaattatatttaattcatataattagggccacacttaaatctctatactttcttatatagctcacatttttacttaattggaatatattcttgccctcgtcaattaccaaaacttttctttgaggtttcataatcttttaaaaatgctaaaaacaaaatagactagctatacactaagatgaaaagacttttagaaattccatatgtataaagtgaaggggccaggtgcagtggctcacatctgtaatcccaattctttgggagtccaagagggtaggattacttgag

SEQ ID NO: 18085 - DNA, 1729 bp, Homo sapiens
tgcatttgcatctgtcttctgaaagatcaactgygtgcttttaaaattaaggtgtctagtataaaatcagtattttaggattatggtgctgacccaattaaaaaatattgcattaaataatctctaatattaagcactaaaataaacatccttattaattctgtccccttgctgctactacccattgccccaaggtgtacattgcattattaataaatttaatttttaatttgtttacttttaaattaatttcttttcttttctttctttctttctttttttttttttagagacagggtctcacattgttgcccaggctggagtgcagtggcatgatcccagcttactgcagtctccacttcccatgctcaagtgatcctcccacctcagcctccctagtagttagaactacaggcatgtgccaccacacctggctaatttttaaaaatttttgcaaagatagagtctcactatgttgcctaggctgctctcaaaatcctggccttaagcaatccttctgccttggcctttcaaagtgctgggattacaggcatgagccactgtgcttggcttaatttgtgtattcgcagaagctttctagtagcttgtaagtcaaaagttaaagacttttggctggatatgacctagagatggactttttttcgttactaatttgatttaaaaatagaacttaagtactggacaatttaatatactaatttaggtttatgggttctataaagacattagacaatctagtgtcaggtgctcaccagtcccacaggatatatggtggagatgagctgttgtctcctttagacagggtttgctctttagtttttcctcctcctcctgacctgtttcatcatttacattccctgcctggctccagttagcatctgaggttgcaaaccctgcttgagggctacagccatcttggtagaaagaggcactgaggtcggccaatttccactcctagaacagatctgaatctcagatggcctttcggccttagtagcaagggtccctccacttcctccacccacttcctgctttggtatttcttgaaaataatgccagaggaaagggaagccccggggagacgtctatgaggaaagcagctgcactgacatgagacatgtgtgagggaggacagggctaccacgcatttccacactcccacttaggctgctggagaaacaaaacagagccatggcatggattcagatctttgaggaaaataaaatgaataatgagaaatgctcacaaagcttactttttgagaggaatacgcccttctggagtgacttgcagcttaagtttagtatagctgttggagaagcagaaaaacaagggtttgatttttttaaaaaagcttttttttcttgaacaataaaatacactcaaaaaagcccatgcctttgtacattttgctgaatttccacaaactgcccaagtctccacagttggcacccagattaagaaatagaacattgtcactttagcagcattccagaagcccttcccaaacgccctgccaaagggaactgttatcctgactacaaatagcatagattacttttgcctgtttttgcaccttacatgaaggaatcatactcttgtgtttggcttctttcactcaatagcatgtttctgagaactaaccatattttgcttattgtttgcttatatattcattctcagaatgagaactctaggtcactgttga

SEQ ID NO: 18086 - DNA, 1729 bp, Homo sapiens
tgcatttgcatctgtcttctgaaagatcaactgcgtgcttttaaaattaaggtgtctagtataaaatcartattttaggattatggtgctgacccaattaaaaaatattgcattaaataatctctaatattaagcactaaaataaacatccttattaattctgtccccttgctgctactacccattgccccaaggtgtacattgcattattaataaatttaatttttaatttgtttacttttaaattaatttcttttcttttctttctttctttctttttttttttttagagacagggtctcacattgttgcccaggctggagtgcagtggcatgatcccagcttactgcagtctccacttcccatgctcaagtgatcctcccacctcagcctccctagtagttagaactacaggcatgtgccaccacacctggctaatttttaaaaatttttgcaaagatagagtctcactatgttgcctaggctgctctcaaaatcctggccttaagcaatccttctgccttggcctttcaaagtgctgggattacaggcatgagccactgtgcttggcttaatttgtgtattcgcagaagctttctagtagcttgtaagtcaaaagttaaagacttttggctggatatgacctagagatggactttttttcgttactaatttgatttaaaaatagaacttaagtactggacaatttaatatactaatttaggtttatgggttctataaagacattagacaatctagtgtcaggtgctcaccagtcccacaggatatatggtggagatgagctgttgtctcctttagacagggtttgctctttagtttttcctcctcctcctgacctgtttcatcatttacattccctgcctggctccagttagcatctgaggttgcaaaccctgcttgagggctacagccatcttggtagaaagaggcactgaggtcggccaatttccactcctagaacagatctgaatctcagatggcctttcggccttagtagcaagggtccctccacttcctccacccacttcctgctttggtatttcttgaaaataatgccagaggaaagggaagccccggggagacgtctatgaggaaagcagctgcactgacatgagacatgtgtgagggaggacagggctaccacgcatttccacactcccacttaggctgctggagaaacaaaacagagccatggcatggattcagatctttgaggaaaataaaatgaataatgagaaatgctcacaaagcttactttttgagaggaatacgcccttctggagtgacttgcagcttaagtttagtatagctgttggagaagcagaaaaacaagggtttgatttttttaaaaaagcttttttttcttgaacaataaaatacactcaaaaaagcccatgcctttgtacattttgctgaatttccacaaactgcccaagtctccacagttggcacccagattaagaaatagaacattgtcactttagcagcattccagaagcccttcccaaacgccctgccaaagggaactgttatcctgactacaaatagcatagattacttttgcctgtttttgcaccttacatgaaggaatcatactcttgtgtttggcttctttcactcaatagcatgtttctgagaactaaccatattttgcttattgtttgcttatatattcattctcagaatgagaactctaggtcactgttga

SEQ ID NO: 18087 - DNA, 1729 bp, Homo sapiens
tgcatttgcatctgtcttctgaaagatcaactgcgtgcttttaaaattaaggtgtctagtataaaatcagtattttaggattatggtgctgacccaattaaaaaatattgcattaaataatctctaatattaagcactaaaataaacatccttattaattctgtccccttgctgctactacccattgccccaaggtgtacattgcattattaataaatttaatttttaatttgtttacttttaaattaatttcttttcttttctttctttctttctttttttttttttagagacagggtctcacattgttgcccaggctggagtgcagtggcatgatcccagcttactgcagtctccacttcccatgctcaagtgatcctcccacctcagcctccctagtagttagaactacaggcatgtgccaccacacctggctaatttttaaaaatttttgcaaagatagagtctcactatgttgcctaggctgctctcaaaatcctggccttaagcaatccttctgccttggcctttcaaagtgctgggattacaggcatgagccactgtgcttggcttaatttgtgtattcgcagaagctttctagtagcttgtaagtcaaaagttaaagacttttggctggatatgacctagagatggactttttttcgttactaatttgatttaaaaatagaacttaagtactggacaatttaatatactaatttaggtttatgggttctataaagacattagacaatctagtgtcaggtgctcaccagtcccacaggatatatggtggagatgagctgttgtctcctttagacagggtttgctctttagtttttcctcctcctcctgacctgtttcatcatttacattccctgcctggctccagttagcatctgaggttgcaaaccctgcttgagggctacagccatcttggtagaaagaggcactgaggtcggccaatttccactcctagaacagatctgaatctcagatggcctttcggccttagtagcaagggtccctccacttcctccacccacttcctgctttggtatttcttgaaaataatgccagaggaaagggaagccccggggagacgtctatgaggaaagcagctgcactgacatgagacatgtgtgagggaggacagggctaccacgcatttccacactcccacttaggctgctggagaaacaaaacagagccatggcatggattcagatctttgaggaaaataaaatgaataatgagaaatgctcacaaagcttactttttgagaggaatacgcccttctggagtgacttgcagcttaagtttagtatagctgttggagaagcagaaaaacaagggtttgatttttttaaaaaagcttttttttcttgaacaataaaatacactcaaaaaagcccatgcctttgtacattttgctgaatttccacaaactgcccaagtctccacagttggcacccagattaagaaatagaacattgtcactttagcagcattccagaagcccttcccaaacgccctgccaaagggaactgttatcctgactacaaatagcatagattacttttgcctgtttttgcaccttacatgaaggaatcatactcttgtgtttggcttctttcactcaatagcatgtttctgagaaytaaccatattttgcttattgtttgcttatatattcattctcagaatgagaactctaggtcactgttga

SEQ ID NO: 18088 - DNA, 574 bp, Homo sapiens
attggaaagaaaaattatttgytggctgggaaaggtagggaagtgtagatggcaattccatgagcagctccacttccattaccacttttccatgaggcacattctcatcattcagacaacaaaaggtacagtgtagactctgccacagcacaccatctatgttttcttttgttcatttgttttagtacaaattgcttatctaatattaattagacaatattaagaaattttacacaagaacattactgataataaagaggccaaaaaaatgtagcaaatgtctttgtgaagtgatgtctctctgcagagtggtgaactgacaattggggcttatttctgattttttttaaaccaagatttacaaagcctgtgttgacattctccacattatcctccacattatttttgctcagttcagcacgggtaccagccagtcagaacagatgtgaccctatcaaaatggatgctggctgttggcatttgctatgtttataccagcgtgtaccactacatcattctgtctgtctaccccaacatcatcagcctttcccaatacaccaaactttagttttcc

SEQ ID NO: 18089 - DNA, 574 bp, Homo sapiens
attggaaagaaaaattatttgttggctgggaaaggtagggaagtgtagatggcaattccatgagcagctccacttccattaccacttttccatgaggcacattctcatcattcagacaacaaaaggtacagtgtagactctgccacagcacaccatctatgttttcttttgttcatttgtyttagtacaaattgcttatctaatattaattagacaatattaagaaattttacacaagaacattactgataataaagaggccaaaaaaatgtagcaaatgtctttgtgaagtgatgtctctctgcagagtggtgaactgacaattggggcttatttctgattttttttaaaccaagatttacaaagcctgtgttgacattctccacattatcctccacattatttttgctcagttcagcacgggtaccagccagtcagaacagatgtgaccctatcaaaatggatgctggctgttggcatttgctatgtttataccagcgtgtaccactacatcattctgtctgtctaccccaacatcatcagcctttcccaatacaccaaactttagttttcc

SEQ ID NO: 18090 - DNA, 574 bp, Homo sapiens
attggaaagaaaaattatttgttggctgggaaaggtagggaagtgtagatggcaattccatgagcagctccacttccattaccacttttccatgaggcacattctcatcattcagacaacaaaaggtacagtgtagactctgccacagcacaccatctatgttttcttttgttcatttgttttagtacaaattgcttatctaatattaattagacaatattaagaaattttacacaagaacattactgataataaagaggccaaaaaaatgtagcaaatgtctttgtgaagtgatgtctctctgcagagtggtgaactgacaattggggcttatttctgattttttttaaaccaagatttacaaagcctgtgttgacattctccacattatcctccacattatttttgctcagttcagcacgggtaccagccagtcagaacagatgtgaccctatcaaaatggatgctggctgttggcatttgctatgtttataccagcgtgtrccactacatcattctgtctgtctaccccaacatcatcagcctttcccaatacaccaaactttagttttcc

SEQ ID NO: 18091 - DNA, 532 bp, Homo sapiens
cagtgctcaccagaaaccaggggttccaaacagtgcctgctaattgagcaatgagtgaggagtaactggaccttctgccatttttgtatggggtaacatccaataataaatattttatccttgcacagaagaattgtgtagagtcacagtggagttttgtgcaagctggaaaacacatggtaatgggctttscaccccctccccatcttcctcaaagtaatgttggaagtgggtccctgggtttcacacaaagaggcagcagatacactctcataatacagatcactgcttgatatgctgctgcaggaagattccagaaaacctgataatcattgaatttcagaagggaatgctgagtgtggatattttagtcaagcttaagttcaatctgaaaaataaaagcaaacaattctaataacagaaaatacaggtgtatattgtccttgacattaaaaaattctgaatataacttagtcctagaattatggtacgatgttccatggtgttgggaactcaatgtttttctgttgtg

SEQ ID NO: 18092 - DNA, 532 bp, Homo sapiens
cagtgctcaccagaaaccaggggttccaaacagtgcctgctaattgagcaatgagtgaggagtaactggaccttctgccatttttgtatggggtaacatccaataataaatattttatccttgcacagaagaattgtgtagagtcacagtggagttttgtgcaagctggaaaacacatggtaatgggctttgcaccccctccccatcttcctcaaagtaatgttggaagtgggtccctgggtttcacacaaagaggcagcagatacactctcataatacagatcactgcttgatatgctgctgcaggaagattccagaaaacctgataatcattgaatttcagaagggaatgctgagtgtggatattttagtcaagcttaagttcaatctgaaaaataaaagcaaacaattctaataacagaaaatacaggtgtatattgtccttgacattwaaaaattctgaatataacttagtcctagaattatggtacgatgttccatggtgttgggaactcaatgtttttctgttgtg

SEQ ID NO: 18093 - DNA, 1211 bp, Homo sapiens
ttgtctgcattgatgtgaaagatcagttagaacaacattattttgtagttataagacttcaaaccacagtgaactttagctccctgaatgactcttcagatgtttaatatcgttctaaaaatgtacaaatgtaagagcagagagcagattagtggctgggaggagaaaatatccctgatcaaggatgaatgatgggctctttgtataaagttgcaccaggtctttcctttcctcagaaaacaaattgcgtggttggtgatttgggccatatcttcagatcataaacgtttttctgcaacaatacaaaatatgcattgttacagtcagatgagatttttaaaaaagagttgacaaaatactttaaaaataacctatttaagtataactttttattatggaaattatcaaacacatactaaagtaaaaagaaaagtataacaattccccttgtacctcaycatctagcctcaacatgttgccacttttatttcatctttgactcactaatccgcccactccccatcttgtttttcctggtatattttaaagaatatcccagacaggctgggtgcagtggctcacgcctgtaatcccaagcactttgggagaccgaggtgggcggattgcctgaggtcaggagttcgagaccagcgtggccaacatggtgaaccccgtctccactaaaagtacaaaaattagctgggcgtggtggcgggtgcctgtaatctcagctacttgggaggctgaggcaggagaatcgcttgaacccgggaggaggcagaggttgccgtgagccaagatcacaccattgtactccagcctgggtgacaagagtgaaactccatctcaaaaaaaaatcccagacagtgtatgatttcactgtaagttattcaatatatatctttatagagtaagactttaaaacaatgtagctctatattaaggataatttcttaatatcttaattcttaagaaattaagaaggatttcttaataatataaaaaacaattataaaactcttttaaataatagcagtgctgaaaactatcagaacaccttgccttaggcacaaatctgttcttactagctctggcattggtggttcagcttgagcatcctattgcaccctgagtttggcaacatgtgttggagttattatattactaatggtatagatcaggcttggcaaacttctctgtaaagggccaga

SEQ ID NO: 18094 - DNA, 556 bp, Homo sapiens
aatgaaattatttatttttattcagggaaaatgtgtatttatttatggggcttatgagattggtgccccaaagttcttgacccacgtttcatttgagtaaagcttggtgtaaggtttggaatcattttrtagtgttatttcttaagatctttccacccacagttaggacatgtgacacatgtgattctatgtcatttcatttcaacttgggtcttacttagcctttgaaaggatgaaatcctgactctggttgacagctgtgtctgtaaacatgaatgcagtttggtattaacttttatctttccatacagtgaggggcatggaacagtaccactaacaatgggaggtgcttacataatgttaactaccactctacaatctgtgtgatataggaggttgaatccatatgtagatcctgctcttagatcctgtagattgatggtaaagcaaaaacaaatggagcgttgatagaattctgttgagtagccatatgagcattattctgatacatatgaaatacaaccttgtgattatatgatatatgtgtttgtatatg

SEQ ID NO: 18095 - DNA, 581 bp, Homo sapiens
ttcaccatgttggccaccaaagacacggggtttcaccatgttggccaggatggtctcgaactcctgacctcataatccacctgcctcagcctccaaaagtagtagtattacaggcatgagccaccacgcacagcccagagcagcaattcttaaaccaacacaaaacatgacggggagagcccaccagcccctcaccggctcctggggatgagggctcgaacatgctggaggagtcactgtaggtgttggaggcttgttctgagagcttctttttgccgcttccttctgatgacttgtgtgatttcttcttatttttcaccaaaattttatacattaaatccatagggcttggaagaggaactccagattccagctaatagaaatgaaaggcatattctttaaaaatactgctccctctttcagatcccctccccagacccccagatcagctgtggataccaaatgtctagacttcttccctaccttcaacactgctcattaaactcttagtgtatcttacatgggagctaatttttttttatatcaaagatatattttcattactatacttttttttkcaa

SEQ ID NO: 18096 - DNA, 652 bp, Homo sapiens
gaagctaagacagaggaggcatggaagggattttctctcagagtccttggatgacccccaccctcctcacaccgtgattccagacctccagcctccagaactgtgagacaataaatttctattgktttcagccacccagtttgtggtactttgttacaacagtcctagaaaatgaataaaccatcgtatacccaagagtgaaagttcactctgtttctcaccccaaattataggcagacatgtttccagtgtagctcatcaaacatcaaagagataacacatcattgggtgttgattatacgtctcaggaataataattaattttaatagcaaaattctaagaaatctttcatttcttctaagtgtttattctccccctctcatgctaaaataaggagttaatgcgctgggaagtaactaagtaaaaaatgtgttgaagaaatagaaatgtgtttattttgattttcagagaggtttattttaacttccattttaaatttaggttgcctttgtgagaaggctaaaaatagatctaatggatattaatattgtgttaaattaattttgagtatcagaatccatccttccttagatcattttcaattaaggtgcatatgcaaattctgctttgcacatgtcaacattatttagt

SEQ ID NO: 18097 - DNA, 1832 bp, Homo sapiens
agtaacatgactgttgattatcattagcaagtattatgtagtatacataattgtatgagctgtactttcatatcactagcagcacagttggtttgttaataccagcatcaccacaaacacatgagtaacgcattgcattattacattatgatggctatgatgtcactaggcagcaataaatttttgttttattataatcttatgagaccactgtttcatatgtggttcttctttgattgaaaagttgttatatagcacaagactatatttagatatagttgcaragaactagattcaatttattatgtcaaagaaactttcacattaacatatttgattattattttaaaaatttggacaagtagttggaagcctcatgtgaaattttctttgaattgcttaaaagcttaatttaatactttggttgtcaggtttttaagcaaatctgaacatcgacataaaagatagcatgaatcccaagtactgcaggaaataagggtgaaaaattgcacaacaaaaacataaacaaaaaggagaaagcttctaaatagtaattggggtgctagggaaaaccactcattaacatgagctataaattcaaggtattttaaagaatggaaaaatgcataatttttagccttctgctcctctaccacactacacacactatatatatacacacacatatatatgtgtatatatatattttttgtgtatatatattttgtatatatatgtgtgtatatatattttttaagctacaaaaagctttaatatgaaggcatagtataataatattagtttatttttctattcaaactaacttaactttaggctacatttgtgaaaatatggaaaaacatagtaagtgttctagtttatcacatattagttgtattaacctctttatgctttgcctttctcatttgtaaataaagtaatagaatatagaggaattttgtaaaaattaaatgagagaatccctgtgaacaagtaaacagtgcctagcatgtagtaggcatttaatatatattaactatgtgtttacttataaacataaataaaacctagcaaatatttacacctattactcaaatttatttttaaaaaaggaaagaaaaagacaatttattcttttagttgcctggtattagtttgactatatactgaaataaacaggtcttcttttccaacagtttaaggaaaactacctttattttatgtttttcttcctggcattttgtttggcattatgtagacctaaccctatatcaggtatcatcaagctgcttataggcagcagattattcaaagtaaaattttagtttttaagtagtttttgctgttcttattttttgcaatcacatatttactagaatatctaatagagaaatataactatatgaatactaaagataatataaataatttgcattttgtagaaaaaagtattttttatttccaaatttgtatcattctgttcatattgaccatttataacaatttagttatatatacatatttatacaccgtagaattatttttaactacatatttatgtttaaattacaataaataaaagagttaaaactaatagtataacataaccagtaactttttaaattattattagcaagcattatgtgctattcataatcgtatgtgctataaattcctcataaagttccctataaattaaagtcagtccatgaaatctttaaattcaaatttagctgttcccaaggagaaatgctgaagtattgcttaaaaaaaaaatctctaggtgtttgaattaaataacttcatattaatttttaaatacaacgattgta

SEQ ID NO: 18098 - DNA, 1437 bp, Homo sapiens
gcagatgcagtcccttgctaggaaggggataaggctttgtgaaagacacatgggctggattttaaccttcactgatcccactggctgagtgtcctagggcagtgacccaattatatgcaasggcgctgcttaaggagatctaaaaattactcagcatgtccattaaatacctgtataaatttttatagacatttcttatccaaggatgagtgtgttggcttcataggacactggtgtgaaataacaagaaagagaacatgactaggaagaaaggctgttatcctggaacatgcatgctgaacaatccacgttttactaacctattgatttttggaaagtttctttaaaaagacttatcctttttctgtattgccctactaaactaaaggtgataaaagtttttataaaaacagtgaagtatttaggaagtgacttgacagaattatcaaatacccattcaactattccatataaaaggattaaaattacaagacaatagagatagcatacatggcttgctttcttttgttttttggtttttgggttttcttcctatcagatgccaaggtggtcaaagtttgtcttaggtagacgaatacaagctttctttgagaaacctggaatttaatatgggcagggaggaacatgccgttaggtgttttatgctgctttgactccctaaagggagaatgcacaaaggggcttgagctatggtttttacatctcaccagaggcatcatttccttgaactgtctcaatatagattccgttttttaagaaggcaagctgagacttttttccattactcttggccggaatctggatttgtcaaactggccactgtcactatttatgtctaattagaaccacctgtgagaatttgtgtgacacacaaaaaaggggtggagagaaaaggaaagctaatgttcataatgattataacaatatttaatctcaaggctcattttatttgttagaggcctgataatgagactttcctctcacattttaatatgcacctctcccattttaaaagtttttttttttagattttagcagaaagtgttcagtagttttatgtgcatgagtgtgtcctcctaaaaacaacttttttaacccttttaagaaaaaaatgtgcaaagttgaaatctgatttggggtgacacagtgtggctggattgtctttttcttattgagattggtataaagtgagttgggtggacaccttgtccaggaaacagcactgcaagtgctcccgctctcctcaaacccattttccttccaatcacacctcccacattttcctaaagaaaattccttccagtctcaaactcaataactttggtcttatcacaacagcaaaaacaattttgaaaattttgagggggcaaaagtacctatgtcgggccaggatagaattattaaagcagagagaga

SEQ ID NO: 18099 - DNA, 1931 bp, Homo sapiens
cacacacacacacacacacgcacacacacacaaaatctcttatgttttaacaaagttgacaaatttgttttgggccacattcaaagctgtttgacctgcattcagcctgcaaactgcaggttagacaagcttggtttagcactatccccttgtgagtgagttcttatcagtgaggtcatgagagatctgattgttaaaaacagcctgggactgcccccttctctctcttactccctctctgaccatgtgacacactggcttcccttcaccttctgccatgattgtaagcttcttgaggcctcacccagagcagacgccattgcttcctgtgcagcctgcagaaccctgaaccaagataaacctctttttttaaaaaataaatgaataaattacccagcatcgcgtgtgtcttcatagcaatagtaacagactaacgtagaccctgccaaattgtgacacatgaccaaaaagtgttttcataagaataccacaaggaagtgaatatttcagtagcaggatatcagtgtgaattctactgcaagactggatagggaaaatgcggttgattcattttgtccaaaactatgcagcagctgcaggggaataaacaaccaaaaataacctacagcagtgtgggaatatatgaaggatgtgatgctctgtgacaaaaatagaaataaaatcagatttatggcacgatactctttaagaaaaatgtatacacttttgtatatacacatacacacactcagaaaacaaccttcttatcttgtaagaattctttaagagtaaagaacttatatcaaacacattagcatgcctgtctgtgacaagggataaagaataaaaaaattgaataagtaaaaccagaaagaaacttttaggaaacaataataataatgtctcatgtagtaaagaatatgattaattttttgcaactgtggtataaaaacagaaactgtcaaaatcacatgtaatgagctttagtatagagcttattgtagggcaaaaatcaaattttaaagacttagtttgcatagttggatggaggaatggtctcctatgtgaagtagtaagatacacgaaacaatcccatgggtgtatgggaagaaaatactcaaaatgctacttatatttatcttttactcatttttccaacagtttagtatctaaatgctaggggaggccagatgtggtgactcacacctgtaatagcagtgcttgagggtggggggcaaggcaggaagaacacttgaggccaagagttctaggccagcctgggcaacatagtgggtttttgtgtccacacacaaaaaataaaaattagctaggcatgatgctatgcacctgtagttctatctactggagaggctgaggcaggaggatcacctgagggaggagtttgaggctgcagtgagccatgatcactctactgcaccatagcctgggtgacagaatgagamcctgtctcttaagtgaaaataagtaagagctaggagaccacatgattttctagttttcagcccctattgaagttccctgtagattattttgcttattcccaatgttccaggtgtttctccacattgtaggcttgtccttctacctactcaaggccccagatccagcaaatgtcctcagagatggactccgctgctaatctgtgatcacctaggaaaggcttatttttctctgaaatttagttcattgtaactttaggcccatagtgttttgatggctttaaacaaaaaaaaaattttaagttcatccaatgtcttctcgttatggcaggagcaattgcccttggtaactttattttaattggaagaagaatctctaatgtaggcattgtaatgaggtttttggtctttgaccttactggagcagttaaattcaagtctatttcctatattattcatgtattgaaggat

SEQ ID NO: 18100 - DNA, 1931 bp, Homo sapiens
cacacacacacacacacacgcacacacacacaaaatctcttatgttttaacaaagttgacaaatttgttttgggccacattcaaagctgtttgacctgcattcagcctgcaaactgcaggttagacaagcttggtttagcactatccccttgtgagtgagttcttatcagtgaggtcatgagagatctgattgttaaaaacagcctgggactgcccccttctctctcttactccctctctgaccatgtgacacactggcttcccttcaccttctgccatgattgtaagcttcttgaggcctcacccagagcagacgccattgcttcctgtgcagcctgcagaaccctgaaccaagataaacctctttttttaaaaaataaatgaataaattacccagcatcgcgtgtgtcttcatagcaatagtaacagactaacgtagaccctgccaaattgtgacacatgaccaaaaagtgttttcataagaataccacaaggaagtgaatatttcagtagcaggatatcagtgtgaattctactgcaagactggatagggaaaatgcggttgattcattttgtccaaaactatgcagcagctgcaggggaataaacaaccaaaaataacctacagcagtgtgggaatatatgaaggatgtgatgctctgtgacaaaaatagaaataaaatcagatttatggcacgatactctttaagaaaaatgtatacacttttgtatatacacatacacacactcagaaaacaaccttcttatcttgtaagaattctttaagagtaaagaacttatatcaaacacattagcatgcctgtctgtgacaagggataaagaataaaaaaattgaataagtaaaaccagaaagaaacttttaggaaacaataataataatgtctcatgtagtaaagaatatgattaattttttgcaactgtggtataaaaacagaaactgtcaaaatcacatgtaatgagctttagtatagagcttattgtagggcaaaaatcaaattttaaagacttagtttgcatagttggatggaggaatggtctcctatgtgaagtagtaagatacacgaaacaatcccatgggtgtatgggaagaaaatactcaaaatgctacttatatttatcttttactcatttttccaacagtttagtatctaaatgctaggggaggccagatgtggtgactcacacctgtaatagcagtgcttgagggtggggggcaaggcaggaagaacacttgaggccaagagttctaggccagcctgggcaacatagtgggtttttgtgtccacacacaaaaaataaaaattagctaggcatgatgctatgcacctgtagttctatctactggagaggctgaggcaggaggatcacctgagggaggagtttgaggctgcagtgagccatgatcactctactgcaccatagcctgggtgacagaatgagaccctgtctcttaagtgaaaataagtaagagctaggagaccacatgattttctagttttcagcccctattgaagttccctgtagattattttgcttattcccaatgttccaggtgtttctccacattgtaggcttgtccttctacctactcaaggccccagatccagcaaatgtcctcagagatggactccgctgctaatctgtgatcacctaggaaaggcttatttttctctgaaatttagttcattgtaactttaggcccatagtgttttgatggctttaaacaaaaaaaaaattttaagttcatccaatgtcttctcgttatggcaggagcaattgccctyggtaactttattttaattggaagaagaatctctaatgtaggcattgtaatgaggtttttggtctttgaccttactggagcagttaaattcaagtctatttcctatattattcatgtattgaaggat

SEQ ID NO: 18101 - DNA, 612 bp, Homo sapiens
ttgctctgtaagatattaacaagttttatatataacccaaatatcttaacattttaaaattaaatggtctataaatacctagctcctcaaatattgtttgaactggtcttaatatctaattgtttccccacctaattaatgagttgaacaaaatccttgccatatattcatattatatttgcatcagtgtcctaattatatcgtttgaaattatactttagcaataagaataaaagtcataatccaaatgttagcacttagcatgggaatgagtctatcagtcagggtttagtcaagaaaaactggtttctctagataatccaaattaaaaaggtttaatgcagatgtcaagaagcctatacaaccattggaagactaggggaagctgaggtcaatgaagccacggtggacaacctcagctcagctcccagctgaacagtttcctcttcattgtccattgtccttgaacttccagatatttctcttcaaccatcacmgtctgcagtgatgaaggagtggctttctggtggagcctcttagcatctcatggttgtccacatttctgcctttaaccccctttagcctgtcatttgtttcagccttccaaatctt

SEQ ID NO: 18102 - DNA, 646 bp, Homo sapiens
tgcgtgaaccatggtgcctgggcacatgttcttaagttttaaagggactatgtctactgcttcacatttaagaatgatgtttgttgtaggtttttgtcagatgcccttatcaggatatgcacattttaaaatcacctaattatgtatatattgctttttagaaaatttgcaccaatttacatttctaccatcagtgtatggaagggcactccttgacaatacttacccacatcacatggggtattcttgttaaaagtttcagattttggccgggcgcggtggctcacgcctgtaatcccagcactttgggaggccgagacgggcggatcacgaggtcaggagagcgagaccatcctggctaacacggtgaaaccccgtctctactaaaaaaaatacaaaaattagccgggcatggtggcgcgtgcctgtagtcccagctacacgggaggctgaggcaggagaatggygtgaacccgggaggcggagcttgcagtgagtcgagatcgcgccactgcactccagcctgggcgacagagcgaaactccgtctcaaaaaaaaaaaaaaaaagaaagtttcagattttataggcagtaaggaacttcttgtttagatttgtttcttccttttaaaacaatattttgtgttg

SEQ ID NO: 18103 - DNA, 580 bp, Homo sapiens
atactaaatcacaaagtacaaatccaaggaagttaatacctttactaagttacaaaacttgggcaaatcaatacagtactcttttataatgaaaccatacttttgttggagtcatgttactttagtgataattttcactccaaaaatatttaagtaccaaatcaaaacactggtttttaatggtggtttatagcatagtaaggtattttrcacaaaatatattttaaaactacacaatttctccttttaagtgagctcccttgtgcaagctgctgaagtgtacagcagcagggcaatgggcgtctataggaggtggctctgctctgttctggggttggtccaaagtcaggtggagttccaatgtatgaaaagcttgaaaaatctaccttaaggagactgaatatcaataccagtttccaaggagttcttgttgaattttcacagaaatactggaaccctcaaaatcagatagtaatttcaaacaacattaatttcagatgatcccttttatttagaggccctgcatctgttttgatcaagtcacatagccttacaccaacttatcaaaaaaaaaaaaaaa

SEQ ID NO: 18104 - DNA, 600 bp, Homo sapiens
taaaaatgcaagacctcagcatttcgcaacagaaacggaagcttttgtgggatttctacaatgttgcaaggatataaagaggaatagagcaaagtgttaacactttagaagggcaggaagatctaatcaatatggtaatatcagcaagggagatatagatgggcataatttgtggaactctattgtgtacttttttttttttttttttgagacagagtctcactctgtcaccaggctggaktgcagtggcatgatctcagctcactgcaacctccacctcccgggttcaagtgatgctcctgcctcagcagctgggattacaggcatgtgccaccacacccagctaatttttttgtatttttattggagacagggtttcaccatgttagccaggctaatctcgaactcctgaccttaagtgagccacctgcctcagcctcccaaagtgccgggattacaggcgtgagccactgtgcctggcccctgtacatacttttttaaaaagtcactattgtttgcattatataaaatgtaaaggtacattagcagcaatatatttctttttgtttttcctttagtttcatactatgaaagtaatac

SEQ ID NO: 18105 - DNA, 600 bp, Homo sapiens
taaaaatgcaagacctcagcatttcgcaacagaaacggaagcttttgtgggatttctacaatgttgcaaggatataaagaggaatagagcaaagtgttaacactttagaagggcaggaagatctaatcaatatggtaatatcagcaagggagatatagatgggcataatttgtggaactctattgtgtacttttttttttttttttttgagacagagtctcactctgtcaccaggctggagtgcagtggcatgatctcagctcactgcaacctccacctcccgggttcaagtgatgctcctgcctcagcagctgggattacaggcatgtgccaccacacccagctaatttttttgtatttttaktggagacagggtttcaccatgttagccaggctaatctcgaactcctgaccttaagtgagccacctgcctcagcctcccaaagtgccgggattacaggcgtgagccactgtgcctggcccctgtacatacttttttaaaaagtcactattgtttgcattatataaaatgtaaaggtacattagcagcaatatatttctttttgtttttcctttagtttcatactatgaaagtaatac

SEQ ID NO: 18106 - DNA, 559 bp, Homo sapiens
taggcaacagtcctgtcaaactttcaacacttcccctttcatcgatcttccaataagattttcttcactttcccttaaaccttcactgacagcctcattaagaacctttaggccgggcgcggtggytcacacctgtaatcccagcactttgggaggccgaggcaggcggatcatgaggtcaggagatcgagaccatcctggctaacacggtgaaaccccgtctctactaaaaatacaaaaaattagccaggtgtggtggcgggcgcctgtagtcccagctactcgagaggctgaggcaggagaatggcgtgaacccgggaggcggagcttgcagtgagccgagatcacgccaatgcactccagcctgggcgacagagcaagactctgtctcaaaaacaaaaaaaaacaaaacaaaaaaaaaacctttaggcttccattaaaactctcctcgagtctccttcagttttcactgacactctgtgtggtcctttatgcttctttctgctccccaggtccagagccaatgccatgtgtgtcagccttttgttactgcagcacc

SEQ ID NO: 18107 - DNA, 573 bp, Homo sapiens
aatgatttctattgtacttgaacatatgagaattttaacaaattttcttgctcaaccccaaccctgatattcccactgggacattctcccatggctccctattgagaaaagaaactattttgcttcgtytaagtaaatccatggtaacctgattccctccttcccactaactagggcaaaacaaaggcacctgagctctgtcttgattcatattcacagcctgcattcagtgtgggtcatgttctcactaacctatgtctaggtgattactagagttttctcactggtctcctagcattgagtcattctccactgcaattttacataccacttgctgatttgttatatttgtactcctttttcataataaccaccagagtataattttacatttactataattatatgattaaaatctttctctaccactagactgtaaattacataagaacaggaacaatgtgtttgctcactatgaatttgcagtgcctagctcagtaccttaagtattagacactggagaaatatctactgagtaaatgaatagcattttaaaatataggggtgtggagt

SEQ ID NO: 18108 - DNA, 609 bp, Homo sapiens
ccaggatggagtgcagtgacacaatcacagctcactacaacctctgcctcacaggctcaagtgatcctcccacctcagcctcccaaataactgggatgacagacacgtgccacaacatttggctaatgtttaaattttttgtagagatggggtctctcttatcgcccaggctggtyttgaactcctggactcgagcgatcctcacacctcagcctccccaaaatgctgaggttacaggtgtgagccatggtgcctggcctggaagagtggttttttaaagaaaaacataaacagttgaatatcagatcctataaatgtcaagcatgaaaaaaaaaagcagtcagtgttagtgacactgtatttatacagcacttgtagaagtgctttaaagcacctaaaaacaaaaatatattcccaaagatagaaatgttatcaatattatttctcttttctagacaggagaaaaataacttactaaaagtgactacataatcaatttctgatttacattccctggtttttcccccaaaataagtttagaagattaaatttccctccctaagaactgcggtgttatggcaagggtatcattaagtacaatatgtagta

SEQ ID NO: 18109 - DNA, 609 bp, Homo sapiens
ccaggatggagtgcagtgacacaatcacagctcactacaacctctgcctcacaggctcaagtgatcctcccacctcagcctcccaaataactgggatgacagacacgtgccacaacatttggctaatgtttaaattttttgtagagatggggtctctcttatcgcccaggctggttttgaactcctggactcgagcgatcctcacacctcagcctccccaaaatgctgaggttacaggtgtgagccatggygcctggcctggaagagtggttttttaaagaaaaacataaacagttgaatatcagatcctataaatgtcaagcatgaaaaaaaaaagcagtcagtgttagtgacactgtatttatacagcacttgtagaagtgctttaaagcacctaaaaacaaaaatatattcccaaagatagaaatgttatcaatattatttctcttttctagacaggagaaaaataacttactaaaagtgactacataatcaatttctgatttacattccctggtttttcccccaaaataagtttagaagattaaatttccctccctaagaactgcggtgttatggcaagggtatcattaagtacaatatgtagta

SEQ ID NO: 18110 - DNA, 571 bp, Homo sapiens
ggtgccattttgagtttgacttcaggacggtgagaatcactcgctatcattttgatcctaagtgggctttcctctctgaaggtagacttttctcgtgcatccagattcttgtgtagagggggactgtaatcaaagaggtctttgagcttttcagactttacctgctcaggtgactgagtttctttctttactgttattctttcagaatttttgtcttcttctttgtgcttatcttttgtagtgctaggcctttccacyacatatccagtctctttaagtttataatttttttcttctctaaatccatcactttctctattgcctttcagtgaaactttggacttgtacttgagtccttcctcctcagtattccggtgagatgcagtagcaaaacttttaccctgatctgcgaggactgacttcctgaactgtctataatcctctgtctcctctgtgtcatccccttctgaatcattaaacttttgttttccagactctttatcactgaagtaatctagagcttcctgatcttcccattctccctctgccctccctttctctgatcctttct

SEQ ID NO: 18111 - DNA, 571 bp, Homo sapiens
ggtgccattttgagtttgacttcaggacggtgagaatcactcgctatcattttgatcctaagtgggctttcctctctgaaggtagacttttctcgtgcatccagattcttgtgtagagggggactgtaatcaaagaggtctttgagcttttcagactttacctgctcaggtgactgagtttctttctttactgttattctttcagaatttttgtcttcttctttgtgcttatcttttgtagtgctaggcctttccactacatatccagtctctttawgtttataatttttttcttctctaaatccatcactttctctattgcctttcagtgaaactttggacttgtacttgagtccttcctcctcagtattccggtgagatgcagtagcaaaacttttaccctgatctgcgaggactgacttcctgaactgtctataatcctctgtctcctctgtgtcatccccttctgaatcattaaacttttgttttccagactctttatcactgaagtaatctagagcttcctgatcttcccattctccctctgccctccctttctctgatcctttct

SEQ ID NO: 18112 - DNA, 571 bp, Homo sapiens
ggtgccattttgagtttgacttcaggacggtgagaatcactcgctatcattttgatcctaagtgggctttcctctctgaaggtagacttttctcgtgcatccagattcttgtgtagagggggactgtaatcaaagaggtctttgagcttttcagactttacctgctcaggtgactgagtttctttctttactgttattctttcagaatttttgtcttcttctttgtgcttatcttttgtagtgctaggcctttccactacatatccagtctctttaagtttatmatttttttcttctctaaatccatcactttctctattgcctttcagtgaaactttggacttgtacttgagtccttcctcctcagtattccggtgagatgcagtagcaaaacttttaccctgatctgcgaggactgacttcctgaactgtctataatcctctgtctcctctgtgtcatccccttctgaatcattaaacttttgttttccagactctttatcactgaagtaatctagagcttcctgatcttcccattctccctctgccctccctttctctgatcctttct

SEQ ID NO: 18113 - DNA, 1444 bp, Homo sapiens
ccagcaggcgcgccagggcccccggatccaaggtgcggggtcccgattgggcgcctggacgccccgtgacggtggcgccgctgccactgtcccgaagcgaggcgaggccaggcgctgcgctttcggctgcccgccccttctccccgccccgcgctcagtcccctccctccgtcccgcctcctgcctcgctccctccctcggcggctgctgcgccgcgctcccggcgcactcggagcccggcggggaccgggaggcaragacggggcggccgtggctccgagggcgggagctgagccgggccccgggaccgaagtttggcggcggctccgggaggcagagcgggctccccgggcgacttccaggcccctctcgcgtcctcgccccggacccgtgggcagccggggggaacggaagccgcggccgggccaactccgaggcggggacgccgcgacgggaacttgaggtgggaactttgcgcgctgcagcctcgccgggcgccaccaaagcgcgaaccggaccccgagcctgcaaactcgggctcgggggcggctgcacgtggccgtggccctgaactccctgcgggggcctcgaaacccgcctgcggggaggccagggcgacagaggactcgggagtcaccgctggtgcgtggcggcgtggagcgcgcttgttacggccaaggtgcgggtccggcttcggttcatcccaaggggtcaccgggatgcgaagtccgggacgttcgccgccgcggtgaccccggcgggggcgcatcccggctgtgggccgaggtttctcccccgatcctgggaggaaggagagttagggattggggtgggggagtgtgtgtcacttgctcattcactgtatccttaggcacagtatggagccccccttcacccccaccgtgggcctgattgagtcattcattatgaacacagcaagcgtttattgagcgcctactgtgtgctaggcactggggatactgagacagttcactgggcacccccaggaactggtaggaaggtggtggtctcagccttagggtttccatgtgggagagaggctcagcccggaggtatggaaggaaaagggtgaagttcattcattcattcatagattggacaaagattggttgagcacctattgtaagcagctcatcataccaagcgctcaacagtcattcatccagttcacaaacatttatggaggcgctatgctggggagaagtgaaaagggatggaatgggggcacccttcatgcagcttagagagaagtaaggattaagacccaggcccccgcttgggaggccgcagactgccggggtggccaactgtagcagcccatgtatataggcagaagtcttggttcatctaatgcattccttctcaaggtgggaggtgtggaagctggaattggttctagaataggaagaaaagatcttttcaa

SEQ ID NO: 18114 - DNA, 438 bp, Homo sapiens
tgaacaaaaaatatatatattaatatattactagcatgatatatacttataagctaataagcaaatatttacagcaactattcattcatattatctaggtgatttactcaaaataggtatttctaccaaagttgggaaacaaaacacataccagaagaggcagataactgcgtgtcacccaaacctaaactgatctaaggaaaaataacaaattacaactttcacatgtcatgttttgtagagtttytgaaaatccttgaggattttgtcaggagacaggtttgtggctattctcttagcacacagatgagaattgttctactaattaagatgaaacaataattttcattggccttacagagctggcactgtaggtgactatatggtacattgaggggagagaaggggacctatatgcctcctctgctctataagctg

SEQ ID NO: 18115 - DNA, 589 bp, Homo sapiens
caacaatcagactggttgagaaagcaaacgaatctttatgatgggtagaccgttgcacaaatttgcaagtgacataaccaacaaatagataaaagaaacacatttttatataaaaggaacacatgcacaaaccattaatgtgtgtatatgcattacaaaatgagaatcaacaactttagaaaaattaacaacttggtgcaattatgaaattattcaattggatactgyggtagaagatagtcatggggtaggaggacagggtcaatattaacttgattgtttgtatgtatttttaaagtagtgccagaaaaaattcaagaaaagagaagttatatgacgaagtaaaatgctttagaaacgatgggaaaacattggagttactggaaaaatattgtgtttacagaaaatgtaaacaactgtaaataccttaaggtaattatgcctagattttgttagacaaagattttatatattttgagaaacaagaaaataatatttcaaatgagtcacacagtgaatatattttaaggcacctatgaacctatatatttcaaaatgcaagaatattgcaaattcatgtaatgaaaag

SEQ ID NO: 18116 - DNA, 547 bp, Homo sapiens
attacaatttaagatgagatttgggtggggacacaaagcctatcatatttcctggcaatggttttttggtgctggatatgctgtatcaaaaactataaaagctttagatgatgtcatttttctccacgaagatttatatttttttcctcactggcaagtagtgtaggaatgaataattttgatgcataaaatattggtctatatatggtttgactttatacataggataaggcccttcctggacctcaaatgaagaaaaaaaaaaaaagccctgaatctagattctcttttccccagaataacatatttattgaattcttttctatacattctggctctgtaaagctattatagcatctcctttacttatctgcctctaacccacgtyatgggtacaataccaactcaagagagaatttcttgcacaaaatcaaggtcagttctctgaaacttccttttctctgagactttggccctgtgtctccagactactttgtagcaggaaatttcaattttgttgctccagtccagggaggctgctgtaaca

SEQ ID NO: 18117 - DNA, 567 bp, Homo sapiens
gaattactcttagctcatctactggattattcatctttctcctattgatttatgcatttttaaatatataaataatgtagcatatgcatacatgagttgcagatgatttgcccactttattatttccttttcattttggaaaatttagsttttaagtaaccaaatctatgcgttttttatttatttttttattccacttctggcttccacttttggcatcattaccataattttataaagatccctctgtatatcctctgtacatatgaatgtattaacatttttaagacgtattcttgatacatatcaccaaattgctttctacaacagttttgccaggagtgtacaagaatgcccatctcactgcagggagaatagcttttaagtgtcatctttttgttttcccagaaatctgagtggatgacaacaacctgcaatcacgcactttatgctatttgtgatgtttttacccagttttatgaagctttgaatgaagttcttctttctgatgtatttgcacaattgcagtggtgtgtcaaacaaggtactctttaagcctctaggcat

SEQ ID NO: 18118 - DNA, 567 bp, Homo sapiens
gaattactcttagctcatctactggattattcatctttctcctattgatttatgcatttttaaatatataaataatgtagcatatgcatacatgagttgcagatgatttgcccactttattatttccttttcattttggaaaatttagcttttaagtaaccaaatctatgcgttttttatttatttttttattccacttctggcttccacttttggcatcattaccataattttataaagatccctctgtatatcctctgtacatatgaatgtattaacatttttaagacgtattcttgatacatatcaccaaattgctttctacaacagttttgccaggagtgtrcaagaatgcccatctcactgcagggagaatagcttttaagtgtcatctttttgttttcccagaaatctgagtggatgacaacaacctgcaatcacgcactttatgctatttgtgatgtttttacccagttttatgaagctttgaatgaagttcttctttctgatgtatttgcacaattgcagtggtgtgtcaaacaaggtactctttaagcctctaggcat

SEQ ID NO: 18119 - DNA, 585 bp, Homo sapiens
tttcatgttgagaaagtagcaaagcttttaaatactgagaatattttagttacatgaagatacttttagtagtcactgttgttgttacattccccctacccctcagaaaataacagggctgttaaggaatcctcaaagagcatagattgagtgaaaatgacacagaacaaaggacagatcccaggagtgaaatgaagaagttctgtaaatagctgtgccgttttcctttgaaatgtctggcacactctatatagtayagtggtcgaggatagaggggctaattctgtgatgaagcattctgcatggaatttcagcagggcatagatggtgagggcatctggatctgtttgagtttttaaactaattatatgacaaactttttaaaatgtagcatacctggaaacatcatcccgccacgtcatctgcatttaaataatcattgcctcacctttaacacccagcctctagaaaaataaagcatgaacaaatgttagctctgagctgctctcagtaatttggagtgtgctaagcaaaaacctacattttctagcatgaaattggcacaggaatgcatgcaaagttttg

SEQ ID NO: 18120 - DNA, 616 bp, Homo sapiens
ttgcatgcatctccattgatttcttgttaatgctggaaacttgttttagtgtcaattgtatgaagatataggaaataytaaggtaggagaaaaaggatgtaatattattggaattaaaatagtaactattgaatgtgtatcatatgctctaagcattttgttatttaatattcaaaaaaagcttggaacgatttcataaacaggtcattgattacctttttaattggaaaaggtagctagcaaattatgcttctctgatttgtttttcttcttctttacctttcttttgggctagagggagatcaaaggccaaaatccggacaggaatttcctcaaaggttttttttttttttttttttgccactacggccttcgagccacaagtgccactagtggcttggccggcaacccggggccacctcagtttttgactgaaagtgattttgaagtctcagatcagaagtaggaacttcattgtcaaaactgagtgtgtttaaataccatgagaatagctagatacaataaaaactactactagtgagcacttcatgtgtgccaggctcaaagaagtttaactttcctaaagtcacatggctagttagtggcacagctggga

SEQ ID NO: 18121 - DNA, 616 bp, Homo sapiens
ttgcatgcatctccattgatttcttgttaatgctggaaacttgttttagtgtcaattgtatgaagatataggaaatactaaggtaggagaaaaaggatgtaatattattggaattaaaatagtaactattgaatgtgtatcatatgctctaagcattttgttatttaatattcaaaaaaagcttggaacgatttcataaacaggtcattgattacctttttaattggaaaaggtagctagcaaattatgcttctctgatttgtttttcttcttcttyacctttcttttgggctagagggagatcaaaggccaaaatccggacaggaatttcctcaaaggttttttttttttttttttttgccactacggccttcgagccacaagtgccactagtggcttggccggcaacccggggccacctcagtttttgactgaaagtgattttgaagtctcagatcagaagtaggaacttcattgtcaaaactgagtgtgtttaaataccatgagaatagctagatacaataaaaactactactagtgagcacttcatgtgtgccaggctcaaagaagtttaactttcctaaagtcacatggctagttagtggcacagctggga

SEQ ID NO: 18122 - DNA, 591 bp, Homo sapiens
tacccaaagacaaatgtacagattatttttactgtttttataattgaaatacaaaaaaagagaaaattctggcaacttcagaaaccaccttgttagtttattgtgggtatccatcattgtataaaccaatttaatagggtgctatggttgccaaagagtctgatctccagattttctcagcacttcccatctgctcacacaatagccagaagacgtttgctttcctggagatagcataatgctttaaaactgcctgaagaaatctacccacccaagctgttttaataaggttaagtgtgtaaaatattcatcccacaggatatatgcccatatgccgtcttatcattagtcataaaaaacaaacacttaattattccgatctctaaggtccatctttgtggttaggctccgagggactccatgaaccaggsggtcttatttatcagtgacagtgtctctatccagacttactccatgttgtcatggtattttatttgtctagccatcttgtaaatgcttattccttgctgtcaaccatctcaacatgcttggaggcagatgggcccctggcactctccatggtattcttca

SEQ ID NO: 18123 - DNA, 548 bp, Homo sapiens
aattttcatgtattgttagagtaatatgtccagtaaactcattgtaaggtatgaaatatattaacatgtcagttttcaacctaattctgctgggaaatttacaaagcatgtcactttttctttacaccttttctgcttgtgacctaaaatagtcatgctgarctacctcaaatgagcattgattttcaaattgtactctttggaaagttattatttttgactgatttatcaaatctactttaggaccatacttttattttattttttgatatggatagaatttaccaaatctgatgttagactttggtgttctctaccagagagctctaacatcaacattgtcaaatatgcttgaggattggatgacaggggattaagagttgtacattatggcgttatacagtgtttgagctagaaaagttgataaacttatatagcatttcagtttttcagataagaaattttgtgccttggtcctgattatctagctaattatttttaaaatgagaattaaaactctggccatgtaagtctcattccattaaatt

SEQ ID NO: 18124 - DNA, 563 bp, Homo sapiens
agcaaatcccccatcccactctgccttggcccaagctgaagaagcagccaggatccttctctgactttttatcctgccccgcaggctggcctgatgccccagaggttgactgagctsagctccttttgttgtttcaggaagcagctgtgaggaaaacagtcccatttcaaagtacttgtgattgctgcagacccaggaggaagccttttcttcccaaagggaaagccagctgcacttgcccctaagcccagatgtgcagatgaaaatttctcatgtcttgttgtctaaggtttgaatgttttaacctccaaagtgtcagatggactctgagagctgcaaaaagtttaactaaaatagttcagttgctaaaggagaggctgaggaggatgagagaagttgacccacccatccccagaacccagaagaacgacagctttaaggaggttggatggaaagctgaacacattcagacagagcctgctctccatcagcctccctggagatgaggggctggctgctgcaatgggagctctgtccctatgtacctcctcttcgcaaggggt

SEQ ID NO: 18125 - DNA, 563 bp, Homo sapiens
agcaaatcccccatcccactctgccttggcccaagctgaagaagcagccaggatccttctctgactttttatcctgccccgcaggctggcctgatgccccagaggttgactgagctcagctccttttgttgtttcaggaagcagctgtgaggaaaacagtcccatttcaaagtmcttgtgattgctgcagacccaggaggaagccttttcttcccaaagggaaagccagctgcacttgcccctaagcccagatgtgcagatgaaaatttctcatgtcttgttgtctaaggtttgaatgttttaacctccaaagtgtcagatggactctgagagctgcaaaaagtttaactaaaatagttcagttgctaaaggagaggctgaggaggatgagagaagttgacccacccatccccagaacccagaagaacgacagctttaaggaggttggatggaaagctgaacacattcagacagagcctgctctccatcagcctccctggagatgaggggctggctgctgcaatgggagctctgtccctatgtacctcctcttcgcaaggggt

SEQ ID NO: 18126 - DNA, 563 bp, Homo sapiens
agcaaatcccccatcccactctgccttggcccaagctgaagaagcagccaggatccttctctgactttttatcctgccccgcaggctggcctgatgccccagaggttgactgagctcagctccttttgttgtttcaggaagcagctgtgaggaaaacagtcccatttcaaagtacttgtgattgctgcagacccaggaggaagccttttcttcccaaagggaaagccagctgcacttgcccctaagcccagatgtgcagatgaaaatttctcatgtcttgttgtctaaggtttgaatgttttaacctccmaagtgtcagatggactctgagagctgcaaaaagtttaactaaaatagttcagttgctaaaggagaggctgaggaggatgagagaagttgacccacccatccccagaacccagaagaacgacagctttaaggaggttggatggaaagctgaacacattcagacagagcctgctctccatcagcctccctggagatgaggggctggctgctgcaatgggagctctgtccctatgtacctcctcttcgcaaggggt

SEQ ID NO: 18127 - DNA, 563 bp, Homo sapiens
agcaaatcccccatcccactctgccttggcccaagctgaagaagcagccaggatccttctctgactttttatcctgccccgcaggctggcctgatgccccagaggttgactgagctcagctccttttgttgtttcaggaagcagctgtgaggaaaacagtcccatttcaaagtacttgtgattgctgcagacccaggaggaagccttttcttcccaaagggaaagccagctgcacttgcccctaagcccagatgtgcagatgaaaatttctcatgtcttgttgtctaaggtttgaatgttttaacctccaaagtgtcagatggactctgagagctgcaaaaagtttaactaaaatagttcagttgctaaaggagaggctgaggaggatgagagaagttgacccacccatccccagaacccagaagaacracagctttaaggaggttggatggaaagctgaacacattcagacagagcctgctctccatcagcctccctggagatgaggggctggctgctgcaatgggagctctgtccctatgtacctcctcttcgcaaggggt

SEQ ID NO: 18128 - DNA, 553 bp, Homo sapiens
caccttaggaagtaaacacggtgtccttgacccctctgagcgtctgtgctcctgtacttgagatagaagagacccaagcacagaggactgcatgttatttgcaaattgggtatttagaggagcagttccagtgctcaaagcattaatcttaacagttaaaacaggcgctggttgctgccctggattgtacattgatctctgaagtgccttttcttccactgttgcaaagggactggggtttgtggcaatgtcagcctcgggctactctttttgcctttgtcaccagtgtagctctgaactttgagtttctttacagctgagcaaatgcggctgggctcatatggggaggaggtaaatgtggaggcaggttgactaggcagggaggtgggtgcctgtcgggtccagtccctgacacccttagagagttgtttcttttgygtcatctggtccagcaagcattttctgctgctgttacaagaaagctctttttggagggcttgggtcaccaggtggtcaacctgctctgtggacagatgtccctttgtatatccca

SEQ ID NO: 18129 - DNA, 553 bp, Homo sapiens
caccttaggaagtaaacacggtgtccttgacccctctgagcgtctgtgctcctgtacttgagatagaagagacccaagcacagaggactgcatgttatttgcaaattgggtatttagaggagcagttccagtgctcaaagcattaatcttaacagttaaaacaggcgctggttgctgccctggattgtacattgatctctgaagtgccttttcttccactgttgcaaagggactggggtttgtggcaatgtcagcctcgggctactctttttgcctttgtcaccagtgtagctctgaactttgagtttctttacagctgagcaaatgcggctgggctcatatggggaggaggtaaatgtggaggcaggttgactaggcagggaggtgggtgcctgtcgggtccagtccctgacacccttagagagttgtttcttttgtgtcatctggtccagcaagcattttctgctgctgttacaagaaagstctttttggagggcttgggtcaccaggtggtcaacctgctctgtggacagatgtccctttgtatatccca

SEQ ID NO: 18130 - DNA, 598 bp, Homo sapiens
cagagtgtgataattatgagacattgcagtcatcatgcttggtgaggggaaagaggaggggccgggcagtaggtgttcctgggacattccaggtaggccccagatgctttgagtctttgggaaatatgaggtccatttggactccatgccaggctgctcccccmacaccggggatgagggcagacaagctgctattcttttaatttaccctccagtccccttcttcactccagcggggtcctgttgccctctgtgagccctgcttcaaggcccagaaggcaccccaggaattctcacttccaagattgtgttcctgccattcactcacctggaaaggctcccctgcctgcccaaagcctccctgctgttatgcagccatcctctcatcctgtcctcatccagggtccttgtccttgtcctggcttcttccctgaagactctgcagaccagcccccagggtggcccgcccctccttggcttttcctgcctgaggtcacagtacatttattgagctccagctgtgtacctggcacaagacacctatgctaggaccccctaactctccaacagcctgtgagacgtcaatgggcacgtgaga

SEQ ID NO: 18131 - DNA, 1495 bp, Homo sapiens
actcagagatagaggaggtaaaatgaagcaaggagaagcaaagggaggaggttaaagactgattgagaaaccaaatgaaaaagaggaaaagatcagcaggattgacagagatgggccagaaaacagacttgtatcccacgctgcagttgctatgcaaagtaaccatttccacacctgatgaatcaaagatactcatgattcccttgctgacgatttcctgctcaccacccacgtggggaaacctacttgtgtcatctcccccatggctgagcatctgctctcacagccccagctgcgcagactgctggtcatatgactgtggcttcctggccacagatgcttggaccagaaatggataactcgtccaacttgaactagttggatttttccccaggaatttgaaactggggcctgaagacactaggtgcttgactagggaagtgacataaaacaggaagccatgtctggcccacatacatgccaaaacagagaacactggtatggagagagagagaacagaacaggtccaggagctgtagggggaagagaccatgtaatcttaagaagagaaagagatattagctgccctgcttccacattttggtgggtgggggaggcacttagctgtactccaaaccactgggttccacagctcaggtggcttttattcactgcaaataaatacgaccccctggtgaagtcaactgaatcctacttggtttccaatttctatggacatagcaacattgctgtgggggagggggagatgagaatggtggcctcttatgagtttaatattctcagaacactcaaattcatatatgcaaaacttttcactaaaatatcaattttatgcaccaagtaagcattaaggcaataagtcaaattaaacaagatatcagctacttagaatctactctgatgacttagcttcataagcaaacgtgagacaagtttatattattaccatgcatttcatgtacaacaaccctagagtctgggctgcaaaatcctgaaaacatggcatccatttgcttttcacaagttactaaaaaatcccagatggtaaagcctttaaaactgactacaggaaaaatcagtgtctgtctcctgagcatgactttgaggctgcaaaattggctggttggtatatgaagagttcataaaactgtgattaaataaagacaccaggaagtgyttaggcaaagcctgtgcaaagactgctctgtagcctctttgtatgagagcaaaatgatatgaagccgggagaaataaactattttaagacaaagaacttttgtaggaactgattttcaatgaagtcctcctaatctggcacagaaaatgaaaatgttgatggaaaaccctgtggagatgtcaccaagcatgagtcagtgtagacgtcaaaaaagaatgtggtttgcaaagggttgatcagtccgtggttcccccaacaaattctgggaaacgaattctccaaattaaattttttcat

SEQ ID NO: 18132 - DNA, 738 bp, Homo sapiens
aattttaaattatgaatagtaatatcaactgatatggtttggctgtgtccccagccaaatctcatcttgaactgtaactcccacgattcccgcgtgtcatgggaggaacccggtgggaggtaattgaatcatggaagcaaatccttcctgtgctgttctcttgatagcaagtctcacgagatctgatggttttaaaaaacgggagtttcgctgcagaagttctctctttgcctgctgtaagacttcacttgctcctccttgccttgtgtcatgattgtgaggcttccccagccacgtggaactataagtccatcaaacctctttcttttgtaaaatacccagtctcgggtatgtctttatcagcagcgtgaaaacagacaaacacataaaccacttatttttaaatgttattgtaaatataaaaaagaatgttaaaaggattgaatgtgattatctcctcaggtgactagaactcagaggtggagagcagtggagctgaggataaaataaaaattaaattaaaaattatataatgattcccccaaattcatgtaactatatttatataatacttattttgcttgaatgagtcataaaattacatctcttaataagagaaatatttgaaactaccttarttttattaaccaatctacccccaaatttattatttttcttattttcaaaaatgattaagaaagtttaaatgttaaaaatacataaaacattacttaaaca

SEQ ID NO: 18133 - DNA, 583 bp, Homo sapiens
ttttaacggcaccccactgagagtagccctgatccagatactttaaagatttttttcagcttgctatagtttggatgtttgtccttctaaacctcatgttgaaatgtgatcccatatgttggaggtagggcctaatgagaggtgtttgggtcatggggacagatccctcataagtagataaatgccctccctgaggaggggtagtgagtgagttcttgctctgttaggtcccatgagagctggttrttagaaagagcctgacacttcccctctctctcttgcttcttcttgtcatttgatctctgcacagaccagctctcttttaccttctgccatgagtggaagcagcctgaggccctcaccagaagccaagcagatgccagcaccatgcttcttgtatagcctgcagaaccatgagccaaataaacctcttttccttataaattacaagcaatggagaaaggactccctattcaataaatggtgctgaggtaactagctagccatatgcagaaggttgaaactggaccccttcctttcaccatatacaaaaatcaactcaagatggattaagtacttaatg

SEQ ID NO: 18134 - DNA, 586 bp, Homo sapiens
tgagaggtccagtaggtggtcttggggcaccacctaaaacatggcagtcagggtttaggagtaygggtaagaaagtgcctccagagtttgagaaaggcaatgctttaacagcagccaggaaccccatcctggaggaatcaccacattgacatgtgactggggaccttggatacctctgcccccaccaagttcctggagcagtgggccaggtgggtatatgtgagtgtgtgggtgtccaaggagctcaaagctctagggaaaaagagcacctgcctgggaaccagagacttgattctgccttttcccagcccagagctgctcagttgctcacagggtctacgctggccctcctcagagcatcagaaaaggatcagaaaaacataccctacctgtcacaaaaggagcaacatgtggcaaagccctgggcagatcgttaggcactgacattattagtggtaattcatgcattcgataatcacaaacctcttgcctctcccgcacagagattgcaccacaaaaggaaaatgcctaggcctagcattagatggctcaggtctacatcttagccccatcacttcctagctgt

SEQ ID NO: 18135 - DNA, 542 bp, Homo sapiens
tgacccctaactggtagccattatttccgccgcaatgctaaatgtgacccaaatgtgaaaacaccaacatggtcccccatgtagggctcacactcaaaacaggacactcgagttctgtgctgtttggagtcctgagatctgtggtttccagagcccataatcagaggctcttttcagcgccatgctcaaccccactacatttctacaaggtgctctccactcaaggttgcaggactagggtgtggaaagttgtcacttcaggggagctgacagtgtctgggattgctggagtgggcaatctgacactatctgggattgctggtaggcccaggtgctgaagatggggctggagacagagaggaagaaggtggggtccctgcttctggcgacattttctgtgtgaagcacagaaatgcttatttgctcactgaatggctggcctgtgctcatgctggggttcytgtcttcctccccaagccagcttcctcttttcccttcttatcactccctgcccagcatccgtgggctttcaactccaatca

SEQ ID NO: 18136 - DNA, 541 bp, Homo sapiens
ccactgcattccagcctggatgatggaatgagactttctcaaaaaaaaaaaggtaattcataatacaggaacccagtaattctataccttttatggctattttaaatcattttatcagtaatttycctatgaaacccaagagatgataattttgggattaattaattttaccacagcaagtggatcaaagcaatgacagtaccaaaaccagtctgtcctcaggttttggtacttagaaaattatatttctaattgtagagttccatatgtataaacaggacggcacagcaaatattatcttcttcaagaactcaactaaaatcttacaatggacaaggctttaaggctttaagacccaggatttaagactgtgggtaactaaaagttgtttttaaaagagggtattttcccttttaaagtttattaagtctacattaattttaaatgaaatttgtagtcttgatcatacaccttttgacagctgaagaaactctgagatgggaagataattctggattaaaaatgtaccaaggtatacaaa

SEQ ID NO: 18137 - DNA, 541 bp, Homo sapiens
ccactgcattccagcctggatgatggaatgagactttctcaaaaaaaaaaaggtaattcataatacaggaacccagtaattctataccttttatggctattttaaatcattttatcagtaattttcctatgaracccaagagatgataattttgggattaattaattttaccacagcaagtggatcaaagcaatgacagtaccaaaaccagtctgtcctcaggttttggtacttagaaaattatatttctaattgtagagttccatatgtataaacaggacggcacagcaaatattatcttcttcaagaactcaactaaaatcttacaatggacaaggctttaaggctttaagacccaggatttaagactgtgggtaactaaaagttgtttttaaaagagggtattttcccttttaaagtttattaagtctacattaattttaaatgaaatttgtagtcttgatcatacaccttttgacagctgaagaaactctgagatgggaagataattctggattaaaaatgtaccaaggtatacaaa

SEQ ID NO: 18138 - DNA, 607 bp, Homo sapiens
tattaaagacagttcagcaattgggatgagggcttttattgcaggaaaggatggtgagaccacaaattaatccaaattggagctgcccaacacagcatatttcacctggtggtaagaccctaagtgcagtggactttttaaaaatggaaagcttattgcttctcagggatatctctctaactgattgattgcctaaccagcatttcttccttctattttgagtaattgtgcaccacttaattagtctttcaatccatgaacatagtttatctcttcatttattttgaacttttctactatctctcagcaatgttttatagttttcagtgtagaagtattatatatcttttgttgatttatttccagggttttttttttgttttatatattactgaaattggkttcttaaaaaactttattttccaaattgttattggtagtatataagaatgcagttgattagctttgtattctgtgaccttgttagactcatttattactccagtaattgttttatagattccctaagattttctacaaaaaaaaaatcatatctgtgagtaggaacacctttacttctttcttccaaaatttaggcctttgattt

SEQ ID NO: 18139 - DNA, 607 bp, Homo sapiens
tattaaagacagttcagcaattgggatgagggcttttattgcaggaaaggatggtgagaccacaaattaatccaaattggagctgcccaacacagcatatttcacctggtggtaagaccctaagtgcagtggactttttaaaaatggaaagcttattgcttctcagggatatctctctaactgattgattgcctaaccagcatttcttccttctattttgagtaattgtgcaccacttaattagtctttcaatccatgaacatagtttatctcttcatttattttgaacttttctactatctctcagcaatgttttatagttttcagtgtagaagtattatatatcttttgttgatttatttccagggttttttttttgttttatatattactgaaattggtttcttaaaaaactttattttccaaattgttattggtagtatataagaatkcagttgattagctttgtattctgtgaccttgttagactcatttattactccagtaattgttttatagattccctaagattttctacaaaaaaaaaatcatatctgtgagtaggaacacctttacttctttcttccaaaatttaggcctttgattt

SEQ ID NO: 18140 - DNA, 570 bp, Homo sapiens
ttaatattatgatacccatgtggaagattgtggtgacagaaaatgggtgatctgtgactgcatctatgaaagaggtatgctctgaatacttttcagttcgtctccagaatttttaagagaagtggataaatgcctcttgaatccaatcaattccccttgctctaattctgtgctgaatgaggaagtggattatgatttagcttcttatatatatctgcctataaaaataagtggaaacaaacaaaaatggactaatttgaaaaactgggaatttaatctgttgagaagttgtaaatctcattttaaaggaagtaaatgacatttgacttctttgggcttggttaggacgagttgacttccctaggtcttatcatctcttatcatcakctaggcatcatatcatgtcagatatcctgacagaactggtctggtctacacagctaactcagacctggagcaagatctctcctcgacctgtctgtgtggctcacttgtgtggccccaccttgtattcttcatgggactttctacctgaaaaatttacattgtgtttttatcaaagagcttacc

SEQ ID NO: 18141 - DNA, 1458 bp, Homo sapiens
catccagcgcacagattttgtttagataacttggttttgaagaacagaagtttccrtctctcttgaaaaatgagcagctcaagcaacactggcctgcattccaccctccatggcaacagtcagctggagtggcagcagctctacagccttgcacagattggcactctgcagccagccaaagtccccaccgccctgagttgccgctctcttggcccccgtagcatgtgatctacaacccttgccccgtgtctcatgtgtatggctggttttccagggcccggatggctccagcccctcctctccctgatcagtgaatgtggcccagcccatccaactctcccccacagccaggaggccagctccaagggcaacacacctggaagctgcaacacggatcagtccacttcccttgtcctggctgcaataaatggggccaaggtcacactagcttttttggcaaaacttcaccctggtgactcactgagattcctatatatatatttacaaaaaaaaaaaaaagccctcacttcttggcacagcctggcaactaaaaataacaacaccacaatatccgatttaggcttacgcctcacaaagttcttttacaagtgctactgtcttcaatcctcacaacaaatctgcacagcaagaatttttctcccactctataaatggggaaactgaggccgagagaggcatcttgaactacctgaaagtgaggactttaccctggctgggggagcattaacaagcgagtctttaaaagctggcaatatttaagctaaggtacagagcatagaggttaagggtcaagactgtgatattgggctgggcacggtgactcatgcctgtaatcccagcactttgggaggccgaggtgggaggatcacttgaagtcaggagttcaagaccagccttgacaacatggtgaaaccttgtctttcctaaaaatacaaaaattggctgggcatggtggcatgcacctgtaattccagctactccagaggctgagatgcaagaatcgcttgaacccaggaggtagaggttgcagtgagccgagattgcaccactgtgacaaagcaagactgtatctcaaaaaaacaaaaacaaaaacaaaaaagactgtgatattagactgcactggatttaatcttgacttaaagtgtgaccttgggcaaaaggcttagtctcaaggagcctcagttttcccatctgtgaaactgggataataatagtacctacttcacagggctattgcgaggatttgggaagatgctgcacgtaaggggcttagcatcacagagcccgggatgcattaggtgctcaatgaaaatctcaacaaaaggaagaggaacacagatgtgggcaggtatcaagcatgtgggcggtgcctatttccctaacagctctcagaggatgcaccctcctgcctccgaggctccaagggttaacagccct

SEQ ID NO: 18142 - DNA, 457 bp, Homo sapiens
gcccagccttctgcggtcaggcatgagtgcacacctgccacatcccaggcagcaccagagcacggtgacagtcgcgctggcctgagcacagtctccaaacagtaaaaagggatttactgcctcttgttcgttaatatatcttagttgcctccagccttgttattttctctagacattacyggactcactaacgcagtggcccgaagtagacaagaggcagtgtacgctcccacccccaccccgcaacttgcagagaagagcaactccctgctgttgcgccataaataattgaacagtctcttccaggcaacacagtcaagatggagatttaatttattccctgggaggactaaaggtggctatgtagagccggttcgcagtcaagctgagctggggacactggtactttcaaaatgtgtcaaaccatgccctggggtccagtgtcaaatgccattgc

SEQ ID NO: 18143 - DNA, 457 bp, Homo sapiens
gcccagccttctgcggtcaggcatgagtgcacacctgccacatcccaggcagcaccagagcacggtgacagtcgcgctggcctgagcacagtctccaaacagtaaaaagggatttactgcctcttgttcgttaatatatcttagttgcctccagccttgttattttctctagacattaccggactcactaacgcagtggcccgaagtagacaagaggcagtgtacgctcccacccccaccccgcaacttgcagagaagagcaactccctgctgttgcgccataaataattgaacagtctcttccaggcaacacagtcaagatgsagatttaatttattccctgggaggactaaaggtggctatgtagagccggttcgcagtcaagctgagctggggacactggtactttcaaaatgtgtcaaaccatgccctggggtccagtgtcaaatgccattgc

SEQ ID NO: 18144 - DNA, 457 bp, Homo sapiens
gcccagccttctgcggtcaggcatgagtgcacacctgccacatcccaggcagcaccagagcacggtgacagtcgcgctggcctgagcacagtctccaaacagtaaaaagggatttactgcctcttgttcgttaatatatcttagttgcctccagccttgttattttctctagacattaccggactcactaacgcagtggcccgaagtagacaagaggcagtgtacgctcccacccccaccccgcaacttgcagagaagagcaactccctgctgttgcgccataaataattgaacagtctcttccaggcaacacagtcaagatggagatttaatttattccctgggaggactaaaggtggctatgtagasccggttcgcagtcaagctgagctggggacactggtactttcaaaatgtgtcaaaccatgccctggggtccagtgtcaaatgccattgc

SEQ ID NO: 18145 - DNA, 1564 bp, Homo sapiens
ggagtcatcccaggtattgctgactcataggcagtcaagaaatggctgattcacaccacgtggataataaaaatattttaaatgtttccttgctagggaacatgtcacaaagctgtgttaaaggggaagagaaatagaatatagaatttggaaacttcacragtcgtaactgcatccttccccaacccttcaaaatattcagagcctctgaagagtccatgttttcctccccaccagatgctccttcctgctttctcttctgtattcatttcccacagtggtgtgaagctgcacattaatatttctgtgaggcctttactgattcccttcagctgtctgtgaaaacttgggttgtgttgcagatctctgaggcccttctgatatggacattctctgattcaaaaagataaagaggctcagttgggacaagggaaagaacctagccattctgttaagagctgggggtctaagagtggagagaagcaatcagtgatgcactatgagtgacaggtggtctccaaagggagcagtggtggtggaccaagtggtggatcatttacagacgtgctcagggtaagcctggctcacctgaggaccctgtctaagaacctgaggaggggagggtgggaatggggcttatttgtttattctcaaaattcatatgttgaaatccaaacgctcaatgtgatgatgtttggaaatgggaacttgggaggtgattaggtcagaggttggacacccccatgaatgtgattcgtgcccttataagagaggccccagggagctgccttgcccctttcaccatgtgaggtttcatattaaaagaaaaaaaaaaaaaagaaagagagagagagaagggaggttttcacctgtctctctatctctctccaccatgtgaggatacagtaagaaggcacaatttgtaaacctggaagagggctcttctgaaacctgaccatgctggtactctgatctcaaactccctagactctagaattgtgaggaataaatctctgttgtttaagccacccagcctagggtatactgttatagcagcctaaactgacaaagacaggggcatttaggcctctataatctccaccagcatgttcccatttttattgatctccataatggatatgatggggcactgcccagatcccctcttcaggaaaatacctctaccctctactgtcaggaatttcagttgttgattgctcataccagggactctaccttgaaattacccttggcctcaagggactctctcatcatagttatgtctccttctagggcagctaggcaatgctgactaatgcaagaacacaagggcctggcccccttgcctcaaacagacaactgagaaagccaatgtagacttagagctcctggcagggttgtctaaggcctttgctgttagtgcagtgggggggtcagctttgctgtctgcccagtcccacctttctcactcttttgcaggtatatatcccaattgcagtcaccagaagactgtctgagcccacctccctgactctgtttctagaagatgtgaatgaagacaatc

SEQ ID NO: 18146 - DNA, 573 bp, Homo sapiens
tcacctggcttgggaacaagtgtctttaccgtgaggatcgtctcaatgtgacggggcgccctgtatggatgaacccgaccaccagccctggaagtcccacagcgcatcctgggtgctcaaacaccagagagcctacatctacaccctcacattcagtgtgactctccacatttttaattgtgtgcagcaaaaattcagcgctcttttcrggtcaccaaccctgtgtccagccccactgtttggcctaggtacacctgccagctccacccctgccaagtcggaatggcatacactgtttctataaagggacgtctttcagacacttggtgacttctcacgtatgcatacccttgatggcctgggcagtttcacgagcgttcttaaagtgatcaagaagacctgaacctctggatttgcacgattttgtggggatttctgggtcaagtgactaatgaaccattttcacagatcatctcaggccgcttggggaagagctataaagtcactatttttaaaagcaatttttttgttgttttttttttggttttttgagacggagtctcactctgtcgc

SEQ ID NO: 18147 - DNA, 1763 bp, Homo sapiens
  misc_feature (1)...(1763): n = A,T,C or G
tggacttttgaagaccattttgtcttcaaagtgctgcaggttcaaagagtccctgatcattccctcatcttttcaccatcctcattgtaggatcattacaatatgaaaagaactggcttctcttggtcctgcaaagatattctttctcccttgccacagagcacccctcggggacttatccatgatcacctaagatgccccttctgcctgaatgtagctgaaaaagtgcattgtgagactgttgaaaaagacaggtcaatgccatgtcctccccacaagcctgggctgccaggtcccccccaccaacaccctgcccctccataaytgtgagcacttcggtctgggctcctccttccataacctgcccgcctagagaatgaagtttatgcagctgttagagactgaatgcttctgtcccctcaaattcatatgttgaagccctaacctccaatgtgataggatttggagatggggtcttttggaggtgatgagggttagaagaggtcatgaaggtgggaccctcatgatgggattagtgcccttgtgaaaagagacaccagagagctcactctctcagccatttgaggacacagcaagaaggtagctgtctggaaaccaggaagacagcccttaccagaacccaaacacgctggcacttgtgcgggagggatnctatcagcagtnnnnnnnnnnnnnnnnnnnnnnnnnnnnnnnnnnnnnnnnnnnnnnnnnnnnnnnnnnnnnnnnnnnnnnnnnnnnnnnnnnnnnnnnnnnnnnnnnnnnaaatcttttaatatcctgtatgatattctagcaagttggcggttcccatctctgtgctaccccagcattttataccttattatatcatctgtcacattgtatggttattatttcctcagtggtttatctctttgccagtccatgagattcttgaggctgggaatcatgttttattcatgtttttagcatctttacctatccactgagctatgcaagtgcttgataaatatgcattgaatgaatgaaaaactgaatgaatatggacttcactgactcatggatgatttctgcccttgcgatggccatgatttcctgggacattttctgcataaatttgttctttcattcaacattcactaaactgcaagctccatgaagggggcgactaagcctggttttgctcctcactgcatctttactgaataacacacacttggtccacaataggcatttaacagatgctggttgaatgaaaacatatttattgggcagctactgtaaaccaggcactgggctaagtcctggaaataccgcagtgaaaaagcaaatgaggtgtgtcttcatggagtttgtattctagtgacttttaccttttggagtatttacaggggacttaaggtaggtgaggcaatggcagatggtggggcacagtgatttttttttttttttttttgagacaaggtctcattctgtttcctgggctggagtgcagtggcatgatcacagctcactgtagccttgacctcctgggtccaagcaatccttccacctcagcctcccgagtagccaggaatacagatgtgtgccaccacacctggctaattttaaaaagttttattttgtagagacggggttttgccattttgcccaagctggtctcaaactcctgggctcaggcaatccgcctgcctcggcttcccaaagtgctgggattacagatgtgagccaccgcacccagttgaccttgctttcttaacaca

SEQ ID NO: 18148 - DNA, 1898 bp, Homo sapiens
catttgaacctatgaggtattaatatcatctcctcagatgaggaaacagagtaaacaatttacgcaaagtcacatagctagtaagtgatagggtaaggactaaacctcaggctaattcccaggtccatactcataaccagtatgccacactgcctttctaaaatcttagttgttttcattttgtacccaaatacacatttttttaaaccacaggtaacctataacctataacctataaacctacatacttagaggttaatctgcctctaggaatcagtagttgattctacatctgtgagtacagtttacctggtctgccctacatcttctcttaacagccctagactttcaaatgttccttataagacattaatttttttttccagctttctgattatcctagtctcactccactgaatgatcttattcatccatgtctctctttaagtgcagcactaagaactgaacataatgttttcactgtgagctgactggcaaagtaaggaggaggattatcattccacttcattctaaacaacagacatctatcaatggagccttttgtttatcggctcataaatttgatgactcatattaagctcaaaatcaactaaaatcctgataacctagtcacatgcactgtaagacattccccacccatcctacacttgtttaacagtgaatttagttaattcagtaacagcaatgaaaactaagtaaattagtaaagtaaacaagacagcctggagaatacagccaggagaccaactaggcaacaagctgttttcaagcattttcatagcagtcttagggtactaattactataagtctgttctcatcactaaaagtatctagatcttctacaagactgattatgtgttacgttaggtagaaaatctgctagacctgttgcctacatataaaacatgcaaacacacacaatttgctccttatttgtctctgatattggcataggtaaaaaccactagattcccttttaagaaattctgagggccagacgtggtggctcacgcctgtaatcctagcactttgggaggccaaggcaggcagatcacttgaggtcaggagttcaagaccagcctggccaacatggtgaaaccctgtctctactaaaaataaaaaaaattagctgggcatggtggcaggcgcctataatcccagctactcaggaggctgaggcacgagaattgcttgaactcaagaagcggaggttgcagtgagccgagatcacgccactgcgctccagcctgggcaacagagccagactccatctcaaaaacaaaatggtgggcttactttttcttcaactgtggttgaggaaactgatttgaataaaataatttcaactcacttctactgaggttttactttcaaaagaattcaagactaaagtgagaaaaacaaggaatgtaagtactggccatgtactctagggaagagatcaagatgcaacaaagtaaaccaaagcctcagaactacatacaagagagaacaacaaggaaagcaaaatcagacttctgtgctatgttctgaagttagcaaaactaagcctaaaggggttagaaaaataccttgctctggttagtggatttaaaacataacaatgttttaaaactttgtccgtattaaacacccaaaatgatttgtatggagagtaatctggaggcttacataccaagcagttacccatggccacctctaaagcatgtgaatggggaaaacagagaccttttcattttgtaaaaattttaaaggaaaaaaaacaagaaagtaggtattacttatacactaaaacacayacacacagtatttgtaaggaactttggttggatccctagagaaatcaaacaatgccagctcataaatcagcctagta

SEQ ID NO: 18149 - DNA, 598 bp, Homo sapiens
atgtggctagtgatggagagaggctgttgcaaagctatgaaagagcagagggtggctgggcatggtggctcacgcctgtaatcccagcactttgggaggctgaggtgggtggatcatgaggtcaggagttcaagaccatcctggccaacatggcgaaaccccgtctctactaaaaacacaaaaaattagccaggcgtggtggcacgcgcctgtagtcccagctactcaggaggccgaggcaggagaattgcttgaacctgggaggcagaggctgcagtaagccaagatggcgccactgcactccagtccagcctggcaactctgtctcaaaccaaagaagaaagaaagaaagagagaaagagagagagagagagagagagagcaagagcgagcagagggcaataaatggaacctaaaccraagtgtggagttacttattgtagataatgcaggttaaaagccagttcacatgccaggtacttctcagaaatcgcaagtctctacagctgatagaaacccagactttcaggccgaataaatgtccttcactcgggttgcatcacaaaaatgaatcttcatctgctcttccacttcctag

SEQ ID NO: 18150 - DNA, 556 bp, Homo sapiens
cccaacagagacaggcaaatcagaaatcaacagcccttgaaaagtgtgcggtgcaacaatgagcaatggggcctgcgacatccccaaatcttgcaccccaagaaagctgtatccccagtcagtccccctcagcactggccgaagacatccggtgcctctagccaccatcaccactgtccaaggcactgtcttctttgggaaggtatctgatttggtcagtcacaaattcttttttagccttccctggagaaaaasaagtccccaagaaaaaattcactctatgtagagaaaaaatattttctctcatgttagtacatgcagaacatttaatattccacaatatatatggttttttattcataagagggtgatggcttttatttgtgccatgcttggtgtgggcttggtttccagaagcgacaggacatggagggatgttgacagtggtgctgtaagcccaccttcatcctgagttccttcactgaaccttatgtttccataataccgtctttacacaaacaacaaaaaattctaaaaacaagatgagaaaaaccta

SEQ ID NO: 18151 - DNA, 2204 bp, Homo sapiens
cagacagtgtctaaaaacaaggatgtggtccaggcaccaggggtaggggcgtgtcacacacaccgtgtcttacaaagaggaaaaataagaggttcccgcaagatgcttgcgactctggtacttttcaaagtaacgcagccaggcagcgggctttcccccggcccctcgctctggatagggctgccatttgcatcctagctgtgatttagacacctccaaccttctagttttcagttacaagagtcccatctccgcccaggtcccaggtctgcatgacgtaatttattgtggcaaccattcctggcgactgcccagaaactcagtgcgtcctgcccggggtttaagcgcgggaagtgggagaggcgggtggcgcccgagcgcagtagcaggggcgtagggcgcagggcgcaggagcgcgggaccaccggcgccggagcgcggcagggagcgctcgcgggggcgcacagcagccaagcccgcggaggaggagcgcgcgcgcgcagcatgggctgtggaccttcccaacctgctgaagaccggagacgtgtacgcgcgcccaagaagggctggaaagaggaattcaaggtaataaacaaacaaacaaacaracaaacaaacagacagaaagccttttgcctgggaggtctcgcgattcccacgcttgggggcgacaagagttggctggagcagggtcggtcgaggctagttaacaggtgggagcaactttattctgccggtgtttaactgctgtcttaaccgggactagacggatgcataaatatcaaaatatatctatctatatcgatagagagtatagatacagatatatggctataagatcaattttgagagcctttggtgtttaaagagattacgaaggtggtcacaccccagggcacaggcaaggaataaccggatgagcagcatgttctgcacagagctagtgttgaccgtgattctcgagggaaggttagagtccgtaggaactgccatatattattggcttctgaaaaataggccctttggtcgtttcttaaagctgggagagatctcagaacctatctggttgcgtcctctcgattcatagatgagaatcatgaggcccagagagataggcgacttgtccgaggctgcacagctaatttgggggcacagcgaaggtagaatttagttttcaagagtttcgttccaatactcttttccctaattcctcaaagttgcatgcactgtaattcttctagagacattatggggaattttttccagagcgagacctagagggatgagttggctgagcagaaatgaggtccatgatttctttgcatccttaccaccctccagattccacagacagcgctagcaaccctcaagggtccacctaagaggggttacaccgaaagataaggctaacatataatttatcatcaaaattatgcttttaagagtgaaaggaaaccctattaatacattttcccaaagaccctggctgaagcacagcaaactgggacttatggccacctttccgaagggtcatttttggagctactgttcaaagagcacacacttggtctcagcaggcactgtgcaagacactattaagtgccagctgcagcacctacttcatgtggggcacatctcttgggctcttggagtacattttgaaacaagcaaaccagaatctagtgaaggctgactccacatttagtacctggtgccctgggggaagcctgtgcccaaatggccacccatcttaacactattttctgctttccatcctgaaactgccactgtctctgtatagggacccattacctttttttttttttttttttttttgagacggagtcttgctctgtcacccaggctggagtgcaatggcacgatctcagctcactgcaacctccatcccccgggttcaagcaattctcctgcctcagcctcctgagtagctgggatgacaggcgtgcgccaccacgcccagctaatttttgtatttttattagagacagagtttcttcatgttggtcaggctggtctcgaactcctgacctcgtgatccacccgccccagcctcccaaagtgctgggattacaggtgtaactcaccgcaccctgctaggacccattaccttttatggggtatttctgcctctcctgacaggatcctaacaagtttctcctccacactgccacctatcttgccaa

SEQ ID NO: 18152 - DNA, 2204 bp, Homo sapiens
cagacagtgtctaaaaacaaggatgtggtccaggcaccaggggtaggggcgtgtcacacacaccgtgtcttacaaagaggaaaaataagaggttcccgcaagatgcttgcgactctggtacttttcaaagtaacgcagccaggcagcgggctttcccccggcccctcgctctggatagggctgccatttgcatcctagctgtgatttagacacctccaaccttctagttttcagttacaagagtcccatctccgcccaggtcccaggtctgcatgacgtaatttattgtggcaaccattcctggcgactgcccagaaactcagtgcgtcctgcccggggtttaagcgcgggaagtgggagaggcgggtggcgcccgagcgcagtagcaggggcgtagggcgcagggcgcaggagcgcgggaccaccggcgccggagcgcggcagggagcgctcgcgggggcgcacagcagccaagcccgcggaggaggagcgcgcgcgcgcagcatgggctgtggaccttcccaacctgctgaagaccggagacgtgtacgcgcgcccaagaagggctggaaagaggaattcaaggtaataaacaaacaaacaaacaaacaracaaacagacagaaagccttttgcctgggaggtctcgcgattcccacgcttgggggcgacaagagttggctggagcagggtcggtcgaggctagttaacaggtgggagcaactttattctgccggtgtttaactgctgtcttaaccgggactagacggatgcataaatatcaaaatatatctatctatatcgatagagagtatagatacagatatatggctataagatcaattttgagagcctttggtgtttaaagagattacgaaggtggtcacaccccagggcacaggcaaggaataaccggatgagcagcatgttctgcacagagctagtgttgaccgtgattctcgagggaaggttagagtccgtaggaactgccatatattattggcttctgaaaaataggccctttggtcgtttcttaaagctgggagagatctcagaacctatctggttgcgtcctctcgattcatagatgagaatcatgaggcccagagagataggcgacttgtccgaggctgcacagctaatttgggggcacagcgaaggtagaatttagttttcaagagtttcgttccaatactcttttccctaattcctcaaagttgcatgcactgtaattcttctagagacattatggggaattttttccagagcgagacctagagggatgagttggctgagcagaaatgaggtccatgatttctttgcatccttaccaccctccagattccacagacagcgctagcaaccctcaagggtccacctaagaggggttacaccgaaagataaggctaacatataatttatcatcaaaattatgcttttaagagtgaaaggaaaccctattaatacattttcccaaagaccctggctgaagcacagcaaactgggacttatggccacctttccgaagggtcatttttggagctactgttcaaagagcacacacttggtctcagcaggcactgtgcaagacactattaagtgccagctgcagcacctacttcatgtggggcacatctcttgggctcttggagtacattttgaaacaagcaaaccagaatctagtgaaggctgactccacatttagtacctggtgccctgggggaagcctgtgcccaaatggccacccatcttaacactattttctgctttccatcctgaaactgccactgtctctgtatagggacccattacctttttttttttttttttttttttgagacggagtcttgctctgtcacccaggctggagtgcaatggcacgatctcagctcactgcaacctccatcccccgggttcaagcaattctcctgcctcagcctcctgagtagctgggatgacaggcgtgcgccaccacgcccagctaatttttgtatttttattagagacagagtttcttcatgttggtcaggctggtctcgaactcctgacctcgtgatccacccgccccagcctcccaaagtgctgggattacaggtgtaactcaccgcaccctgctaggacccattaccttttatggggtatttctgcctctcctgacaggatcctaacaagtttctcctccacactgccacctatcttgccaa

SEQ ID NO: 18153 - DNA, 2204 bp, Homo sapiens
cagacagtgtctaaaaacaaggatgtggtccaggcaccaggggtaggggcgtgtcacacacaccgtgtcttacaaagaggaaaaataagaggttcccgcaagatgcttgcgactctggtacttttcaaagtaacgcagccaggcagcgggctttcccccggcccctcgctctggatagggctgccatttgcatcctagctgtgatttagacacctccaaccttctagttttcagttacaagagtcccatctccgcccaggtcccaggtctgcatgacgtaatttattgtggcaaccattcctggcgactgcccagaaactcagtgcgtcctgcccggggtttaagcgcgggaagtgggagaggcgggtggcgcccgagcgcagtagcaggggcgtagggcgcagggcgcaggagcgcgggaccaccggcgccggagcgcggcagggagcgctcgcgggggcgcacagcagccaagcccgcggaggaggagcgcgcgcgcgcagcatgggctgtggaccttcccaacctgctgaagaccggagacgtgtacgcgcgcccaagaagggctggaaagaggaattcaaggtaataaacaaacaaacaaacaaacaaacaaacagacagaaagccttttgcctgggaggtctcgcgattcccacgcttgggggcgacaagagttggctggagcagggtcggtcgaggctagttaacaggtgggagcaactttattctgccggtgtttaactgctgtcttaaccgggactagacggatgsataaatatcaaaatatatctatctatatcgatagagagtatagatacagatatatggctataagatcaattttgagagcctttggtgtttaaagagattacgaaggtggtcacaccccagggcacaggcaaggaataaccggatgagcagcatgttctgcacagagctagtgttgaccgtgattctcgagggaaggttagagtccgtaggaactgccatatattattggcttctgaaaaataggccctttggtcgtttcttaaagctgggagagatctcagaacctatctggttgcgtcctctcgattcatagatgagaatcatgaggcccagagagataggcgacttgtccgaggctgcacagctaatttgggggcacagcgaaggtagaatttagttttcaagagtttcgttccaatactcttttccctaattcctcaaagttgcatgcactgtaattcttctagagacattatggggaattttttccagagcgagacctagagggatgagttggctgagcagaaatgaggtccatgatttctttgcatccttaccaccctccagattccacagacagcgctagcaaccctcaagggtccacctaagaggggttacaccgaaagataaggctaacatataatttatcatcaaaattatgcttttaagagtgaaaggaaaccctattaatacattttcccaaagaccctggctgaagcacagcaaactgggacttatggccacctttccgaagggtcatttttggagctactgttcaaagagcacacacttggtctcagcaggcactgtgcaagacactattaagtgccagctgcagcacctacttcatgtggggcacatctcttgggctcttggagtacattttgaaacaagcaaaccagaatctagtgaaggctgactccacatttagtacctggtgccctgggggaagcctgtgcccaaatggccacccatcttaacactattttctgctttccatcctgaaactgccactgtctctgtatagggacccattacctttttttttttttttttttttttgagacggagtcttgctctgtcacccaggctggagtgcaatggcacgatctcagctcactgcaacctccatcccccgggttcaagcaattctcctgcctcagcctcctgagtagctgggatgacaggcgtgcgccaccacgcccagctaatttttgtatttttattagagacagagtttcttcatgttggtcaggctggtctcgaactcctgacctcgtgatccacccgccccagcctcccaaagtgctgggattacaggtgtaactcaccgcaccctgctaggacccattaccttttatggggtatttctgcctctcctgacaggatcctaacaagtttctcctccacactgccacctatcttgccaa

SEQ ID NO: 18154 - DNA, 2204 bp, Homo sapiens
cagacagtgtctaaaaacaaggatgtggtccaggcaccaggggtaggggcgtgtcacacacaccgtgtcttacaaagaggaaaaataagaggttcccgcaagatgcttgcgactctggtacttttcaaagtaacgcagccaggcagcgggctttcccccggcccctcgctctggatagggctgccatttgcatcctagctgtgatttagacacctccaaccttctagttttcagttacaagagtcccatctccgcccaggtcccaggtctgcatgacgtaatttattgtggcaaccattcctggcgactgcccagaaactcagtgcgtcctgcccggggtttaagcgcgggaagtgggagaggcgggtggcgcccgagcgcagtagcaggggcgtagggcgcagggcgcaggagcgcgggaccaccggcgccggagcgcggcagggagcgctcgcgggggcgcacagcagccaagcccgcggaggaggagcgcgcgcgcgcagcatgggctgtggaccttcccaacctgctgaagaccggagacgtgtacgcgcgcccaagaagggctggaaagaggaattcaaggtaataaacaaacaaacaaacaaacaaacaaacagacagaaagccttttgcctgggaggtctcgcgattcccacgcttgggggcgacaagagttggctggagcagggtcggtcgaggctagttaacaggtgggagcaactttattctgccggtgtttaactgctgtcttaaccgggactagacggatgcataaatatcaaaatatatctatctatatcgatagagagtatagatacagatatatggctataagatcaattttgagagcctttggtgtttaaagagattrcgaaggtggtcacaccccagggcacaggcaaggaataaccggatgagcagcatgttctgcacagagctagtgttgaccgtgattctcgagggaaggttagagtccgtaggaactgccatatattattggcttctgaaaaataggccctttggtcgtttcttaaagctgggagagatctcagaacctatctggttgcgtcctctcgattcatagatgagaatcatgaggcccagagagataggcgacttgtccgaggctgcacagctaatttgggggcacagcgaaggtagaatttagttttcaagagtttcgttccaatactcttttccctaattcctcaaagttgcatgcactgtaattcttctagagacattatggggaattttttccagagcgagacctagagggatgagttggctgagcagaaatgaggtccatgatttctttgcatccttaccaccctccagattccacagacagcgctagcaaccctcaagggtccacctaagaggggttacaccgaaagataaggctaacatataatttatcatcaaaattatgcttttaagagtgaaaggaaaccctattaatacattttcccaaagaccctggctgaagcacagcaaactgggacttatggccacctttccgaagggtcatttttggagctactgttcaaagagcacacacttggtctcagcaggcactgtgcaagacactattaagtgccagctgcagcacctacttcatgtggggcacatctcttgggctcttggagtacattttgaaacaagcaaaccagaatctagtgaaggctgactccacatttagtacctggtgccctgggggaagcctgtgcccaaatggccacccatcttaacactattttctgctttccatcctgaaactgccactgtctctgtatagggacccattacctttttttttttttttttttttttgagacggagtcttgctctgtcacccaggctggagtgcaatggcacgatctcagctcactgcaacctccatcccccgggttcaagcaattctcctgcctcagcctcctgagtagctgggatgacaggcgtgcgccaccacgcccagctaatttttgtatttttattagagacagagtttcttcatgttggtcaggctggtctcgaactcctgacctcgtgatccacccgccccagcctcccaaagtgctgggattacaggtgtaactcaccgcaccctgctaggacccattaccttttatggggtatttctgcctctcctgacaggatcctaacaagtttctcctccacactgccacctatcttgccaa

SEQ ID NO: 18155 - DNA, 2076 bp, Homo sapiens
attcctgctttttttctgyctatgctactttggcaagtatagtgcataaaagacataaggaagattgggaaaatcatggatgatctttctacttaaatgaaattgtatccaaaaccaaaaaacaaaaacaagagtgagagatagaactttttctatgggtttcccactgtggaaatctccctacagacacttcatgtgttctctgattatttggctggttggattattttctctctcttctggctgtttgctaactgaggttttcattacagaggccctctatcgtccgggtaccaattcctgattaataaaaagataccatctcttgacatggtaccctccaggtttgattgacgctgctttgagctttgagcatgcatcggttatgtgaccccgggcctcttgtttgctcaactgttttcattttgtggtatagaaactttacatgtccagccactactaagcagaaacacaaagaagcaattatctgttcaattgatgtttcccagatgcaagttatttaatgcttttattaacccttagagtggcatgttattcagtctccacaccaggtgaatattcggtaggaaacgcagctcctatacacacaatattgtcatttaaaattaaaggaaaaaattaaaatgtctctccagccaaacaagccctttttcagcatttttacatattatgaaatataaatctaaggcaacttttaggttgtttacagagaataaaaagttatctttaaatctagggcttaaaatgaataattagaggtaaatctagttggcttaatcaaaataactgctataggaattacatataattagcgtccaaataaaatccttagcctactctatacaggaaagtaatataaatattagataggaaaatatcaattctctctcttatgtcttctcaagatcacatttaaacccttgatctttcttgtcatttcaagcacaagccaaaatacaagccaaaacacaagcaaatcatgaattttaaatcttgattccaaaagccactctcctagtctggttggaaaaataacaaagctatgttctgtattttatcactgcacatttaggccacaatcattcaagtgttttgccaacaatgagcacagcacaaggtaccagaaggcaatgggtagacaacctttcgacagcttattccagcacagactcacgcaaaacaaaatgctgccagagccaagtcccctttcggcttcttcctggctttgtacaatcttattcctcacttaatttctccatcctgttcccttctctctgcccctagtagcccctgtgactcacgtaagcctttctcaggccagcaggcacgtgggagcctcacccggcctggggccagcagatgaaccaggagtgtgacccaggtcccagcagtaaccagaggtgacagggcaagggctacagtttaagcactttgaagatgagacttctgaccacatggagagaaaataagcaccaacttataccctttgcacagggtacagtagagccaccaaatcgcagtcaggagccaggacctcttcactggatgctgtcctcactcatatcgccccacaccgggtcatggcggtctttgtgcatcactttccacctctttcctttatctttgtcctattccaccattgcttctgcttccttccccaagactgatcatgtatgtcccaactgaaaaagaaaaatctcttttctgaaccctgcatcagtctctaccagcggtcctcacacagggcaatgcccttcccacccccaccagaggacatttagcaacatctggagacctttacgtttgtcaccgctaggggaggggttgccactgtcatggggtgtccaggccagggatgctgccaaacctcctacaaggcacaagacagccttccctccccaacaacaaagaattgtgtggcccaacctgcccatagtgctgagggagcaactctgctttggacaccactcgctaaacttcccaactgaactccctgcgtgttgtctacacttagtggtttgcgctttctccctcccaactcacgctgaaccgcaa

SEQ ID NO: 18156 - DNA, 2076 bp, Homo sapiens
attcctgctttttttctgcctatgctactttggcaagtatagtgcataaaagacataaggaagattgggaaaatcatggatgatctttctacttaaatgaaattgtatccaaaaccaaaaaacaaaaacaagagtgagagatagaactttttctatgggtttcccactgtggaaatctccctacagacacttcatgtgttctytgattatttggctggttggattattttctctctcttctggctgtttgctaactgaggttttcattacagaggccctctatcgtccgggtaccaattcctgattaataaaaagataccatctcttgacatggtaccctccaggtttgattgacgctgctttgagctttgagcatgcatcggttatgtgaccccgggcctcttgtttgctcaactgttttcattttgtggtatagaaactttacatgtccagccactactaagcagaaacacaaagaagcaattatctgttcaattgatgtttcccagatgcaagttatttaatgcttttattaacccttagagtggcatgttattcagtctccacaccaggtgaatattcggtaggaaacgcagctcctatacacacaatattgtcatttaaaattaaaggaaaaaattaaaatgtctctccagccaaacaagccctttttcagcatttttacatattatgaaatataaatctaaggcaacttttaggttgtttacagagaataaaaagttatctttaaatctagggcttaaaatgaataattagaggtaaatctagttggcttaatcaaaataactgctataggaattacatataattagcgtccaaataaaatccttagcctactctatacaggaaagtaatataaatattagataggaaaatatcaattctctctcttatgtcttctcaagatcacatttaaacccttgatctttcttgtcatttcaagcacaagccaaaatacaagccaaaacacaagcaaatcatgaattttaaatcttgattccaaaagccactctcctagtctggttggaaaaataacaaagctatgttctgtattttatcactgcacatttaggccacaatcattcaagtgttttgccaacaatgagcacagcacaaggtaccagaaggcaatgggtagacaacctttcgacagcttattccagcacagactcacgcaaaacaaaatgctgccagagccaagtcccctttcggcttcttcctggctttgtacaatcttattcctcacttaatttctccatcctgttcccttctctctgcccctagtagcccctgtgactcacgtaagcctttctcaggccagcaggcacgtgggagcctcacccggcctggggccagcagatgaaccaggagtgtgacccaggtcccagcagtaaccagaggtgacagggcaagggctacagtttaagcactttgaagatgagacttctgaccacatggagagaaaataagcaccaacttataccctttgcacagggtacagtagagccaccaaatcgcagtcaggagccaggacctcttcactggatgctgtcctcactcatatcgccccacaccgggtcatggcggtctttgtgcatcactttccacctctttcctttatctttgtcctattccaccattgcttctgcttccttccccaagactgatcatgtatgtcccaactgaaaaagaaaaatctcttttctgaaccctgcatcagtctctaccagcggtcctcacacagggcaatgcccttcccacccccaccagaggacatttagcaacatctggagacctttacgtttgtcaccgctaggggaggggttgccactgtcatggggtgtccaggccagggatgctgccaaacctcctacaaggcacaagacagccttccctccccaacaacaaagaattgtgtggcccaacctgcccatagtgctgagggagcaactctgctttggacaccactcgctaaacttcccaactgaactccctgcgtgttgtctacacttagtggtttgcgctttctccctcccaactcacgctgaaccgcaa

SEQ ID NO: 18157 - DNA, 581 bp, Homo sapiens
cccctgcagtctgcagttatttatttcagccttcagtattcatcctgttttggtgaaccacrgcaatgatggaagtgggtataaataaatgtaagttcactaaaacgattaaaagaaactcataagctccaactggatgtcaaaggaggctttttgaaagtttggaaatgaatttttgaaaaagtttggaaatcccagatcagatctggaagctcttaactgagactctgttctttttctaacattctgtgtcatttttaggtcaaatagcttttgggggatataaaaaacttagggcatctggctgggcacagtggctcacgcctgtaatcccagcactttgggaggccaagggggaggatcacttgaggtcaggagtttgagaccagcctggtcaacatggcgaaactctgtctctattaaaaatacaaaaatattagctgggcatggtggcacagcctgtggtcccagctactcaggaggctgaggcaggagaatcacttgaacctgggaggctgggttgcagtgagtcaagatcgcaccaccgcactccagcttgggcgacagagtgagactctatc

SEQ ID NO: 18158 - DNA, 518 bp, Homo sapiens
gatataaatccaagtggagggagaagttttctccttcatgtccccttcccaaacaacctagcttagttcatcagcttctgttgacattatttataaatgctaatgaactcataagtgctaattaataactccatgtgctgctatttactagcaaatataggaatccaggtgcagtatagacctgtccccaaatacagtacatttcttcatctctgagccaagtagcatgtctgggatgactctgttccaatactgccgaagtcagtgccatacacacttaaaaaatacacccaggagctacacttaaactctcacaacagcatcatcttcttattacccacttagataagaaaccagggtcaagtccagctgtattagtcagrgttctccagagaaacagaaccaataggatatatatatatagctctatagaatgagatttgttatgaggctgagaagtcccgcaatctgctgtctgcaagctggaggcacaagaaagctggtggtgcagttccatt

SEQ ID NO: 18159 - DNA, 324 bp, Homo sapiens
aggatccatacaaatcaggctgacctgctaatagaggaagaaccccatctgcatgggaggatagctacagctgttatccaaggaagacacacctagggccagccagacmagaagtcaccacttactgattcagcccaggctcctcacacacattatgtccacacttacagccatccctgaggctggagttaccatcctatttttcagatgaggaaactgaggcttcagtaagatgtggcccattaatacaagcctgaacactctggcttgatttgttagaacaaagggaaacccagtgtttgttaaagaaagaaagtgacattc

SEQ ID NO: 18160 - DNA, 653 bp, Homo sapiens
atccaagtcgcctattcttaaaagaagttgaccgcttattgttttgtggyctgtggacactagcaaagtagtttgtcctgaacacttaggatcagttggactcatgtcacagcatcttagacctgaccagtgatcccagagtggggtaggcctttcttggtgctctttgatggatattgatgttggcaagtgcttcactcaccagctcatgcatgtggatcccaagattctagggatatagcaatccctttatggatgcaagttcatccttaagagaaactctaggcctcacacatatgtttacaaattattcgacattgccagaagtttcacattgagtgaacttgaagtgcaaatcattccaatcttgttgcagctgtcatgttttccctgtaactgggattgtgagacacaatgagtatctgggttgtcagcaatcagggagaggaaatgccatggctggtttatttagtgtagtgtatttgctggtttaattttagttgagatgaatatgcataagggctttcgtagcttcattcattattttggtcccttttcacacaagatcttctgttcttcaaccgtgaattctattaataaagagtttctaagagatgtaaccatcatggtcagagagggaataatgtacaaat

SEQ ID NO: 18161 - DNA, 605 bp, Homo sapiens
ttttaccacaatttttttaaaaagtaaagcagaagctcagaagcgcagttagtgttgcagcacctgagggctttgggagttccacagacctagatctgagtccctgctttgccactcagtagtagtgagtgaacttggtgaagtcaactagccacctgtggcctcgtcaataaaatggggctaccccacatggttgttggaaggattaaatgagatagtgtaggtgatgcccttgtcacagagcctggcacctggtgagtgctcagtaaatgctggctgggattaggaagcagaatgcaaagtggttaaaccacctggaattggaccacttaatgatgaatcctggcaatttacttctcaccatcagaaggaytgggcaaattacttgacctctctgtgccccaactgtctcatttgcaaagtagacaaaatgataggcccacctcagagcattgttataaggattacagcatttccattaatgaacacatgcattaacatgtgaagtgctcaaaaacgtgcctagcaagcattatttaaatattcacttttattgttaggagcaattctgaggtaatagacaaaaatgatcaaatagtcttatc

SEQ ID NO: 18162 - DNA, 577 bp, Homo sapiens
ctttgaccgtgggtaagttgcttggggctgacaataaatgcagaacagataattctgctaagatgactgctaccctagtggctatggcagtggttatgaatacagactcaggagtactgtactcagaaagcaacctctcccagtgtgttcttcctgagkgtagaagatcactttgtcttgtatttggccaagtgcagtttccttctcctccctctaaacctctaaatgcaggagtgcttaaatctcagtctttgggcatctcctctacctatactcattttcaaggtgaactcatctaggcccatagctcaaatgccatccacatacaatgactcccaaattctatctccaactttatcctctcccccagctccagactctatctctatcttaacctctccacttgggcatctgataggactctgacgtgtcacatgatttaagacatctggaatagaaatcttgctttccgctcctcacctgctcttctcccagtctttctcaaccctgtaaaagacaccacccttcacccagctggctcaagtcgaaagtctacaagtcagccctaactcctctc

SEQ ID NO: 18163 - DNA, 552 bp, Homo sapiens
tcagggaagtgagaggaaataagtatgggacattgaaggccacccaaggagcattacagcagtctcatctctagaatgacaggagttccacagttgttagcggtgccaggagaacatcgggaaagaagccagagcctactggggaactaactagacagcatgcatcagccaggccagggatgaagaatgtgtccttgagattaatgtttcacagctgtgatgtagacctagctacaggcatagtcgatggattttgcagcaggagacagatgagaaattatagcatccaaaagagcctgttacaccaaatcaatgataaacgtacatccatgagacaattggtggtgaaaaaaaaagatagcatcccttagctctgatttttcccttcatccaaattttgcaacagtttgttttktttttgtttttttttttgccttttagctttctaggaacactttattcagctgaaaagaacagcaaggcaccacttcagttattttcacaagttgtaacaaaggacgtgacaacggcacccttaattaatctttgtcc

SEQ ID NO: 18164 - DNA, 606 bp, Homo sapiens
cttgatcaaaaaagcatcaattaaatgatgccccaaatatgagagatacttagtttctaatcaggcatattaaaagagagatagaatataggtatatttagatatacttaattatgtcaataaaattagacaatacaagtataaaagttctataacaatgatatattttcagaaatcacatattcataagacatttgaggtataatatgtagacaaagaaaaaaattaaccaaatttgtattaggtgaatttggaatattagtcaatgttacagaaatcattacatttactgaaaatgcagtcttctgataaaacaatatcacttccgtaggaaaaagcctatagaaatcaatctaatctaatttaatttgcaattctgaacaggaaaatagtaaaatcaaaggagatgccctgtgtgtatgggcatgccactgtttctgctgtgtgagacagacacattaatggcacaccctttgggtaacacataatattttttaaaayatgctacatgaaagtgaaatagcactaaatgacctggccatcataatattagaatttatctgtttttcacaaaaccctgtactgataatgtactttaaaaatgac

SEQ ID NO: 18165 - DNA, 606 bp, Homo sapiens
cttgatcaaaaaagcatcaattaaatgatgccccaaatatgagagatacttagtttctaatcaggcatattaaaagagagatagaatataggtatatttagatatacttaattatgtcaataaaattagacaatacaagtataaaagttctataacaatgatatattttcagaaatcacatattcataagacatttgaggtataatatgtagacaaagaaaaaaattaaccaaatttgtattaggtgaatttggaatattagtcaatgttacagaaatcattacatttactgaaaatgcagtcttctgataaaacaatatcacttccgtaggaaaaagcctatagaaatcaatctaatctaatttaatttgcaattctgaacaggaaaatagtaaaatcaaaggagatgccctgtgtgtatgggcatgccactgtttctgctgtgtgagacagacacattaatggcacaccctttgggtaacacataatattttttaaaatatgctacatgaaagtgaaatagcactaaatgacctggccatcataatatyagaatttatctgtttttcacaaaaccctgtactgataatgtactttaaaaatgac

SEQ ID NO: 18166 - DNA, 1654 bp, Homo sapiens
tatcaaatctatgcttctccctgaaatttttttttctgtttcttcattcaaagctgttaacaggtttttgtttctttgtttgatttaggaagtttccaagattgaagaaggagggagagagggctatggaagtcacaggttggaggtggtgcccagagcctggaataaacatttaccctagtgttcatcagagagtgaatgaggcctgggaatccaagacttgccaaagattattctgcctggaacaggtcaaaatacagcaaaggatatgaagggacactacaagatgggaaaatgggtgcctcattgttaactgatgtggacagatgatgggtaaccacataatcttctctacgtcatttttgatactaccaaaaattctgggttcttggcatcatagcaaaactcagatgtagagagaagccccacaattagatgaagtaaaattttcctacttgaagttgaatttcactgaagtgaaatcaggtcacagagtctaaaattaagttgatctaggaaaactgaaaaaaagagtatttattccacagttgaagtgtagaaaggaattaatctatgctataatagtaatagttaaaatttattgaacttttactatatgacaagaactttgataatatgtttatttgcattgactagttcatttaattctgacagaactttttaatatacttatacatcacttaacaatgaagacacattcttagaaatgcacttttaggtaattgtgcccttgtgtgaacatcatagagtgtacatacacaaacctagatgatattgatagcaacaagaaacagacaaggcagacatggatgggtccctggtgaaactcaaccttcaagccaagaacagtctaaagcctgaaaaccaagcaacagttacagatagaattcacggaccagaatgagaacttccatttccatcttacctactctctctctattggttctttctgaatgatgccttttagccaatcaaatgctcccttttccaagcccacccataaatcaatcagcatgcgttccccccattctaagttcataaaaccctggattcagcctcatagacggctacgctctttggggtcccctcttgctgttgagagcttttctttcattcagtaaattctactctgccttaccctgcctccagtgtccacgtaccttattactcttggccacgggacaagaacccataactcactgaactatgggagcaaaagagctgtaacattcctgttcactgagccgtgggcaggaagagtaaaagagctgtaacactccttcccaccaaactatgagagtcaaaaagccacaacaatatagcctamtacacatctaggctatatgtatagcttattgctcctaggtgacaaacctatacagcatgttactatactgaacactataggcagttgtaacacaatgtttaattttttttatctaactatatctaaacacagaagaggtacagtaaaaatatagtattataatcttatgggaccaccacagtatatatggctcattcttactcagaatgtcattatgcaatacatgactctagttaccattataatttccatttcacaaatgagaaatatgaagcatagttaagataaatgcctaagatctatcca

SEQ ID NO: 18167 - DNA, 650 bp, Homo sapiens
ctctcattaacatcatttattttccctgtataattttttcattaccttagtaaagaaatagggttaggcaaagcgttctgcttctcttctctactagaaaagatccaagtccttctccattcattaaacatggtcacatgtctcatatatacatacaaatatatacatgtaaactttcactgtgagaattcttatccattgatttgtagatcacaaggaacttgttgagcaatgacagctgctgcttttcaatgcactggcatggttgggagggggctggggattttgccttttggcacacaagtcaataaacacaytggagattaacagcaaagagataagaagcttgggtgtggggaggactagaatgatggtttaggggaaaaggaaaaaggagggaatttcaggaaaaggaatcgaaattatagatcaaatgaccagataacaaaaagaaggggagagattcaataaggttggaggaaagatttagagagaaaacaagattggaggaaggaaagtggagtggttaaggataagaaagaaattaggaacagaggcaaagagagaagaaaaaggtggcaaccagctggtcatccacttgagaaagaaagcatgaaggaaaatatttaagaataagtaaatacagttga

SEQ ID NO: 18168 - DNA, 527 bp, Homo sapiens
gatgaaaacataaaagaatgtgcatctatcatttggaaaatgtatttaaatagccaaactattagtttccacacaactttaatataaataaagagaaaattcaatacactgttccagtttcatgtttcaagtcatattttagaatgcagcatgtatcattttaagttagatcaggtcagtacacaaaggagaaccgccaaatcaggcaggaaaagcttcccagaggtgggaaaagcacgtgacctggtaaaataagaaaagttctggaggcacaggaagcagcccatgtgacggtgtgaaggtataaacacaacaaagaagtgaatgtgagctgtaaaaagatgaatccaaagtataaaggtgaaacaagttcatctcataaatgagaaagggcgaagagtcaaagagaaggcttaaccctcatacctgttctagaaaacaccatgtgcccagaaactgaatcaaaggcaatgaraatatttatgacaaaacacattatacaatgagtttgaggaattataaaaaga

SEQ ID NO: 18169 - DNA, 559 bp, Homo sapiens
tcctaggcttttgttctgccagaaccactcggggacagtttttcttttcaatcatttcattctgaatccattaacttttttctatatttctcaatgtacaaaatgattgataggagagagatgaaagagagacctatttcactgcaattgttgagcagctgaaggagatttctatctcatctggagaagaaggaggaggagggggaaaggaaaggcaaaatgagcctggaccttctcttcgtccacttaaataagaatttctgacttggttaatccacaaatgtttcctgagcacctacaatgcaccagttgatatgtaggtgccagagagtagacagtaaattttaaggcgctggtgtcacccacaaatgactaaggacctgcacactggtggccacagctcaaggctaaggaatctcctgggtacgctcacttctgcttatgatggacattctaggtaatcttcacaatgatgtgtgagctggaaagaatggtaggattatagcaggacyacctgctctatgagacttatggctcgttgggaaccaggtcttattcg

SEQ ID NO: 18170 - DNA, 558 bp, Homo sapiens
caccccaccccaccccaccccaccgcagcccacgtaagctggagtggaagtgtgcgatcacagcccacgttaacctctccctcccgggcttaagagatccctgtagtcccagctatttgggaggctgaggtcaccagagcscagagacagaagaccaggcgggccggccccaaaagaaaagaaaataaataaacgaaaattattaataaataatgaatgaaggaagggaggaaggatatacatacacgtgtatgtaaatgaaatggggcttcgatacatattcatccattaaaagtaacataatataaacgtattaattatggaaatatcatttacatagttttatcactacggggggtgtgtgtgtgtgtgtgtgtgtgtgtgtgtgtgtgtgtgtgtgtgtagatgtatgttcatacacggcagcgttcagaaaataagattgaaaaaaggaaggaatcggccgggcatggtggctcacatctgtactcccagcagtctttgggaggccgaggcgggcggatcactaggtcgggagttcgagaccagcccggccaa

SEQ ID NO: 18171 - DNA, 1095 bp, Homo sapiens
taaaaagcatctgttgaaggccagccttcagaagtgtatgtctttctctgtgtaaggcaggagagttgaatttttttttttaaagctacaatgtgatagtcaaatccaagtgccataatgtttgcttgttcaaggtattcaggaagggtggaggatggaccaagtcactgcctggtagtaatcatgagccatcaaaaaggaggagtaggggggcggacgcggtggctcacgcctattatcctagcactttgggatgccgaggtgagcagatcaggtcaggagttcgagaccagcstggccaacacggtgaaaccccgtctctactaaagttacaaaaattagccaggcgtgatggtggacgcctgtaatctcagcaactcgggaggctaaggcaggacaatcatttgaacctggaaggcagaggttgcagtgagccgagatcgcgccattgctctccagcctgggcgacaatagcaaaaaactacgtctcaaaaaaaaaaaaaaaaaaaaaaaaaaaattttaggaaggaggaactttgggtgggccttaaaggttgagtgacatctgccatgtggaggggcagggaatgcttttcaggccgagggtttccagagaaaaggcagaattcttctggaaacagcttggctataattttgaatctacaagaaggactaggaggtgaagataaagtgcttcagggccttaaatgttatgctgagcatatacttcattccaatatccatcaagtgctactatttgtattttaagattcctattcttactatcagaaaaggaatctctgatatttagatgaactttatagaatgcaaattataaaactgaatctgacccaagttttatagatccttttaattcaaaggagagaagcatcttttcttcattcgtgcagtaaacctttatgaagcccttgcaatgggtaggaattattctcagagctgtaggggatggatggccaaggcatagtgcctagtacataataggagtgaaacagatatttcaataaataaatcaatgaatgatgggacaactttggcgaccaaaaaagttttagacattgggtttggtggtaatgc

SEQ ID NO: 18172 - DNA, 1095 bp, Homo sapiens
taaaaagcatctgttgaaggccagccttcagaagtgtatgtctttctctgtgtaaggcaggagagttgaatttttttttttaaagctacaatgtgatagtcaaatccaagtgccataatgtttgcttgttcaaggtattcaggaagggtggaggatggaccaagtcactgcctggtagtaatcatgagccatcaaaaaggaggagtaggggggcggacgcggtggctcacgcctattatcctagcactttgggatgccgaggtgagcagatcaggtcaggagttcgagaccagcgtggccaacacggtgaaaccccgtytctactaaagttacaaaaattagccaggcgtgatggtggacgcctgtaatctcagcaactcgggaggctaaggcaggacaatcatttgaacctggaaggcagaggttgcagtgagccgagatcgcgccattgctctccagcctgggcgacaatagcaaaaaactacgtctcaaaaaaaaaaaaaaaaaaaaaaaaaaaattttaggaaggaggaactttgggtgggccttaaaggttgagtgacatctgccatgtggaggggcagggaatgcttttcaggccgagggtttccagagaaaaggcagaattcttctggaaacagcttggctataattttgaatctacaagaaggactaggaggtgaagataaagtgcttcagggccttaaatgttatgctgagcatatacttcattccaatatccatcaagtgctactatttgtattttaagattcctattcttactatcagaaaaggaatctctgatatttagatgaactttatagaatgcaaattataaaactgaatctgacccaagttttatagatccttttaattcaaaggagagaagcatcttttcttcattcgtgcagtaaacctttatgaagcccttgcaatgggtaggaattattctcagagctgtaggggatggatggccaaggcatagtgcctagtacataataggagtgaaacagatatttcaataaataaatcaatgaatgatgggacaactttggcgaccaaaaaagttttagacattgggtttggtggtaatgc

SEQ ID NO: 18173 - DNA, 1095 bp, Homo sapiens
taaaaagcatctgttgaaggccagccttcagaagtgtatgtctttctctgtgtaaggcaggagagttgaatttttttttttaaagctacaatgtgatagtcaaatccaagtgccataatgtttgcttgttcaaggtattcaggaagggtggaggatggaccaagtcactgcctggtagtaatcatgagccatcaaaaaggaggagtaggggggcggacgcggtggctcacgcctattatcctagcactttgggatgccgaggtgagcagatcaggtcaggagttcgagaccagcgtggccaacacggtgaaaccccgtctctactaaagttacaaaaattagccaggcgtgatggtggacgcctgtaatctcagcaactcgggaggctaaggcaggacaatcatttgaacctggaaggcagaggttgcagtgagccgagatcgcgccattgctctccagcctgggcgayaatagcaaaaaactacgtctcaaaaaaaaaaaaaaaaaaaaaaaaaaaattttaggaaggaggaactttgggtgggccttaaaggttgagtgacatctgccatgtggaggggcagggaatgcttttcaggccgagggtttccagagaaaaggcagaattcttctggaaacagcttggctataattttgaatctacaagaaggactaggaggtgaagataaagtgcttcagggccttaaatgttatgctgagcatatacttcattccaatatccatcaagtgctactatttgtattttaagattcctattcttactatcagaaaaggaatctctgatatttagatgaactttatagaatgcaaattataaaactgaatctgacccaagttttatagatccttttaattcaaaggagagaagcatcttttcttcattcgtgcagtaaacctttatgaagcccttgcaatgggtaggaattattctcagagctgtaggggatggatggccaaggcatagtgcctagtacataataggagtgaaacagatatttcaataaataaatcaatgaatgatgggacaactttggcgaccaaaaaagttttagacattgggtttggtggtaatgc

SEQ ID NO: 18174 - DNA, 1150 bp, Homo sapiens
aattttaaaagtggatgtcagtaatgtagtaaggtatagtgtaagtatattgatattatatttccaaaaaaataaaattattgttaaaagataccattcaggccgggcgtggtgactcacacctgtaatcccagcacttagggaggccaaggccagtggatcatgaggtcaggagatcgagaccatcctggccaacatggtgaaacccatctctactaaaaatacaaaaactagccaggcatggtggcatgcgcctgtggtcccagctactcaggaggctgaggcaggagaatcgcttgaacctgggaggcagaggttgcagtgagccaagatcgcaccactgcactccagcctgggtgacagagtgagactctgtctcaaaaaaaaaaaaaaaaatgcccttcaaagcagtaagattagaaattataaaagaataaatttaagaattgcatggagattataaagccataaagacactgaaagaaccaaaaaaatttaaatatatgcctagacatatatgtaattcaaggaaaaaattcaatattctaactatgtaaattcttccccaatttctcagtaaacgtagtactagttatcacaataagatttatttttatattactctccataaaatatgaaaaacattccaaaatatttagccagaaaaagagtgtataacacaaaaaataaagtgtaagagaggaggacatattcttcaaagtgttaaaagtatattgtcaaactgtagtaattaatatattatgagactgataccagaatagattagcagcagatcragggaaaagaataaaacgttcagaaatggcttgaaacacattttagaaatttggacataataataaagcatcagatcagtaggggtaactagtatggaacaaatcactaattatttgaataacattaaattagatttctatgttacatctcacaaaaataaatttctgacaacatacttttttatatttagccacttaaaattttctaaaatttggttgcttttgtagggtacattgtagcttctattttctgtccctattcctattttctacaataagctctattctattgagttatctactcgatccccacctccagggtgactattaattagctggatccaaagagtaca

SEQ ID NO: 18175 - DNA, 1150 bp, Homo sapiens
aattttaaaagtggatgtcagtaatgtagtaaggtatagtgtaagtatattgatattatatttccaaaaaaataaaattattgttaaaagataccattcaggccgggcgtggtgactcacacctgtaatcccagcacttagggaggccaaggccagtggatcatgaggtcaggagatcgagaccatcctggccaacatggtgaaacccatctctactaaaaatacaaaaactagccaggcatggtggcatgcgcctgtggtcccagctactcaggaggctgaggcaggagaatcgcttgaacctgggaggcagaggttgcagtgagccaagatcgcaccactgcactccagcctgggtgacagagtgagactctgtctcaaaaaaaaaaaaaaaaatgcccttcaaagcagtaagattagaaattataaaagaataaatttaagaattgcatggagattataaagccataaagacactgaaagaaccaaaaaaatttaaatatatgcctagacatatatgtaattcaaggaaaaaattcaatattctaactatgtaaattcttccccaatttctcagtaaacgtagtactagttatcacaataagatttatttttatattactctccataaaatatgaaaaacattccaaaatatttagccagaaaaagagtgtataacacaaaaaataaagtgtaagagaggaggacatattcttcaaagtgttaaaagtatattgtcaaactgtagtaattaatatattatgagactgataccagaatagattagcagcagatcgagggaaaagaataaaaygttcagaaatggcttgaaacacattttagaaatttggacataataataaagcatcagatcagtaggggtaactagtatggaacaaatcactaattatttgaataacattaaattagatttctatgttacatctcacaaaaataaatttctgacaacatacttttttatatttagccacttaaaattttctaaaatttggttgcttttgtagggtacattgtagcttctattttctgtccctattcctattttctacaataagctctattctattgagttatctactcgatccccacctccagggtgactattaattagctggatccaaagagtaca

SEQ ID NO: 18176 - DNA, 535 bp, Homo sapiens
cctatggatttccctttgtataagagttaaaaacactctccccacaagacgaacaaacaatgcttgtttaagaaatagcagaataaacaaaaagttggacaagggcaatccacttcataaacaacctagaaagaaaagaacctcccccaagamagcaagcagtagtaactggtattaggccacacctctttgaaaacgaatgcaaaaagggtaaacatgctccataacaaattccccaacctctctgcatccccaaggtactgaaaccaagtgtgttatgcagattattaatagttaagatcacctgactttacaataagataaaacatcttacttgttgcgccaaggcgacgtgtgtctctggcaatataatttgcaaagataatagacctcatgctggtcttaccagacccacttttacccatcaacagcacctaaggacaaagtagggaaaaggaaaggaaaaaagttagcaatctagagcaaatcaagtctaaagggatctatttctctcctggatttgatattttcctga

SEQ ID NO: 18177 - DNA, 535 bp, Homo sapiens
cctatggatttccctttgtataagagttaaaaacactctccccacaagacgaacaaacaatgcttgtttaagaaatagcagaataaacaaaaagttggacaagggcaatccacttcataaacaacctagaaagaaaagaacctcccccaagacagcaagcagtagtaactggtattaggccacacctctttgaaaacgaatgcaaaaagggtaaacatgctccataacaaatyccccaacctctctgcatccccaaggtactgaaaccaagtgtgttatgcagattattaatagttaagatcacctgactttacaataagataaaacatcttacttgttgcgccaaggcgacgtgtgtctctggcaatataatttgcaaagataatagacctcatgctggtcttaccagacccacttttacccatcaacagcacctaaggacaaagtagggaaaaggaaaggaaaaaagttagcaatctagagcaaatcaagtctaaagggatctatttctctcctggatttgatattttcctga

SEQ ID NO: 18178 - DNA, 574 bp, Homo sapiens
gtaaagtgacttttgagagtcctttcaaatctagaatttatgaaatatagttccaattaccttgctttccttttcgttctttcttttttattttattttttttgagaccaagtctcactctatcatccaggctggagggctgtggcatgatctcagctcactgcaacctccgyctcccgggttcaagtgattctcatgcctcagccaccccacctgagccccccacctcagccatcccatgcctgggattacaggcatgcaccatcatgtccggctattttttttttttttttggtatatttagtacagacagggttttgccatgttggccaggctgatcttgaactcctggcctcaagtgatgcacctgcctcagcctcccacagtgctgggattacaggcatgagccaccgtgcccagccttaacttgcttttcaaatgaagggaacctatgttctaccttcaatcccaagatattttatacaaatttctaattactaatataagaagtattgatgaaaatatactacactcagacttgatttaatctaaaaatgtagctatataactttat

SEQ ID NO: 18179 - DNA, 608 bp, Homo sapiens
attttatcagtagctgtgagctgaagaacaaataatttttgtggcagtacaattcaaaagattgagttgcattaatagagatgatacacacgtggactatagcttatatgaaccaaaactgacatcagagtaagctgattgatgtatttatggcaataaaaatagttgcttgtctctgaatcatgagaaggaaagaaggaaaatagttggaaaaaacggtggggtgattctgaacatcataagaaaagtacagatactctgatttcaacaatccaatgttaaaggctgattacattaaaattttcttccataacttatttttcttttgtagtacagtaaattattttttcagggtctacatattatgccaaaatagaacatactttaaaaaaatttagtggtgattcagggggaggagccaagatggtcgaataggaacagctccggtctacagcccccagcgtgagcgacgcagaagatgggtgatttctgcatttccatctgaggtacygggttcatctcactggggaatgtcagacagtgggcgcaggtcagtgggtgggcgcaccttgcacaagctgaagcagggcgaggcattgcctcactcg

SEQ ID NO: 18180 - DNA, 608 bp, Homo sapiens
attttatcagtagctgtgagctgaagaacaaataatttttgtggcagtacaattcaaaagattgagttgcattaatagagatgatacacacgtggactatagcttatatgaaccaaaactgacatcagagtaagctgattgatgtatttatggcaataaaaatagttgcttgtctctgaatcatgagaaggaaagaaggaaaatagttggaaaaaacggtggggtgattctgaacatcataagaaaagtacagatactctgatttcaacaatccaatgttaaaggctgattacattaaaattttcttccataacttatttttcttttgtagtacagtaaattattttttcagggtctacatattatgccaaaatagaacatactttaaaaaaatttagtggtgattcagggggaggagccaagatggtcgaataggaacagctccggtctacagcccccagcgtgagcgacgcagaagatgggtgatttctgcatttccatctgaggtactgggttcatctcactggggaatgtcagacagtgggcgcaggtcagtgggtgggcgcaccttgcacaagctgaagcagggcgagrcattgcctcactcg

SEQ ID NO: 18181 - DNA, 553 bp, Homo sapiens
ccttcttcaaaatccctgtaaaacatatttaatcccacctttaccttaaggccctttattccactactgaattatcaagtggcattgaaaaagagaaaggaggaggaagagaagagaaagagagttcagcttaataaatattcagattcttgtagtcagataccgtcagcatatgcttaaattttgtgtaatgttgaaaaaataaacattttatttattttggaaagaggcatcacaatctttwtttttatttttattttattttttttgtagacagagtctcattttgtcaccaaggttggcatgcagtggcacaattatgactcactacggccttggtcttccaggctgaagtgatcctcccacctcaaccttccaaagtgctgggattacaggcatgagccactgcacctggcccataatcttcgttctttcagttgctgaatgtcttaatttgtttcccaaagattcctgactgattcagccaccgggattaaactctccctcaaggcaggtcgttgacaggtcaccatctctcctagttcttttcttt

SEQ ID NO: 18182 - DNA, 595 bp, Homo sapiens
ttagaccatatgggtaacttcctgatgctgccatggcatttgtaaactgtcatggcactgatgggagcgtagtagtgaggatgaccagaggtcactcttgtggccatcttggttttggagggttttggtgggttttggccagctcctttactgcagcctattttatcagcaaggtctttaagacctgtattttttgttgatctcctatctcatcctgcgacttaraatgtctttaccatctgggaatgcagcccagtaggtttcagccttgttttacccagctcctatttaagatggagttgctttggttcacacagctctgacactacctgtgccctgccaagttcatcccctttataataattcaccgcattggaaaggcagaataaccaaatgatatagcgtctacccctcgatgccagactgctaggtccaagccccagtatcatcacatcccagctgttagatgtggacaagttatttaacacccttgagcctcaatttccacttctataaaatgcagataattactgtatgattcttataaggttgctgggaagatgacatgaactaatacacagagaacagttagaat

SEQ ID NO: 18183 - DNA, 595 bp, Homo sapiens
ttagaccatatgggtaacttcctgatgctgccatggcatttgtaaactgtcatggcactgatgggagcgtagtagtgaggatgaccagaggtcactcttgtggccatcttggttttggagggttttggtgggttttggccagctcctttactgcagcctattttatcagcaaggtctttaagacctgtattttttgttgatctcctatctcatcctgcgacttagaatgtctttaccatctgggaatgcagcccagtaggtttcagccttgttttacccagctcctatttaagatggagttgctttggttcacacagctctgacactacctgtgccctgccaagttcatcccctttataataattcaccrcattggaaaggcagaataaccaaatgatatagcgtctacccctcgatgccagactgctaggtccaagccccagtatcatcacatcccagctgttagatgtggacaagttatttaacacccttgagcctcaatttccacttctataaaatgcagataattactgtatgattcttataaggttgctgggaagatgacatgaactaatacacagagaacagttagaat

SEQ ID NO: 18184 - DNA, 512 bp, Homo sapiens
aatggtacacctttgacccagtaattctgtttctggtaatctattttaggaagacaatattctaggtaaataaaatgaaataacaggagaaagcaatacaaaaaagatcttagaaacagcatcatttataaacaggaaaatctatatagacaagagaaatgttcaataacatggcaatagttaaattatgtcaaattaaataaaatttgaaaatctctaatttacaatgtcaatataaaaaagagcaaataaattattacttatgaaataatacacataagaagaaaaaaatgcctatatacctatggcaagattgagtgctttttaatttcctttaaaactttttatctctacattagaaactttgtcccatggatgttaactgtcatgtgcttagtaaaaamgtctcattaaaatatacatttaaaattaaaaaaaaaattaaatgtgttcatggcacccagagagagaatatattttaggttcagtgtgtaggtaatgactttttctca

SEQ ID NO: 18185 - DNA, 1961 bp, Homo sapiens
tatcctaatgaagaaagatagaaattgtaatctgaactcgatgtgggcccaagtcccaattctagatayctacatacattttcaatggaaaaggatcatgctgctctatcatgcttcctttgatttatccattcagcatatacttactggatacttactgtgtgctgagttatatgacttgtactatgttaggaattataggaatgagaagaatgtaaagaaatgtagcacatggtccatgttgttaaggagcttataatttaattggagcaatatcaaaattagaacacaagatgacactactggagatgccacaaatgaaagtatattatataaaaccaatacttacgcattcagaggaaggaactttcctgggttggaacatctatcaaatgcttttcatagaagacagaatttgagctattctatgcgattaagtaagagagagttagaaagcagaagtgtaatcatacaggtagggtgaccatataatctatcatctaagtcgggacacattttgagaatataagagggcactcttaataaatacacaaggagaaaaggtataaaccagaacagtccctggaaaattggaagggtcagtcactttaatgattggcagggtaagtgatatgaggaaaaccaaaaagtggcaactgtgcttccataccgactatccaagtgaccattgcacccaactttaacctacttctctagccatcacatctagcttcccttttttgttccagttagctatcaggttgacatacatttgttccccttctgtgtgtggccttatgtcatattctgttctgaagagcatgcatggagtgcttaagggataagcacatcatcttatgggacatatttatggaaatggagcaaaaaaggaaacaacggatgtgagagattttgccaggaatggatcagctggattcgatagctgaattgactggtaaatttttttttgtgttggcttttgttttactaggctttgatcaagagcccctctcaggatgagatgctccctacatacctgaaggatctttctattagcatagacaaagcggaacatgaaatcagctcttctcctgggagtctgggagccattattaacatccttgatctgctctcaacagttccaacccaagtaaattcagaaatgatgacggtgagtttgcttaacctttgcaggagttttgggtcttaccttttcacccctcagaatttgtattcaagaaacgtaattcctccccattgcagcttctctgtcttttccagagcagtgctcaggatagttctgccagctatggcttttaggatattaggaaatgtttccagtattcattttgagaccttaagaatatttattagtgaatctctgctttattttcttcattaaaatggaataaattcatacttgctttccagaaaaactaggaattaaaggttttcagaatatataagatgatattctcaaaggtctagcactaaatgtgaactttaaaggaatcgtgggaggataggttctggaagcatagaggttctgggaggataaagaattcacctacaagagttcaaatgaagagactttaatgaagggatacctacagaggtaaagacagggttaacaaacaaacaaataaaccaggggtgatgaggcactcagagaccagcaacatttagaagccattatcaccccctaggaaaaagaggaaacagtgcagagcccagtgagagctgaagacttagaggcgggaccagtcagcaggagctatagtcttggaaggccagagctataaccagacatgtgctcaggagaaaggggactgcagcggggagagcagtggacagcaggaaagatgtatctccacttcccaggtccaagcaattctcctgcttcagcctcccaagtagctgggattacaggcactttgggaggccgaggcggatggatcacc

SEQ ID NO: 18186 - DNA, 587 bp, Homo sapiens
aaccctgaccactttagttttataatacttttctgtcaactcccaaacacaaaatacgagcaaaaattgtgtgccatttctccaattaatttccaagtccccaggtactaaacaaaagaggacagaagttgtttttcctracaatgataaagaactgtactgtatttgatttcttaaaatgttacaaatttctagtttcatcatcctgtaatctttccactaaactaatcaaggctgacactgaaaattgttctataaaaatacccaggttcaagtaaaaagtgaacctagaagaataaatgttaaagactttctccaaaattttatatgaagcttctacagtgataacaccaaattttttaaatgactgcaagacctttggcaaagaaacaagatataatgaaaaaataattaagtttaaagatacatcaatgaagatataaataaagtttctccattaccttttgcctatgagagatgttccaaaaatagaggttccacaaacttgacacaaatttcattttatacaaacttgggcactaaaatctaaaaatagattcaaatgtactgtattccacagttaacgc

SEQ ID NO: 18187 - DNA, 549 bp, Homo sapiens
tcccacttagaagttatgaaattggggccagattattttgatacataccacattttgagatacactgccaaattaagaggctaaaaaaattacatctcctgagtatttaatgttcctccctatataagtattatactattttaattattatagctttaaaatrtggttaaatatctattaatattgattaggccagatacccaatggtgaagagaagatataattgaaattcataaactcatggaagggagaggcatttagcatattcaccaaactctaataataatataatgaatatgttaaaaatagaaatcttttaaaaaatttgctgtgaatcctgaaaactaaactataaattctaaaattttgatataattattgggaaatttttaattaaaataatgcttgcagccaggcacggtggctcacacccgtaatcccagcactttgggaggctgaggcaggtggattatgaggtcaacacatcgagaccatcctggccaacatggtgaaaccccgtctctactaaaaatacaaaaattagacagg

SEQ ID NO: 18188 - DNA, 633 bp, Homo sapiens
ttaagactttagggactgggattgattgactggaattctccctcaagtctcagaagactttatggaaagaggaatttttcttgaacatttgtacaagctcttcctgcattactaccttatctactcttccccttaaaacctaggctattattttttttcgattttattattattatactttaagttttagggtacatgtgcacattaaaagcctaatatttgcaaaagaaatgctttgmaaattgtattacttctcatctgttatttttatgatagatgagaagtaatacaacttgcaaggcatttcttttgcaaatactaggcttttaaaaatatttgaggttaagaagttggcaagaaccccacattgtaaagaaaggtgctaggcgtatccacaggaaaacatgtgatccaaactggatcttccagcattagctggctcccacttcaagcccaatacataagaggagagattgtgctggtgaggaagagccaagatttccttggagagagttgtcagggtgtcctgtgttctcccttctgaaggatgtccttcttccacctcagacaaagcaaacgacatttaaaaagaattactcgtagagagtatggttactttccagaaagagaacc

SEQ ID NO: 18189 - DNA, 559 bp, Homo sapiens
tcactggattgtgaggtaaagctagaggtttctcccaatctgtagtggggaaatctggggacaaacatttatcttcagaggcctgtctacactgccccttccagtgtcacaggctgtcacaattcacctggctttgaagacctgtggtgttcagctgaagaccattctcccagcatcaacaccaacaggcaaaaccatcagatgaagctttcacagctgccaaggtacttgctgtcctcaacatatttcatactcaactcggctctattttatttaccagtctcctcccctagtcttggaaaattctcctttcagccctctgccaaaccacatccccatttcaaacctttccaatttctcacctccaaaaagcagcaccaggcaagcacacctggctccaattattccagcaaygccttcccccagccccagccccaaccccagctctagccccagccctagccccagccccacatccccctaacatgcctgattacttagcacttaacgtgtttatctcagcccagctgtagttgattacatctatttggttaagttt

SEQ ID NO: 18190 - DNA, 559 bp, Homo sapiens
tcactggattgtgaggtaaagctagaggtttctcccaatctgtagtggggaaatctggggacaaacatttatcttcagaggcctgtctacactgccccttccagtgtcacaggctgtcacaattcacctggctttgaagacctgtggtgttcagctgaagaccattctcccagcatcaacaccaacaggcaaaaccatcagatgaagctttcacagctgccaaggtacttgctgtcctcaacatatttcatactcaactcggctctattttatttaccagtctcctcccctagtcttggaaaattctcctttcagccctctgccaaaccacatccccatttcaaacctttccaatttctcacctccaaaaagcagcaccaggcaagcacacctggctccaattattccagcaatgccytcccccagccccagccccaaccccagctctagccccagccctagccccagccccacatccccctaacatgcctgattacttagcacttaacgtgtttatctcagcccagctgtagttgattacatctatttggttaagttt

SEQ ID NO: 18191 - DNA, 498 bp, Homo sapiens
ttgagtttttcattcttcatcaacttgcctgccttttttcaattactaaaaaatggggacccagtaggtttggaaaattagataactacaaaaacacactaaatactctataaagcataaaagcaatttgagaataatgggaatttgatttcatatggtgtcatgcatagtcagtactggctataacattatcaatayaaaggtcctaactttctcatgcttttgagataaacatatgtgatcaatgatctcttttaacaaatttagtagtagggtatgtgtgggatttatacttgtttaaacttataaaaaacttgagaaaaaatacagcaatgaacacgtttttgttttggcaggtggattctgtcccatttgaaatctaattatcatttgttctaatttttacaggatggcatgtaatttttcaagcaaattttctttattacaaaatccatcatgaatttttctataaaactatttctcaggacttaacactat

SEQ ID NO: 18192 - DNA, 647 bp, Homo sapiens
tatttatgtgagtatatagatgtaaatatatggtgtatgtatttgraaaaaagtttggaaatctgtacgaaaaacttaacagtagttaattctgaggggtgggattaggagaaagagattttcattttttgctttaaatgtttggatatttgagtgcttttacatgtgcaagtattatttgtataatttcaaaaaacagtaaaataagaatagctaaattcacaaacatatgtttaagcacttggttaccttttcacaaagttcaggaatcctcacttggagaatacctttttaaaggaaataaataagttaatatgtttcctttggataaaagtcagaactgaaagaccatctggtttaataccctagaaagaccctcacctatctaagccctcaagacaagagaggaatctggaacccctgacatctagggttcctttatatccctccacagcttcctttggatctcagatagggcaaaatgccctaactggcatatgaccattatgagtgtttttcttgaaaggaagtgagacttggtcatcagataatttcccacaaaaaacctgatgtgtgcacttggagcttagtactggttacagtgaataaagctctgtggcccaggagcttgcctgctaaagctgggc

SEQ ID NO: 18193 - DNA, 559 bp, Homo sapiens
tgtgccaacttaacctggctgtcttgagctttgatggaagcaccaccagtatttccacttatatctcattctgtagatctgtttcacaatggaggtacattgttaccctcaactaaactgaagtcctgttgttagggagaaaagattttgactatagggtcatagtgtctaccaaaataaaagttctaattcttacartttcattgaaaacctatctattcttcagctcataacaaggatcagatcatatggttttggcatagtgtattgtaactttatataccttgtactattttaaatcgttaaacaacatattacttgcaatggtcagtatggatgaataattttgatggtttgcaggtgcacgtcttggactaggtttatcaaccttattgctattaatatttgggtcagaaaattctttgttatggaggctgttctctgccttgcaaaatgtttaacagcacccctgacttctacatgctagaagccagtagccctccccacctctagttgagacaacgaaaaatgcctccagatattgcccatgctctctggg

SEQ ID NO: 18194 - DNA, 559 bp, Homo sapiens
tgtgccaacttaacctggctgtcttgagctttgatggaagcaccaccagtatttccacttatatctcattctgtagatctgtttcacaatggaggtacattgttaccctcaactaaactgaagtcctgttgttagggagaaaagattttgactatagggtcatagtgtctaccaaaataaaagttctaattcttacaatttcattgaaaacctatctattcttcagctcataacaaggatcagatcatatggttttggcatagtgtattgtaactttatataccttgtactattttaaatcgttaaacarcatattacttgcaatggtcagtatggatgaataattttgatggtttgcaggtgcacgtcttggactaggtttatcaaccttattgctattaatatttgggtcagaaaattctttgttatggaggctgttctctgccttgcaaaatgtttaacagcacccctgacttctacatgctagaagccagtagccctccccacctctagttgagacaacgaaaaatgcctccagatattgcccatgctctctggg

SEQ ID NO: 18195 - DNA, 582 bp, Homo sapiens
tattaaattaatgaatacttactgagtttcgtcaaggttcagaactttaaatacatatttttaataaattacttttatttccatttttatttaactatttattaaattaatgaatacttactgaatttctcttatgtgccactctgtatcaggtacttgggacacataggtgaatgaaaggaaayaaaatatcttgtccttatcaagtttgcattccagtgtacctgagaaagtgtatgcagatgttcactctcctcaatgtatgccaacgggaaacacattgaaattccaagcaatggcttcttattttgcactgatcgggttggtggtggtggtggtgggggcaggtgggtgatgaaggctgggttatggataaaaaaggtctttaaaaaaagggtttagtgaccatatttactagagatgcacacgaatgcacacaaacttttgatacggaagtgctgggaagggaagagcgtggtccctttaaatgatatggaagggggaagggaagtgctgggtagaggcggtcatggtccccggctagggctctatcccagggacctcggtcttcgcgcccaaaag

SEQ ID NO: 18196 - DNA, 582 bp, Homo sapiens
tattaaattaatgaatacttactgagtttcgtcaaggttcagaactttaaatacatatttttaataaattacttttatttccatttttatttaactatttattaaattaatgaatacttactgaatttctcttatgtgccactctgtatcaggtacttgggacacataggtgaatgaaaggaaacaaaatatcttgtccttatcaagtttgcattccagtgtacctgagaaagtgtatgcagatgttcactctcctcaatgtatgccaacgggaaacacattgaaattccaagcawtggcttcttattttgcactgatcgggttggtggtggtggtggtgggggcaggtgggtgatgaaggctgggttatggataaaaaaggtctttaaaaaaagggtttagtgaccatatttactagagatgcacacgaatgcacacaaacttttgatacggaagtgctgggaagggaagagcgtggtccctttaaatgatatggaagggggaagggaagtgctgggtagaggcggtcatggtccccggctagggctctatcccagggacctcggtcttcgcgcccaaaag

SEQ ID NO: 18197 - DNA, 529 bp, Homo sapiens
ctacgtgttggtgacaagataggaaaaccagaattctcttaaactgcagctgggagagcaaacttgcatatcactttggagggcaatttgaagacatctaaagtgacagagtatacacatcctactacctgraaatccatttttatttattttatatatatatatatatatatataaaatttttttttttttttttttttttttttcagactgagtcttgattgctctgttgcccaagctgcagtgcagtgccacgatctgggctcactgcaacctccctaagtagctgggattacaggtgcacaccaccatgcctggctaattttttttttacttctactagagacggggtttcaccatgttggccaggctggtctcaaactcctgacctcaggtgatcctcccacctcggcctcctaaagtgctgggattacaggcgtgagccaccgtgccgggctgaaattccatttttagacatatgtctagaatatctagcacatctgcatgaggtgacatgatcaagaatgta

SEQ ID NO: 18198 - DNA, 529 bp, Homo sapiens
ctacgtgttggtgacaagataggaaaaccagaattctcttaaactgcagctgggagagcaaacttgcatatcactttggagggcaatttgaagacatctaaagtgacagagtatacacatcctactacctggaamtccatttttatttattttatatatatatatatatatatataaaatttttttttttttttttttttttttttcagactgagtcttgattgctctgttgcccaagctgcagtgcagtgccacgatctgggctcactgcaacctccctaagtagctgggattacaggtgcacaccaccatgcctggctaattttttttttacttctactagagacggggtttcaccatgttggccaggctggtctcaaactcctgacctcaggtgatcctcccacctcggcctcctaaagtgctgggattacaggcgtgagccaccgtgccgggctgaaattccatttttagacatatgtctagaatatctagcacatctgcatgaggtgacatgatcaagaatgta

SEQ ID NO: 18199 - DNA, 1840 bp, Homo sapiens
tatcgcttcctcatccatcagtgaagtcagtaagtcctaagtggaaccatcagagggcagggaccatctatctgtatttgacttgcttatttgttcaaggttctgagtcaataggacaagcaactactaagccactagagggcgcaacttgcctactctttctagagtaaggcagcaggtgtttcgggaccggtggggccacctggacctcagtggagggtggtgtgggtgcagcccttcccagggctgatgacgcatctggctgacgaggctgactgtcagcctctggcctctctcccagaggtgtgccctcagatcaaagaggacacctcctccccttaagaggatttatttcctcgaaggcacagcttctatgatctgtgtttttctttcttcctttcccattcacatttaattccttgtagccgccaagtttctgagaacaaagctgtttagaaagcaatgaagaacacaacatcactgatgtagtattcctggccaaaatattgatgtgactctcctcatgagaacagaccaattcactttgagagaaatactacaaaataatggtctacagtcttcaaaaaagtcattgccaactaccttacattaaaatatatgaaagagatgtgacaattaaatgcaatccatgggccaggtgcggtgactcacgcctgtaatcccagcactttgggagaccaaggcgggcggatcatgaggtcaggagattgagactatcctcgctaacacggtgaaaccccgtctctactaaaaatacaagaaattagccaggcatggtggcaggcgcctgtagtcccagctacttgggagactgaggcaggagaatggcatgaacccgggaggtggagcttgcagtgagccgagatcacgccactgcactccagcctaggtgacagagcgagactccatctcaaaaaaaaaaaaaaaaacgcaatccatgatcctactttggaccctggattaaagcaaacaaaaactgtaaaagaacattactgggacaatttggacacatttgaatatgggctgtattttagataatagtgttgtataatgataaatgcctggcatgtggtcataactgtagtaatgtaggggaatgcccttgctaccatatataatactaaagtgtttaagatgaaggtttatgatatcagcaacttggagagaaaaagggacagagagggaaaaagcaaacacagcaaaatgttaacaattagtgaacttaggtgatgggcatagggtatttatcgaactattcttgtaacttctctgtaacaggaaagaaatacatacatacacttcatctttgaaagtgagagagagaaggaaggaaagaaatactgaatagtactaggtacctggggggatgagtgaggtgctagtttccaaggacagagtgagggtatctcttgtgggattggggtccacaagaatgtgcagctcccttgcaatgggaacttgtggggaatgccattcagaaaatgaaataaaatctacagatccggccaggtgcggtggctcatgcstgcaaccccagcactttgggaggccgaggaaggcagagcacctgaggtcaggagtttgagaccagcctggccaacatggtgaaaccccatctctcctaaaaatacaaaaattagctgggcatggtggcgcacacctgtaatcccagctacttgggaggctgaggcaggagaatcacttaaacccgagatagaggttgcagtgagctgagatcgcgccactgcactccagcctggacaacagagcaagactcatctcaaagaaaaaaaaaaagaccctattggacacagagaat

SEQ ID NO: 18200 - DNA, 1840 bp, Homo sapiens
tatcgcttcctcatccatcagtgaagtcagtaagtcctaagtggaaccatcagagggcagggaccatctatctgtatttgacttgcttatttgttcaaggttctgagtcaataggacaagcaactactaagccactagagggcgcaacttgcctactctttctagagtaaggcagcaggtgtttcgggaccggtggggccacctggacctcagtggagggtggtgtgggtgcagcccttcccagggctgatgacgcatctggctgacgaggctgactgtcagcctctggcctctctcccagaggtgtgccctcagatcaaagaggacacctcctccccttaagaggatttatttcctcgaaggcacagcttctatgatctgtgtttttctttcttcctttcccattcacatttaattccttgtagccgccaagtttctgagaacaaagctgtttagaaagcaatgaagaacacaacatcactgatgtagtattcctggccaaaatattgatgtgactctcctcatgagaacagaccaattcactttgagagaaatactacaaaataatggtctacagtcttcaaaaaagtcattgccaactaccttacattaaaatatatgaaagagatgtgacaattaaatgcaatccatgggccaggtgcggtgactcacgcctgtaatcccagcactttgggagaccaaggcgggcggatcatgaggtcaggagattgagactatcctcgctaacacggtgaaaccccgtctctactaaaaatacaagaaattagccaggcatggtggcaggcgcctgtagtcccagctacttgggagactgaggcaggagaatggcatgaacccgggaggtggagcttgcagtgagccgagatcacgccactgcactccagcctaggtgacagagcgagactccatctcaaaaaaaaaaaaaaaaacgcaatccatgatcctactttggaccctggattaaagcaaacaaaaactgtaaaagaacattactgggacaatttggacacatttgaatatgggctgtattttagataatagtgttgtataatgataaatgcctggcatgtggtcataactgtagtaatgtaggggaatgcccttgctaccatatataatactaaagtgtttaagatgaaggtttatgatatcagcaacttggagagaaaaagggacagagagggaaaaagcaaacacagcaaaatgttaacaattagtgaacttaggtgatgggcatagggtatttatcgaactattcttgtaacttctctgtaacaggaaagaaatacatacatacacttcatctttgaaagtgagagagagaaggaaggaaagaaatactgaatagtactaggtacctggggggatgagtgaggtgctagtttccaaggacagagtgagggtatctcttgtgggattggggtccacaagaatgtgcagctcccttgcaatgggaacttgtggggaatgccattcagaaaatgaaataaaatctacagatccggccaggtgcggtggctcatgcgtgcaaccccagcactttgggaggccgaggaaggcagagcacctgaggtcaggagtttgagaccagcctggccaacatggtgaaaccccatctctcctaaaaatacaaaaattagctgggcatggtggcgcacacctgtaatcccagctacttgggaggctgaggcaggagaatcacttaaacccgagatagaggttgcagtgagctgagatygcgccactgcactccagcctggacaacagagcaagactcatctcaaagaaaaaaaaaaagaccctattggacacagagaat

SEQ ID NO: 18201 - DNA, 511 bp, Homo sapiens
ttcagctcttggcctctgagacttgcaccacagcctcccagggcttttcagcctgattgagggctaccctaggggattcctggttgtgaggctttggattgggactgagccacatgaatggcttctctgcttctccagcctgcagtgggtctatcatgggattttgcctctgtgatcatgtgagccaattccccctaataaatccccttccatacatctcactgattcaatcagtaagattcaataagtaattcaatctctaatgcagattgtgrtaccaaaagtgattctaaagaaacagaatttttggcacaagacagggatgccctctcgcaccacccctattcgacatagtgttggaagttctggccagggcaattaggcaggagaaggaaataaagggtattcaattaggaaaagaggaagtcaaattgtccctgtttgcagacgacatgattgtatatctagaaaaccccattgtctcagcccaaaatctccttaagctgataag

SEQ ID NO: 18202 - DNA, 511 bp, Homo sapiens
ttcagctcttggcctctgagacttgcaccacagcctcccagggcttttcagcctgattgagggctaccctaggggattcctggttgtgaggctttggattgggactgagccacatgaatggcttctctgcttctccagcctgcagtgggtctatcatgggattttgcctctgtgatcatgtgagccaattccccctaataaatccccttccatacatctcactgattcaatcagtaagattcaataagtaattcaatctctaatgcagattgtggtaccaaaagtgattctaaagaaacagaatttttggcacaagacagggatgccctctygcaccacccctattcgacatagtgttggaagttctggccagggcaattaggcaggagaaggaaataaagggtattcaattaggaaaagaggaagtcaaattgtccctgtttgcagacgacatgattgtatatctagaaaaccccattgtctcagcccaaaatctccttaagctgataag

SEQ ID NO: 18203 - DNA, 511 bp, Homo sapiens
ttcagctcttggcctctgagacttgcaccacagcctcccagggcttttcagcctgattgagggctaccctaggggattcctggttgtgaggctttggattgggactgagccacatgaatggcttctctgcttctccagcctgcagtgggtctatcatgggattttgcctctgtgatcatgtgagccaattccccctaataaatccccttccatacatctcactgattcaatcagtaagattcaataagtaattcaatctctaatgcagattgtggtaccaaaagtgattctaaagaaacagaatttttggcacaagacagggatgccctctcgcaycacccctattcgacatagtgttggaagttctggccagggcaattaggcaggagaaggaaataaagggtattcaattaggaaaagaggaagtcaaattgtccctgtttgcagacgacatgattgtatatctagaaaaccccattgtctcagcccaaaatctccttaagctgataag

SEQ ID NO: 18204 - DNA, 511 bp, Homo sapiens
ttcagctcttggcctctgagacttgcaccacagcctcccagggcttttcagcctgattgagggctaccctaggggattcctggttgtgaggctttggattgggactgagccacatgaatggcttctctgcttctccagcctgcagtgggtctatcatgggattttgcctctgtgatcatgtgagccaattccccctaataaatccccttccatacatctcactgattcaatcagtaagattcaataagtaattcaatctctaatgcagattgtggtaccaaaagtgattctaaagaaacagaatttttggcacaagacagggatgccctctcgcaccacccctattcracatagtgttggaagttctggccagggcaattaggcaggagaaggaaataaagggtattcaattaggaaaagaggaagtcaaattgtccctgtttgcagacgacatgattgtatatctagaaaaccccattgtctcagcccaaaatctccttaagctgataag

SEQ ID NO: 18205 - DNA, 561 bp, Homo sapiens
cctctcccccgcttcccattgtgtggcctggcgtctgaggcccctgtggtctgactgccccactgctccctggtatgcattcaggttgaattcagagagctctgcgtgccagtgtccagccccattcaccagggcacacggccatsgtggaaagatgggattggccagtacttcccaagcctgccaggccgggagaaccacctgcagtgcattgcaaatacagactcctgggccccgctcacacccacttagagtctggaggggcagagtccagggagctgggcttttggtgcctccaggtgagccctatgatcaggtgcaagtgggagatgctgcgggacagcggcgcctcctcaggttggggcagcgggggagagaagtctcactggaagctgcctttccagtcttggggctcagcttctcgatctccagggaggctctccctcatcccactgctggggacgctggactctggagtgaaaatgacccacgctctcctctgctcccgttttcaccttgggcatcattgtcatcatcattatgagcagcagccggaaaagc

SEQ ID NO: 18206 - DNA, 584 bp, Homo sapiens
ccaattttgtgaatatcaaattcaacagtttggaaacacaagcttctaaataaactgtttcmctatgacagtgtccttgagaatacatgccatccagaggtaattctgctttatactcagattctttccatacttccaaaaaaggatcaatattagacctgtacaacaaattacactcttttacagaaaataataaaatatccaagtctctcaccaaattttcaaaaaagaggaaaagtgtaagcttccagatgaaagtttctatagctttccccaattttagtaccaccatgaaaaagaaattcttcactcattcaaggcatacgactagaaaactaatttccatggcatcaaattaatttcctcctttggagataaaagcatgagatcttttccaaagcattaaaatcgccaagaaaaaaaaaaaaagaaaaaaaagaccattaccagcattttaaaactaagagaatgaagtaaacaaaaaagggaaagaaaaagcttcaaaagttcatttttctcctaatttcttgaactctctattccagaagtacctaatgtttttcttaaaagagaggctttcaatt

SEQ ID NO: 18207 - DNA, 584 bp, Homo sapiens
ccaattttgtgaatatcaaattcaacagtttggaaacacaagcttctaaataaactgtttccctrtgacagtgtccttgagaatacatgccatccagaggtaattctgctttatactcagattctttccatacttccaaaaaaggatcaatattagacctgtacaacaaattacactcttttacagaaaataataaaatatccaagtctctcaccaaattttcaaaaaagaggaaaagtgtaagcttccagatgaaagtttctatagctttccccaattttagtaccaccatgaaaaagaaattcttcactcattcaaggcatacgactagaaaactaatttccatggcatcaaattaatttcctcctttggagataaaagcatgagatcttttccaaagcattaaaatcgccaagaaaaaaaaaaaaagaaaaaaaagaccattaccagcattttaaaactaagagaatgaagtaaacaaaaaagggaaagaaaaagcttcaaaagttcatttttctcctaatttcttgaactctctattccagaagtacctaatgtttttcttaaaagagaggctttcaatt

SEQ ID NO: 18208 - DNA, 584 bp, Homo sapiens
ccaattttgtgaatatcaaattcaacagtttggaaacacaagcttctaaataaactgtttccctatgacagtgtccttgagaatacatgccatccagaggtaattctgctttatactcagattctttccatacttccaaaaaaggatcaatattagacctgtayaacaaattacactcttttacagaaaataataaaatatccaagtctctcaccaaattttcaaaaaagaggaaaagtgtaagcttccagatgaaagtttctatagctttccccaattttagtaccaccatgaaaaagaaattcttcactcattcaaggcatacgactagaaaactaatttccatggcatcaaattaatttcctcctttggagataaaagcatgagatcttttccaaagcattaaaatcgccaagaaaaaaaaaaaaagaaaaaaaagaccattaccagcattttaaaactaagagaatgaagtaaacaaaaaagggaaagaaaaagcttcaaaagttcatttttctcctaatttcttgaactctctattccagaagtacctaatgtttttcttaaaagagaggctttcaatt

SEQ ID NO: 18209 - DNA, 584 bp, Homo sapiens
ccaattttgtgaatatcaaattcaacagtttggaaacacaagcttctaaataaactgtttccctatgacagtgtccttgagaatacatgccatccagaggtaattctgctttatactcagattctttccatacttccaaaaaaggatcaatattagacctgtacaacaaattacactcttttacagaaaataataaaatatccaagtctctcaccaaattttcaaaaaagaggaaaagtgtaagcttccagatgaaagtttctatagctttccccaawtttagtaccaccatgaaaaagaaattcttcactcattcaaggcatacgactagaaaactaatttccatggcatcaaattaatttcctcctttggagataaaagcatgagatcttttccaaagcattaaaatcgccaagaaaaaaaaaaaaagaaaaaaaagaccattaccagcattttaaaactaagagaatgaagtaaacaaaaaagggaaagaaaaagcttcaaaagttcatttttctcctaatttcttgaactctctattccagaagtacctaatgtttttcttaaaagagaggctttcaatt

SEQ ID NO: 18210 - DNA, 584 bp, Homo sapiens
ccaattttgtgaatatcaaattcaacagtttggaaacacaagcttctaaataaactgtttccctatgacagtgtccttgagaatacatgccatccagaggtaattctgctttatactcagattctttccatacttccaaaaaaggatcaatattagacctgtacaacaaattacactcttttacagaaaataataaaatatccaagtctctcaccaaattttcaaaaaagaggaaaagtgtaagcttccagatgaaagtttctatagctttccccaattttagtaccaccatgaaaaagaaattcttcactcattcaaggcatacgactagaaaactaatttccatggcatcaaattaatttcctcctttggagataaaascatgagatcttttccaaagcattaaaatcgccaagaaaaaaaaaaaaagaaaaaaaagaccattaccagcattttaaaactaagagaatgaagtaaacaaaaaagggaaagaaaaagcttcaaaagttcatttttctcctaatttcttgaactctctattccagaagtacctaatgtttttcttaaaagagaggctttcaatt

SEQ ID NO: 18211 - DNA, 543 bp, Homo sapiens
gagattcatcatcctgacattatttactagaggcacagttcatgaactcataggaggccccatgatgtgggttctgctgtcatacttttgactattgcttaattataatgtgagggaaaaaattatattaaaatcttgggcaccgaagcgtgtcactttatgtttcagtgattttccagttcaaaccactgctataaaaacagttaccatttattttggtctatttgccagatattatcccaagtttttgttatacatgcattataaaatatctcagtcattaaagcacactgaaataatgaagcaaatatgtgtgcaaccactagccatttaaacaaatagaaacattttatattatcatttttaaaaaatcagtaacayattatagatagggctaaagtgtactatgcatagcatcccaacccaattatctgtcctcctctgcctaaagaggttagcgaacatcccaaagttgaagcatatttttcgcacctctgtctttatatatattttctctaaatgaaatctaataaagatttatgt

SEQ ID NO: 18212 - DNA, 1816 bp, Homo sapiens
agcctggcctatgtctggagaacacacagaggataattctaacaatgtcaaatctaggtaagttctacactgttttgctccgtaactccagaaragtcacaacctcaccatatcctagtttccttaattataatgagagagtttgatgaaatggaagattttaaacaatctcccacttttaataatatcacagtcctttaaaatctgtttagaaacatcaaagttaatattatacaaaatccataaaacatgaaatagaataaagagagaagctataataaataaaaacctaaggaaaataaataaaagcaggccaggtgcagtggctcatgcctgtaatcccaacactttgagaggctgatgatgtgggcagatcacttgaggccaggaatttgaaatcagtctttagttcttttctggccaacatggcaaaaccccatttctgctaaaaatacaaaaattagctgggcatggtggcttatcctggaatcccagatactacaaaggctgaggcacaagaactgctcgaacctgggaggccaaggttgcagtgagctgagatcacgtcactgcactccagcctgtgcaagagtaagcactatctcaaaaagagaaaaaaagaaaagaaagaaaagaaaaaaaattttttttggctactcccaatagattttgcatgtaactactggttgtttttctgcaggtacagaaatgattgccacatattcactccccaagattaggctgtaaggtttttcatgggcataaatataatttttcatctttgcgtcttaataaccaaacccaaacaggaataactcaatctcagttaactattaataaagtaagaagaaatactatgtttttactatagtttacatcatcaaataaagtatacagttgagcgatcttctgaataattatcatttaaataccatgtttaattatttcattaaatgtatctctgatattttgatacactaataatatagttataaaacttttccaataaagttgtccaatttttgaatttatggtactgaaaattactttatagctaatttttgatgtatattttagcttgtacctttcaagcagcattaatttagaatttacagtcctttgaattttaaaaattagttcaaagatttttattgcagtcttacttaaaatactttctagtttctttaaaatatttcaaacactttgaagacatttttttcaaaggatattaaagaatgtatttcagttttagtttatgttttgtcaaatatttataatgatcaatgatcatatcctatattatatctattactcaaaacattgacaaactataatctgcatttactaatatactaagatgctaatattcattcattcatactaagctatgtcaatcactataatacttgtaataataatatttatacttatatttatattataaaatataattataatatattataattatatacaattattatatataatatataacatataacatattattaatataacatataataatatataatatattattaatataacatataatatgttatatattgtatataatataacataaaataatacattattatatattgtatataatatataacataattatataataacaatattcaaaacttgtatatattgcaggacacaaataaaggtgttagactgttcttggtgtccattattttgtaactttcacttcaaaaatacgtgtgtgtatgtggtgtacgtgtgtgtatttaagcaagacttttactcattgtatagaaaatattgttcaacatgcact

SEQ ID NO: 18213 - DNA, 1816 bp, Homo sapiens
agcctggcctatgtctggagaacacacagaggataattctaacaatgtcaaatctaggtaagttctacactgttttgctccgtaactccagaagagtcacaacctcaccatatcctagtwtccttaattataatgagagagtttgatgaaatggaagattttaaacaatctcccacttttaataatatcacagtcctttaaaatctgtttagaaacatcaaagttaatattatacaaaatccataaaacatgaaatagaataaagagagaagctataataaataaaaacctaaggaaaataaataaaagcaggccaggtgcagtggctcatgcctgtaatcccaacactttgagaggctgatgatgtgggcagatcacttgaggccaggaatttgaaatcagtctttagttcttttctggccaacatggcaaaaccccatttctgctaaaaatacaaaaattagctgggcatggtggcttatcctggaatcccagatactacaaaggctgaggcacaagaactgctcgaacctgggaggccaaggttgcagtgagctgagatcacgtcactgcactccagcctgtgcaagagtaagcactatctcaaaaagagaaaaaaagaaaagaaagaaaagaaaaaaaattttttttggctactcccaatagattttgcatgtaactactggttgtttttctgcaggtacagaaatgattgccacatattcactccccaagattaggctgtaaggtttttcatgggcataaatataatttttcatctttgcgtcttaataaccaaacccaaacaggaataactcaatctcagttaactattaataaagtaagaagaaatactatgtttttactatagtttacatcatcaaataaagtatacagttgagcgatcttctgaataattatcatttaaataccatgtttaattatttcattaaatgtatctctgatattttgatacactaataatatagttataaaacttttccaataaagttgtccaatttttgaatttatggtactgaaaattactttatagctaatttttgatgtatattttagcttgtacctttcaagcagcattaatttagaatttacagtcctttgaattttaaaaattagttcaaagatttttattgcagtcttacttaaaatactttctagtttctttaaaatatttcaaacactttgaagacatttttttcaaaggatattaaagaatgtatttcagttttagtttatgttttgtcaaatatttataatgatcaatgatcatatcctatattatatctattactcaaaacattgacaaactataatctgcatttactaatatactaagatgctaatattcattcattcatactaagctatgtcaatcactataatacttgtaataataatatttatacttatatttatattataaaatataattataatatattataattatatacaattattatatataatatataacatataacatattattaatataacatataataatatataatatattattaatataacatataatatgttatatattgtatataatataacataaaataatacattattatatattgtatataatatataacataattatataataacaatattcaaaacttgtatatattgcaggacacaaataaaggtgttagactgttcttggtgtccattattttgtaactttcacttcaaaaatacgtgtgtgtatgtggtgtacgtgtgtgtatttaagcaagacttttactcattgtatagaaaatattgttcaacatgcact

SEQ ID NO: 18214 - DNA, 1816 bp, Homo sapiens
agcctggcctatgtctggagaacacacagaggataattctaacaatgtcaaatctaggtaagttctacactgttttgctccgtaactccagaagagtcacaacctcaccatatcctagtttccttaattataatgagagagtttgatgaaatggaagattttaaacaatctcccacttttaataatatcacagtcctttaaaatctgtttagaaacatcaaagttaatattatacaaaatccataaaacatgaaatagaataaagagagaagctataataaataaaaacctaaggaaaataaataaaagcaggccaggtgcagtggctcatgcctgtaatcccaacactttgagaggctgatgatgtgggcagatcacttgaggccaggaatttgaaatcagtctttagttcttttctggccaacatggcaaaaccccatttctgctaaaaatacaaaaattagctgggcatggtggcttatcctggaatcccagatactacaaaggctgaggcacaagaactgctcgaacctgggaggccaaggttgcagtgagctgagatcacgtcactgcactccagcctgtgcaagagtaagcactatctcaaaaagagaaaaaaagaaaagaaagaaaagaaaaaaaattttttttggctactcccaatagattttgcatgtaactactggttgtttttctgcaggtacagaaatgattgccacatattcactccccaagattaggctgtaaggtttttcatgggcataaatataatttttcatctttgcgtcttaataaccaaacccaaacaggaataactcaatctcagttaactattaataaagtaagaagaaatactatgtttttactatagtttacatcatcaaataaagtatacagttgagcgatcttctgaataattatcatttaaataccatgtttaattatttcattaaatgtatctctgatattttgatacactaataatatagttataaaacttttccaataaagttgtccaatttttgaatttatggtactgaaaattactttatagctaatttttgatgtatattttagcttgtacctttcaagcagcattaatttagaatttacagtcctttgaattttaaaaattagttcaaagatttttattgcagtcttacttaaaatactttctagtttctttaaaatatttcaaacactttgaagacatttttttcaaaggatattaaagaatgtatttcagttttagtttatgttttgtcaaatatttataatgatcaatgatcatatcctayattatatctattactcaaaacattgacaaactataatctgcatttactaatatactaagatgctaatattcattcattcatactaagctatgtcaatcactataatacttgtaataataatatttatacttatatttatattataaaatataattataatatattataattatatacaattattatatataatatataacatataacatattattaatataacatataataatatataatatattattaatataacatataatatgttatatattgtatataatataacataaaataatacattattatatattgtatataatatataacataattatataataacaatattcaaaacttgtatatattgcaggacacaaataaaggtgttagactgttcttggtgtccattattttgtaactttcacttcaaaaatacgtgtgtgtatgtggtgtacgtgtgtgtatttaagcaagacttttactcattgtatagaaaatattgttcaacatgcact

SEQ ID NO: 18215 - DNA, 549 bp, Homo sapiens
cggctcactgcaacctccacttcctaggttcaaatgattctcctgcygcagcctcccgagtagctgggactacaggtgcgtgccaccacacccagctaatttttgtatttttggtagagacagggtttcaccacgttgtccatggccaggatggtcttgatcttgaccttgtgatccgcccgcctcggcctcccaaagtgctgggattgcaggcgtgagccaccgcgcccagcctgtcctctgtgattttctgggcttatgttaaaattataactcaatcaccagtctttataaatttgcttttttatatttaaaccaaacctaatgctaattgtgatatgttatttattctcacctgatttgaatcattggattcaattaaatgagtttaattatcattaaataattctaagagaaataatgtctattcggatggtgggaattttctttctacatgcagccccattctgaatgaatgaaatcaaatcacgtgacgatcagggtcctagagtaacttaatattttgtacattggttatttgactcctca

SEQ ID NO: 18216 - DNA, 549 bp, Homo sapiens
cggctcactgcaacctccacttcctaggttcaaatgattctcctgccgcagcctcccgagtagctgggactacaggtgcgtgccaccacacccagctaatttttgtatttttggtagagacagggtttcaccacgttgtccatggccaggatggtcttgatcttgaccttgtgatccrcccgcctcggcctcccaaagtgctgggattgcaggcgtgagccaccgcgcccagcctgtcctctgtgattttctgggcttatgttaaaattataactcaatcaccagtctttataaatttgcttttttatatttaaaccaaacctaatgctaattgtgatatgttatttattctcacctgatttgaatcattggattcaattaaatgagtttaattatcattaaataattctaagagaaataatgtctattcggatggtgggaattttctttctacatgcagccccattctgaatgaatgaaatcaaatcacgtgacgatcagggtcctagagtaacttaatattttgtacattggttatttgactcctca

SEQ ID NO: 18217 - DNA, 549 bp, Homo sapiens
cggctcactgcaacctccacttcctaggttcaaatgattctcctgccgcagcctcccgagtagctgggactacaggtgcgtgccaccacacccagctaatttttgtatttttggtagagacagggtttcaccacgttgtccatggccaggatggtcttgatcttgaccttgtgatccgcccgcctcggcctcccaaagtgctgggattgcaggcgtgagccaccgcgcccagcctgtcctctgtgattttctgggcttatgttaaaattataactcaatcaccagtctttataaatttgcttttttatatttaaaccaaacctaatgctaattgtgatatgttatttattctcacctgatttgaatcattggattcaattaaatgagtttaattatcattaaataattctaagagaaataatgtctattcggatggtgggaattttctttctacatgcagccccattctgaatgaatgaaatcaaatcacgtgamgatcagggtcctagagtaacttaatattttgtacattggttatttgactcctca

SEQ ID NO: 18218 - DNA, 572 bp, Homo sapiens
tgttgtccaggctggcccctgaactcttggccccaagtgatcctcctgccttggcctcccaaagtgctgggattacaggcctgagccactacacccagccctccctctttatagcaaggcttgctgggcaccttctctagggctacttggctatagatgatgaatgcctatgtgcatgaagcccttctgatctgggtctagggaacagggagacctcctattacatcatgagaccacagtatacctatatgatgcaccaggctccartaaacaggctccagtaaacaggttcatgcctggtgatttctgttgcatttctaagcaactggatcagagaggaagaagatggcaagagctggccacccagagttcaggagccatgtttagctcccaacccaaccctgtcccatgcattcccccatcccttgccctgtgtcctgctcaccagccgggcagcaatattcctcccagctgaggccaggacacgaagtagtttcatggcagtagcacagggtactttgtatagactaggggtaggccctgcccccacaggagaccaactggtgggcaag

SEQ ID NO: 18219 - DNA, 819 bp, Homo sapiens
  misc_feature (1)...(819): n = A,T,C or G
atnnnnnnnnnnnnnnnnnnnnnnnnnnnnnnnnnnnnnnnnnnnnnnnnnnnnnnnnnnnnnnnnnnnnnnnnnnnnnnnnnnnnnnnnnnnnnnnnnnnnataaatagaaacaactcaaagaatatatcacaagagattaactgtaaacaagattacgtgtgatttttatatttttctcgtcgggcctcagattttctacaattttaaaaaaaaaatacacaataattatatatgcattcacccatatatacaccttagttacttgaaccaaaatcaaaaacctttacacaactctttattattcttaatttcactttacragaaaacatctctcgatacataaaaagtccagataaatacatataaatatactctaaaaacaaatattttaatatgtaagtggttttaagttactgacattaatcattaagttaataataaccttgatcctgtgagacagtcaaaatatgctcattttcagcatagtacacttgccaaggcagcaaaatggaacagtatacttgaacaagattttcaatgatcatgggcaaaataaaaagacacagttaaccagaatattcaattagtcagaatatattctttaaacatctattagtcaggcaagtttcacttttcagggccttgtatcaaagcttttttttaaattataaaaacccataaacaatgctaattattcacatttacaaattaaacaccaaagtccattcccagattaaaatctgcttttaatctaaattgatgtgcttttaccaagactttatgtgatcattatccatcccttcccgctattgctga

SEQ ID NO: 18220 - DNA, 819 bp, Homo sapiens
  misc_feature (1)...(819): n = A,T,C or G
atnnnnnnnnnnnnnnnnnnnnnnnnnnnnnnnnnnnnnnnnnnnnnnnnnnnnnnnnnnnnnnnnnnnnnnnnnnnnnnnnnnnnnnnnnnnnnnnnnnnnataaatagaaacaactcaaagaatatatcacaagagattaactgtaaacaagattacgtgtgatttttatatttttctcgtcgggcctcagattttctacaattttaaaaaaaaaatacacaataattatatatgcattcacccatatatacaccttagttacttgaaccaaaatcaaaaacctttacacaactctttattattcttaatttcactttacgagaaaacatctctcgatacataaaaagtccagataaatacatataaatatactctaaaaacaaatattttaatatgtaagtggttttaagttactgacattaatcattaagttaataataaccttgatcctgtgagacagtcaaaatatgctcattttcagcatagtacacttgcyaaggcagcaaaatggaacagtatacttgaacaagattttcaatgatcatgggcaaaataaaaagacacagttaaccagaatattcaattagtcagaatatattctttaaacatctattagtcaggcaagtttcacttttcagggccttgtatcaaagcttttttttaaattataaaaacccataaacaatgctaattattcacatttacaaattaaacaccaaagtccattcccagattaaaatctgcttttaatctaaattgatgtgcttttaccaagactttatgtgatcattatccatcccttcccgctattgctga

SEQ ID NO: 18221 - DNA, 561 bp, Homo sapiens
ggggaattggaaaaattgagattaggagtatacgcaggctttaaatgtcagacgctataaacacagaagccagagcaaagatctctttctggcagagggrcattcaggaacatctcctaatgttaatcccatactgatattagaaaaggagcatcaggccttaagcattatttgcattatttgcaagtgtcgatgagcttggaattcttttcaagtagataaagaaaaaaaaaatcaagggatcaaagaaagaggaaacagtgcaaaactggctaaagtctcgcagttgaatgactcctgttagggaactctgggaggagttattaaagattcaagattgagaaaactgaggttcagaattaaatccaattctgaaaactacgagatcatggaggcacttcctatacgactttgagtcactagggttcaagtcagggatgccattacagagtaatcaggggacgagataaggtactggttactgaaggactgactcggaacaaagcaagtcagctggtctggcaccaggatcccaggtgttcaggatcacagcacaattag

SEQ ID NO: 18222 - DNA, 561 bp, Homo sapiens
ggggaattggaaaaattgagattaggagtatacgcaggctttaaatgtcagacgctataaacacagaagccagagcaaagatctctttctggcagagggacattcaggaacatctcctaatgttaatcccatactgatattagaaaaggagcatcaggccttaagcattwtttgcattatttgcaagtgtcgatgagcttggaattcttttcaagtagataaagaaaaaaaaaatcaagggatcaaagaaagaggaaacagtgcaaaactggctaaagtctcgcagttgaatgactcctgttagggaactctgggaggagttattaaagattcaagattgagaaaactgaggttcagaattaaatccaattctgaaaactacgagatcatggaggcacttcctatacgactttgagtcactagggttcaagtcagggatgccattacagagtaatcaggggacgagataaggtactggttactgaaggactgactcggaacaaagcaagtcagctggtctggcaccaggatcccaggtgttcaggatcacagcacaattag

SEQ ID NO: 18223 - DNA, 561 bp, Homo sapiens
ggggaattggaaaaattgagattaggagtatacgcaggctttaaatgtcagacgctataaacacagaagccagagcaaagatctctttctggcagagggacattcaggaacatctcctaatgttaatcccatactgatattagaaaaggagcatcaggccttaagcattatttgcattatttgcaagtgtcgatgagcttggaattcttttcaagtagataaagaaaaaaaaaatcaagggatcaaagaaagaggaaacagtgcaaaactggctaaagtctcgcagttgaatgactcctgttagggaactctgggaggagttattaaagattcaagattgagaaaactgaggttcagaattaaatccaattctgaaaactacgagatcatggaggcacttcctatacgactttgagtcmctagggttcaagtcagggatgccattacagagtaatcaggggacgagataaggtactggttactgaaggactgactcggaacaaagcaagtcagctggtctggcaccaggatcccaggtgttcaggatcacagcacaattag

SEQ ID NO: 18224 - DNA, 546 bp, Homo sapiens
gattatttctatcttattttagcatgtgtctaatttttcctagattgaaggattctcattaagcaaactagggaatttcaaccttcaagacattgaaaaagatgttgtgatctgggaacatactgacagtgctgcaggggacacaggcataacaaaagaagaggcaccaagagaaacgccgattaaaaggggacaggtctgttctcttttgtttctagttgtcagtttcacttgccaattgtgaagttgtggattagtcagtcttgtcttctttccttarctatctttactatttcgtggctctttcatttgccagtctgtttagtacctcgaacagacaagtaatgagaaaaggttaaaaaaaatattagatcactaaatccacagttatttatgtagtttctttgtgctggttcctttgaaagagactcagaattcaaaggtaaatccatatctatcctcaaagagcttagtcttaggtggtattatgaggtttaaatgtatgaaaggttaactagctttcagttactaaaataacagtgaatg

SEQ ID NO: 18225 - DNA, 1021 bp, Homo sapiens
  misc_feature (1)...(1021): n = A,T,C or G
ttagcaaccccaagccctgctgtcagtcatctgttcagcacagatgtgagtagtggcccaaatccctccatagcctgtgctcacagccaccatgctgcctttatggcacaccctcacaaacagccaatgaaggagaggctggctgacaataggctagtaagattaccatcatttttgtagctatgaaagaaaaatcaataaggagtagataaatcttctaagtaaatacatataaatctgtttataaattgtaagaaatcaaatccagaccatttgcatcagaagatgcttacatgaggctgggattatgtgaagaaatggagaaaagccttatgagtgttaaaagatgttaataacatggtatatgtaatttgtcttctccaggatttataaagaatattaaaatatttttccctcctctggacttgtgtcagccccaacatctcatcctcctggtctgaaaaagattggggcctttggggaggcagcatgctttctgttctcaaccgtaatcagacagctcaccctgcacaccacctatgtggctatcctttaggcgtgtgtgatttgcaaaacattctgtggcctattttcctacctcacacactaaaatcattcaataattaaatggaaatatcaataaggagtaggtaaatcttccaagtaaatgtatataaacctgtttataaactctttgaaatcaaatccagaccatttacatcagaaattagttttcaaactaatattcccaaattaactaacttcacctaggttgtgagtattgcagcgtcttatttctaatcccagtactactattggtgtgagtcaagtaaagatgccctggtgactggggtgtgnnnnnnnnnnnnnnnnnnnnnnnnnnnnnnnnnnnnnnnnnnnnnnnnnnnnnnnnnnnnnnnnnnnnnnnnnnnnnnnnnnnnnnnnnnnnnnnnnnnngsaatgtccatgtaattctacaattcactgtcacatctaaccatatagcttttacttactgtgt

SEQ ID NO: 18226 - DNA, 538 bp, Homo sapiens
ccgagttcaagtgattctcctgcctcagccacccaaatagtgtgccaccatgcctggctatcttttgtatttttagtagaaatggagtttcaccatgttggtcaggatggtctcgaactcctgaccttgttatccgcccgcctcagcctcccaaaatgctgggattacaaacgtgagccaccgtgccctacctaccctcagtttttaatcctctgtgccattactacttcatagtgcagtaacttttcagagtttttttcttgtttttttttttgaaagatgaagtcgtgctccgttgcccaggctggcctgcagtggcgtgatcttagctcactgcaacctccaccacccaggttcaagcgattctcctgcctcagcctctcgagtagctgggattacaggygcccaccaccacacctggctaatttttgtatttttagtagagacggggtttcactgtgttggccaagctggtctccaactcctgacctcaggtgatctgcccacctcagtctcccaaagtgttgggattacaggc

SEQ ID NO: 18227 - DNA, 540 bp, Homo sapiens
tatggagccccaaacataaacttgacatatacagcatatacagacaccaaagaaatgtagatatttataaatacaaattaattaaagctcacatttccttactatctgaaaactaattaataatcatgaatttactgtcctgcatatgttaaaaaattctaaatatatatgtatacacggtatcataactgtctaatttccatatttgcagttttcattagattttctatgcttcctcttctttattctcccttcactccatccctcctgatcccctctcccacatatcacatccatgatgtttcccccaactgaccccactttttccactggcttcctaccttgaaggtgcagtttgctctccrtgctttgcagaaggacggaactcacagagtccagattgtcatagctgttacagcccagaggcccagtgcgtgtctctgtgacctgcagtagatatcaaataagataggtgtgagacagcagtccttgtctaggacataccccaaagagtcatgccccagcagagcaaagcctgca

SEQ ID NO: 18228 - DNA, 621 bp, Homo sapiens
taaatcaaatcatctcaactattttgtgataatcataaaagatatgtcctacttcctgacttttggattcatgacatcacctcctggccttcttgagattgtgtggaatctagtgaatgttgtgcagaagttaygtgtgtgacttttaattgttggtgctagatctttcacatctctcatttccttctggcacaataaccagccacattctttatggtggcggtgttgaaagttagttaattaacattatattttgaggtatttcctctgtacagtttacactcagtttcaactgatctagacaataattatctttttctttcaggtactccaaactaaatgatctgttcaataaaatcctcattttgaggtagacaatctcaaacatatgttcctaacaggatgaaaatctctgttatcatcataataattccattattataacatgtgatgtagtaattattaatgattttattatccacatgtctatttgtataaatgcctgttcagtgaaatagaattttatattctagcaaatcatggtttagctagtcttttaagggaaactaaggcaaaagcaaggtttccagtaggtttattgaaatactaaccttaatgctc

SEQ ID NO: 18229 - DNA, 621 bp, Homo sapiens
taaatcaaatcatctcaactattttgtgataatcataaaagatatgtcctacttcctgacttttggattcatgacatcacctcctggccttcttgagattgtgtggaatctagtgaatgttgtgcagaagttatgtgtgtgacttttaattgttggtgctagatctttcacatctctcatttccttctggcacaataaccagccacattctttatggtggcggtgttgaaagttagttaattaacattatattttgaggtatttcctctgtacagtttacactcagtttcaactgatctagacaataattatctttttctttcaggtactccaaactaaatkatctgttcaataaaatcctcattttgaggtagacaatctcaaacatatgttcctaacaggatgaaaatctctgttatcatcataataattccattattataacatgtgatgtagtaattattaatgattttattatccacatgtctatttgtataaatgcctgttcagtgaaatagaattttatattctagcaaatcatggtttagctagtcttttaagggaaactaaggcaaaagcaaggtttccagtaggtttattgaaatactaaccttaatgctc

SEQ ID NO: 18230 - DNA, 621 bp, Homo sapiens
taaatcaaatcatctcaactattttgtgataatcataaaagatatgtcctacttcctgacttttggattcatgacatcacctcctggccttcttgagattgtgtggaatctagtgaatgttgtgcagaagttatgtgtgtgacttttaattgttggtgctagatctttcacatctctcatttccttctggcacaataaccagccacattctttatggtggcggtgttgaaagttagttaattaacattatattttgaggtatttcctctgtacagtttacactcagtttcaactgatctagacaataattatctttttctttcaggtactccaaactaaatgatctgttcaataaaatcctcattttgaggtagacaatctcaaacatatgttcctaacaggatgaaaatctctgttatcatcataataattccattattataacatgtgatgtagtaattattaatgattttattatccacatgtctatttgtataaatgyctgttcagtgaaatagaattttatattctagcaaatcatggtttagctagtcttttaagggaaactaaggcaaaagcaaggtttccagtaggtttattgaaatactaaccttaatgctc

SEQ ID NO: 18231 - DNA, 592 bp, Homo sapiens
atacattctacacatgtgaacatatctgtccaataaatccttagacgtgtgactatagtcaaagagcactgacacgtgtttttaattctgataacaatgctagaggttccatctgtttatattcttatcttagatatgttgacatacttccctgcacatccccgccaacacaacatgctatcaaacttttgggtttgataccagatagatgaaaaatggcatctcattgtccatatttgcatttactttattatgagtgggtcagtcatcttctcatatgtttaagaaccattcgtacttccttttcttgttctttgctctttttctttgatggtggttctttttcttattgacttgagagagcacattgttatattmaataacttaatttctgtggcaaatattgtccccatcgtttccccatcaaaacatcatttctcttttgactctgtttatagtgggatttttgtctgattgccatgcagaattattttatttgtattattaaatttgttaatcttttctatggcttctgagttttgtgcaacacttaaaaagacctctcttagttatttttaaattgtcttaaatt

SEQ ID NO: 18232 - DNA, 592 bp, Homo sapiens
atacattctacacatgtgaacatatctgtccaataaatccttagacgtgtgactatagtcaaagagcactgacacgtgtttttaattctgataacaatgctagaggttccatctgtttatattcttatcttagatatgttgacatacttccctgcacatccccgccaacacaacatgctatcaaacttttgggtttgataccagatagatgaaaaatggcatctcattgtccatatttgcatttactttattatgagtgggtcagtcatcttctcatatgtttaagaaccattcgtacttccttttcttgttctttgctctttttctttgatggtggttctttttcttattgacttgagagagcacattgttatattaaataacttaatttctgtggcaaatattgtccccatcgtttccccatcaaaacatcatttctcttttgactctgtttatagtgggatttttgtctgattgycatgcagaattattttatttgtattattaaatttgttaatcttttctatggcttctgagttttgtgcaacacttaaaaagacctctcttagttatttttaaattgtcttaaatt

SEQ ID NO: 18233 - DNA, 592 bp, Homo sapiens
atacattctacacatgtgaacatatctgtccaataaatccttagacgtgtgactatagtcaaagagcactgacacgtgtttttaattctgataacaatgctagaggttccatctgtttatattcttatcttagatatgttgacatacttccctgcacatccccgccaacacaacatgctatcaaacttttgggtttgataccagatagatgaaaaatggcatctcattgtccatatttgcatttactttattatgagtgggtcagtcatcttctcatatgtttaagaaccattcgtacttccttttcttgttctttgctctttttctttgatggtggttctttttcttattgacttgagagagcacattgttatattaaataacttaatttctgtggcaaatattgtccccatcgtttccccatcaaaacatcatttctcttttgactctgtttatagtgggatttttgtctgattgccatgcagaattattttatttgtattattaaatttgttaatmttttctatggcttctgagttttgtgcaacacttaaaaagacctctcttagttatttttaaattgtcttaaatt

SEQ ID NO: 18234 - DNA, 1008 bp, Homo sapiens
tcaacaaatactcactgagggcctacaatgtgtcagaccctgtgtgtgctaagaaagcagtgagcaatgcagccccagcctttgggaagctcatattctgggaggtgagggtagtcagaccaggaayaaatgttatgttatgtaaataaacatagtatctcaggaggtaacaactgccactgaaggaaaataaggtagagtgcagtggccaacatgtatgggatggagaagggaaagaggtatgattgtatataaggtggtcaaggaagacttcacggataaggtgatatctgactagcacctgaaggaagtggaggctgtgcagattctggaggaagggcattctgggccaagggaagagcgagtgcctgggccctgaagcacaaccatagctgggacattggcagaagacgcttttcaaatgctcaaccccttgctctgccattctttgtgtgtctgtttccctatgagtctgtgagcctctcaaggccagggccatgtgactactaagctacctgtccacaaggcagccggaagagggaagaaggtgagaagcacatcatgtgaaaggtggcagaagagatgcttccccagatattctgtggtctgaaaagagaggctcagaagaaacacagcagctggctgttttcctttgcctgaagggctgtcatatgtaagagaaagtcaaaagaatccctgttgtctcaaaaggcagaattcaagtgagtaggcagaagttacagagaagccaactacagctccatatcagaaaggtatgcacatctctcacagtcagagctccaatccatgggctgcctcacacattgcccatcaccagaggtacttcagcacaggctgccagttctgagatgcaggtgggacaaggcatcccacacagccccttctggccttaaggctgtattaccctcacggtccccactgttcacctggcaccttgggacaagctgactgacaattccatttattacactgtctgatgctgagatc

SEQ ID NO: 18235 - DNA, 1289 bp, Homo sapiens
tccccatttgcaggttagaaaactgaggcttaaattactgttccaaatccatgaggttaataagcagttggagtcaagattcaaatgggactaggtaaggtaggctggtgtgaagtttgcagccctagccacatatcagagtcacccctgggagcttttaaaagtcagaggtctgcccctcctgcttgggcctatggaatcagagtctttcagggtcttgcctgcgtcaatctgatgcccactctcaagtgacagccacgggtaagggctaactgcctgggctttggcatcagacagacctatgcttagtcctgggtctgccactcatggcctttccacagatcacctcgcccctctgtagcctcctaatctataaagtggggcagcactaggacctggctcacagagatattgtgagaacggacaacacagtgagaaccctacttcgcacagggcctggtgtgtagtgagcatttggtaaacactgggagtcctcgctcattgggttgggtgctgaccagggcggggcactctcaagctgtcagtacagcacctccgttcagcctcacaaccacctgctagccatgaaagaattagcaacataattgatgaacaggcccagcggataaggaactgaggagagcagcccagagagagagagcgtggggtggctcccccatcctgtgacccggctctgctgagagcatggggtgactcccctatcctgtgacccagctctgctcaccaccgctcccttcacacatgcccacgtgcatgcgcacacacgcggacccctcagtcctggcagcagttagccgcagtgcaagagcatatccaatctcaggaagaagcagtggttcctgctgtcttgctgcagtgggggtctttacgtcccttcctttacccccttccctcaacctctgtttcctggatcctgggcacaragccaccccagggaccatgtggactaggtggcacagtgaaggccagcaggtgcgggcaggcgtgagcacccatgggcatctgggaagagtttcgttgtcagctcttctcggtgtacggactttccttttccatttggggaacaaagactctttgagtgcattgagagccttgaatcctgaggatgacatcaactgaaatgagtcatcacccccacccggcaggcagctctggagggctcagctcagggctctgggaggaaaacacatggaaaatggcacggagaaaaaggggcctgtcaggggcacgtgaggggcatgggatgggagcatgcagtgacctgctgg

SEQ ID NO: 18236 - DNA, 589 bp, Homo sapiens
gacagtaagtagggagcactagaggtgactacaaccagccaattaggaccataaatcctcaagatgagcaccatatattaaattgcatcagatgatcaaactacttatgtagtatagcaggatgtcactaatactgcaaaaccattcttgtaaaaggaaaacaatcatatctaatttatacagtacatgataataaagattagttatgctttcagtagattattttttgagacacactcactaatatcaatgtgacacctcaaaccacttcatttagaaagcacaaaagttgtttctaaggttgatttttttttcattcaaatacaagactggtacaggttataataaactgtaatacttaaatcttagctacatatcctgggtttttaaaaaatgtatttgtttacacatcatgctttttttgtgtataattagcataaagtctgcaaaacgttgggaagggagcaggatgtgtttagttttggataagtttgaaatatcagtgaagcatcaggtacgtgaggaacaggtaaaytgagattgtagatgaagagtagacttgtagattgggaataattcatacacaggt

SEQ ID NO: 18237 - DNA, 1383 bp, Homo sapiens
tttcctttctcttcagtaaaagtaaaaaaaataataatgaaagaaaaataaagcagtcttgcaaccttaatactcagggagacactttgagtcctaaatgagtcatgtgttttagattaaacaatctataactcctctactctttctgtgtgagcagcatttttaaaactctacatttgtcttcctaactcccaactttcaacttgcaagtctttccactcataagttttgtgtacgttgtaaagggatacagaattctaatagagttctgcccttcttttctctgtgtaaataaacctggaatttatgcattaacagggtcrtagctagctggaaattataacctaagttattaatgaattgggtataagaggaaaatgatccataattgaaatggctttctctgtgggagtaatgtttcctcttgcattgaccaggcatcctgcactcagagccaaaacttgccctggagtgaaagacaaacaaaacatctttttttttttttttttttttttttttttcataatcagaagttacctctgtagatcttagacttcttcagtgaaaccatgcacttttgaattattagtaagttagggtaattggcattattcatcactgcaaacatttattatttctttgtagtcagaacatttaaattctgtattgtagctattttgaaatatacaatatattattatctatagttatgctactgtgcaatagaacactataagttattcttcctatctaattgtatctttgtacctattggcttgtatctctccatttttctctcccccaacgctcctgcactctggtaaccacaatacaattactactcagttgagttccttatatattattgacattaactccttgtcagacatacagcttgcaaatattttctgtcatttatttacaatagcggtgtgagagcataaacaactgctggtagtattttgtataatagtagaaaataccacagaaattatgcaaattcagtacctttgaccgacagagcagtatttaaaagatttgaatcaaaaaggcctgaggagagtctgtctcactcccactttccacagttctaaacattccatattgtcttaagcatggctgttttccacttacacgttaacctttggactctgaagccatatcccttagaaatacttttgaaaaaatttttgtaaaaaaaaatgtaatccacttcaagttgatttttgtataggtgaaagataagggtccagtttcattcttctacatgtagatacccaattttggagtatccacttcaaaagcaccacttttgaagagactcttcttttttcccaatgtgtgttcttggtatatttgttaaaaatctgtagcctatagatg

SEQ ID NO: 18238 - DNA, 1335 bp, Homo sapiens
gattctttttattttctttttagagacaggttctcattctgtcacccaggctggagtgcagtaccacaatcatagctctcactgtaacctcaaactcttgggctcaactgatcctcccacattaaccttctgagtatctgggactacaggcatgcaccaccacacccagctaatttttttttttttttggtagaggcagagtctcactatgttgcccaggttcatacatgaatgmtttgtaatgactgtatctttccctatctctctctctctgagtatacactttaaatttataatacctaatctcttactatttttacatttagattatttctaatttccctgttataacatatcaagcaatatcttcatgcacatatctttgcataattcccagaagtaggattgctgggtcctaggttgttgtattccttgggaacctttggatgtaaataaatcaattcaggctagaataagcaaaaaagcctctcagagaagagagaacccaagggtgggtttgcagccagacttcacaaaggtagaggacgaggaactgaagggccatcagaaaccaaggaaatttttccacttctcaatcattctctttctgcacataggattgttctactttttggtccacatggaaagtagaagagcagcaatccattgcacttggatttttatcttttcaggagatgggtccaggcaaaagtagaatctcttgggtcctatttcaacttcccaagagagaacatctgattgcccctgctgcagtcagctcaggtgtccacctctggtccaagcttctgtggctggggggcagatgtgtgcgtggaggggtgtcacaatgtacaaacagctgccaagtgccctgaggagcagttaaagagaacattatgagtggcacaggcaccacaaagtgattggaatgtgtagctaatcatattgtgttaaggttttggatctgcaattctcaaactacctatcactaagtgggcatctttctgcaaccttcctaattggataatcactttaaaaattatcatgacggccgggcgcggtggctcacacctataatcccagcagttttggaggccgaggtgggcggatcacaaggtcaggatatcgagaccatcctggctaacacggtgaaaccccgtctctactgaatgtacaaaaaattagctgggcgaggtggtgggtgcctgtagtcccagctactcgggaggctgaggcaggagaatggtgccaacctgggaggcggagcttgcagtgaaccaagatcacgccactgcactccagcctgggcaacagagcaagactctgtctcaaaaa

SEQ ID NO: 18239 - DNA, 1864 bp, Homo sapiens
atttccctgataagtacctctattacatatgacactgccccttcatatcactcatctcattagtaatttcctgttcagtagtttttctttctgttgagaatgaagttcagaaagcctagatccataccatcttcgccactgcttcctcagagcccagcacagtgcctggcacacagcaggtgctccgtaagtgcttgtggaatgaataagtcttgctgccactagcctcttatctctctggataatcctacatggggtagtttgtgtgttttttttttttctaaaaactccacrgccaggttatcttttgttcaggaatcatcactagttgccagtgccgtacgtgaagcccaaacattctagcctggtcctggctctgggaacctatgctgctcagtcattccaactttctatctcacgagtcctctcagcgagctctctgctcacttcctgaaatcctactcgtcctttgaggcttggctcaaatgccagctctattacggtactcattccttgcttaaaactcactgatgcctcccctttgctacaagatgtaaagggacattgaagagttttaagaggaagagtgatttgccctgatttgggtttgggctgagtgttcctaaagcttcatagggatggatcaggggtggcaggtgctggagggaggcaggcctctccctctaaacatgaccctcacccagtgcctacaagtttgtggagccaggggcttgctcaaggcctcacagtgattcatcatcaggcttagagatttacacccagttggtgccaaggctgctgccatttaatccactcagttctgctgctgatctggcccctgggagtgtggtttcccaactccctggatccctggcctgaatcccagggtctccctcacaatgggacctaaaaatagaaaccacttttatagtgtaggggaaaaggcaaaggacccaggcaaggtttaaatggaagtgttccctggagggctgtctggggaacatagggattgtcccaggaagctctgaacataaaggacaggccttctggcaggggacaaagtggccctgtttgcatttgggagggcccagctccacttccctcacctactcacaatctctcttcttatgcctttcctggctctgaacccatgccttgcccagcactccgtccccatccccaggaagggcctttgtagccatcacaaagcattagaacgaagcattagagagagccaaggagccatcaaatcaaagttaaagagaggagaagaggatggggctacagcgaggggagggctgggatgaagatgcccagagtgtctgaagtgaacatcaccatctcgagcagcacacaggtctttctggctgacaatcctggacattcctgctcccactcacacatcactgaaaatgccccagatgggcccacatgccaggagaccacatcacacactccccagcacgttccagtcctgacagcatgatcctggattaccttcctgaaccatcatcttctcatgtttacaatgaaaaacttaaaaaaaaattttttttgagatggagtcttgctttgtcacccaggctgcagggcagtggcatgatctcggctcactgcaaccaccacctcccaagttcaagcaattctcctgcctcagcctccccagtagctggaactacaggcgtgcgtcattatgcctggctaatttttgtatttttagtagagacggggtttcaccgtgttggccaggctggtctcgaactcctgacctcaggtgatctgcctgcatcagcctcccaaagtgctgggattataggcggagccactacacctgacctaaaaatattaatagtaggatttaaaa

SEQ ID NO: 18240 - DNA, 1599 bp, Homo sapiens
tgttaccttatgaagttccttcttggcatcagtagaaaaccatgaatcatataatgagtagacatcagtgtgtcataaggatgtgaagtgatcatgctcagttgaatcagctaggtgggaagaaaagggagctgttcccttgtggagaaagtaaaagaagcttcaggtgtacctgaaggtgtactgctcacgcctgtaatcccagcactttaggaggccgaggtgcgtggatcacaagctcgggagatcgagaccatcctggtcaacatggtgaaaccccgtctctactaaaaaatacaaaaattagctgggcgtggtggtgcatgcctgtagtcccagctactcgggagactgaggcagaagaattgcttgaaccagagagtcggaggttgcagtgagcagagttctcaccactgcactccagcctggtgacagagcgagaatccatttcaatgaaaaaaaaaaaaaaaagcttcaggtatttttaagtttcaactctctcaagctaaagctggttatatttattgtcttcctgtgagagagaacatttgtctgttcacaaatttttcacaaaaagttggataacttactacatttttatatttgtgtatctgaattgctgctgccataggttaaatggaatatgatcacggcaaattgacagtcaaacctagcctgaaaatgaataaagaacgtcagtctacagaacgttttccatcccagaactcaggcaagtcagggttcaaagatactgaatgagtccaatgcctgaacacaggctgaaagttttagcagaaaactactattaaaagcaaattgtagctgattcatcagagatttgcagatttaaattgaggtaactgctgccctacctttggggaactggtgagtagtgtagtttagcagtaatgaaaataaaatgactcaaaatataagttaaaatgtgaaaataaagagctaataagcatcttaaatgatttgtagtataaaatatttggaacttactgacactttgaaaataatgtctattccacgacaccaacagctgttaaattttgtggtgattgctgaaatggaaaagaacgggcttgtaaaggtgaagagagtctaaaattagtattgtctgtgtttgtatgaaatgagctcattcctcatgtccatatttgagaactttacaagacaataataattattagtattgtcttgtaaaactgtaagtctgataatttattaccactttcacatgagtattgctattcaatgtatctaccaataaggaaaacaaagccatgaatgggaaaagcagttgtccaagatctcacagtcaaaatgtggtaacaattttactgaaatgaagattcttttggtttcaaagctcttattctttctgctggctacactgactctagaataggtatagtgtaagactttcaaaatgctgatagggcatcaacgcctgttcttaatttgattaaaataaaaagcatacaaagtgtatattttcctttcttggaattaactgaggtaattttgtttttcctccctcatttgycctgaagacagtttacacttggtcggaccacacaagcaaagtttcaa

SEQ ID NO: 18241 - DNA, 520 bp, Homo sapiens
tgaacttgtgctttcagaagcattgccattgaagcaaatcccctgaagttctggtagccaaattcaataaggaaaaagaaaattatccttaaagttttcactaccaattatcagacaccagagaagaagtgactatttcatgtttatattgttgtcaccccataaaacttagatggarcttgtgtgcttctactctgtggaaaatttcacaaattcttgatgttcttcagacttcatacaaatttataaaattatggacccatagttttattcatggtctttgattttattctcctctttaaccttgagaaagatgaaaactgatttgaattaacaattaattgactgacatacttgaaaatgttttgaaaagtttgggccatacattgttatgttatcagacagaaaacatgattatcatcctcccctaggaaaagacattttaaactttcatgacaggatattgtggataacctaggaaaataaataaaacaatgttacgttgcagtgtcccaggcaa

SEQ ID NO: 18242 - DNA, 547 bp, Homo sapiens
ctaaatggggctaattattttgtcctgtaagcactttttttcctataaatctttcctrgtttaaaatagttatcccaaaaagggccagagctaccaggtagggcagtgtttgaacctggaggcactatcttgtggaagattagcatccatgatattacatattctaatgtcctagccttgtatagctcctcaggaagtccacccaacacaagaggcaataggacctattcttctaccagcttgcatttttcctctagtgacttgctaagcaaccagaaaaactcacccagggctctgtttttattagtccctaaagcctaggagctacctgacacatgtttaggtagggtggttgtaaatggctttgagattactttgttttccaattgctaaattttcaaataatttaccacttattttgagctcctgtttggcagcattaaacatttcttaatgaaagatctcggaaaagggggaaaatgtttcttgatgcatgtttaaatgggatagtggtaaatggctttgagcttacttagttttcaaattg

SEQ ID NO: 18243 - DNA, 1689 bp, Homo sapiens
gggcaacagagcaagaccctgtctcaaaaaataaaatttaaaaatttcttctaaaattaatttttaaggggtaacatgctgtgcctgtttttatattttgagatctcctaaataaatgttccagtgtaaattatcatatgtcctttctctagcaacatatggaataattcccaatcattatttgtacgtagtgttttttctttaaatctattttgtttttattttgaaatgttatcgtacatgttgctaacaataatcaggaattatagataattaatctagaatactagccccattactatttcttcttccgtcatgacctgcagggaaacaatataggaacacccactggggatatgactgccacatgttagactataaattcagtacattgcattgcattctcacttgcagtttataaaacaaagtgaaagtgtgagttgggaaaaaaagacagttgacagaaaagtatgacaatgaagaaatgatgatgactttaatcagtctttctctaaatgtgtctatgaaacttctaatgtagaaccatctgtgatggttgttaaaaatgcagatccagagtacctacgaaattattatttctgggcatgaagtttgggcatctgcattttaaataaaaatacacccttgtcatgcacaattacatttaagatgcactgagctgtgctgtctaggaatagagaatatttgtaaatctgattttatggtcttataatagtaccttcctagacttctttgttgcttattgttttatgattagctagaaatatgaagtctcataaatgggaaatgagggaactaatgggggatttagaaatgtactagcttctaccaaaatctcatgaatctgaaatacttttaacatcatcttgtttttgttatgtaaatatcatgtaattatagataacatgcaaacaatgatcatctttatctgttaaaatcaagaacaagacaaaaaagtgtgctattcagagcagctgacttcttggaagaaaaggtttgctctgactgtctttcctttcaaataagatttgtccctatcagatagaagaaaaaaaaaaacctaaagtgttctatgtaaaaagaggttatcaaatatttatttagcagttaaaatcaggccaaccaaggtggctcttgcctgtaatcccagcactttgggagtccaaggtgggaggataccttaaggccagaagtttgagaccagcctgtactaaatataatgagaccttacctctactaaaaacagaaaaattagccgggcatggtggcatgcacctgtagtcccagttattcaggaggttgagtggggaggatccctgaaattcagggtttgaagctgcagtgagctgactgtgccactgcactctaagcctgggtgacagaacaagaaactgtatcacatacacacacacaaaagttaaaatatttcttcaagtaaacttacactttttttaaagcctagtatagaacgcagataaaaccaagcagccattctccccttttcctgtaccttttcctatagcctcccttaaatcactttgtggaaatccccaggccttacagaaaatagttataaaccattcctctaaccacgtaagtaaactaaaattccttcagtayacacacacacacacacacacacacacacaaattactgaaaacatgtta

SEQ ID NO: 18244 - DNA, 543 bp, Homo sapiens
gtaagattttttttaaaattgtttaacatttacctctgtcaaaatagattttaattaaatttaaattctgattttttwaaataatgagccaaataaatattgactcagaacagaagatatggttgttttaaagggcttgacctaaattaacatcaagctttttgaatttcttggtaattttactcaatatctaagtcaacgtatcaatctctacctgtgcctatatcacatatatcaaagttaccatttttacaaatggcactaatccagctgtcatgctgcttattgcatgagctctcatccatagagttcttcagcaagtctcagcaggatccactgatttctaacttttgccagatcccctgcagattaactggtgaactatgagaagtctgttttgaatcccgagtaatactgaaggtgattgaactctttatgaaaatagctacctgctttcttcggtttcagcaaggaacatgtagagtatagtatgatagtgaagagtgatttcctcatatatatatttgttgtcaaaattttctc

SEQ ID NO: 18245 - DNA, 553 bp, Homo sapiens
ggaagggaggtgttaaatgtaaatgtgtygcattcattcccagttgctacatgaatgcattctaacaagctgctagaaagggagtcaaggaaaggaaagattctgatccatgttccaaaaatgcaaagctgaagagatgttgcaagatgacattcaatttgaggaaaagcccataatggggcttcttcagctttgcaagaaaaccatgagattaagaggaatgatggagacccaccatccggacatgatggaagcccctaggttttcatacctgggctcccaggggctttgactcaagcagaaaaacctggggacacccagatctctgcctctccctgtaggcaccacagggcccctggctggagcctctttgctcactgatgacagctattgctgcactcaccatggatgccaatgcaagcagcacagaaaaggggtgctgcagtgctcctctcagatgccaggtcacacttccaggctacagctgaacttgcatcttcacagacaccattaaaactcaacctaccggccgggcacgatggcttacacctgc

SEQ ID NO: 18246 - DNA, 543 bp, Homo sapiens
tggaattctctcatttgaaatcctctaatgacttcccaacaggtttagaatcaagtccaaatgcctcccgtgactcccccacaaccactatgccccaggcccacactccactccagacactctgagctcctcccggcccatggagacccttgcggctcatgctcatcgcacagccttcgccctgctggctgtgcccctgcctgaccatcccttttctgacaactaggtctcaactaatatgacctccacacacccacacttggaggctccccaggccccatctaaggtaacacctccacctccactgaatctatctcattctcttatctaatcctgctacacctcatccactacagagtactcatcactatcagacgttattagtttacacatgtatagatcgtctgtttacagatataacatgatctcgtccaactagsgttttactctcaattcaccatcctgcccccggggcagactctgcatatgccctggtcactgctgatcctagaacaataccggacacatggctcaccctccacg

SEQ ID NO: 18247 - DNA, 3087 bp, Homo sapiens
cttttaatagggagaaaactaggattctcctgacattctctccaaatgaatggtcatatctgggattgcagctgtattaagtccaagccaggggatactagaggaggaaaaaatgtggtaaagtcaatacaaattcagttgtgatgcaaattttagtcttctttatctggcctcttacttactttttagagtcctcaaagagctgctccttaaattttatccagatttcataactgtatttagtggaacagacaacatggagcactcttattctttcaattggaactgaaatcaaacttttaaggcattaaggaataatgggctcatacatgaaaattgcttagaatagtacctgaaaaatagttaagacttgatcaatggcagttattataggcaactattactattactattttccagcacttaggtagggaccgggatagagctctaagcctttatggtgcttatatgttaaaargagagatagatatacacaaataactagttataacttttagaagcatacaaaacaaaaagagacagtgattggacagtcaggatattgttgtggagtgctttcatttcatgaacatgcatacatttctatggattgtgaattcctgggtgttacaacatatattttgattattcagggacctatatactaaatgtattattagtacattttgaaattacaaagcaagttacagagcaattgtattttataatactagatattgttttatttaaaaattacattaatcattttatttcagtgtcgactctctgccaggtactttttcattcgggttatcttaccactttaatagtatcatctgattcttatattttaccattcttttggtcaaatggcaagacaagtttctggattgtagccagttcaccagtattaaacaatgcctgttgcctctcggggtcctgagctggacatgtgtggaggaagaataacaggggaaccccaaagaagctgctctgtggtgacctgaaaaggaaggatgctctgcaagttgagcagaataaccatgttagaacacttataagaaaaatttcaggttggagcttgacaactggacaagtcaggttggatcttgactactgcacaaagacaacagcaggcagcttgcctcttagatgtcagtgagccttcttatagtctacctacatgtgccttttgaaagtcgaaacagcactatactaacaactgaaagaaaaaccagttgttcacacattgcaaaaactagtacagattttcagtagtgcaaagcaatggatagaggctttatgtggagtaaatctactgtaatgctcatttaattggatggattaaaaaaatgcccttaagtctgttgaagttaaaattcctcaaggaagccatgcttctttccaaccaaaagccttaggcatgctttttcactttttacctaattaaattttacataaaattcattttcaactccaaacctacttcctcaggaaagacttacctgaatgaccatcagagtcaagtattttgctttcataaatttctatactttttagtagcacctaagtcatgtttattttgcccagcagtgtagccccagtgcttcacactgtatctggtacttagtaggtgcttattaaatattcaataagtatggcaattaattacaaataattgttgagcactttgaaagcattaaacactctgtcacaaggatgaatgaatatgatttgtgctctggagatgtttgcagtctaataaggaaaggcatgcatgtaagaaaatacataaacacacttgagttctgtttttgctgtcacttaaaagcatgaactggcagtgacgagactgccaagaaaaaaagtgaacagtcatccgggtagggtgaataaaagaggttgaaaagaagggcatcacagaaaaactgcagttgaaccatggacaaagatttcccatatgtattgtaactaggaatgcttttctgtgtattgatacacacatacacacatatgcacacaatacataaatgtgaaagtacttatatgttatattatattatatgctatatgtgtacatatacatagtaaatggatatctatatttttagtataaacatgtaacatgtaattctaagattaattagctgagtcattataaactattctctgccacatgcacacaataatttctcagatcaattatgacatcttctgtatgtgctttcaatattatggtaaaagaaatgccccatgtatcattttggtttgactcctaatttactatggtgtaactgtagcttttacttcccataggcaaagatctgttaacagtgaattctgcaactgagaaagttttgtaaaattaatctttccaagatccagtgaataatattttggcactctttttgatgtttgtaaatctccttggtaagacaatatggatctaaacttttaatcctctctcagagacaacagagtatcacagtgtattatttgtagtgattatttagagaaataaccttggtattaacaggatgtattttgtctgaggcttaaattgtcgatcagtctctcatgacctttttcactattctagcatcatagtatcttgactataatctcaatgttcttttactcaaattccattctcttgcataatgatgaaacatattcagccaccttgtaactgaagcattctacttagcacctactgagaagaatttttattcctgcatctaggtattacagaaacagagtgacaatcactgtgattgaaaagcagcatatcttcaaccaacttagccattattcaccttgtccatggaactatcattattttggctaactaagggcacccatgagtcctaagtttcacattttattgtatattaataacagaagaaggtaattgttgagataaaaaaagaaaatgtccagtttttaggagcaggagcagatggtcccagaggcttttctcttttacctcattaggcctgaataaattgcaacgtcttcaagtaaagctgtagggaaggcatttttgcgattggcctgatggtgatccacaggtgcagggaagtgcaa

SEQ ID NO: 18248 - DNA, 1725 bp, Homo sapiens
tgtaacaaaatgtcatatgtgatctgtaaatatgtacaaatattatgagtcaataaaaaataaaaaaaaaacacaaatgcaaaacaacaacaacaaaaccacagcaaaagcaacaatcccataggggttagcacaggcggctgaggaagcacagaggaatcaccccaccccgggctggaggtcagggaaggcttctcaaaggcagtgacatctaagacacagcaaacaaatgtgcttattaaacaaaggaggaatgaacgtgcagaatccctaatggcagtgcaggggcaggctgacctgggtgctctctcttactcctttaccctcacaaaatagcactgaagggccaggctttaggctcttgggctttggggctggtgaactgtctgggtctggcttctctaagtaaatgtattaaagattcacagtgaagccctgagaggctttttctatgttacccagtcttcttaaactggagcacagaacagtgtaagaaagtatactcatgagttgcaggaagcacaggataaacatgtgttctggactttctcaatggtaagaaatttaaagcttaatttaaaaatatgacctgaaggacaagtaagagttagccaagtgaagtgggatagggcagaggtcattccaaacagaggggagagtttaggaaaaggcactccagagggcaagggctataggaggaagagcatggcccagctggggaaatgtgagtattacactattttttattttcttatttatttattcattcattcgttcattcattcattcgttcattcactcatccatccattcattcatttatttaggacaagggtctcactctgttgctcaggctggagtccagtggcatgacagcctccatctccctgggctcaggtgatgctcccacctcagcctcctgagtagctgagactacaggtgtgcaccaccacgcccagctcatattttttggtattttttgtagagatggggttgtgccgtgttgcccaggctggtctcgaactcctgggctcaagcaatccacccaccttgggctcccaaagtgctggcattacaggggtgagccaccacgcccagccctgaatattacagtatgaccagagggaaaataactctaagaggacatagggatgattccagagaggtaagcaagggttagatgatgtagggcctagtaagctcagttttttgtcctgttggagacatgtttccatgaaatcaactaccatctatagtctattaattccaaattttctatctctatccttgagcccctcttgggaaatcagacccctatatccaactgtcagtggatgtaaactcattaaactcatgctatctgatatgaactctcctgatttccttccaggcttgctcytgatcctcctttaggcctctgctccactccaggtctgctttccatgatgcccactgctaggtttccttctgtagattctggtctcttctcttctttctagcccggtgtcctcatggactgatagctcagtcataacccctgggctgtcctgatcctgacatctcttttttctggatgcagcattccatgggcagggcccaggcaaatctgaccatgcaactctccttcaaagccttcaatggatccccattatcctcaagataaacaagaagaagttcaaactccttggcacccaacacatagtgttctagtgaagggtaaatgag

SEQ ID NO: 18249 - DNA, 803 bp, Homo sapiens
ggcacgtgtctgtaatcccagctacttgggaggctgaggcaggagaatctcttgaacccgggaggtggaggttgcagtgggccgagatcacgccattgtactccagtctgggggacaagagcgagacttcgtctcaaaaaaagaaaaaaaaaagagttgytaaattttagtttttaaaactccatggattgctccactggtattaagaaggccagtactattaagtaggggagagcacaaagttgcaacaaggactgcacatgatctagaattcaggtctgtggcctttccgagaagttgcactaacatggagaagccaaaaagggtttatgaacagcttcagagaagagaacatgggtaattacaggccctttgaggactgagaggttgagtcccttttcctcatctctgtttggattggccaacagttctgagatgaacaaggctgagtaactaacgtatcagaggaatagaaagaaatgcaaataagtaaggtgttttagatgctgaatctcaccaattctactttgtaagacttatagataaaaagaaagcaaggggaaaatacttttgaaaaataggaagtcttttgttgcataatatgtttgctgtcagctatggcaagtgacagtcatgggaggtaccacaagagctttcatacacattagctcattttgtcttaaataatctttaccacaacaaagtgaggcaagcattgttattattcccatgtaactgatggtgaatctgaggctcaaagctcacagtcagtcttccacaggactgaaaactgaacctagctc

SEQ ID NO: 18250 - DNA, 521 bp, Homo sapiens
gtcacccaggctggaagtacagtggtgtaatctcagctcactgcaacctctgcctcctgggttcaagtgattctcctgcctcagcctcccgagtagctgggattacaggcatgtgccaccatgctggctaatttttctatttttagtagagatggggtttcgccatgttggccaggctggtctggaactcctgacctcaagtgatctgcccacctcagcctcccaaagtgctgggattacaggcatgagccaccaagtttttaattgatggcattttaaagaatacctcatattttatactttccagacattttccccacttatatgaaatttaaaatgagagtatagctgttatttgttacttggtcataaaggtatttggaaaagcactgatcttagaattttaataaaaggcatttattaccaaaaaaaaaaaaacactggatatattgamcttaaaatgagtaattagtattttccagtaaagcattttggattcaacatagactatgcttcaccct

SEQ ID NO: 18251 - DNA, 641 bp, Homo sapiens
cagggacacacacagggaaaacaccataagaggatgaaggcagagcagggctgatgcttctataagtcaagggggacaaagactgccagcatgcagcagagccggggacaggccggggggagatgcttcccagtgccatcagtggcagctggcagaccttaatcttgaacttccagcctccggcacgtttgtgcaggccaccaagtctgcagtactttgtcacgacagctctggtcagcggcagtggctgacatcctggctgcagcaggcttgtcctcatctgggtgggcttcatctatctctgcagcccccacacccctgctgcgggaagtacaggccttgaggtgcagttcgcaggaccccaggctttgagtcagttttggagagggcaaggctgatggaagcctttttgtgggctgcaggtgttcagtcttagagacatggcctgaaggatctcctgacatggtccagggaggcctccgtgccgtctgccttcatctctgtgtcaccmagacccccctcgaggcggcctgggcctgggctgcaaaccactgagcaggtctcagcctcaaccccagaagctcacaagtgggagggagccctggaagcccgtggtggtgttttgattcccgtggtgtaaa

SEQ ID NO: 18252 - DNA, 586 bp, Homo sapiens
aggcccagtgcaaagtgaaaatgtggatccccttgtttcaaaaattattaagaagttcaagacagcaacagcagggcatgaaaccaagctcagcgtcctccgatgtgcaagccccatgcaactgcacaggtctcacatccataaagccagccagatcagaaacctcaacttagaaaaagagggagataaagaaacagcacttgatgcagtggctcacgcctgtaatcccaacactttgtgaggccgaggcaggtggatcacaaggtcaggagattgagaccagcctggccaatatggtaaaaccctgtmtccactaaaaatacaaaaattagccagtcatggtagcaggtgcctgtagtcccagctatccagaaggttgaggcaggagaatagcttgaacctgggaggtggaggttgcagtgagccgagatcgtgccactgcactccagcctgagtgacagagtgagactccgtctcagaaaaaaaaaaaaaaaaaaaaagagcaaaataaagaaacagcacttgattctctacactgatcttcaacagatgtctggtttcctttacctctgttccaactgtgata

SEQ ID NO: 18253 - DNA, 1485 bp, Homo sapiens
cactggccagggtctcaactggccatcctgcacaccagctagggcactgcacactgaccaaagagactaatttgcatatcagccagagatatgcccgagaggagggacctggggtcctggtggattgaccagaaaatgcagtattcttttccttatcccagagatctctggctgatatgaaaattagtctccttggtctgtttgcagggcagaccagcaccaggaaaaatcattctggcctgccccaagggttcagccatatgcttcgtccccaccccttacatttcacccacacacacccattcttggscttcccaaagatcttgggtgcaaaccaaactacagggtacactcttagtgagccagccaaactgcagggtagactgcccgccaggtctcccatcttagcccctgagcttgatcacagtgggaggctaaacatggaggaaaaaacctgagttctctccctcatccacatatacacacctgggataaggggtttccctggaagaaggcaggattcatgcgagatcgcaggctggagaagtgggaggtgcctgggccaggagccctctcagcatggttcagaaggcttggagcaagaagaccggtgactaaggactctgagggattctggatcctccatccccacctacatctattacatagtctgtgaccccttgctcaggccttgggggtcagcagcctaattctttgcataggtacatgttgggcgcatgggcctgaggctgtgggagaggacacgggtgaggctggtccccagactgaccacgtctttgtcttcgtctatccacagcccatggcagccaactataatgtcttcctcaacagctccaagctagctgagtggcgtatgcgggtggagctcaatatcagctctggcctctttagggaggcccatgatcgactaatgcagttggccgactgggacttttcaacactggattcaatggtcaaggagaatatttctgagttgctgaagaagagcaggtgaccctaggcgcagcctgtcccgcagggcctggctggcttagcaatctgagccaccttccttaaaggaaatactaaaacaaaaacaaaaacaaaaacaaaaaactgttctttgcctaataaagaactggaacaaccatcacagctgctgagcagcagacagttggcatatgcatagggtctgatgtgggagtgggtggtggttacagatccttccagtttccaaaaagaattttaaaagtaaagggttaaatatggttacattgtgagtaataatagttggtgacttcaatactccactttcagtaatagaaaaactacagaagaccatcaaggaaatagggaatttgaaaagcacgattaaccaatcgcatacactagacatgaacagaacgttccacccgacaggagcagaataagcattcttctaaagagcacatggaatattctccagtatagagcatatatttggtc

SEQ ID NO: 18254 - DNA, 1485 bp, Homo sapiens
cactggccagggtctcaactggccatcctgcacaccagctagggcactgcacactgaccaaagagactaatttgcatatcagccagagatatgcccgagaggagggacctggggtcctggtggattgaccagaaaatgcagtattcttttccttatcccagagatctctggctgatatgaaaattagtctccttggtctgtttgcagggcagaccagcaccaggaaaaatcattctggcctgccccaagggttcagccatatgcttcgtccccaccccttacatttcacccacacacacccattcttggccttcccaaagatcttgggtgcaaaccaaactacagggtasactcttagtgagccagccaaactgcagggtagactgcccgccaggtctcccatcttagcccctgagcttgatcacagtgggaggctaaacatggaggaaaaaacctgagttctctccctcatccacatatacacacctgggataaggggtttccctggaagaaggcaggattcatgcgagatcgcaggctggagaagtgggaggtgcctgggccaggagccctctcagcatggttcagaaggcttggagcaagaagaccggtgactaaggactctgagggattctggatcctccatccccacctacatctattacatagtctgtgaccccttgctcaggccttgggggtcagcagcctaattctttgcataggtacatgttgggcgcatgggcctgaggctgtgggagaggacacgggtgaggctggtccccagactgaccacgtctttgtcttcgtctatccacagcccatggcagccaactataatgtcttcctcaacagctccaagctagctgagtggcgtatgcgggtggagctcaatatcagctctggcctctttagggaggcccatgatcgactaatgcagttggccgactgggacttttcaacactggattcaatggtcaaggagaatatttctgagttgctgaagaagagcaggtgaccctaggcgcagcctgtcccgcagggcctggctggcttagcaatctgagccaccttccttaaaggaaatactaaaacaaaaacaaaaacaaaaacaaaaaactgttctttgcctaataaagaactggaacaaccatcacagctgctgagcagcagacagttggcatatgcatagggtctgatgtgggagtgggtggtggttacagatccttccagtttccaaaaagaattttaaaagtaaagggttaaatatggttacattgtgagtaataatagttggtgacttcaatactccactttcagtaatagaaaaactacagaagaccatcaaggaaatagggaatttgaaaagcacgattaaccaatcgcatacactagacatgaacagaacgttccacccgacaggagcagaataagcattcttctaaagagcacatggaatattctccagtatagagcatatatttggtc

SEQ ID NO: 18255 - DNA, 1212 bp, Homo sapiens
ccaacaggccccacctgggagggccctcaatttgacatgagatttgggcagccacgcagacccaaaccatatcaggtttatattcataaagctcttagaagatcacctggatgataactcaaaataagtgattatatatacacatcaatctatccacctatccatctatgtttgccaagtaatagaaatgcaaaagacatttaatgatgaaaccaatcaagattatattctttattatatgaaggccatttgcagagaggaaagaatcaaggttaacaaaaaattgtaacacagagtgcctgggagaatgttcattaactgagatagggaagaaacaacagtttttagaaaagattaagacttactttgaagatgatagcttgtctataaaaaacacatatcaagtgttcaaaagcttgttgaaaatggagacataatatacaggatggaaggagctcatggtcagaagaatagatcttgggatttttgcttataattaaagtattttgttgttgtttttttgttttgtttgagatggggcctcgctccatcacccaggctggagtgcagtggaaccatcagggctcactatagcctcaatttcccaggcttaactgattctttcatctcagcctccccagtagctgagactatgtgtgcaccaccacacccagctaactgtttttttktttgtttgtttgtttgtttgtttgttttggtagagataatggctccctatgttgcataagctagtctcaaactcctgggctcaagtgatcctcccaccttggcctttcaaagttctgggattacaggtgtgggccgctatgctcagcctggttagttgaagttttggatcagactatcaagaatagaaagaaagcaggttagagaaaatgttcaagggcagacccttagagctatgcttctcaagctttacatgtacatgaatcatctgagcaggtacttaaaattcagatcctgggattctgattcagcaggttcttagaaggggcctgagatgccatatttctgacaagcttgcagatcactgccatattgttagtccatggccacagagcagcaagtccctccaacctggtgtactgaggcatgactagaaaattcagggccagggtggagtaggagtaaatggaacttgagaatgcaatataattaataaatggagaagaaagtttccaaaaaagaaaa

SEQ ID NO: 18256 - DNA, 1212 bp, Homo sapiens
ccaacaggccccacctgggagggccctcaatttgacatgagatttgggcagccacgcagacccaaaccatatcaggtttatattcataaagctcttagaagatcacctggatgataactcaaaataagtgattatatatacacatcaatctatccacctatccatctatgtttgccaagtaatagaaatgcaaaagacatttaatgatgaaaccaatcaagattatattctttattatatgaaggccatttgcagagaggaaagaatcaaggttaacaaaaaattgtaacacagagtgcctgggagaatgttcattaactgagatagggaagaaacaacagtttttagaaaagattaagacttactttgaagatgatagcttgtctataaaaaacacatatcaagtgttcaaaagcttgttgaaaatggagacataatatacaggatggaaggagctcatggtcagaagaatagatcttgggatttttgcttataattaaagtattttgttgttgtttttttgttttgtttgagatggggcctcgctccatcacccaggctggagtgcagtggaaccatcagggctcactatagcctcaatttcccaggcttaactgattctttcatctcagcctccccagtagctgagactatgtgtgcaccaccacacccagctaactgtttttttgtttgtttgtttgtttgtttgtttkttttggtagagataatggctccctatgttgcataagctagtctcaaactcctgggctcaagtgatcctcccaccttggcctttcaaagttctgggattacaggtgtgggccgctatgctcagcctggttagttgaagttttggatcagactatcaagaatagaaagaaagcaggttagagaaaatgttcaagggcagacccttagagctatgcttctcaagctttacatgtacatgaatcatctgagcaggtacttaaaattcagatcctgggattctgattcagcaggttcttagaaggggcctgagatgccatatttctgacaagcttgcagatcactgccatattgttagtccatggccacagagcagcaagtccctccaacctggtgtactgaggcatgactagaaaattcagggccagggtggagtaggagtaaatggaacttgagaatgcaatataattaataaatggagaagaaagtttccaaaaaagaaaa

SEQ ID NO: 18257 - DNA, 541 bp, Homo sapiens
tacattgtgatgtttccatctcccatttaatccttgggaaatcacatcatttacagatatttatggctcttttcagctttaacattcaataatttaactaaaattagaagttaacaaaagtcactgagactagaatttcttaattttatttctttatgtatgaatatttactaatatgtaaattttcttgtaagttctgaatcctaccttctttttaaggcacacagatttgtcctttgtagaagaactgcgcacaaaataaggttatcacagaaacatataagccaatagtaattatgatataaaatgctatattataaagggcttggcatgatttaatttcttatttttgtatttttcaaagagtaatataaagcatttctctaagcaacagagcatacatgcattttacaactttgtttccttttatcaaatgaaaatggattcaatatcagatttgtggcataaaatctgataaatctatgaagtctcaatgaactaaaacggcaaatcatattattttacttcattcctaargaaa

SEQ ID NO: 18258 - DNA, 610 bp, Homo sapiens
cattagtaatatttttgtaaattttattttaatataatttcaaacttagatacggaaaagttgcaagaaattcccatatgccctttatgcagattcagcaattgtttatattttgcacatttattttatcattctctctttcctcatatatatgtgtgtgcttatgatgtactctgtattcgtatctacyatatatagtatatatacacatacgcacatgcacacacatatttttttcagagtcacgtgagaataagttgaatacatcatgccttttttgccctaaatacttgtgtgttttggtaaggacaaggatattctcttacaaaaccatagtatagttattaaaatcagaaaatctaacattggtctaatactgttattgaatccacagtccacgtgtatatttcatcagttgtctcatcatatcttctttctttctatttctttctttctttctttcttttttgagatggagtcttactctgctgcccaggctggagtgcagtggtgtgatcctggctcattgcaacctctgccttctgggttcaagcgattctcctgcctcagcctcccaagtagctgggattacaggcatgcaccaccacaa

SEQ ID NO: 18259 - DNA, 592 bp, Homo sapiens
ttgggtgctgtaggtgctcattcatatggtgtgttattgcttccagttggtcctttttattatccrttcatttggatacaatggtgagggcgccactgaagaaagtgtggcttagggatggaaaggggaaaggagccagatgacctaggtagagactcccctctccccctctagctctccaggtcttccccactttctctttcctccctttccctcttcatcatgacctcatttcccttttcttgatcaaaattcctctggagattccagctgtgggaacctctgaaaccacgtgctgcagctacacgtgtgataccagaggcagacaactatgtgacctttgtgtgtgaaaagcaaaggcaaagacaatttatgagaaagtttttgctgagaacaatctggtgacagggtgattggggaagacacatttggaagatttccacctggacgtgttccttttccctgcctgaaaagcactcagagcagagcctgtgtggaggctgggatagggtgctgtgggaggtctgttctccagataacctctccaaggctctggggcccaacgaggaggatttaagtgcctggtgaagtc

SEQ ID NO: 18260 - DNA, 592 bp, Homo sapiens
ttgggtgctgtaggtgctcattcatatggtgtgttattgcttccagttggtcctttttattatccattcatttggatacaatggtgagggcgccactgaagaaagtgtggcttagggatggaaaggggaaaggagccagatgacctaggtagagactcccctctccccctctagctctccaggtcttccccactttctctttcctccctttccctcttcatcatgacctcatttcccttttcttgatcaaaattcctctggagattccagctgtgggaacctctgaaaccacgtkctgcagctacacgtgtgataccagaggcagacaactatgtgacctttgtgtgtgaaaagcaaaggcaaagacaatttatgagaaagtttttgctgagaacaatctggtgacagggtgattggggaagacacatttggaagatttccacctggacgtgttccttttccctgcctgaaaagcactcagagcagagcctgtgtggaggctgggatagggtgctgtgggaggtctgttctccagataacctctccaaggctctggggcccaacgaggaggatttaagtgcctggtgaagtc

SEQ ID NO: 18261 - DNA, 592 bp, Homo sapiens
ttgggtgctgtaggtgctcattcatatggtgtgttattgcttccagttggtcctttttattatccattcatttggatacaatggtgagggcgccactgaagaaagtgtggcttagggatggaaaggggaaaggagccagatgacctaggtagagactcccctctccccctctagctctccaggtcttccccactttctctttcctccctttccctcttcatcatgacctcatttcccttttcttgatcaaaattcctctggagattccagctgtgggaacctctgaaaccacgtgctgcagctacacgtgtgataccagaggcagacaactatgtgacctttgtgtgtgaaaagcaaaggcaaagacaatttatgagaaagtttttgctgagaacaatctggtgacagggtgattggggaagacacatttggaagatttccacctggacgtgttccttttccctgcctgaaaagcactcagagcagagcctgtgtggaggctgggatagggtgctgtgggaggtctgttctccagataacctctccaaggctctggggmccaacgaggaggatttaagtgcctggtgaagtc

SEQ ID NO: 18262 - DNA, 545 bp, Homo sapiens
ctaatggtttatacccattttcacaagttctaacagctggtaagcggtgcagctgggaaagcaaaagttttaatgtaaagatttctttttgaaaggccagtaaatctcttattaggaaggataacaacaacttagctagggcatctgtgggaaattaaagaaaggaagaaataagagaataaatttattktgaataatgaaacacaataaaagcaaatacttatgacttttcaaggtttttgagaatcttcacagaagactttttaaaatccacatcattctctggccctgctcctaactagacccttagtatcattgcatattgagagctttacaaaggagaatgtgttttccacaagtaaacagtgaagaaaacacaaaatagaaaacgtgagaacaaatgggttaaagtgctttttattggctaatgacaatttcatttggttataacttcactctaattgtttgcatgtatattctttaaaccactgtttcctaaaactgtctgatgagaaagttacctagaatattcattaaaaacacac

SEQ ID NO: 18263 - DNA, 545 bp, Homo sapiens
ctaatggtttatacccattttcacaagttctaacagctggtaagcggtgcagctgggaaagcaaaagttttaatgtaaagatttctttttgaaaggccagtaaatctcttattaggaaggataacaacaacttagctagggcatctgtgggaaattaaagaaaggaagaaataagagaataaatttattttgaataatgaaacacaataaaagcaaatacttatgacttttcaaggtttttgagaatcttcacagaagactttttaaaatccacatcattctctggccctgctcctaactagacccttagtatcattgcatattgagagctttacaaaggagaatgtgttttcyacaagtaaacagtgaagaaaacacaaaatagaaaacgtgagaacaaatgggttaaagtgctttttattggctaatgacaatttcatttggttataacttcactctaattgtttgcatgtatattctttaaaccactgtttcctaaaactgtctgatgagaaagttacctagaatattcattaaaaacacac

SEQ ID NO: 18264 - DNA, 545 bp, Homo sapiens
ctaatggtttatacccattttcacaagttctaacagctggtaagcggtgcagctgggaaagcaaaagttttaatgtaaagatttctttttgaaaggccagtaaatctcttattaggaaggataacaacaacttagctagggcatctgtgggaaattaaagaaaggaagaaataagagaataaatttattttgaataatgaaacacaataaaagcaaatacttatgacttttcaaggtttttgagaatcttcacagaagactttttaaaatccacatcattctctggccctgctcctaactagacccttagtatcattgcatattgagagctttacaaaggagaatgtgttttccacaagtaaacagtgaagaaaacacaaaatagaaaacgtgagaacaaatgggttaaagygctttttattggctaatgacaatttcatttggttataacttcactctaattgtttgcatgtatattctttaaaccactgtttcctaaaactgtctgatgagaaagttacctagaatattcattaaaaacacac

SEQ ID NO: 18265 - DNA, 2400 bp, Homo sapiens
tgactgacacgctgctccgagtgagcttgtcctgccttggcacaaattctatgtctggccagggccacagaaggccgagtcccctggatggtaatcctggctgctttctgtacttgaacgtaaagtcctcatcaagacggcctgtggtctgcctcttggcaaccaagaagcctgcagtgccatacgacccctgaggcatggactggagccccaaaggcagcgcacccctggttcctgagcctgctgcttgtttcctctctgtggctccatttgtagcacagttgttgcactgaagcttgtgcatgctggataaggccaagcgggctcaaagagcaaccagccacctctgcaagggtgtgccaggagcaggtgcaccagtcaccaactaatggccagacatggtacatcacttctaccctaaaggtgggccacagtgccatctgcttttcctaaggcctctgctccatcaggaattaggtggcagccaaggcaggacaagcacactcggagcagtgtgttagcacctggggcctgtgcatgccagggaggccaagctggctcaaagagcaaccagacacctctgcaaggtctggccagggctatagaaggtccccctggatggtaatcctggctgctttctgcacttgaatataaagtcctccccaagatggcctgtggtctgcctcttggcaaccaagaagcccgcagtgccatgtgacacctgaggcatggactggagccccaaaggcagggtacacccttctcctgaacctgcttcttgtttcctctatatggctccatttgtggcaaagttgttgcactgaaacttgtgcatgccgggcaaggacaagctggctcaaagagcaaccagccacctctgcaaaggtgtagcaggagccggtgtaccagtcaccaattagcgtcctaccctaaaggtagggccacagtgccatctgcttttcttaaggcctctgctccatcagcaataaggtggcagacactcaggctgtgggaacctggccatccccacttcctcgagcgggtgaggtggtggatgctccgcctgcactaggcgcacccttgcagaggtggctggttgctctttgagccagcttggccttgcctggcatgcacaggccccagctactgacacgctgctccgagtgagcttgtcctgccttggcacaaattttaagtctcgccagggccacagaaggctcagtcccatggatggtaattttggctgctttctgcacttgaatgtaaagtcctcctcaagaaggcctgtggtctgcctcttggcaaccaagaagcctgcagtaccgtacgacccgaggcatggactggagccccaaaggcagtgcacaccctgctcctgagcctgctgctcgtttctatatggctccatttgtagcacagttgttgcactgaagcttgggcatgctggccaaggccaagctggctcaaaaagcaaccagtcacctctgcaagggtgtgccaggagcaagggcacgagctaccaactagcagccggacatgtacatcacttcttctaccctaaaggtagggccacagtgccatctgcttttcctaaagcctctgttccatcagcaattaggtggcagccaatcaagctgtgggaagctggccatccccacttccttgtgtrgctgaggtgctggatgctctgcctgctctaggcgcacccttgcagaggtggctggttgctctttgagccagctcggccttgcctggcatgcataggccccagcgactgacacgctgctccgagtgagcttgtcctgccttggcacaaattctatgtctggccagggccacagaaggccgagtcccctggatggtaatcctggctgctttctgtacttgaacgtaaagtcctcatcaagacggcctgtggtcttcctcttggcaaccaagaagcctgcagtgccatacgacccctgaggcatggactggagccccaaaggcagcgcacacctggtttctgagcctgctgcttgtttcctctctgtggctccatttgtagcacagttgttgcactgaagcttgtgcatgctgggcaaggccaagctggctcaaagagcaaccagccacctctgcaagggtgtgccaggagcaggtgtaccagtcaccaactaacggccagacatggtacatcacttctaccctaaaggtgggccacagtgccatctgcttttcctaaggccactgctccatcaggaattaggtggcagccaaggcaggacaagcacactcggagcagtgtgttagtacctggggcctgtgcatgccagggaggccaagctggctcaaagagcaaccagacacctctgcaaggtctggccagggctatagaaggtccccctggatggtaatcct

SEQ ID NO: 18266 - DNA, 1303 bp, Homo sapiens
tgtcgtcccagttggtgatgatgccgtgctccatggggtacttcagggtcaggatgcctctcttgctctgggcctcattgcccacataggactccatctgacgcatgccccccatcatgytctggtgcctggggcaccccacgatggaagggaagacagcccggggggcatcgtcacctgcaaagccggccttgcacatgccagagccgttgtcaatgacgagcacggcagtatcatcatccatggtgagctcattcagttgtagaccctttaaaagattatcattctttttttccacactttcaatttcctccaaatatttcttttctcttagctggctctgatgtttcattatgtctagttccagtcttagcatgacaatttcttcctgcaacgtactattttcatgcaagaggtctttttctttcttataactaagagaaagctaagtaaacaaagggaacttttagttagcactcaatagattgatatatcatgatttcttctgaaattaaaaaataacatctgtatttgtataatgaaagaatccccatagtggatatttaactggaaaaaactggacaaaactccaaacctagcagagtgtaaattcctctagtgatttatttttcatagtctttaaataaagatttaaacttttaggaatctgctcctgaattcctaaaagtttaaatatttatttaaagactatgaaaaataaatcactagaggatttttaagaatctcagaattaaaaaagcctttctctgagttacaaaaaacccagaggcataaaatataagattaatacatttgactatatttttaagattaggtttatactctgatatctaacctatcaaccacaccatcctaagagccttagctatgcatatatttggacagaagcaatttctcaaagttctttaagtttcttttactgaagaacgttttaccgatattctacatttctaatatttttatactcagttataagaattatatttattcataacttaaatctaagcactgtacccttctacactgtacacatctgtatctaagcattgcactcctacatacaacactgaactcatttaagatcgtgattcttaaaaggagaagtcaaaaaatatatacaagatgcaggattttccccaggtctgctgatgctacttctagtgatcctccacaaaaccacagttacttctgtggtgtaaatatataaatacaaaagaagccttttgtttcaaaatatgaatggtaagtaagatgcaacttatagagattttcttagaaatca

SEQ ID NO: 18267 - DNA, 1303 bp, Homo sapiens
tgtcgtcccagttggtgatgatgccgtgctccatggggtacttcagggtcaggatgcctctcttgctctgggcctcattgcccacataggactccatctgacgcatgccccccatcatgttctggtgcctggggcaccccacgatggaagggaagacagcccggggggcatcgtcacctgcaaagccggccttgcacrtgccagagccgttgtcaatgacgagcacggcagtatcatcatccatggtgagctcattcagttgtagaccctttaaaagattatcattctttttttccacactttcaatttcctccaaatatttcttttctcttagctggctctgatgtttcattatgtctagttccagtcttagcatgacaatttcttcctgcaacgtactattttcatgcaagaggtctttttctttcttataactaagagaaagctaagtaaacaaagggaacttttagttagcactcaatagattgatatatcatgatttcttctgaaattaaaaaataacatctgtatttgtataatgaaagaatccccatagtggatatttaactggaaaaaactggacaaaactccaaacctagcagagtgtaaattcctctagtgatttatttttcatagtctttaaataaagatttaaacttttaggaatctgctcctgaattcctaaaagtttaaatatttatttaaagactatgaaaaataaatcactagaggatttttaagaatctcagaattaaaaaagcctttctctgagttacaaaaaacccagaggcataaaatataagattaatacatttgactatatttttaagattaggtttatactctgatatctaacctatcaaccacaccatcctaagagccttagctatgcatatatttggacagaagcaatttctcaaagttctttaagtttcttttactgaagaacgttttaccgatattctacatttctaatatttttatactcagttataagaattatatttattcataacttaaatctaagcactgtacccttctacactgtacacatctgtatctaagcattgcactcctacatacaacactgaactcatttaagatcgtgattcttaaaaggagaagtcaaaaaatatatacaagatgcaggattttccccaggtctgctgatgctacttctagtgatcctccacaaaaccacagttacttctgtggtgtaaatatataaatacaaaagaagccttttgtttcaaaatatgaatggtaagtaagatgcaacttatagagattttcttagaaatca

SEQ ID NO: 18268 - DNA, 1303 bp, Homo sapiens
tgtcgtcccagttggtgatgatgccgtgctccatggggtacttcagggtcaggatgcctctcttgctctgggcctcattgcccacataggactccatctgacgcatgccccccatcatgttctggtgcctggggcaccccacgatggaagggaagacagcccggggggcatcgtcacctgcaaagccggccttgcacatgccagagccgttgtcaatgacgagcacggcagtatcatcatccatggtgagctcattcagttgtagaccctttaaaagatyatcattctttttttccacactttcaatttcctccaaatatttcttttctcttagctggctctgatgtttcattatgtctagttccagtcttagcatgacaatttcttcctgcaacgtactattttcatgcaagaggtctttttctttcttataactaagagaaagctaagtaaacaaagggaacttttagttagcactcaatagattgatatatcatgatttcttctgaaattaaaaaataacatctgtatttgtataatgaaagaatccccatagtggatatttaactggaaaaaactggacaaaactccaaacctagcagagtgtaaattcctctagtgatttatttttcatagtctttaaataaagatttaaacttttaggaatctgctcctgaattcctaaaagtttaaatatttatttaaagactatgaaaaataaatcactagaggatttttaagaatctcagaattaaaaaagcctttctctgagttacaaaaaacccagaggcataaaatataagattaatacatttgactatatttttaagattaggtttatactctgatatctaacctatcaaccacaccatcctaagagccttagctatgcatatatttggacagaagcaatttctcaaagttctttaagtttcttttactgaagaacgttttaccgatattctacatttctaatatttttatactcagttataagaattatatttattcataacttaaatctaagcactgtacccttctacactgtacacatctgtatctaagcattgcactcctacatacaacactgaactcatttaagatcgtgattcttaaaaggagaagtcaaaaaatatatacaagatgcaggattttccccaggtctgctgatgctacttctagtgatcctccacaaaaccacagttacttctgtggtgtaaatatataaatacaaaagaagccttttgtttcaaaatatgaatggtaagtaagatgcaacttatagagattttcttagaaatca

SEQ ID NO: 18269 - DNA, 597 bp, Homo sapiens
atatatggggaaacagatgcttccttctggtggcagtggcagtgatgattttaatgccaaaatagtcatacagtttgtaaatccaaccacttttgggtgaatataagttaggccaagagcctttcaaaacccccctgggcctgcgaatgttgcgcttggaaaacgcaggagatggggttggaatgaggcaggggttggggaactgcgctgcctcctgcgcccccactcctgccgcagcctctccccttcaaatcttcacattgaggattgtgtttatcccaggacacctggcttagaagatgagatgtccgttttattctgctccttctcaaagtgtacttttcaaatatgagttggtaactatagggcatttgagagtgatcrttgtaattatagtaatcagaacttttcagtttagtcaagaatctggacaaaggaatcagtcatatctgtaccttctgcagttccaacagcttatgtaatgtacatgattaggctttgcccacttagtgttcagttcattcttgtgagactcgtggaaaattcagattcttcggtgggatgtgatgaactgtgtaagggcaaatgttaattgga

SEQ ID NO: 18270 - DNA, 344 bp, Homo sapiens
gtgaatacttaagtttaaaaatgctaaatcaagccagtatcatcccttgtggtcacagcagctgctgctgcaaaggttttataaattgcctacattcccgcaccccatctggcgatgctggtgtgttacagccatggatgacttactcttcacaatagccttcacttggatctattccctactttaaaataaaaagacaaaaagaaggtgccaaagggcttgcctaaagtgctcccacccaacaagagtacaattcaaccacataatgctgcctcctcagcatttagaagattagattcagggccaaaggggaggtcagaagaggaaggccccctggwttgcag

SEQ ID NO: 18271 - DNA, 530 bp, Homo sapiens
ggtgataatctaggcactgtatattcggttttggttttctgtgcaggggattgaagccaacttgctttcttgctgccattttgaaactggaaaatgtctgcagtgagacatttaaaggagttgtacctaacagcctaaatgggctggaaatgtttatcttattatcaacaacatagacaaaatatggcaatggatgtgctcagttagggagggcaggaaaacaagaaggcctaagactcaacatataagttggcaaactgtaaacatttaggaagaaggagactagaaagaggaagttaataaaggagagaaaatgatagtgtaggaagtatgaagggagaaaaacagtttaaacatgttcagctacatagaatgctgcaaaaaatgtgagttaaaatgaaatttgagagtggttcatcggaatytcaatttatagaattcagatgactttcaaatataatttggagagtggtagacacaagcctgttggagtagattgaagaatgaatgggaaatgaagaagtaaatta

SEQ ID NO: 18272 - DNA, 530 bp, Homo sapiens
ggtgataatctaggcactgtatattcggttttggttttctgtgcaggggattgaagccaacttgctttcttgctgccattttgaaactggaaaatgtctgcagtgagacatttaaaggagttgtacctaacagcctaaatgggctggaaatgtttatcttattatcaacaacatagacaaaatatggcaatggatgtgctcagttagggagggcaggaaaacaagaaggcctaagactcaacatataagttggcaaactgtaaacatttaggaagaaggagactagaaagaggaagttaataaaggagagaaaatgatagtgtaggaagtatgaagggagaaaaacagtttaaacatgttcagctacatagaatgctgcaaaaaatgtgagttaaaatgaaatttgagagtggttcatcggaatctcaatttatagaattcagatgactttmaaatataatttggagagtggtagacacaagcctgttggagtagattgaagaatgaatgggaaatgaagaagtaaatta

SEQ ID NO: 18273 - DNA, 571 bp, Homo sapiens
gacactgaaatatattcagcataaaagagtkagtattataaaatgggttttctgagaaggactttgaattaatatcctaaatatagatcatgtttcataacataaaacaacttcattatatctgagatttcatatcaaaatcggttttaaaagtgagaaacaaacaaaagataatagatctttattaaggtgtgtaagccattttcaatttatcatggcctttggtcttaaggatagaaaagcttattatgaattcttcatgctgtgggaacttgaattccttggagtgttttctatattattatttcaactctctttctctgatcaatccaaattgattttaacatagctataatgatccaagcattcatattctccctagagatgattcctgaaataaaatagttttattctttggctatgtcaaattcttcagagataatttatttcataatctgcaacagcaaagcaatgatgcagttgtttaccatggagtgaggaaattaaccatttgccctcttcttttactatgtatgcccatagattcaaaattttacatatcagtggtaaa

SEQ ID NO: 18274 - DNA, 1237 bp, Homo sapiens
actcctacccctcacaatcatggcaagccaacgccacttatccagtgaaccactatcacgaaaaaaactctacctctctatactaatctccctacaaatctccttaattataacattcacagccacagaactaatcatattttatatcttcttcgaaaccacacttatccccaccttggctatcatcacccgatgaggcaaccarccagaacgcctgaacgcaggcacatacttcctattctacaccctagtaggctcccttcccctactcatcgcactaatttacactcacaacaccctaggctcactaaacattctactactcactctcactgcccaagaactatcaaactcctgagccaacaacttaatatgactagcttacacaatagcttttatagtaaagatacctctttacggactccacttatgactccctaaagcccatgtcgaagcccccatcgctgggtcaatagtacttgccgcagtactcttgaaactaggcggctatggtataatacgcctcacactcattctcaaccccctgacaaaacacatagcctaccccttccttgtactatccctatgaggcataattataacaagctccatctgcctacgacaaacagacctaaaatcgctcattgcatactcttcaatcagccacatagccctcgtagtaacagccattctcatccaaaccccctgaagcttcaccggcgcagtcattctcataatcgcccacggacttacatcctcattactattctgcctagcaaactcaaactacgaacgcactcacagtcgcatcataatcctctctcaaggacttcaaactctactcccactaatagctttttgatgacttctagcaagcctcgctaacctcgccttaccccccactattaacctactgggagaactctctgtgctagtaaccacgttctcctgatcaaatatcactctcctacttacaggactcaacatactagtcacagccctatactccctctacatatttaccacaacacaatggggctcactcacccaccacattaacaacataaaaccctcattcacacgagaaaacaccctcatgttcatacacctatcccccattctcctcctatccctcaaccccgacatcattaccgggttttcctcttgtaaatatagtttaaccaaaacatcagattgtgaatctgacaacagaggcttacgaccccttatttaccga

SEQ ID NO: 18275 - DNA, 1237 bp, Homo sapiens
actcctacccctcacaatcatggcaagccaacgccacttatccagtgaaccactatcacgaaaaaaactctacctctctatactaatctccctacaaatctccttaattataacattcacagccacagaactaatcatattttatatcttcttcgaaaccacacttatccccaccttggctatcatcacccgatgaggcaaccagccagaacgcctgaacgcaggcacatacttcctattctacaccctagtaggctcccttcccctactcatcgcactaatttacactcacaacaccctaggctcactaaacattctactactcactctcactgcccaagaactatcaaactcctgagccaacaacttaatatgactagcttacacaatagcttttatagtaaagatacctctttacggactccacttatgactccctaaagcccatgtcgaagcccccatcgctgggtcaatagtacttgccgcagtactcttraaactaggcggctatggtataatacgcctcacactcattctcaaccccctgacaaaacacatagcctaccccttccttgtactatccctatgaggcataattataacaagctccatctgcctacgacaaacagacctaaaatcgctcattgcatactcttcaatcagccacatagccctcgtagtaacagccattctcatccaaaccccctgaagcttcaccggcgcagtcattctcataatcgcccacggacttacatcctcattactattctgcctagcaaactcaaactacgaacgcactcacagtcgcatcataatcctctctcaaggacttcaaactctactcccactaatagctttttgatgacttctagcaagcctcgctaacctcgccttaccccccactattaacctactgggagaactctctgtgctagtaaccacgttctcctgatcaaatatcactctcctacttacaggactcaacatactagtcacagccctatactccctctacatatttaccacaacacaatggggctcactcacccaccacattaacaacataaaaccctcattcacacgagaaaacaccctcatgttcatacacctatcccccattctcctcctatccctcaaccccgacatcattaccgggttttcctcttgtaaatatagtttaaccaaaacatcagattgtgaatctgacaacagaggcttacgaccccttatttaccga

SEQ ID NO: 18276 - DNA, 1518 bp, Homo sapiens
catctatgacatcatgggattttccagtaacagaaaaggaaacctttgagttaggtgtgcagtgagtctgccctgtgtacataagctaagatctagcactgtggtggccctcacgggtggtcttgcaggagagtgaaggagcaccatctcaccataggcagtgtttcaaacagaacatttcatagctcattttcagttgtaaaaaggatagctgcatgggtattatgttagtggagagcaatctcttaaaggcttttttttttttttaaatataggaagaagggttatggacctcagtgaccatttatttatctgttagactatgcagcaactgaatatcattcttttttctttctggctcagaattctttaaggataatgtctcagaatgtacagtatataaattctttttaaatatatattttattttattttctttaagttctgggttacaagtgctgaacgtgcggagttgttacataggtacacatgtgccatggtggtttgctgcacctatcaacccgtcatctaggttttaagctctgcatgcattaggtatttatcctaatgctctcccttccctttctccccacccgcaaacaggccccaatgtatatgtttattgcagcactatttataatagcgaagacatggaatcaacccaaatgcccatcaaagatagactggataaagaaaatgtggcacatatacaccatggagtattatgcagccataaaaaagaatgagttcatgtcctttgtggggacatggatgaagctggaaaatatcattcttattatggtgaaattctcttttggaaggaccttggtgagatacaactccaccttcaataaggaagctgaggaagggcagaaattccctttctctggcagctaagacatggtgcactcaatagaggctgaccaagtgaaagccacagagtcccagggaggcacatgcagtggttcagatgtggtcgtgtcctaaacagactaactatgagatacgtccttccctgtggtctcagcttcccaggccctgttatttcctgccagttttcagtatggagtttaccagcctttccttcccaaaatgtccttttctgctctgcttaaccagaaatggtttctgttgtttgtaaccctaaaccctgtgcattagaagtctcactgtatgatgcttgccacataatagatgaccaataaataatgactgttgtttttcttattaacctttatgattttattaactaatctccaaagccctctgtctcattctatcaagtacaatcattgttagcctgtattagcatgatccttccatctactttatcatttcagttgtctttttgtagaagccttcatgctcttatttgtcagtttgtgatactagcaaaattggwggtttcgggactattcagaaacagctagtgatctcactgatattttggctacagattttggccagatggtataagccaatctaccttcagctataacattcagaaattctacttaa

SEQ ID NO: 18277 - DNA, 587 bp, Homo sapiens
acagtcaccccacagggcagtttgatgacatatatcagtcttaaaaataatcaagccctttgattaacattctgtattaggaatttctcataagaaaatagatgagtgttagagggacattcatctcagcaatatctacaataatacctctagctgccctaaacgtcccaaaatacagaatttattaagtaaatataaatatatcaatatgctagaataatttgtggtcatttaaaaatatgttgtagatctacaaaattcaatgcacagtgcaatccaattttgcaaatatgtgatacttattattaatgtatgtaatatatagctatattatattttatatatttgtttctttgttttttgagacagagtcttgctctgtttcccaggctggagtgcaatrgcgcaatctcggctcacagcaacctctgccttccgggttcaagctattctcatgtctcagcccccgagtaggtgggattacaggcacccaccaccgtgcctggctaatttttgtatttttaatagagagatggggtttcgccatgttggtcaggttggtctcgaactcctgatctcaggtgatc

SEQ ID NO: 18278 - DNA, 587 bp, Homo sapiens
acagtcaccccacagggcagtttgatgacatatatcagtcttaaaaataatcaagccctttgattaacattctgtattaggaatttctcataagaaaatagatgagtgttagagggacattcatctcagcaatatctacaataatacctctagctgccctaaacgtcccaaaatacagaatttattaagtaaatataaatatatcaatatgctagaataatttgtggtcatttaaaaatatgttgtagatctacaaaattcaatgcacagtgcaatccaattttgcaaatatgtgatacttattattaatgtatgtaatatatagctatattatattttatatatttgtttctttgttttttgagacagagtcttgctctgtttcccaggctggagtgcaatagcgcaatctcggctcacagcaacctctgccttccgggttcaagctattctcatgtctcagcccccgagtaggtgggattacaggcacccaccaccgtgcctggctaatttttgtatttttaatagagagayggggtttcgccatgttggtcaggttggtctcgaactcctgatctcaggtgatc

SEQ ID NO: 18279 - DNA, 1385 bp, Homo sapiens
gtggggacacgggcagctgcacgcttcctccaggccccgcgggctctagagtcctggcarctggctcacaccgggatacttgactgctgtgccccactcccaccccctttgtaaagcaaacaggtttagatttcgacggacaggtttggggtccacattcagtggccgggcacatgacagcgactcctgggccgtgtgacactcaccctcagctctcaccttagtctctaccagttttggtccaagaagtggcagcagcccaagcatccagcccagcggcaccctggcaccatgctcgtggggcaccgggaaaagccacctgcagcattccaggcccggcttccgagttcctcctagcaactgggtctcatgcagatgaaaacccccaggcctggcgcacagtagctgctcagtcaaatgtcttcagccctttggactcaacagtacacttggaccctgagggaaggaacagcgctgggcctggggtccgaaaacctggcttcaacccagctccctcctctaccctcctgctgctccaccttcggtaagatgctgagccccgcaagcctcagtttctccatctgtaaaggctgcagctgttctgcagacagtgaaggactgtgcgcccagcatccagtggcttccacctatggcgtgtgttgtcaggctatgagaaccctgatggcaaaggtgccctgagcagaagctgaaaaccacgtcctttcaagggaattcggggaggaaataaggttcctttccacgtgcatcttatttctggggcctcaaggtgccaggagccaccgcccaggagctggacgcctgtgctgggaggggcactatggcatgctcacctctgatgtctgtttccatccattcctcctctctggtcatctgaagcaccctctggattctgggagctatcgagacttaatgagggccacctggaggccctgcatcaataacaagtttgtattattgcctcggtatttggacaaattaggaaccccacagccggcgtcagcagagtttgggaatttcctaagatgccaggccaagtccactcctgagcctgcccaccagcaaatgacgcatcacagggccacgctggcccatcctggttcctctatctgctagatgtggatggtggggtcctggccttcgaacgggaatgtctgattcgagaacatccccagagccaggaagaaacaagctgaccgagctcctgatgagtgagtgaatgggtgaatggaggaagaaaccctttgcccagcccatcgcatgggttcagaagctctaatgaagtcaggggcctggaaggaaggacttggggaaggaaagcatccgactgcacagtcaggcaagagctgggcctcgacggtcactcc

SEQ ID NO: 18280 - DNA, 1640 bp, Homo sapiens
tgtttggatatgttaaattttaggggccctgtcacattcagacccacttgggaatggtccacatatggatgatatacacagaagatacataataattaaagtcaatcatccaggggaaatccagaactctggagaattccagtggttaaggcatgggccaaggaagggagccaggttcagggaaggtgcagtcagagatgtaggagtcgacaacaactagctgaagatggtgtcctaggaccctggaattgagatagaatgggagtggtgagaggctcctccttcacatgtttttttcattttttttcttcttctcttctcaaaacccatgctactactttgctgacactatacctgctaacccygaggcttcagtcatacaaaaaaaaaaaaaaatagccattcttctgtgctcttataaagttttaccctgtcttttacttaaagaactccaggaactggccttaggaaaccaaacactgaaccaagtttgcagtgtcccacctcagaaaggaatgaggaacaactaatgtacagccttgttgcctccagccagacctcaaggtggcccattactcaagataaccatcgtgacctactcatcccctacccaccatgggctttgcccagcccagcccacatacctcctccgatgtcaattctctgcctaataaaaaaaatccctcccagctctttttgggaaactagctggaggatccttgggcctctgctgtctcccttgtgctcaagcacaagccttgaaataaaagcctagtctgggaaatgtgcctggtcccgcgttaattcccgtattacatggggagccgaagagcccgtggcctataacagaatgagcattaaaaaaaggagggagtaattgggtggctgtatcaaatctttaagaaagagtaagtgataaagcctaaaaacactttttggattgagcagttcatgagggcagtattaggaaaggcatggacattcttttaaaatgtctagctaagaaggagggtgatttaggttattttgaggagaaagtgaagaatttatcaccacatagtcttctctaacatgaagatgccatcaagtaatttgagaactgacaggctgttttcttccaggttccagttcaatttaacaaatgtttatggaagtcctgctcagtacaaggccatgtgacaccaagcacccacgatataccactgactaagatgccatccccactgttgagcacttggaaattggtagaaagtcccttgcatggtcagcagaccctaatggaagtaaggcggtcgtcagcagaaaatcgagctgtgcacagactgcctgggcacacaggaaaagagccagagagggatgcccagggcctgggaggatggccaggagtgcaggaacggagggaccaggaagaaggaccagagaaacgctgggcaactgtgtgccgggagggatgttaagcagcctgtgtgccctgagtattgcagggtggctgggaggtgcccgggcccagaccagcaggggcgtttgactcaagctgaaacagaagcctggagagacacccagcggccctctgcctacagatgtataggaaaacaataggactctctccttctttgtagtttagattcccatttgacatc

SEQ ID NO: 18281 - DNA, 1640 bp, Homo sapiens
tgtttggatatgttaaattttaggggccctgtcacattcagacccacttgggaatggtccacatatggatgatatacacagaagatacataataattaaagtcaatcatccaggggaaatccagaactctggagaattccagtggttaaggcatgggccaaggaagggagccaggttcagggaaggtgcagtcagagatgtaggagtcgacaacaactagctgaagatggtgtcctaggaccctggaattgagatagaatgggagtggtgagaggctcctccttcacatgtttttttcattttttttcttcttctcttctcaaaacccatgctactactttgctgacactatacctgctaaccctgaggcttcagtcatacaaaaaaaaaaaaaaatagccattcttctgtgctcttataaagttttaccctgtcttttacttaaagaactccaggaactggccttaggaaaccaaacactgaaccaagtttgcagtgtcccacctcagaaaggaatgaggaacaactaatgtacagccttgttgcctccagccagacctcaaggtggcccattactcaagataaccatcgtgacctactcatcccctacccaccatgggctttgcccagcccagcccacatacctcctccgatgtcaattctctgcctaataaaaaaaatccctcccagctctttttgggaaactagctggaggatccttgggcctctgctgtctcccttgtgctcaagcacaagccttgaaataaaagcctagtctgggaaatgtgcctggtcccgcgttaattcccgtattacatggggagccgaagagcccgtggcctataacagaatgagcattaaaaaaaggagggagtaattgggtggctgtatcaaatctttaagaaagagtaagtgataaagcctaaaaacactttttggattgagcagttcatgagggcagtattaggaaaggcatggacattcttttaaaatgtctagctaagaaggagggtgatttaggttattttgaggagaaagtgaagaatttatcaccacatagtcttctctaacatgaagatgccatcaagtaatttgagaactgacaggctgttttcttccaggttccagttcaatttaacaaatgtttatggaagtcctgctcagtacaaggccatgtgacaccaagcacccacgatataccactgactaagatgccatccccactgttgagcacttggaaattggtagaaagtcccttgcatggtcagcagaccctaatggaagtaaggcggtcgtcagcagaaaatcgagctgtgcacagactgcctgggcacacaggaaaagagccagagagggatgcccagggcctgggaggatggccaggagtgcaggaacggagggaccaggaagaaggaccagagaaacgctgggcractgtgtgccgggagggatgttaagcagcctgtgtgccctgagtattgcagggtggctgggaggtgcccgggcccagaccagcaggggcgtttgactcaagctgaaacagaagcctggagagacacccagcggccctctgcctacagatgtataggaaaacaataggactctctccttctttgtagtttagattcccatttgacatc

SEQ ID NO: 18282 - DNA, 1938 bp, Homo sapiens
ggattgtttgtaacacaaaggataaatgcttgaggtgatggatagcctatttaccctgatataatcatttcacgttgcattcctgtatcaaagtatctcatgtaactcataaatayatacatccactatgtacccacaaatattttatactaaaaaaaaggtttttaaggccttctgtggttctttaactcaagactctggaagacagagaaggatctgcagggcagcccaagcccgccctccatggaggtcaatgttttgtttgcccttgcagccagtgaccctcagggacatgcagtgggtcttaacaatgggctcccctcctccctaaccagcacccagccctggctgccatctgaacagttctgcccaggagagactctgctggccgtatctgaatccccttgtgggagcccacggtgtggtcaccccctgccatctggcaggagcaaaggtgtccactgtttcgctcaggactctcgctgctgtcccagtcttccgcatgtgctcagggtccttgacttggagtttttctttctcaccctcagcacggcagcctggtgctacagttctctttcccacctgaacatactgcgagtgtggcagacaccccagagcacaattgtgctccactggctgcaccttctcgatgccttggtccttatggaagtcctttgtgcagaggacttttttgccacttggtgtaatatgaaacatccctccagcaacagtaactcttgacgtaactgtttaacagtttcacacctgttaagtctgggtttcagttcagtatgatactgtttatatacttttataataaaatgtattaactggtaggtggaaggtgattatagctaacagaaaaaaaattactacagaagtcttttcctgatcacaataaatacaacaggatggagttaaccactctgcctcccaactgtaaaaatagttttaatagaaaactaagaatcaattttctgggaaatttatggatatgaaattatttgcccctctacaattggcaataaatgaaaagtaaagcattctacagagatcatgaaccttacagtaacctccttgaagaacaaaagtgatttgaaaaatcacttaactaaagataagctctatttcttcctctctcctctcatgttctcacatctctggaagatagttgggcctctgggcaaatttctgatatctatcagtacgtaaaattaatgaaaaaccaggcaaacctgtagaagttatttattaatgttcaacttgtgaaatgcaagagcattcccttgaaatataatattccctctttttcttgttcttactacaaattggttttggatgtattaggggttcaaagaaataatttccagctatatagggatggactctgaatctttccattgaaccagtaagtctcctgatgaggccagagagccccatgtctaggggccaggtgagcccctcactcctcaaagctgggctttctggtggccatgacagttgcagattccgaggcagggcaggtgatccttttgtcttcctggatgtgaatgttatacttggccctcaatggtacagaaggccaggctaactggggctggtacaaagagtggacactctccgtgattctaattccaagcgaggggttggcagccagctggcaccaggtagtccctggaagtgacaggttgggctgtgctcctgtctgccagtgtgtctaccaaggtggaaaaagagcaacaaggcaatgttgttataaggacagggagttggggggggattgcagattctcagccacaaagcttgaaatgaaagtgaatcaagaacttttgcagaaaaattccatctttccaggcccttaggactccctggtttatcctcctaggatgtgttctaagtggttcacaccctggtaagaaataagctcattcatggcag

SEQ ID NO: 18283 - DNA, 1938 bp, Homo sapiens
ggattgtttgtaacacaaaggataaatgcttgaggtgatggatagcctatttaccctgatataatcatttcacgttgcattcctgtatcaaagtatctcatgtaactcataaatatatacatccactatgtacccacaaatattttatactaaaaaaaagktttttaaggccttctgtggttctttaactcaagactctggaagacagagaaggatctgcagggcagcccaagcccgccctccatggaggtcaatgttttgtttgcccttgcagccagtgaccctcagggacatgcagtgggtcttaacaatgggctcccctcctccctaaccagcacccagccctggctgccatctgaacagttctgcccaggagagactctgctggccgtatctgaatccccttgtgggagcccacggtgtggtcaccccctgccatctggcaggagcaaaggtgtccactgtttcgctcaggactctcgctgctgtcccagtcttccgcatgtgctcagggtccttgacttggagtttttctttctcaccctcagcacggcagcctggtgctacagttctctttcccacctgaacatactgcgagtgtggcagacaccccagagcacaattgtgctccactggctgcaccttctcgatgccttggtccttatggaagtcctttgtgcagaggacttttttgccacttggtgtaatatgaaacatccctccagcaacagtaactcttgacgtaactgtttaacagtttcacacctgttaagtctgggtttcagttcagtatgatactgtttatatacttttataataaaatgtattaactggtaggtggaaggtgattatagctaacagaaaaaaaattactacagaagtcttttcctgatcacaataaatacaacaggatggagttaaccactctgcctcccaactgtaaaaatagttttaatagaaaactaagaatcaattttctgggaaatttatggatatgaaattatttgcccctctacaattggcaataaatgaaaagtaaagcattctacagagatcatgaaccttacagtaacctccttgaagaacaaaagtgatttgaaaaatcacttaactaaagataagctctatttcttcctctctcctctcatgttctcacatctctggaagatagttgggcctctgggcaaatttctgatatctatcagtacgtaaaattaatgaaaaaccaggcaaacctgtagaagttatttattaatgttcaacttgtgaaatgcaagagcattcccttgaaatataatattccctctttttcttgttcttactacaaattggttttggatgtattaggggttcaaagaaataatttccagctatatagggatggactctgaatctttccattgaaccagtaagtctcctgatgaggccagagagccccatgtctaggggccaggtgagcccctcactcctcaaagctgggctttctggtggccatgacagttgcagattccgaggcagggcaggtgatccttttgtcttcctggatgtgaatgttatacttggccctcaatggtacagaaggccaggctaactggggctggtacaaagagtggacactctccgtgattctaattccaagcgaggggttggcagccagctggcaccaggtagtccctggaagtgacaggttgggctgtgctcctgtctgccagtgtgtctaccaaggtggaaaaagagcaacaaggcaatgttgttataaggacagggagttggggggggattgcagattctcagccacaaagcttgaaatgaaagtgaatcaagaacttttgcagaaaaattccatctttccaggcccttaggactccctggtttatcctcctaggatgtgttctaagtggttcacaccctggtaagaaataagctcattcatggcag

SEQ ID NO: 18284 - DNA, 1938 bp, Homo sapiens
ggattgtttgtaacacaaaggataaatgcttgaggtgatggatagcctatttaccctgatataatcatttcacgttgcattcctgtatcaaagtatctcatgtaactcataaatatatacatccactatgtacccacaaatattttatactaaaaaaaaggtttttaaggccttctgtggttctttaactcaagactctggaagacagagaaggatctgcagggcagcccaagcccgccctccatggaggtcaatgttttgtttgcccttgcagccagtgaccctcagggacatgcagtgggtcttaacaatgggctcccctcctccctaaccagcacccagccctrgctgccatctgaacagttctgcccaggagagactctgctggccgtatctgaatccccttgtgggagcccacggtgtggtcaccccctgccatctggcaggagcaaaggtgtccactgtttcgctcaggactctcgctgctgtcccagtcttccgcatgtgctcagggtccttgacttggagtttttctttctcaccctcagcacggcagcctggtgctacagttctctttcccacctgaacatactgcgagtgtggcagacaccccagagcacaattgtgctccactggctgcaccttctcgatgccttggtccttatggaagtcctttgtgcagaggacttttttgccacttggtgtaatatgaaacatccctccagcaacagtaactcttgacgtaactgtttaacagtttcacacctgttaagtctgggtttcagttcagtatgatactgtttatatacttttataataaaatgtattaactggtaggtggaaggtgattatagctaacagaaaaaaaattactacagaagtcttttcctgatcacaataaatacaacaggatggagttaaccactctgcctcccaactgtaaaaatagttttaatagaaaactaagaatcaattttctgggaaatttatggatatgaaattatttgcccctctacaattggcaataaatgaaaagtaaagcattctacagagatcatgaaccttacagtaacctccttgaagaacaaaagtgatttgaaaaatcacttaactaaagataagctctatttcttcctctctcctctcatgttctcacatctctggaagatagttgggcctctgggcaaatttctgatatctatcagtacgtaaaattaatgaaaaaccaggcaaacctgtagaagttatttattaatgttcaacttgtgaaatgcaagagcattcccttgaaatataatattccctctttttcttgttcttactacaaattggttttggatgtattaggggttcaaagaaataatttccagctatatagggatggactctgaatctttccattgaaccagtaagtctcctgatgaggccagagagccccatgtctaggggccaggtgagcccctcactcctcaaagctgggctttctggtggccatgacagttgcagattccgaggcagggcaggtgatccttttgtcttcctggatgtgaatgttatacttggccctcaatggtacagaaggccaggctaactggggctggtacaaagagtggacactctccgtgattctaattccaagcgaggggttggcagccagctggcaccaggtagtccctggaagtgacaggttgggctgtgctcctgtctgccagtgtgtctaccaaggtggaaaaagagcaacaaggcaatgttgttataaggacagggagttggggggggattgcagattctcagccacaaagcttgaaatgaaagtgaatcaagaacttttgcagaaaaattccatctttccaggcccttaggactccctggtttatcctcctaggatgtgttctaagtggttcacaccctggtaagaaataagctcattcatggcag

SEQ ID NO: 18285 - DNA, 1938 bp, Homo sapiens
ggattgtttgtaacacaaaggataaatgcttgaggtgatggatagcctatttaccctgatataatcatttcacgttgcattcctgtatcaaagtatctcatgtaactcataaatatatacatccactatgtacccacaaatattttatactaaaaaaaaggtttttaaggccttctgtggttctttaactcaagactctggaagacagagaaggatctgcagggcagcccaagcccgccctccatggaggtcaatgttttgtttgcccttgcagccagtgaccctcagggacatgcagtgggtcttaacaatgggctcccctcctccctaaccagcacccagccctggctgccatctgaacagttctgcccaggagagactctgctggccgtatctgaatccccttgtgggagcccacggtgtggtcaccccctgccatctggcaggagcaaaggtgtccactgtttcgctcaggactytcgctgctgtcccagtcttccgcatgtgctcagggtccttgacttggagtttttctttctcaccctcagcacggcagcctggtgctacagttctctttcccacctgaacatactgcgagtgtggcagacaccccagagcacaattgtgctccactggctgcaccttctcgatgccttggtccttatggaagtcctttgtgcagaggacttttttgccacttggtgtaatatgaaacatccctccagcaacagtaactcttgacgtaactgtttaacagtttcacacctgttaagtctgggtttcagttcagtatgatactgtttatatacttttataataaaatgtattaactggtaggtggaaggtgattatagctaacagaaaaaaaattactacagaagtcttttcctgatcacaataaatacaacaggatggagttaaccactctgcctcccaactgtaaaaatagttttaatagaaaactaagaatcaattttctgggaaatttatggatatgaaattatttgcccctctacaattggcaataaatgaaaagtaaagcattctacagagatcatgaaccttacagtaacctccttgaagaacaaaagtgatttgaaaaatcacttaactaaagataagctctatttcttcctctctcctctcatgttctcacatctctggaagatagttgggcctctgggcaaatttctgatatctatcagtacgtaaaattaatgaaaaaccaggcaaacctgtagaagttatttattaatgttcaacttgtgaaatgcaagagcattcccttgaaatataatattccctctttttcttgttcttactacaaattggttttggatgtattaggggttcaaagaaataatttccagctatatagggatggactctgaatctttccattgaaccagtaagtctcctgatgaggccagagagccccatgtctaggggccaggtgagcccctcactcctcaaagctgggctttctggtggccatgacagttgcagattccgaggcagggcaggtgatccttttgtcttcctggatgtgaatgttatacttggccctcaatggtacagaaggccaggctaactggggctggtacaaagagtggacactctccgtgattctaattccaagcgaggggttggcagccagctggcaccaggtagtccctggaagtgacaggttgggctgtgctcctgtctgccagtgtgtctaccaaggtggaaaaagagcaacaaggcaatgttgttataaggacagggagttggggggggattgcagattctcagccacaaagcttgaaatgaaagtgaatcaagaacttttgcagaaaaattccatctttccaggcccttaggactccctggtttatcctcctaggatgtgttctaagtggttcacaccctggtaagaaataagctcattcatggcag

SEQ ID NO: 18286 - DNA, 1529 bp, Homo sapiens
atcaagagcattagagggcaggcctggcagtgccaacacattccaggcttctgcctgtgccgtgtctatgaaaatcttgttggcataagcaagttacccagccacgagcaatacctatgggatggataagtctatccaccctccctcgggccctggtaaggacgtggatgtgtcatactcttacaggggtagtgaaatagtgaggcccaacattaaatcacctacagcaagatacatcagcctctgtgtccccacgctggaatcatgyttcaccagcaggtttacctgagctgactcccctttgcaatggtgcctgcaggtttaggccaatgctgttccttgtggaagacagagaagcctcagttggcctccgactgttggcaagaacaacatattaagttggcacaaaacaaccagaagccccaggtggcccgtgcccagtgagataggagaggggcaggaagaactgtggaagctcagggaggctctcatccccagccccctccccactagtccccatctctgctttctttttcctgttttttttttgttttgttttgtttttttgagacagggtctgactctgtcacccaggctggagtgcaatgttgtgatcttggcttactccaacctctgcatcccaggctcaagtagtcctcccacttcagcctccccagtggctgggaccagaggcacatgccaccacacccagctaaatgttttgtttttgttttgtagagacagggttttgttgtgttgcccaggctggtctcgaactcctgagctcaagcaatctgtccacccagctaaatgttttgtttttgttttgtagagacagggtttttttgtgttgcccaggctggtctcgaactcctgagctcaggcaatctgcccacctacacctcccaaaattctgggattgcagacatgagtcactgagtccagcctgctttattttttttaacagtacttggaaccttctaatgtactaagtacacatgtattttcttttttttcctctcttccctagaataggagcttaacgtgggcgagtatttttgtttatctcatttatcaccctatccccagtggctggaatagcgtctggcacatgaatggtgtgttctaaataaatatttttaacaaataaatgaaatatcctacaagagaaagctagtatttggaactcacccatcaacagaaccaaaaagctgaagaccttcagcctgtccctacctctgaatgcacccagccccagcagattaaaaacaggaacaaagttggggaagggagcaggtggtgccaccccgaccaaggacccctgaggcttaggctgaatttgagctggagaagggactaacctaggaactgggcgtgagattaaagttgagacttgtctggcctggattttgtaacaccgaaacatgagctattccattcatttttgtttttgttttttttgagacagagtcttgctctgtctcccaggctggagtgcagtggcatgatctcagctcactgcagcctcc

SEQ ID NO: 18287 - DNA, 1529 bp, Homo sapiens
atcaagagcattagagggcaggcctggcagtgccaacacattccaggcttctgcctgtgccgtgtctatgaaaatcttgttggcataagcaagttacccagccacgagcaatacctatgggatggataagtctatccaccctccctcgggccctggtaaggacgtggatgtgtcatactcttacaggggtagtgaaatagtgaggcccaacattaaatcacctacagcaagatacatcagcctctgtgtccccacgctggaatcatgcttcaccagcrggtttacctgagctgactcccctttgcaatggtgcctgcaggtttaggccaatgctgttccttgtggaagacagagaagcctcagttggcctccgactgttggcaagaacaacatattaagttggcacaaaacaaccagaagccccaggtggcccgtgcccagtgagataggagaggggcaggaagaactgtggaagctcagggaggctctcatccccagccccctccccactagtccccatctctgctttctttttcctgttttttttttgttttgttttgtttttttgagacagggtctgactctgtcacccaggctggagtgcaatgttgtgatcttggcttactccaacctctgcatcccaggctcaagtagtcctcccacttcagcctccccagtggctgggaccagaggcacatgccaccacacccagctaaatgttttgtttttgttttgtagagacagggttttgttgtgttgcccaggctggtctcgaactcctgagctcaagcaatctgtccacccagctaaatgttttgtttttgttttgtagagacagggtttttttgtgttgcccaggctggtctcgaactcctgagctcaggcaatctgcccacctacacctcccaaaattctgggattgcagacatgagtcactgagtccagcctgctttattttttttaacagtacttggaaccttctaatgtactaagtacacatgtattttcttttttttcctctcttccctagaataggagcttaacgtgggcgagtatttttgtttatctcatttatcaccctatccccagtggctggaatagcgtctggcacatgaatggtgtgttctaaataaatatttttaacaaataaatgaaatatcctacaagagaaagctagtatttggaactcacccatcaacagaaccaaaaagctgaagaccttcagcctgtccctacctctgaatgcacccagccccagcagattaaaaacaggaacaaagttggggaagggagcaggtggtgccaccccgaccaaggacccctgaggcttaggctgaatttgagctggagaagggactaacctaggaactgggcgtgagattaaagttgagacttgtctggcctggattttgtaacaccgaaacatgagctattccattcatttttgtttttgttttttttgagacagagtcttgctctgtctcccaggctggagtgcagtggcatgatctcagctcactgcagcctcc

SEQ ID NO: 18288 - DNA, 1529 bp, Homo sapiens
atcaagagcattagagggcaggcctggcagtgccaacacattccaggcttctgcctgtgccgtgtctatgaaaatcttgttggcataagcaagttacccagccacgagcaatacctatgggatggataagtctatccaccctccctcgggccctggtaaggacgtggatgtgtcatactcttacaggggtagtgaaatagtgaggcccaacattaaatcacctacagcaagatacatcagcctctgtgtccccacgctggaatcatgcttcaccagcaggtttacctgagctgactcccctttgcaatggtgcctgcaggtttaggccaatgctgttccttgtggaagacagagaagcctcagttggcctcygactgttggcaagaacaacatattaagttggcacaaaacaaccagaagccccaggtggcccgtgcccagtgagataggagaggggcaggaagaactgtggaagctcagggaggctctcatccccagccccctccccactagtccccatctctgctttctttttcctgttttttttttgttttgttttgtttttttgagacagggtctgactctgtcacccaggctggagtgcaatgttgtgatcttggcttactccaacctctgcatcccaggctcaagtagtcctcccacttcagcctccccagtggctgggaccagaggcacatgccaccacacccagctaaatgttttgtttttgttttgtagagacagggttttgttgtgttgcccaggctggtctcgaactcctgagctcaagcaatctgtccacccagctaaatgttttgtttttgttttgtagagacagggtttttttgtgttgcccaggctggtctcgaactcctgagctcaggcaatctgcccacctacacctcccaaaattctgggattgcagacatgagtcactgagtccagcctgctttattttttttaacagtacttggaaccttctaatgtactaagtacacatgtattttcttttttttcctctcttccctagaataggagcttaacgtgggcgagtatttttgtttatctcatttatcaccctatccccagtggctggaatagcgtctggcacatgaatggtgtgttctaaataaatatttttaacaaataaatgaaatatcctacaagagaaagctagtatttggaactcacccatcaacagaaccaaaaagctgaagaccttcagcctgtccctacctctgaatgcacccagccccagcagattaaaaacaggaacaaagttggggaagggagcaggtggtgccaccccgaccaaggacccctgaggcttaggctgaatttgagctggagaagggactaacctaggaactgggcgtgagattaaagttgagacttgtctggcctggattttgtaacaccgaaacatgagctattccattcatttttgtttttgttttttttgagacagagtcttgctctgtctcccaggctggagtgcagtggcatgatctcagctcactgcagcctcc

SEQ ID NO: 18289 - DNA, 1529 bp, Homo sapiens
atcaagagcattagagggcaggcctggcagtgccaacacattccaggcttctgcctgtgccgtgtctatgaaaatcttgttggcataagcaagttacccagccacgagcaatacctatgggatggataagtctatccaccctccctcgggccctggtaaggacgtggatgtgtcatactcttacaggggtagtgaaatagtgaggcccaacattaaatcacctacagcaagatacatcagcctctgtgtccccacgctggaatcatgcttcaccagcaggtttacctgagctgactcccctttgcaatggtgcctgcaggtttaggccaatgctgttccttgtggaagacagagaagcctcagttggcctccgactgttggcaagaacaacatattaagttggcacaaaacaaccagaagccccaggtggcccgtgcccagtgagataggagaggrgcaggaagaactgtggaagctcagggaggctctcatccccagccccctccccactagtccccatctctgctttctttttcctgttttttttttgttttgttttgtttttttgagacagggtctgactctgtcacccaggctggagtgcaatgttgtgatcttggcttactccaacctctgcatcccaggctcaagtagtcctcccacttcagcctccccagtggctgggaccagaggcacatgccaccacacccagctaaatgttttgtttttgttttgtagagacagggttttgttgtgttgcccaggctggtctcgaactcctgagctcaagcaatctgtccacccagctaaatgttttgtttttgttttgtagagacagggtttttttgtgttgcccaggctggtctcgaactcctgagctcaggcaatctgcccacctacacctcccaaaattctgggattgcagacatgagtcactgagtccagcctgctttattttttttaacagtacttggaaccttctaatgtactaagtacacatgtattttcttttttttcctctcttccctagaataggagcttaacgtgggcgagtatttttgtttatctcatttatcaccctatccccagtggctggaatagcgtctggcacatgaatggtgtgttctaaataaatatttttaacaaataaatgaaatatcctacaagagaaagctagtatttggaactcacccatcaacagaaccaaaaagctgaagaccttcagcctgtccctacctctgaatgcacccagccccagcagattaaaaacaggaacaaagttggggaagggagcaggtggtgccaccccgaccaaggacccctgaggcttaggctgaatttgagctggagaagggactaacctaggaactgggcgtgagattaaagttgagacttgtctggcctggattttgtaacaccgaaacatgagctattccattcatttttgtttttgttttttttgagacagagtcttgctctgtctcccaggctggagtgcagtggcatgatctcagctcactgcagcctcc

SEQ ID NO: 18290 - DNA, 566 bp, Homo sapiens
ttcagggcacgccgggtgcaggtgtttcagggcacacatgtgtttcaggacacacggagtgcaggtatttcagggcacacacgtgtgtttcagggcacgccgggtgcaggtgtttcggggcacacgtatttcaggacacacagcgtgcaggtgttttggggcacacgcgtttcagggcacgccgggtgcaggtgtttyggggcacacatgtgtttcaggacacacggaatgcaggtatttcggggcacacgcgtgtgtttcagggcacgccgggtgcaggtgttttggggcacacacgtatttcaggacacacagcgtgcaggtgttttggggcacacgcatgtttcggggcacgccgggtgcaggtgtttcggggcacacgtgtttcaggacacacggagtgcaggtatttcagggcacacgcgtgtttcagggcacgccaggtgcaggtgttttggggcacacgcgtgtttcggggcacaccaggatgcagatctcttactgggtgcaaagcccccaactccttccccgagccaccagagtacggctcccagatcggagcagcc

SEQ ID NO: 18291 - DNA, 589 bp, Homo sapiens
ccaggagcartggatgaggctgtctttgccttcagcagctgttgggatcagagtccaccagacagtccttcctttaaggggatgtatgtgaatggccactgcacacatgactgccctcctgagaacatgacttttgctagaagcagtcagccttggagccaggcaaatgtagctttaagctccagagggaccacttctgtctgcacggctttgagtgagctagttaacagctctgagcttctggagagtggagccttatggggttgtggctatcactgtacaccagggttctcgactgtccatcagtgtacaccagggtcctcaactgcatcactatgaacatttggagctggatcattccttgtggtagagggctgtcctgtacattgcgggatatcacgcagcatccctgacctctacccaccacattgcagtagcccacacctcagttgtgacgaccaaaaatttctacagacattgcccaatgtcctttggggaaaaaaaatcaacttccctcactactgagaactgttgctgtactaatgtagccagcagagctcagaggcagcttccgatttcagagttgcaa

SEQ ID NO: 18292 - DNA, 528 bp, Homo sapiens
gtcattgaaccatttctgttctgagcctctgccaccctgcccctcccccagggccaactagaccaccattaccttcccccgccccccttcattcagcctcaggagccacaggggggctctaggactctgctctagctatcgcctgcatcagccctgcttggacagtgcccaggtcctgctggtggttaaatattctgaatgcctcccctgccaacaaccctgatttcctgagcgtgaagatcttagaggagaatggctccatctgtatttgaaagcaggaggccaggkagaggacagaagaaggaatagccctttcgcctgccccaggggagtgactgtgcctttcatcaaatgctttctttcatttaatcctaaccgcagggaagtggcactgctctttgagagtaacaagaaagagaaagtaatttaccaaatttccttctctgtgtcttaagaagagactttggcaaactgagggtgaagggtgaaagccctaactctcaggcaccctgagaaggaaaggaactc

SEQ ID NO: 18293 - DNA, 600 bp, Homo sapiens
ccattgcactccagcctgggcaaaaagagcgaaattctgtctcaaaaaaaaaaaaaaaaaaagaacctgaacttcagtgttgtgataaaaactgggtttgttgtcatttcctggcagaaatgatgtgaggctgagcccagaaaataaatctccagcatraagcacagaacctgaaccataacaggtactcagttgaaagagttttcttcccgcctcctccctacctgggtttctcttgggaaaatgttcatcagtgttttggcattggaaatggcttcctttgcctggaaattcggccctgagagtccatctgctggtgggagcctccccttaccacctgccctcacctctcaatggtattgccctagcattccatttccatcttagaatgctcaccagggtaagacgtgaagcctccctacagcaagaaagtcgagaccaggaagaagtctggtgaaggtgtcacacaataattgtgggattggattttcatttttgcatgtgaacccaagcactttcaacaggtaacgccctctctctagtggtttctgcatcttctctcccctctcaccacttgagaaacaaagaaactaaaaggtg

SEQ ID NO: 18294 - DNA, 573 bp, Homo sapiens
tccataaggggaattttcagttatctgcataattcaatttcccaggatttcttgaatcaatttgtacttatattgaaaagatacctacatatgcattggaaggaraaatactattaatttcgttttatatgctgaaattttctatggcacattttgccatagaaaattcatgtcaataatctctaacgggttttaagattatgaagttttttcatgacactctgatttgattctatagaatttaagagtttttaaatctgttaatataaagtccattagctactttaagtcattaacagatcattgatgtacacaagggaatcttaaatatttctaaaataattaagaaaagatagctttaaggctactggcaacaatatataattaaaagaataaaaaatgatggaaataataaactgaatattgcatacagtggacatgaagtttgtttttatttggcttttacagatgccttaacattattttcctccagatcaatctaaaggctctggcatactgtgcttgaaagaaattttcatttctccttcttgaaagagaagagcaaaatccaat

SEQ ID NO: 18295 - DNA, 703 bp, Homo sapiens
atctgaaatgctccaaaatctgagacgtttggaacactggcataatgctcaaggataatggtcattggagcttttagattttgaatttttggatttgggatgctcaactcgtataatgcaaatatccccaaatccagaaaactctgaaatccagaacagttctggtcccaagcattttggataagggatacacaacstgtataaatatagaccttgtgccatagctcagtaccatattcatattaactatttggtttcagcaaaatgtcatgtattacattacactaattcaatttgcattttattgggtttggtcataataaaagtaacaaactctgtggcttaccttaactgaggactcaatactttgcatgtattatttaatcctgaagcaatctgtgtgataggaattattataatttctgtttcacagatgaggaaaccaaggcctgggagtttaagtaacattcaaaaaggcacaattaataaatggtggtagtagagtttgaactcggacattctgattttagtgcccaatttcttacctattgtgttttatttattttgtaaatttattttgtttttatacttttacaatagccagaaacataagctacataaagctagttttgtatttgtatatatttaattaatgtacgataaaaactattttagttttggcattaacaatttgttttcaaaa

SEQ ID NO: 18296 - DNA, 655 bp, Homo sapiens
ggatcgcatgctaaatgcaaagatagtaacatggtacataattgctacaattttgtttttagaaaatcatttactgtatttacttaacctaacattttaaataccccaatccagtatcaaaacaagattaaaccagcagttgcatgatttattaagctagtattgcagaagaactctccatgtawtctgaaaaatcaaatgtagtaggaaaaaaaataacttaggcaaacgtaaatgataatgttaaataaaagaatacaaaaaagctctccttccaacctgcacctgcattttaggtggactttagaagactgtggtgtttctgtaactgttaataagcattcataagaccccagaacagagcttcacagccaagcagaaatacatgatgcgtaactctaatgcttttgacagaattggagcaaaagaaataaataatttcactcattcttaatttgtacacagaccatctagaaagctcctagttttgcttttagtagcatctgtacactcggttttttcagacaagacgtcagctagggtaaaataaaatgtattcctacatgagcaattttatttgagaatctgcagaaacaggaatgatctctatggcatttttaaattgtaacattaagtgctaatgtgtatgacttcc

SEQ ID NO: 18297 - DNA, 2543 bp, Homo sapiens
aaatactgttctaccagcattattgaacaactgctttcagcggggtaaaaatatctggtgcaatctgctccaatgctcattatccttgttaaaaggcagactctgacaatagtatctaagggttacatgtaaaccaaatggttaaaaataggatcctaatttataatgacctttgcacttgtttatcctcaaacctgagtgatttgcaccagaagtgacttctaaacttttagttttacatttcctcacatggtacatatttagaatgtataaaaaaaccaatgtaccagtggccttaaaggttgaaggtactgataggtaacaaagattctcatatgaagtgtgaatacttgttttctaataccaggcctccctgggggatgaacccttgcatttgcttccctatcaactcttgggtaagaggaaggctccctggaccattctactagaaggggtacagccttcgctgcctgaaggaacacccacacctgagaatcaccctgcctgaggtacagagcagaaaggcgaagggaggacagtgcagccagatttgggtgttacctcgatggccagttggaactgctcgtgctcccgctgcagctgctctgcttccgacaaagagctggcattgaccaggctggcgttgagcattgactctccattgcggatccatcccagaacctagggaatcgggacaagcacacaggtgaatggccttccgcagtttccccagagctgttgcctcctctcatggggacttcagttggagagctcactatcttttatcttctgttggagagaggacagcaaatgtcaccataatcaaaatggtcatctccccaatcatacagagtacctgtgccataaggtacttattttatgtacctgctttattcccagctccatgtcacccctctgtcccaatttcctcacccacatagtgtaaacattacttaatgtggttgtactgtatgcatgtctaaacttccttctggaacataggatggtacaaataaataaattccatctgttggtatccttttctttttttataaggtccagttcaaataacaacaacttatggaaatcttttgcacctaatctctcctgctagaaacaatctcttcttcatctagtgcaagcatatcattttgtatgtaccaccgttatggtattcaccacagacttcctggtttctttatttcaacctatgtttcattccccactgagaacataaacttcctgaaatctggggcaatatattagctgtattttagtctcacatagtacctatcacagtactttgcatataatgggtgtggtgtartttttgaagtaatcgagaatacccaggtcacacctgagcagtgagtctaatttcctctaccttgcaaaataaccaagagtaggcaggtttgaacttcagtaggtaaacaaccccaaaaaaggagaaaagagaaagaaaacaagcaaaatagaagtaataacccatattctggatcatcaggaaaaggggagtaagctataatataattgacttaaattatttagaggccatgggtaggctgaatacaacttctatgtgatgttaacaatcactgggagaaagaaaactcaacgagggaatattaggatagaagaagaaacagctgacactgtctagacagttctaggtgaaatggggatgtggcaattatccagctaataaagtcagagcaaataatgcaactggaagagttaggctctgaaaacctacctggtgtctggtcaccagaacattgccaaacactttctttattagggagtctgagagttttcttggagaagaaataaaagctattctgaaaattcaagatcagtaaataccacccatctgtcacctcatgccaaaggagaagacaccactatctgtttcagatttgctttcatatttttctcccctctacttcctcacattgaacaattagaaaataccaagcccagtctcgtgctctagaactcataggcacctctcaaatttcatccttgggcaaaaaatgactcatgccttattgtgcatagataacatcaggtcataaatcccactgaagctaggctacttggattgagatgttaattcatggccaagctagcagattgtagatgagatgccaatctgtaaagcaattagttacaggaaataactgctcagagtgtttgcgtgaaatccctgttgtcactggtggactgtggctggttggctagaggtgctaatgattttgaaaaattgcctgtaactttgggcacttgcattcacagactgcatgcccaaatgcctcatctctttgggaaatggagctcacagtgtccctctgccatgattcactgcattttgtttggtctgaagattcatttgagggtgtcagagaaaccacttctccaagtgcatcacacatcaatgtctgtaggacaatttgactccctttgggtctcttcagttttgttagaaaatttttctctccagtttcagccaacaggaagcatgagttatagctatggtggtg

SEQ ID NO: 18298 - DNA, 854 bp, Homo sapiens
actgaacttctaagacttgcggtggttatctccttaaatacaatagagtatggcactgattattgtctgcttttgaacaggagctgaggaatgacctcaacactgtagtccaaaagcctgaggactctgtgtgtttgacattaatggtcacactaaagcccactgcgcaatgtacctactcaaaccctgggttagctgaccattgagaccatccaataacgatagtctgtgggatctgaataggttttcattctcccacatgcacacagaagtgctgggatcagttggcctaggaagaaactatacaagggctttgtgacaaattcagtgtagtagctcatgscattaaccttccactcatccccgagttcacatgtgcctcttccacttaaaagaccaagagcttgggaaattcaactctgcagcatgtccatctgaggactgtggatattaaacttatcttcaggtacagctgtggtggaggatgaatggattgatttatggaaactgtgcagtggtgatggaatttttcttggacattgatccttgtgttgtgctttgaacatgggagtatgttttctggggaaatgcacacacactcgcaaagacatccacaatcattccatatagactctctcctctgtccctcccaactctgatgtaccaccccaccttagatgacactgctgcttccagggatgacagtagcatggttagagtactggactcccagtttgttgggttttttttttttttttttttgagacagagtttcactcgttgcccaggctgaagtgcaatggcacaaccttggctcactgcaacctctaccacctgggttccagtgattctcc

SEQ ID NO: 18299 - DNA, 1040 bp, Homo sapiens
acagactcagctgctgccggtccatcctccatggtggagagggaaggcaaatggtgaaggaaggcaccaggaaggtctcagaagacagagccttggtcctctagctatgccaacctcttcgacatgaaagagcccatctcaaacagggcacaccacacagtgtttcactgcagcctccagggctcctccttcctaatctgacctcagctaacttgtcctcccttctttatcccctcgaggtcatttcctcccaggatccacctgtcctgctgctgtgttttttgtccctcccagaacttgctttttttttttttttttgagatggagtttctcttttcttgcccaggctggagtataatggtgccatctcgacccaccacaacctgtgccacctgggttcaagkgattctccagtgtcagcctcctgagtagctaggattacaggcatgcatctccatgcttggctaattctgtatttttaggagaaacgggttttctccatgttggtcagtctggtctcgaactctcaacctcaggtaatctgcgcgccttggcctcccaaagtgctggggttacaggcgtcagtcaccatgtcacaacttttgtactagataaaaagcaacccttcctcaaagaggagacttaattctaactaaaatatcctatgtattcactaaccttttgttttaaagaagactaagccaagatttgaaaatactcaattatcctaccatttaaagatgaccgctacttggcccatggtgtttgtgcttctgctcttccttttaacacagtgtgtgtgtgccatgggacctgctgctgctcatgctcacactggctccagcactaggacagcccatcatgggggcagcaggtgggggtgctgaacctctccaacccagctgtgtaggagtccagcagagaagatgaggaccagggtaacatccaagtttttccttcggttcttatttggtgctgtgtcttgggggtatgtgctgaactgcagcatatgtaaggcttgtggagattatgccattaaa

SEQ ID NO: 18300 - DNA, 552 bp, Homo sapiens
gttgagcttcacaagcgcattgccagtggcaaaagcacacttgctggggtcatccggttgtgggaaatatgactcagctgacctctttgctgtgggttacttgaagatgccataagaaattgcactaagaagacaacttcacccattccatgacactgccagggtcatttatagattttctctccttctgagacaagaaatgttgtgaaataaatcaatagagcactttggtatagccagtaaagtaatatacactttcatcctttacatttgcatgagctttgtcagtcacctagtatttttaaatccatcatttcattttatcactaaaatatccatgtgaagtatgcagggcaaaaacattactccatccatttgatagtaaaagaaacagaggctcagrgaagtgtaaggtaatgttggtacatgtgcatattggataatgtccaaaaaggcattttgaataaaataatagggacaaccaagctaaaaaaataatatccatttggcatcaagagcatcgtattcaagaaatttctcttatatagatgt

SEQ ID NO: 18301 - DNA, 1827 bp, Homo sapiens
tatatataactctgaacactatatactattatgtgtttttcagttgtggaaatagaaactcttactctgctggcaggaacttaagttggtaggggctttggagaacaatttggcaatacccaaaagagttggcagtggtctgtgtcagttgtctcatgctgcacaacaaactaccccaaacttagtggcttaaaacagtgatttcttatttctcctaattctgtgagttgctggggtagtccctctgcttgttttgcctggactcattgatgcagccgcattcagctgggagattggctgggctggagggctcaaaatggcctcagtcacatgtctggtggttcatgctggttgttggttctctacatgtggccttatcacttgcaatagacttccttatgtggtagtctgagggcagtggtccaagacgcaaggcctcttgaggtctgagccctgaactcgcatagtgtggcttccatgcgttttgttggtcaaaccaagtcacaaggccagctccaccttttgatggaaggagtggcaaagtcacactgcataggagcatggaaagacatctcgcctccatctttgaagacatatcctgtaattcagctattttacttttatctatcccagaaaaaatctttcacagatagagagatatgtacacattgttcacagcagaattgtttataatagcaaaaaagtaaaaacaatttaagtcattccaggaagaagcagataataaattttagtttattcatataatggaataccatatatcaattaaaattaatgatcactggataattctaaaaataggttgaatgaaaaaatcagattggaaaagaatatgatagtataatagccttaaagttcaatatttgaagtttcttgggtaggctaatgaagattttgcttttgcttctgttttgaaatcaaaacttatctttggatggcctcattagagcatggtgcttatgagtagcttccatccttggatggccagttaagctgtgctgttctctgaccagacgggctgtcactaaaaagcttgtgtttagcttgttggccatttgggaaagtgtagctctttcatttgagaaggtgtaggtagagctgataaaggtttaacttcatcagtaatgttagaaaagtccatatacagtacagtttcttttttaaaattttttttctagaatatagtttcttaacattcatttaataccactgtctgcatctgtaccaggtttaacctgcatttcttatctgtaaatgggaagcatgatatttacctcgtagaggtgttgggaagatgaattgagataataatgcatttaaagcagtaccttttatatggtagatcctctataaacagtagttagaaaaattaacaagtatataggatggcatctatgttaagttcactttcaatggtattgtagtgagtaggtagcattgattacctactcataggtactttaagtaggtactttaattaaattttaggactactgtaattatgaaagtccattattaactataatactttacattttaaaggaaatttacatttataaactcttttcacattaattatctgattttgttctcaggacaactttgtaagatagttatattcaatttagagacattgaatattagtttcaggagaggttaaataagcagtgttagcagaaagcttatgttggttctcatgaaggcagattaaaatggaaataatgataccataatactttgatttttatcatttgtgtttatgtgctttacctacctagattctraatagatttgtctctgtactttttt

SEQ ID NO: 18302 - DNA, 567 bp, Homo sapiens
tatttttagtagagacggggtttctccatgttgaccaggctggtgtcaaactcctgaccccaggtgatccgcccgcctagcctcccaaagtgccaggattacaggcgtgagccaccccgcccagcccctttttttctttcctttctttcctttccttactcttstaaagctttttaataaactttccctcctgctctgaaacttgcctcggcctctccttctacttcatgttcctcagtcgaattctttcttctgagaaagcaagtactgaagttgctggaaacccgtagggatccgccacaggtaccttgcaataactcgggtacctgccaccagtaacagcagcacagacctagcacttgccagcacatatacctcatgcccattatcactcaccctgtgtgtgcttttctgtaggtaggtgtgtgagtgtacttgtgcatgcatgcacgtgtgtgcatgtgtctatgtacgtgtatgggtgtgcctgtatgtgtgtgcgcgcacgtttttaagcacgtgtctatgcatgtgtatgagtgtgcttgtacgtgtgtgtgcacacat

SEQ ID NO: 18303 - DNA, 416 bp, Homo sapiens
acacacacacacacacacacacagtttagtgaagaaataagtgaagctaaagcaaactgaagaaaaaagaatatactaaattttaggttaaagaattggttctaaaatggyatctccatccaatcacaggacctttctctttaattcttcacttcatgatagaggctggcttggagtttctgaattaacaagaaacacatctacgtaggcaggaggggatggggctccaaccaagtcaaggttacttgaaatgggtcaggtacagctgggtgtggtggctcacgactataatcccagcactttgggaagccaaggctggcagatcacttgagctcaggagttcgagaccagcctgggcaagatgggaaaccctctctccaaaaaaatataaaaattttccaagaaggccgggtgtg

SEQ ID NO: 18304 - DNA, 805 bp, Homo sapiens
gattcttccacctcccagctgtttatctattgaaggcaaagcttctttttcctatgccctgtttccttattcatacattaaggaagctaagctgtgtgatatataagctaattcccagaacttccacattttatacctgtatacttgtcattcctattgccttgtataccttgtggtgcctacccaccaccagataatgtccatggtcttcatatctaatgtcgttgccatataacctgcttacctccccaaagtcatcattcaccatgtaaccctagggtgaccaactcaatgcagtttgcctgggactttcrtggtcttagccctgaaagtcttacattatgggaaacccccttcagtcctgacaaaatccatacagaatctacccaaaattttgttacttcacatataaggcatgcctttttatgcttttccaaattgtgttccctctacacaaaactagcagatgtcacctgtacaggctgaattgtgtccccttcaaagagatatgctcaagtcctaactcctagtacctcagaatgtggcattatttggaaacagggtctttatagagtctaagaaagcccaatagagttaaaacaaggccattagggtggtccctgatccaatctgactggtgtccttataaaaggggaagtttggacacagaggctgatgtgcagagggaagatcctgtgaagagacaggtagaacactatgtgaaggtgaaggcagaaactgtagtaatgcactgaaaagccaaggcacatcagagattaacagaaaagacaccagaagccaggat

SEQ ID NO: 18305 - DNA, 1410 bp, Homo sapiens
  misc_feature (1)...(1410): n = A,T,C or G
tggccatgataatagaaagtacctgtagtgaaaaccctgccttcctcgggtcttttctttgtgtcctagtctatcagccccacaccccaaaattcctaaataagccccagtgaacaaacttgggcagcttctgggcaggcacatgagtgccgcagcacggcgttctcgaaggagctgcgacagccatggagggccagttcctgaatgaagaaagacctgcatgagtcagtgatgctccttcacaccgggaggaacctggaaataaacagtttaaaggctctcaagggaaccaaattcacattccgggcaaatgtccctgtattagtcagttctcgcactgctataaagaactatgtgagaccgggtaatttaggaagaaagaaaaacttctttcttcataaagaaaaacttgactcactgttccacagactgaacaggaggcatggctggggaggcctcaggaaacttacgatcatggtggaaggggaggcacatcttcacatggctggagaaggagaaagaaagcaaaggggaaagtgccacacacttttaaaaactagatctcatgagaacccactaccatgaaaacggcaagggagaaatctgtccccatgatccaatcacctcccaccaggcccttcctccaacatgggggattacagttcaacatgagatttgggcagggacacagatccaaaccatatccatccctaatagcaaagtttcaggtacatggtgcagaactccaaaatttataaatccaaacaaatggatttttccgacacaattgtacaacttctttgcagggaagcattcacacagtaaacctttcttttaaggaaataacctttcctcaggtggttcattatgtaaacactgcacatttgtattcaactgtatacacctaagggtggcatagcaaaacctgtgtacatatttatttgtgacaatttatctggaagattagaaaaatccttgtgggtctgcagagaccatatatttactgacactgaaaaatgttcatgacctactatcaatgaaaacgttaattacccaaaaatgtaggcacattataatcctgtttctgaaaaaaaaaaantgtatctttatataagagtagaggcaggcccggcacggaggctcatgcccgtaatcccagcattttgggaggcctagacaggtggatcacttgaggtcaggactttgagaccagcctggacaacatggtgaaaccccgtctctactaaaaatacaaaaattagttgggtgtggtggcacacacctgcagtcccagctacttgggaggctgaggtgggagaattgcctgaacctrggaggcagagcttgtagtaagccgagatggtgaaactgtactccagcctaggtgacacagcaagactgtataaaaaa

SEQ ID NO: 18306 - DNA, 554 bp, Homo sapiens
gggttatttctggaatgtagcatgctatagaacttataatttttatgtgttatatatttctaacttcttttaaaaaatggatatctcccttgttttatgataaaaatagaagttttgggaaaaaatgagaaaatgatttgtttgatctctttaaatgacttgagaaggttttaaattgtgccaaaaggccaggtgcggtggctcatgcttgtaatcccagcactttgggaggccagggcagatggatcaygaggtcaagagattgagaccatcctggccaacatggtgaaacctgtctctactaaaagtacaaaaattagctgggtgtgggggcatgtgcctgtagtccctgctattcgggaggctgaggcaggagaatctcttgaacccaggagggggaggttgcagtgagccaagatcgtgccactgcactccagcctggcaacagagcgagactccatctcaaaaaaaatttaaaaaaaaattgtgccaataaatcttcctttcctaatgttcagcatcaatctgaaaaacaatattatgatgcagaaata

SEQ ID NO: 18307 - DNA, 534 bp, Homo sapiens
aggtgtgagcttctgcacccagccaagcatcttttatttttgtactatcttttaaagaactaaagccagtggcaattgactgtattagattttttttttttttttttttgagacagagtctggctctgtcgcccaggctggagtgcagtggcgcaatctcggcaaactgcaagctccgcctcccgggttcacgccattctcctgcgtcagcctcctgagtagctgggactacaggcgcccgccaccacgcccggctaatgttttgtatttttagtagagacagggtttcaccgtgttagccaggatggcctcgatctcctgacctcgtgatccgctcgcctcggcctcccaaagtgctgggattacaggcgtgagccaccgcgcccggcctgtattagatatttttaagtcagtttcctaaaacaattaaatatttcaggtggttgggacttttctttttttgktttgttttattttgcttaatttaaccattttaaatatgattctctgggaattttttcttcaaaatataga

SEQ ID NO: 18308 - DNA, 526 bp, Homo sapiens
ctttcggctgatctcccgccgaatttgctgtcaaatgaggcatgttggagttagcrgagctgccaggcttcccagagccgcccgcggatgctgggtcttgggctctggagccctggtgggagccagctggaaggagccagggaagggcagacctcaagggctgagagcctttgagcaaatgagcaccagtgggctggctttgggaccccgggatgtaccatcctcaggccacagccacaccagtcttaggtcccagcctctaggtggggtcctgacacaagcgcgcagccacccccaagccaggactgtggttctccttttggaattttatcaaactgccaaagttaacagcaacctggggtcaggtccagcagggactgctgcccctcccagtgacagcgcgttgccctctcccgccaccgctcaggccagctgcttcctctgcctcactgaccacccgcccagtccctacgtccctggaccagcccctccatgcatcaggctcttaccttcacctcccgcgcag

SEQ ID NO: 18309 - DNA, 526 bp, Homo sapiens
ctttcggctgatctcccgccgaatttgctgtcaaatgaggcatgttggagttagcagagctgccaggcttcccagagccgcccgcggatgctgggtcttgggctctggagccctggtgggagccagctggaaggagccagggaagggcagacctcaagggctgagagcctttgagcaaatgagcaccagtgggctggctttgggaccccgggatgtaccatcctcaggccacagccacaccagtcttaggtcccagcctctaggtggggtcctgacacaagcgygcagccacccccaagccaggactgtggttctccttttggaattttatcaaactgccaaagttaacagcaacctggggtcaggtccagcagggactgctgcccctcccagtgacagcgcgttgccctctcccgccaccgctcaggccagctgcttcctctgcctcactgaccacccgcccagtccctacgtccctggaccagcccctccatgcatcaggctcttaccttcacctcccgcgcag

SEQ ID NO: 18310 - DNA, 526 bp, Homo sapiens
ctttcggctgatctcccgccgaatttgctgtcaaatgaggcatgttggagttagcagagctgccaggcttcccagagccgcccgcggatgctgggtcttgggctctggagccctggtgggagccagctggaaggagccagggaagggcagacctcaagggctgagagcctttgagcaaatgagcaccagtgggctggctttgggaccccgggatgtaccatcctcaggccacagccacaccagtcttaggtcccagcctctaggtggggtcctgacacaagcgcgcagccacccccaagccaggactgtggttctccttttggaattttatcaaactgccaaagttaacagcaacctggggtcaggtccagcagggactgctgcccctcccagtgacagygcgttgccctctcccgccaccgctcaggccagctgcttcctctgcctcactgaccacccgcccagtccctacgtccctggaccagcccctccatgcatcaggctcttaccttcacctcccgcgcag

SEQ ID NO: 18311 - DNA, 588 bp, Homo sapiens
tttccagcttgttttgagctcgatatatatatatatatatatatwtttttttttttttttaattgagacagactcttgcactgtcacctgggctggtgtgcagtggcacaatctctgcttgccgcaacctctgcctcccaggttcaagcaattctcctgcctcagcctcccgagtagctaggattacaggcgcctgccaccatgcccggctaatgttttgtatttttagtagagacggggtttcgctttattggccaggctggtcttgaactcctgacctcatgatctgcccgcctcagcctcccaaagtgctgggattataggcgtgagccaccatgcccagtcaatatattcacatttttaataggaataacagtatactaaaatcttttttagcgcatgtttaagatttgaagatgtaatttgactcagtactttccacttgcatttttttcttccacttgcatttctccactattagaatagtgcctgctaagactattctaatactttattatagttaacccctgcgaaaagagctcccagagcttacagtgcatttgattgatgtcatatggactattcatt

SEQ ID NO: 18312 - DNA, 588 bp, Homo sapiens
tttccagcttgttttgagctcgatatatatatatatatatatatttwtttttttttttttaattgagacagactcttgcactgtcacctgggctggtgtgcagtggcacaatctctgcttgccgcaacctctgcctcccaggttcaagcaattctcctgcctcagcctcccgagtagctaggattacaggcgcctgccaccatgcccggctaatgttttgtatttttagtagagacggggtttcgctttattggccaggctggtcttgaactcctgacctcatgatctgcccgcctcagcctcccaaagtgctgggattataggcgtgagccaccatgcccagtcaatatattcacatttttaataggaataacagtatactaaaatcttttttagcgcatgtttaagatttgaagatgtaatttgactcagtactttccacttgcatttttttcttccacttgcatttctccactattagaatagtgcctgctaagactattctaatactttattatagttaacccctgcgaaaagagctcccagagcttacagtgcatttgattgatgtcatatggactattcatt

SEQ ID NO: 18313 - DNA, 588 bp, Homo sapiens
tttccagcttgttttgagctcgatatatatatatatatatatatttttwtttttttttttaattgagacagactcttgcactgtcacctgggctggtgtgcagtggcacaatctctgcttgccgcaacctctgcctcccaggttcaagcaattctcctgcctcagcctcccgagtagctaggattacaggcgcctgccaccatgcccggctaatgttttgtatttttagtagagacggggtttcgctttattggccaggctggtcttgaactcctgacctcatgatctgcccgcctcagcctcccaaagtgctgggattataggcgtgagccaccatgcccagtcaatatattcacatttttaataggaataacagtatactaaaatcttttttagcgcatgtttaagatttgaagatgtaatttgactcagtactttccacttgcatttttttcttccacttgcatttctccactattagaatagtgcctgctaagactattctaatactttattatagttaacccctgcgaaaagagctcccagagcttacagtgcatttgattgatgtcatatggactattcatt

SEQ ID NO: 18314 - DNA, 588 bp, Homo sapiens
tttccagcttgttttgagctcgatatatatatatatatatatatttttttwtttttttttaattgagacagactcttgcactgtcacctgggctggtgtgcagtggcacaatctctgcttgccgcaacctctgcctcccaggttcaagcaattctcctgcctcagcctcccgagtagctaggattacaggcgcctgccaccatgcccggctaatgttttgtatttttagtagagacggggtttcgctttattggccaggctggtcttgaactcctgacctcatgatctgcccgcctcagcctcccaaagtgctgggattataggcgtgagccaccatgcccagtcaatatattcacatttttaataggaataacagtatactaaaatcttttttagcgcatgtttaagatttgaagatgtaatttgactcagtactttccacttgcatttttttcttccacttgcatttctccactattagaatagtgcctgctaagactattctaatactttattatagttaacccctgcgaaaagagctcccagagcttacagtgcatttgattgatgtcatatggactattcatt

SEQ ID NO: 18315 - DNA, 582 bp, Homo sapiens
tgcaacgttgttatgcagccagtattgcagtgccttgtgcttttcgaatccagacggttgattcagccctttattcttttgaggtagataaatttgagtgtcacacagtttatagttgtgggctggctggcaggagggagggcagatactgtgggcctgagctgtctataaatccgtagctgtattaagtaaaggatgagtgggcttctaagggtcaggttataagataccttttgaaatcaagacgtgatctctgagaataacaaagttcctatttcctatgggattttaaagttgggtgtggatgggagaaatttgcttgaaatgaatggctattagcttaattcctacacagacagaacaaaacatgaccaatggcagtttagcatattctggacatctttgcaattttagcagtatattctaatggcaaaataaagcactttatagtttcactaaaatgagtgaaacataaatgtccccatgccttttggcagcatcctatgccatctctttttcccatacatccccctaccccactaatttggtstttggtgcatgtctgtttctttccaggaattt

SEQ ID NO: 18316 - DNA, 633 bp, Homo sapiens
gcatccaaagaagaatggtaagttatgtcctaacaatgaatcagtaaattggcaggaagcgaagttggaacatttaaaagaaaataccaaacataggaatttttttacttgctcttccaccatgcttcctactcaccgttgagggccttcacacctttgagcaatctattcttatatacctttccactagytgtaagataagacacaattcagaatatgggttaaatgatgggaagactaaaaaatcagcacaaagacaacacaacatccataatttcagggaaaaaaacccctttcaatttgcttggaagtttcttctctgttacatttaagaatgaaaccaaagataaagaacactttccctgttataaatctatccactggttgaataaaatacagtatttccctatttctgtctttttccttccttttctttcttccctggtttccttctcatcggtcatgataagattaggcagtgctcccagggggacaggataatatagcccggatggtgggacacccccggtgaaagatgttgctagctttcggtattaaaatataagcaacaaaaacaggcaacaagatttttttttttttttttgagagacggagtcttgctctgtcgcccag

SEQ ID NO: 18317 - DNA, 560 bp, Homo sapiens
caatacagctaacaaagtcattttaggagttaagaaatatcaccaagatccatatgtaacattttattcccttttgcatcctgaagatatggattccatatcacagatgagactttctccatcacttcattggctttgtttggagaatcctgctggttattcatttagttgttggcattgatcctgctgaattctagagttgtgatggtgagttatacaaggttttcctgtgagaattgctttggtgttagtaatgcactcaaaaatgtatctaataaattwtaaaacatatatatatgtatacatatgcaatagtactccaatttcttctttttcaccatctgtattaggagcttttattatttaacttattagttaatatctcaatttgataatttgaaaacattactggcaaaccatttattttcagttgcaagtagttagggaaagttacatttttctcttatccttaggcattataaattcctgagtgttatgcaaagcattactagaatgatttgcacaacagggggctcagtttttaataaaagtgactctta

SEQ ID NO: 18318 - DNA, 641 bp, Homo sapiens
acgcctgaccccatcatctgtgagagcttcaagctggtcttcctgcttcccctctagctaccctggaatccattctctgacccagtggtgaccttgataatataaccgacaatttggaaacgtaaataactcatatcccaccactgcttctccaaagggttcccaatgcccctaatagacatagaagtttcatgtcccrgcttacaaagccctacatatgctaacccttacccacctctgtggtctcaattcacaccactgtccctttccccactacacacaaaccaatccaaagttgtcccctattcactctctgtcacatgaacccatctgaattctttgcatagcacttaccactggacaatactttttttatttattgtgaacgcaattattgcttatggtctaactcttccaccaaaaatgtatgctcagagagccaggagcctatctgtcttgcttacgtgcatatcgccagtgcctaaaaccgaggctcacacactacatgtgttcacacacacacacacaaatacctggggaggagggagaatgcaagttatttctcatggtcactttgactgcaattttcaagaaaaacagtcagtgtgtgacagcaacagtagaagcacgatttccaatca

SEQ ID NO: 18319 - DNA, 745 bp, Homo sapiens
catttctattttcttagatgtacgggaaggatgaaattatttttgttggagacagcatttagtttctcagagagaagatagggcattattcatcacttttgtgatggtgagcctatagaacttatggtatttgttctgccggttggccaggagtaggccacttgagttacaagaaatttctctttgatgattctgaactgctgtttgttctctgccagctgggggcgcaatttctcattgatttctagaatgttcttttctgccttctcactggatcaagggctggcagacaacaccatgctgacgtttgtggcagaagaggtggagccagggactggggagaagaaacccaaacacatgatgggttaaaaactggtgaaatccaataggtttaatcaggactgagggatgtcagtaactgaaattcttaacttactattgagaaaaatgtgatcactccccacagcactttaggatccttcaccacaaaaacaaggtttgaggtgcctgaactcagagctgaaggcactcactaccagtagctcagactctgacaaaagtaaggaagattgtggccagcgtgccaggtaaccgtctgcagttgcaataacagaattagaagataggggtgtcatggaatcttaggagctytgcgttgcaattgcccaggctttgctgaaactcaggcaccctggtctcacctgagggtcaccaccaatgaagattattccttcagcattcactc

SEQ ID NO: 18320 - DNA, 838 bp, Homo sapiens
ttctactctcctcctacttaataagtcaaaagggcacgttatagcatcttggtatatacaacaaaagcaaagatttaccttctctaggttaagttaccttctctaggcaagagaaaaaattctgcggtgttacattagaaattttgcgggtaagaaagtgagatattataatgaatagctcccttttggtaccaaaacccaattcagcactcttggttaccagaactcaataaaaattaactttagaagcacaagtaatagaaaaaagtggagtggggacaagaacagctccaagaattagaactggggactttactgggataaagtctctctcttcccatctttcctgtctgcttctttctacttattggtttcatatactcttatattaagtcaagctttttccaggattcagcaaacaaagagagaacagagccatgggatcagtttcagtttagtgagtgaaaatcagtttccctgttagatagtttaagaaccttcctatagaggaattctcttggtcttgtttgagccaaatggtaatgcctgggccattcagcatgcccgaccactatcactgggttctataactggtgtggattgtcacagaccctttgctagggtcagtgtgaagagaatactgtgactaacaacctctaagagaattatgtggtcggaacttgtgagraccagtttgctaaaggaaatatgacttgtttctagaaaaagaggaaaaagtgatgggtagatggatagacaggaagcagaaaaaaatagtagttgttcaatacagattgactgtattagttttctgtgctgaaaaacaaattactactgg

SEQ ID NO: 18321 - DNA, 1318 bp, Homo sapiens
gaataactttcctgtagaacagatttctgagatttggtgtcccattcttcatttctggatgtagttttcatctttactgtcaaataactgaatgaaacatccaaactgactttcatgaattttcttagggagatagagtgaaataaaattatgacccactttgcagagcacagaattccaactatattttcattttagctggctgtttcacgatagcaattctctgggtctcttttcacagatacaagtayatctatgcccaataattatatctatggtaataaactgaaagagctagtatctttgaggtttccacattgccaactcccgaaaatgtggagaagggtgaagtttctaatataaaagtaacaagaatgtcatggactagaaacataaagtactcaagttttcctttctgttacttgtattataataaaaaaggagacagcaggataagtgcttcaatattgtgtttctcatgtgtttttgaaaatgtgtaggaatattttaatagttttggtttcctttttttttttttttttaagatgccaccataggggcctgttggggagcaaagggattatgttttccttgatgttaagtgaattagccaaacatagacttcctgttcattcttggtttttttccacgtcgtatatgcctattactatttttaagtgatttttatatcaatgttttagtttatttttttactttcttgttaacccgattataaactcccatgggagcaacagtgccttttttgccctgaggtttttatttgcttaagcaatggcaggtccacttaatgatagaccatatcatcaaagaaaggtagtattcatgtggcttttgaattagcatgcatctgcgtagattctgcctctggctttaccagcaacagaaaatttgtagaacagagacagaaatgctttgctgttaattgcgcttaaataagaataggagtaaacgagagtattacctccaaagcaccagagctgctttcctccttataaccagttcctaaagtgaatgaaagcagctctccttatgtgtctgcctacttcattcttcggtaagtttaacagttcatctagctaccctttatttgaaatgatttccagatgcctcctcatataaattgctgacttctggatatattctggttcgggaatgggtagatttctgatgtggtttagtaggtatataaatcccgtgagcttcttgcatctaatttctctgatcctgcttacactgatatttaaagtaggttttgacatactccatcacttaatgttgataaaggacgtttatattc

SEQ ID NO: 18322 - DNA, 1318 bp, Homo sapiens
gaataactttcctgtagaacagatttctgagatttggtgtcccattcttcatttctggatgtagttttcatctttactgtcaaataactgaatgaaacatccaaactgactttcatgaattttcttagggagatagagtgaaataaaattatgacccactttgcagagcacagaattccaactatattttcattttagctggctgtttcacgatagcaattctctgggtctcttttcacagatacaagtacawctatgcccaataattatatctatggtaataaactgaaagagctagtatctttgaggtttccacattgccaactcccgaaaatgtggagaagggtgaagtttctaatataaaagtaacaagaatgtcatggactagaaacataaagtactcaagttttcctttctgttacttgtattataataaaaaaggagacagcaggataagtgcttcaatattgtgtttctcatgtgtttttgaaaatgtgtaggaatattttaatagttttggtttcctttttttttttttttttaagatgccaccataggggcctgttggggagcaaagggattatgttttccttgatgttaagtgaattagccaaacatagacttcctgttcattcttggtttttttccacgtcgtatatgcctattactatttttaagtgatttttatatcaatgttttagtttatttttttactttcttgttaacccgattataaactcccatgggagcaacagtgccttttttgccctgaggtttttatttgcttaagcaatggcaggtccacttaatgatagaccatatcatcaaagaaaggtagtattcatgtggcttttgaattagcatgcatctgcgtagattctgcctctggctttaccagcaacagaaaatttgtagaacagagacagaaatgctttgctgttaattgcgcttaaataagaataggagtaaacgagagtattacctccaaagcaccagagctgctttcctccttataaccagttcctaaagtgaatgaaagcagctctccttatgtgtctgcctacttcattcttcggtaagtttaacagttcatctagctaccctttatttgaaatgatttccagatgcctcctcatataaattgctgacttctggatatattctggttcgggaatgggtagatttctgatgtggtttagtaggtatataaatcccgtgagcttcttgcatctaatttctctgatcctgcttacactgatatttaaagtaggttttgacatactccatcacttaatgttgataaaggacgtttatattc

SEQ ID NO: 18323 - DNA, 594 bp, Homo sapiens
atttaaagtaggttttgacatactccatcacttaatgttgataaaggacgtttatattcttcttagttcgttttatttatgtgttagctttaaagacattttctttgacggaaagtgaagtaacaaaataatagtcgaatagttctgccgtgtctctaatttgttgatattttccatgtacttgaaacatgtatggtacacctcttctttttccttctctgaacaatggctagaaaaaaaaccctacttctttctgtcatttactgtgaggcattactgaatctgggtgtattcatgtatgctgctacctgtatgttttcaaacaataagaattyattgaaacatataagacattatactttctcttctccagtattggattatagactgcacttagttttccggaatgaagtacagacaaagccataacgcgtgtacaactacacattgtcctataatattgtctgataaaaaacagtgtagaaatattctgacagggaaatagcaaatgtattaatttaacttaccttgcaatctctcttaatggagccttatcaccagtgtaagaaataacgtctgggtgtgaatacgtac

SEQ ID NO: 18324 - DNA, 594 bp, Homo sapiens
atttaaagtaggttttgacatactccatcacttaatgttgataaaggacgtttatattcttcttagttcgttttatttatgtgttagctttaaagacattttctttgacggaaagtgaagtaacaaaataatagtcgaatagttctgccgtgtctctaatttgttgatattttccatgtacttgaaacatgtatggtacacctcttctttttccttctctgaacaatggctagaaaaaaaaccctacttctttctgtcatttactgtgaggcattactgaatctgggtgtattcatgtatgctgctacctgtatgttttcaaacaataagaattcattgaaacwtataagacattatactttctcttctccagtattggattatagactgcacttagttttccggaatgaagtacagacaaagccataacgcgtgtacaactacacattgtcctataatattgtctgataaaaaacagtgtagaaatattctgacagggaaatagcaaatgtattaatttaacttaccttgcaatctctcttaatggagccttatcaccagtgtaagaaataacgtctgggtgtgaatacgtac

SEQ ID NO: 18325 - DNA, 594 bp, Homo sapiens
atttaaagtaggttttgacatactccatcacttaatgttgataaaggacgtttatattcttcttagttcgttttatttatgtgttagctttaaagacattttctttgacggaaagtgaagtaacaaaataatagtcgaatagttctgccgtgtctctaatttgttgatattttccatgtacttgaaacatgtatggtacacctcttctttttccttctctgaacaatggctagaaaaaaaaccctacttctttctgtcatttactgtgaggcattactgaatctgggtgtattcatgtatgctgctacctgtatgttttcaaacaataagaattcattgaaacatataagacattatactttctcttctccagtattggattatagactgcacttagttttcyggaatgaagtacagacaaagccataacgcgtgtacaactacacattgtcctataatattgtctgataaaaaacagtgtagaaatattctgacagggaaatagcaaatgtattaatttaacttaccttgcaatctctcttaatggagccttatcaccagtgtaagaaataacgtctgggtgtgaatacgtac

SEQ ID NO: 18326 - DNA, 594 bp, Homo sapiens
atttaaagtaggttttgacatactccatcacttaatgttgataaaggacgtttatattcttcttagttcgttttatttatgtgttagctttaaagacattttctttgacggaaagtgaagtaacaaaataatagtcgaatagttctgccgtgtctctaatttgttgatattttccatgtacttgaaacatgtatggtacacctcttctttttccttctctgaacaatggctagaaaaaaaaccctacttctttctgtcatttactgtgaggcattactgaatctgggtgtattcatgtatgctgctacctgtatgttttcaaacaataagaattcattgaaacatataagacattatactttctcttctccagtattggattatagactgcacttagttttccggaatgaagtacagacaaagccataacgcgtgtacaactacacattgtcctataatattgtctgataaaaaacagtgtagaaatattctgacagggaaatagcaaatgtattaatttaacttaccttgcaatctctcttaatggagccttatcaccagtgtaagaaakaacgtctgggtgtgaatacgtac

SEQ ID NO: 18327 - DNA, 203 bp, Homo sapiens
gggggaatccagttgttacagaagaaaccgaaacataattgaaagtgacaaatgatcaactggagattgggaaaacatgaaatagaaaaccatttgcttcaggagctgcctaaaatataagatacacacagagttcttgattttaaatcaaactttaaaatcactggtagaaaaggcagwtgaaaattatgagaattcaaaaa

SEQ ID NO: 18328 - DNA, 1241 bp, Homo sapiens
tggtaatgatcgtaacagtgctctggtgagatttaagtttctaatgtggggcagctgctcagttagaaagtaaagttagtgtctgataaggtcaggaatcacacggtgtcacttacttcttctatcccaatggaaagcatctcattctgttcacaggtctgtagggattcctgatcctccacctggctctggcttgagtatattctttctatttcagtagagctaatttttatttcctagaaattaaagatgtgaggaaaagctggcaagcattcaaaatggatcatcaattgacagaaaaataaagtatgttgtatatgattataaaaatagtacattttttcccagggagataattgagcaagtgactataatgtacatacgaggatgtttactgcagcattatttataacagcaaaactttggaagccaactcagtgcccatcaatagggggtcactttaaatgaagtgtgtgtggtacacctatccatgaaggataatgcatgtatatttatggatagggatgatgtgcacaacatattattgagtgaaaagcagttctattcatgtaaaattacatatgcctcatgtgtctgaaggtgtgtgtgtgtaaattccttcagagatttgcattggcaaatagaaatatctgggaggttgtttgctaaggatttcgtagcatttttctcagtggggtagaaagaagatgggaattttgaggatgtttgctttaatttttctgtattcttgagtttatatgtacacatatgtacatatatatgtacatatatattttatttttgagacaagatgtctgtctctgtcacccaggctggaatgcagtggcatgatcagagctcacygcagccttgaatgcctgggctcgagtgaccttcccacctcagcctccctaaagtagccaggactgcaggcgtgcaccaccacacaccctggagtctcgttatgttgcccaggctggtcttgaactcgtggcctcaagccatcctcctgccttggctcccaaagtactggggttacaggcgtgaaccactgtttctggcctattcttgagttttctatgacacgcatctttgaaaatagaaaaagaagaattaatatttaaaagacaaatattttatatactcacacatactcattctaaaaaatttttaaaatatagaaagctccaaggaaagaaataaaagtccatctcaggttatactgtagataaatattatta

SEQ ID NO: 18329 - DNA, 1241 bp, Homo sapiens
tggtaatgatcgtaacagtgctctggtgagatttaagtttctaatgtggggcagctgctcagttagaaagtaaagttagtgtctgataaggtcaggaatcacacggtgtcacttacttcttctatcccaatggaaagcatctcattctgttcacaggtctgtagggattcctgatcctccacctggctctggcttgagtatattctttctatttcagtagagctaatttttatttcctagaaattaaagatgtgaggaaaagctggcaagcattcaaaatggatcatcaattgacagaaaaataaagtatgttgtatatgattataaaaatagtacattttttcccagggagataattgagcaagtgactataatgtacatacgaggatgtttactgcagcattatttataacagcaaaactttggaagccaactcagtgcccatcaatagggggtcactttaaatgaagtgtgtgtggtacacctatccatgaaggataatgcatgtatatttatggatagggatgatgtgcacaacatattattgagtgaaaagcagttctattcatgtaaaattacatatgcctcatgtgtctgaaggtgtgtgtgtgtaaattccttcagagatttgcattggcaaatagaaatatctgggaggttgtttgctaaggatttcgtagcatttttctcagtggggtagaaagaagatgggaattttgaggatgtttgctttaatttttctgtattcttgagtttatatgtacacatatgtacatatatatgtacatatatattttatttttgagacaagatgtctgtctctgtcacccaggctggaatgcagtggcatgatcagagctcaccgcagccttgaatgcctgggctcragtgaccttcccacctcagcctccctaaagtagccaggactgcaggcgtgcaccaccacacaccctggagtctcgttatgttgcccaggctggtcttgaactcgtggcctcaagccatcctcctgccttggctcccaaagtactggggttacaggcgtgaaccactgtttctggcctattcttgagttttctatgacacgcatctttgaaaatagaaaaagaagaattaatatttaaaagacaaatattttatatactcacacatactcattctaaaaaatttttaaaatatagaaagctccaaggaaagaaataaaagtccatctcaggttatactgtagataaatattatta

SEQ ID NO: 18330 - DNA, 1241 bp, Homo sapiens
tggtaatgatcgtaacagtgctctggtgagatttaagtttctaatgtggggcagctgctcagttagaaagtaaagttagtgtctgataaggtcaggaatcacacggtgtcacttacttcttctatcccaatggaaagcatctcattctgttcacaggtctgtagggattcctgatcctccacctggctctggcttgagtatattctttctatttcagtagagctaatttttatttcctagaaattaaagatgtgaggaaaagctggcaagcattcaaaatggatcatcaattgacagaaaaataaagtatgttgtatatgattataaaaatagtacattttttcccagggagataattgagcaagtgactataatgtacatacgaggatgtttactgcagcattatttataacagcaaaactttggaagccaactcagtgcccatcaatagggggtcactttaaatgaagtgtgtgtggtacacctatccatgaaggataatgcatgtatatttatggatagggatgatgtgcacaacatattattgagtgaaaagcagttctattcatgtaaaattacatatgcctcatgtgtctgaaggtgtgtgtgtgtaaattccttcagagatttgcattggcaaatagaaatatctgggaggttgtttgctaaggatttcgtagcatttttctcagtggggtagaaagaagatgggaattttgaggatgtttgctttaatttttctgtattcttgagtttatatgtacacatatgtacatatatatgtacatatatattttatttttgagacaagatgtctgtctctgtcacccaggctggaatgcagtggcatgatcagagctcaccgcagccttgaatgcctgggctcgagtgaccttcccacctcagcctccctaaagtagccaggactgcaggcgtgcaccaccacacaccctggagtctcgttatgttgcccaggctggtcttgaactcgtggcctcaagccatcctcctgccttggctcccaaagtactggggttacaggcgtgaaccactgtttctggcctattcttgagttttctatgacacgcatctttgaaaayagaaaaagaagaattaatatttaaaagacaaatattttatatactcacacatactcattctaaaaaatttttaaaatatagaaagctccaaggaaagaaataaaagtccatctcaggttatactgtagataaatattatta

SEQ ID NO: 18331 - DNA, 619 bp, Homo sapiens
ggtacccactgtccggtttcctatatgttgaatttagttattcctcttcattcagctgatatttactggggacttactaagaaccagttctatatcctgaggatatgacgatgaacaaaacagaaaaaaaattcctgccctcatgaagattaaattccagagatattccatgcacaagcaaagatatctatgtaactgtttgagagrtaacacagtagctaagagcaagcaagatggtcgagtcttccagctccactgcttgatggacgtgtccctgcattggtaaaatggggaaagatagtggtatccacctcacaggggtgttgggaaaagtaaaagagttaatgtaaaaaattgcttagctgggggcgatggctcatggctgtaatcccaggactttgggaggctgaggcaggtggattgcctgagctcagatgttcaagaccaccccgggcaacatggtgaaaccctgtctctactgaaatacaaaaattagccgggcatgatggcaagtgcctgtaatcccagctatttgggaggctgaagcacgagaattgcttgaacccaggaggtggaggttgcagtgggtcaagatggtaccacttcactctggcctggg

SEQ ID NO: 18332 - DNA, 619 bp, Homo sapiens
ggtacccactgtccggtttcctatatgttgaatttagttattcctcttcattcagctgatatttactggggacttactaagaaccagttctatatcctgaggatatgacgatgaacaaaacagaaaaaaaattcctgccctcatgaagattaaattccagagatattccatgcacaagcaaagatatctatgtaactgtttgagaggtaacacagtagctaagagcaagcaagatggtcgagtcttccagctccactgcttgatggacgtgtccctgcattggtaaaatggggaaagatagtggtatccacctcacagrggtgttgggaaaagtaaaagagttaatgtaaaaaattgcttagctgggggcgatggctcatggctgtaatcccaggactttgggaggctgaggcaggtggattgcctgagctcagatgttcaagaccaccccgggcaacatggtgaaaccctgtctctactgaaatacaaaaattagccgggcatgatggcaagtgcctgtaatcccagctatttgggaggctgaagcacgagaattgcttgaacccaggaggtggaggttgcagtgggtcaagatggtaccacttcactctggcctggg

SEQ ID NO: 18333 - DNA, 534 bp, Homo sapiens
ggggatcctgaagaagggttacctaayaaaacagatttttgataccaataaatcaggttgtagaagaagtaaatgctttttaaaacttaattttgctgtgtcttgtaaatacacatacacactaggattgccagatttaggagaaaaaaatacaggctgtctagttaaatttgaatttcagataaataacaaatattttttagtatgtctcaaatattacactggacatatttatactaaaaagttattcattgtttatctgaaactcaaatttaactaggcatcttgtattttatctggcagccctaatacacattcacacacatgtgcacacatacacgtacttaatactattttacctctttttttcccctggatcctctgtttatgagaccacacccttgcttaatgtaaaattgctaaccacaatattgtttaagaatgaattgtcactcaaggtagataatggagttctgaaattttgtcatggggaaaaaaggaaaagagtgtatattagttttaaaacaagaagaa

SEQ ID NO: 18334 - DNA, 534 bp, Homo sapiens
ggggatcctgaagaagggttacctaataaaacagatttttgataccaataaatcaggttgtagaagaagtaaatgctttttaaaacttaattttgctgtgtcttrtaaatacacatacacactaggattgccagatttaggagaaaaaaatacaggctgtctagttaaatttgaatttcagataaataacaaatattttttagtatgtctcaaatattacactggacatatttatactaaaaagttattcattgtttatctgaaactcaaatttaactaggcatcttgtattttatctggcagccctaatacacattcacacacatgtgcacacatacacgtacttaatactattttacctctttttttcccctggatcctctgtttatgagaccacacccttgcttaatgtaaaattgctaaccacaatattgtttaagaatgaattgtcactcaaggtagataatggagttctgaaattttgtcatggggaaaaaaggaaaagagtgtatattagttttaaaacaagaagaa

SEQ ID NO: 18335 - DNA, 586 bp, Homo sapiens
aattttgtgtttttaaaaggtaagtgaagctccaggtgaagacacacaatcttttaatatgtaagtggtggaggttgagatgaaatgattttgtagactttactcacaaaattctcagtagctcccaaaaaggtttacacacttaatattcatatgttttgaataygtgagacagctgttgtttacctattattgagtacagaattgggaagaatggcccgtcatttttaaaatccttaaaataattgtcacttttctctaatttccctcctctcattctctactaaaccactgaatcgctccgtactcatcctactccaagtttattgctcttgtgaaaatctgaactgacttctacatgctaagtccaatgttctgttcgtggtcttcatctcatttgccttctctattagtcagcgttctctagagggacagaactaaaaggatagatgcatatatgaaggagaatttattaagcagtattgactcacaggatcacaaggtgaagttccacaactggccatctacaagctgaggattaaggaagccagtctgagtctcaaaacctcaaaagtagagaagccaa

SEQ ID NO: 18336 - DNA, 586 bp, Homo sapiens
aattttgtgtttttaaaaggtaagtgaagctccaggtgaagacacacaatcttttaatatgtaagtggtggaggttgagatgaaatgattttgtagactttactcacaaaattctcagtagctcccaaaaaggtttacacacttaatattcatatgttttgaatatgtgagacagctgttgtttacctattattgagtacagaattgggaagaatggcccgtcatttttaaaatccttaaaataattgtcacttttctctaatttccctcctctcattctctactaaaccactgaatcgctccgtactcatcctactccaagtttattgctcttgtgaaaatctgaactgacttctacatgctaagtccaatgttctgttcgtggtcttcatctcatttgccttctctattagtcagcgttctctagagggacagaactaaaaggatagatgcatatatgaaggagaatttattaagcagtattgactcacaggatcacaaggtgaagttccacaactggccatctacaagctgaggattaaggaagccagtytgagtctcaaaacctcaaaagtagagaagccaa

SEQ ID NO: 18337 - DNA, 529 bp, Homo sapiens
ttttctgtttaccatcataggggtctcactagctgctctcatttctatttagtcttaggaaaggacatagcaattcttctaatttcattggttttacactggtaactcccagaattttgctctcatgttttctgtcggggtatttacaatggatagccctttagaggagaaatatactaccacagacttagtggttaattggggaacagaggaattctattcagccttacaaatggggaaaccatgttgtttgtgacaacatggatgaatctggtttcattttatttcactgctaagtgaaataaacaggcacaggaatactgcatgatgtcatttacatgtggtatctaaaaaaggtgaccttatagaagtagacagtagaatggtagttctcagaggctggggaggggaagagtagatggggaagaggagatattgatcaaagggtagaaagtttccrttagacaggaagataagctttaataatttattgcacagaatggtgactataataaataataatacatcg

SEQ ID NO: 18338 - DNA, 567 bp, Homo sapiens
ctagaaacatgagaaattaaccagaaaaattttaaatcagttcatttcaatggcaagtatcttacagcaacataataaaaatggctgttttatgaagaatgtttctttaaatgactctgcccctctaatgcatctcattaaaaactgtcagccaggcgcggtggctcatgcctataatcccagcactttgggaggcctaggcgggtggatcacctgaggttaggagttcgagaccagcctgatcaatatggtgaaaccccatctctactaaaaatacaaatattagctgggcatggtggcaggcacctgtaatcccagctacccgggaggctgagacaggagaactgcttgaacctgggaagcagaggttgcrgtgagccgagatcacatcactgtactccagcctgggcaacagagtgagactccatctcaaaaaaaaacaaaaaaaaaaactgtcaaaagataccttctcttgaaatgtggctaattatatcactctcctgctcaaagtcctctctcactgccttgaagataattttcacatttcttagcctagaatctctctcc

SEQ ID NO: 18339 - DNA, 772 bp, Homo sapiens
  misc_feature (1)...(772): n = A,T,C or G
aggataactggcatntctagtagaacattcaaagagatgttaatgtcattaaccatgttaaggaataaaagagaaacagtgtttgtgttttaatcactttttccccyggagtgagagggaggctgaaagtcctagctttaaaaataatttctggctttaagttatctgtggaataccatgtttatgctccaggaggtcctctgaaatctgagactggtcttcaaaaggcatgtgaatgacagttacagatataagatttgagatgctttctaaaagtaggtaatttcacagccagaaaggcaaagatggaatccaaattcagtttccaaataaaatcagcctaggagggatagaggaatgagataagcagcaaaaagatgatgtcaacaaacccaaaattagaattctaaatctaataccaatagtggtgtctacacacactcacaaatcacgaaacctgtcaaatgatcagtgtaccaatgggcatgctcaacagcatacccatgaaaaacaggaggaaaaggaagggcagccaaggagcaagtcggtgccaatgacgactacatgtgacgtgactgtaaaggccagaccacaacctccaaaagtctgcacgaaagaaatgagcagcccaaccggaaaacagcaagacccaggaaacagctccatccattagcttactgttcagatcccgcccctctagaccaagcttttgcctcagaaaatcacaggagctgcggggcagaatcacatacattatcattttgttatccaa

SEQ ID NO: 18340 - DNA, 772 bp, Homo sapiens
  misc_feature (1)...(772): n = A,T,C or G
aggataactggcatntctagtagaacattcaaagagatgttaatgtcattaaccatgttaaggaataaaagagaaacagtgtttgtgttttaatcactttttcccccggagtgagagggaggctgaaagtcctagytttaaaaataatttctggctttaagttatctgtggaataccatgtttatgctccaggaggtcctctgaaatctgagactggtcttcaaaaggcatgtgaatgacagttacagatataagatttgagatgctttctaaaagtaggtaatttcacagccagaaaggcaaagatggaatccaaattcagtttccaaataaaatcagcctaggagggatagaggaatgagataagcagcaaaaagatgatgtcaacaaacccaaaattagaattctaaatctaataccaatagtggtgtctacacacactcacaaatcacgaaacctgtcaaatgatcagtgtaccaatgggcatgctcaacagcatacccatgaaaaacaggaggaaaaggaagggcagccaaggagcaagtcggtgccaatgacgactacatgtgacgtgactgtaaaggccagaccacaacctccaaaagtctgcacgaaagaaatgagcagcccaaccggaaaacagcaagacccaggaaacagctccatccattagcttactgttcagatcccgcccctctagaccaagcttttgcctcagaaaatcacaggagctgcggggcagaatcacatacattatcattttgttatccaa

SEQ ID NO: 18341 - DNA, 498 bp, Homo sapiens
ggccgagtccaaagagctgacagcaactaccttcaaaggcaccacttggagcaaatatgacaagagctaactaaagctaataaaaaatctgcaggcccactagttcctctatacccaactattataaaagactgcttccacactgctaaaagaatatataatagcacaaacataataarctttgttttaaaacatgggtgaagtcattaattgatagaatttatcagtcatatctgggcacagtatatattaatgatcctaaaattttaatatttttccaaaattaccagctcaaaattaaattctactacaacctatctgatgaatacacaatattcacacgcaaagcacattaaagccatacaaactaagcttctctttttcacactcgaacagctggtccatctatcatgtacatcaagtaactttaaccccgaaccttgtatgtgcctgcctcttcaccaccatgcgttgtcactgtccccggtacgagtcccc

SEQ ID NO: 18342 - DNA, 1022 bp, Homo sapiens
gattaaattaaataatgtacataaaatgcttagcacagtatctaataaatgctctatatgtataaactattagcataaagtaacttttaaacagataaattatgtatgtatatgtatgcttaataaatgtgtgaagaagatgggaaagaaatatagcaaaatattaacagtggttatgtatgggcagtagggttatggtacttatgtttttatttattagatttctttattttgccaaacttcctacaacagacagatgtttcctgtataatgaaaaaatatattgttttacaaactaagctaagtaaacaagaactgtaaacccacaaatacatttatttatatctttttaaaattctcaatgatccattatctaatcatttctgacccagagaaaaagatagatattgacagcgcattttcactttatcttaatagaagttgggatgggtttaccaggcatctgcatagacagaaatgcaggataataaaaaattaattggggaaagatgaagagcaaaggaagaagatctccaggaagaggccgaactagaaaaaaatgaagagacaggaaaagaactaagaaagagggcattgccaaaattctcacagaccaaagagaggttgccaacagagcatcagaagaaagaaaagaccagagtttactgtggagtattttgtgcaagaaccatccataggaatttttaaaactctattggagacttttggactccaggcctacatgtatggagcttggaagttgctattccaccttaacaaacattaagctgaacaaactaaaacatcaaaaactcttcttaagtttgaaaaagaagtgagatcacaattgccacawataaatcaaatacctggtaatacagctaacaagggaagtgaacgatctctacaaggaaaactacaaaccatggctcaaagaaatcagagatgacacaaacaaatgaaaaaatttctcgtgctcacggataggaagaatcaatattgttaaaatggccgtactgccc

SEQ ID NO: 18343 - DNA, 1830 bp, Homo sapiens
aattctggactcaatgttagggactcagtcttattcacttttgtatcttcagtgtttggaagcaccaacaaacatttgctaagtgagtgaatgggagaggaaggctgtgtggtgcagtgggaaaggcaatgaactggtagtcaggacatggggctctaatcctgactctgctactagtgactgcatgactttgaacaaatcccctcattgctctgggtctcaatttcctcatctgtaaaatgagaataaaaatacagccttccaccccagggttatggagattaaatgaggtaacagagcttcaccagctgcctgccctgtttgtgccctgtcctcctgaaacagcctggactattgttcctgccatttggatctaatttgtgctctctcccctggtgagagctgagctgaaatctgttgccttgttggaggggaagtttgcagcaatggcatacatattatccagttggcccctgtgttactacaagggcagacatcaaaagtgaggaagatgtcaagctagagagatttgcttcttttgttacccctaaacctaaatgaggacccaaagtgggaagagtgaggcagagcagatctacatcacatgctgaggtgtataagtgaggcctcaaacattgtcccctaagccctggaattcagcagcatctaggggaatgccactttaatgaagtctactcattcatataatgtcataatttctcagtgccttgggttaaatgattaactctatcatgggtattcaagtgctaagaaagatgaggaaaggtaaaaaattgcaaatgccaaatacaaggaataccatttggaaaaaatggaaaatcacgattttagacactgctgtctcaagagatgactattgattttcaggtgagatgtctttccagaagatccactaacatggttctttgtacattgtgaaggcaaacttttccatcaaaacttgatatatcttctacttacaagtcaagtgtctggggaggccctaaaaatctgcaactgataatttgtagggctttctgggagtcatatttgttaaatgagtttatttaattgcatggactgggccttatcacaagacaagtggtcaagggaaaatggtgagagaagaaaaagaaggtattgaggctggtagaatccctacccaaagtctaaagtcagttctggtgctaatgctagtgatcaaaaaaaaaaaaaaaaaagtatatttccattttgcaaggctttttttttttttttttttgagactgagtctcgccctgttgtccaggctggagtgcaatggcgtgatgtcggctcactgcaacctctgcctcctgcattcaaatgattctcctgcctcagcctcccgagtagctgggattacaagcgcttgccaacatgcccagctaatttttttatttttagtatagacggagtttcaccacgtgggccaggctggtctcaaactcccgacctcgtgatctgcccacctcagcctcccaaagtgctgggattacaggcatgagccaccgtgcccggccccattttgcaaggcttttaaaaaaatattgtgcgctcagatggcacctttaatcacgaagaacttctggctgagttccagactgattctgctggcacagagagctctgagatcataccctatattcagagcacagaagaaatatttcatccatctctgaaataaagaggaagaaatgaagcatatttgaacagttgcagaaaaaaaccataccagggtgaaaagygaagggcatcctagccatttggagttacagaaaagtactattaatcctaaatacttaagtggca

SEQ ID NO: 18344 - DNA, 490 bp, Homo sapiens
cactatgatctgatttctgtcctcacatcactgaacctgctctttttaaagactctratgggctgatggtagacaaatccaacaaattgttccttttcttttactggacctgtctctggcaatcccttcttaaaagtctcctctgtcttccctgataatattttttcccattttcccaaaatctctttgtacttctccatgtttttaatctactccttaatgttggtgattccccaagttctcttctcattcttaaatctgaggaagtttagtttgcacccatgaattcaattacttactatagaaagtaacatttgtttctttgttcaagtccaaaaatgaactgggctccttttgctcgtcctacaacgtgtctttgtgaattatacagtagtctagtatctacagtcttgtctcctaactctaattggttatttcctattgatttctgaaatttcctgcacatcatctcttccttttcattcctaca

SEQ ID NO: 18345 - DNA, 3081 bp, Homo sapiens
agctccttgaggctagacctagactgctgctgggctttgcaaaacccaactggggatgggtcctgggctgctctctgtggttctgaagcaccatctcccgccagtgtggctgctcccccttaatctgcatctctggtgtctcctatacagcctctgccagaaattcaaaagcagagagggcttttattttctatcttccaaaataaatttcaaagtattattggcaaacttgaatagtgacttctgtttcataatttttcatcgccttttggtttcatctttagacagttttttaagttataagaacttttcttcccctgagaagttgacgcacataaacccccttgtttgccacattagtggcagatcctacttccccctccccgattcctgcaggggctctccaaaaacccagcctgaaatctaagcattaggaaagagcccagccaatcacatcccagtggtatccccacccttcttcacctctcccagactctagccttgccccaccctctcagccaccagagacactcacagggaatcttgtttatctcattgaataacttctccttcagtttggcaaacatgtcctcctggctctccccagcacccccactctcagtggagttgtccacgggtccaatgggcatcgtggcggtggtggtggcaggagccacaataggctcctggttcctcttgaaaatgttcctcatggtggcagaggaaacagctggggacgagaggtgaagagggcagggtgagcatccagaggtcgtcttaccctgagaaagccctgcccaaaggaccaggagaagctctttatagatcaaagatattttgcataatattaacaactgtagtaaaccaataataatagacatcatccaattagtacacagtcagcctgagcagcatagcaagaccctatctttagaaattttttttttttagttaggcatagtgggggctgaagtgatagaggatcacttgagtccaggagtttgaggttacatgagctatgggtgattaagtaaggttctgtctcttaaaaaaaatagtacatatatgtgccaagcactgtgcaaaacactttccatgcattattcatctaatccaaaaaataacctaatggtttttattggttccatttaacagatggggaaacaggttcagagaggttagatagtttttccaaggtcacttagctgtaagttctgaaactgaggtttgaactggtctgcccaactccagagcctgtatagctaatcactctcctatatctcattgaaatctaacctcaccactctaggaaggagacaaggttttacactgagggctcctctttcaacctctctccttgacttccaaggatttctagatactactctgcctagaatctctgcccagctccatgacacttgactctcctcatccctgactccaattcctcctcctgccccgcgagactcctcagctctctgcggtttcttcacgggctccctcagtgcccactcagggtttgttttgacctctcctgtaggaagacggcacccacatctccatctctagcccttcctccccggtctactctgtggcccctactccaggttcatctctagccctgcccccacatgcagctgtagattagccttcccgcatcaaagatgtgatgtttattaataacataacccagacttacygtagaaaatttggggagagagagagaaatccccccataattctaccctccaaagtcaactagcatttggggcattctatgctggtattttttctgagtatgttttacatgttgagaccatactatgtatagttttttttcaagattttttacataaaatttcatcataagccttttcctttattgttttttattattaaatagctacataatatcctactatatggtaacaccataatttttttagccattccactgttagacatttaggcagttttcaactttttcctagtaaaacactgagcataaatgttggtcttcatttaaggcaatgttcttacgagcttccaaactctgccccccataattctgtcctctccaccaagctctttctgctcctcagggctatgcacttatttctcaactgaaagtcccatgagggcagatcctgtgttggcaacagcaccccttgtgccaagcacacagcgggcactctgggtatttgttgactgagctcctctgagggaacatagcagcatacacccacaggtattccaggatgcaagaataaacagcacaactccctgaggcatccgttttactgaatggcaatttacagtatttttaaattaaaacaagctggaaataatagagtaggatgcatacagcacaagaatttaaagaaaaaatgtgagacttttctcactgcacgttaggtatgagttaactctcctctagactcagggttcttctgaaggaacattttaggagctcttaagttctgtcccttcctttaaaaacctgctgagatcccctccccagccctggagactgctccagccttaagtacttctggtggcctgtacattgatgcaatgtaggttcattcaccaagcatttatttaactcttactgtctgccatgttgaaatagccttgaccccaaaactggtcttgaagtgaaaaaccaaggtccactggacttcgcctctggggacaaagagatgggtccggtttggcgggaactgcaagtagccacacaaagggataaagatgtgtgtccagggccttccgccatgtccatctcccctcacttctaccacactgttcagggctctgtgaccttttttttttaaaaaacagctttattgagatgtaattcacatatgtcaccctttaaagtacacagttcagtgcattttattgtattcacagaatagtggaacaattagcataacctaagttagaacatttttgccacctcaaaaagaaacccagtcccattagcagtcactctccattcccatcctcttcccagctccagcaaccactaatctactttctgactctatagatttgtctatcctaaacatttcctatcaa

SEQ ID NO: 18346 - DNA, 501 bp, Homo sapiens
gcagcaacagctggtgtgcctggctgttacacagtggccagactccacgctcacttgcatatacacccctcactgctccacacgttgctcacccttggcaggcttgggatccaggcagctgcatgagccgagtgcagcctgccaggcagagtgggcagaacgaacccaggaggtccaagcaaaactcgggaaaaggcgccactgaccccagaggtttccagctggagaaaagacaccctaagsctcctgtaacacattcattcatatgttaagtaggtcattcaatcagtgaaatgttgtcaatcattagataagcatacattgaatacaaacatacacacatacacatatatataaatatatatataatatgtaatcacttttgtaactgtttagtaaaataaaattcctgtatttgataaactgatagaccaatataattattttatttttgttttaatttggaaatagttgtaaagtagaacctgctagttacactca

SEQ ID NO: 18347 - DNA, 505 bp, Homo sapiens
aagttagagcaaaaacaatttaatccaagtatgggtcatcattgtctccaatcattaaagggagacaaaatctttatggtttagccaagcttgtacttttacaggttaagattaaatacttcttataacttagtatactgggaatgatttaagaagttaaaamaatggtaaatgctatgttttttgtttgtacatctgtgatcttacagttttattataacatgaaaattcaacacattctttctctatataccttttaagttttacaaactgcatgatacatgcattaaaatgtagatggccttagattatacagcatagaaggccaaaggtcataaggctaatgttcacaaagccaaaattcaatttcaggttactatattcttgggttacgattatgagcttattttttcatctgtaaatagaggacaaaaatgtctgttttgtctcttaaagagtaatgacaacatttgaatacgataattgatagcaacagtttttggag

SEQ ID NO: 18348 - DNA, 505 bp, Homo sapiens
aagttagagcaaaaacaatttaatccaagtatgggtcatcattgtctccaatcattaaagggagacaaaatctttatggtttagccaagcttgtacttttacaggttaagattaaatacttcttataacttagtatactgggaatgatttaagaagttaaaaaaatggtaaatgctatgttttttgtttgtacatctgtgatcttacagytttattataacatgaaaattcaacacattctttctctatataccttttaagttttacaaactgcatgatacatgcattaaaatgtagatggccttagattatacagcatagaaggccaaaggtcataaggctaatgttcacaaagccaaaattcaatttcaggttactatattcttgggttacgattatgagcttattttttcatctgtaaatagaggacaaaaatgtctgttttgtctcttaaagagtaatgacaacatttgaatacgataattgatagcaacagtttttggag

SEQ ID NO: 18349 - DNA, 509 bp, Homo sapiens
ggggaagaaaagaggaagttttaattttcactttttaycaatactgtttgagttatttgactttgagtacatattattaacacatatactcacttgcagatgacagcaccccaactcaaaagagattaaggaaaaaagaaaatgtattagttcctgtcactggctgggagcattgggcagtgctggatccaggtgctcaaaaggtgtcgtcatgattctgcctttctaaatctcttggttatttttcttcctctttggctgaatcctcaggcaggctttccctttgcagtagcaaatggtcaccagccacctcagacttaaacttttatcagctcagccatcccagtgaaaagaaagagaaatcttcttccctaaagtttccagtgaaagctgtggtgttgactctgttgcatcctttctggccatacgtccatccctgaactatttatggagcctgaaaagatgaattaggctgaacgaccaggtgagatcatatggtcaccctggac

SEQ ID NO: 18350 - DNA, 656 bp, Homo sapiens
tttattaggtgcataatttgcaaatattttctcccattctgtargttgcctatttactgataattaaatcttttttctcccaaaaggtttgtcacatttaaagtacaaaatcaaatacacagaaccagatatgtgaaccatatatacatatctataaagccattatttagacctatgcaaacctatatgtatatatactaatttatcatcagcgctatcccttaagtaaaaagcaacatatctcttaaaaaaaacctaggtttgttatcagtgaaactgtcgaatgtaaattatttccactttatcacttgaaagggtagaaataggtacctcctagaaacaggggaattaccaagcatatatcaagtttgtatacatttcttaaaatatattctatatgaataattaaccaaagagactgccaatcaaattctttgggcatactaactctaacaaaacttgagtcatgggaagacatagagttaattaattgcattccaagagttttgttttgattttggttttaaatgcagagggactttattttgtttagtaacacagagcacttccaagtcatatttcacatggagttatagtgataaatttttcaggggttacgtatagctattaaaaattaaactgatcaataatggagg

SEQ ID NO: 18351 - DNA, 751 bp, Homo sapiens
tgggtgaagagaacatagtgagtctggagggcagttctctttctccagttcatgtgaggcaggaatgaagtcaggcaaagagagtgagtgagtgagtgagtgagagagagagagagagaaagagagagaggcagcatatataaaggaaatataagggaatagattgtgagtcactgtgagttwatgggaaaatacctaaatgggccatttaaatggcaggaaagttgggagctccatctgctaggcaagagagatacctcaaatttcttatctctggccacccttctggagccatgtgtgtttggtgtaaactggaaatggtgtcaagggtgacagacccctgcttctgatatgataaagttaaattaatattcaaaatggatgcaacgacaacataaaattataagaagtctctatagcaagtcagagttagctcaaaacaaatggaacaaatgggatgacaccaacagctaggctttggagtttccccctttctaacaatgtcatttccccactcattgttatatagtcacaggtatatccttcatttctctgatcctataaatatgtagagagttacatatcctgtaaatatgtagggcccctttcaactaaaacattgacaattgtgtacccagcctaaaattggcttaagctgtagaactatgagaaagtaggggattgcattgctctattaattttctgcttgtaactcttcccccaatataccctttaaacatctgctccatgc

SEQ ID NO: 18352 - DNA, 643 bp, Homo sapiens
ttcataagtaaacagtaactgattttttagcaacaattatatggcttatgctcatgttgcatcagccaggacttaatcacataaccgcacctcattgcaaggaaggctgccaaataaagtctttagctggacaaccatgattccattttaactatggatgggagaagttgaaaagacagcattgccattcatcttctttacacacattgagtggctttcatactcacttcataacgattcccttcttaggaactgaataggcaaggctgaactgaaatgatgttcatacattccagcatagcagagcatttttgawgaacttctgtttagtttggcaaagaaaattggccttctggaaggaacagtgtgtatttcttggtcttgaagatttcgtaatatttccgtagaccacaaaactaataggacaactatgaacagaatattggaaatgacaaaggccaaaagagtgtctcccaaataaacatttattttttactcttcctttctagacttgctttctagaaaccgccctcttctttttgatttctgtgtggtctttcattgataacacagatagaaagaacatagcattaaaatctggattcaaatctttttattgtagtcaatgtggcagtgataattt

SEQ ID NO: 18353 - DNA, 521 bp, Homo sapiens
tgcttaaatatgatccaatacataggacacattaaataaacataagctactacagttttaagtgagttttctcaaatgtgcctaaagaactgttttatacataaataggtgaagacaaagtattattttgatcagaattaatctttattttttgagattattaaaaaactttgagaaattcttttcatttttctaataacttgatgatattaaagtagttgtcttatggtttaatataggtgatttagagtagaattktcaatattcagctaaaaatattattcaacaggtaaacaatttgtgttgtaacaatcattttgtaatgtactttgtatgttcttagaaactattatttctaatatcaaaattaagaaccaatagaatattcagtataagcatcatttatatgggtatagataagttaaatatagatacagctattagatatagatatacacacgataaaactgttttgttttgttttgttttgtttttttgagacggattctcgctctgtcacc

SEQ ID NO: 18354 - DNA, 521 bp, Homo sapiens
tgcttaaatatgatccaatacataggacacattaaataaacataagctactacagttttaagtgagttttctcaaatgtgcctaaagaactgttttatacataaataggtgaagacaaagtattattttgatcagaattaatctttattttttgagattattaaaaaactttgagaaattcttttcatttttctaataacttgatgatattaaagtagttgtcttatggtttaatataggtgatttagagtagaattgtcaatattcagctaaaaatattattcaacaggtaaacaatttgtgttgtaacaatcattttgtaatgtastttgtatgttcttagaaactattatttctaatatcaaaattaagaaccaatagaatattcagtataagcatcatttatatgggtatagataagttaaatatagatacagctattagatatagatatacacacgataaaactgttttgttttgttttgttttgtttttttgagacggattctcgctctgtcacc

SEQ ID NO: 18355 - DNA, 441 bp, Homo sapiens
ctgggcaacagagtgagactctgtctcaagaaaaaaaaaaattagttcaaatattgtatcttgcacaatataggacactkaggaaccttcttaatagcactcacggatcagtagaatcacagaagtgacccctagttttctaacacacttacgttatttctgtcactctatcactgatgacattgatttctggtaaccataaaatacttaagagggatgaaaacagaaaataagctttattcacatgttaggaacatgttttaagactttttatttacatacctgtaaacatcaagtgtaatttcttcccttcgataggagataatatttaggtaagacttaaagcaaaacacgaccccaaaacttgtcttccatcattgctaaaatgatcatttaaagccagtctacctgagcagaacctaattcacatattccttcaca

SEQ ID NO: 18356 - DNA, 585 bp, Homo sapiens
agtgttattcccttagtagttagggcaggttattaatttagtttcgcctacaggcgctctgtccctatactgcatggaagttaattagcattttaactctgaagctgccaaggtcggcaaaactgtaagctgctaacatctaagttgatgcagtatgatgtaatgtctgccagttttttccctgttagacttaattcctacaaaatattacaatcctaaaaaggaataaatgacagcatttgcaggctaatctcttattaagatgctcttttcaggttttacagaaacgtccactttctcaatgaatattcaagtacatcgattaaaaattcaaaacatgcatggtatatcttagactcccccacaagaggaaagtctattgtaaacaaaatcgtctttttcgggttgcaattccaaatatttttttaaggtwcttcatgttcaggagcatgttctgcaattccacttccaaatattaccgataataaaaaaaaaaaaaaaaaacaaagttttccagacagcctagcgcaagttttaaaccatttgctgtacttatgtggatttcctgctcccaaggggctccaa

SEQ ID NO: 18357 - DNA, 501 bp, Homo sapiens
caaaactacgatattcggcacaattaatcttccctgttaatataaacagaagaaagagtaaactrtttgatctcaaagctctggtttaatttctagcaagtacgattacttcggttcataatttaaaaaatgaaagctttagatttctattccaagccattacttgataaatcattcattaaagaacatgaatgcacaaaacaaaaataaactttttttttaaaatttggtaagtgtcagtgttctaggatgtgctggccattctttgtggaggtctcagaaccacctctacccttccagccccagtgtcacccctcctgcccgagtggcaccttcctgcccgagtgtcaccctgctccctccagctgactccagttggttttgctatgagagacaccacaggaacagtaaggttcagaagtcagagctcaaaagtttcctccctactcactcctgtttccagttctgacaggaattcttttactctatgaccgtggctcc

SEQ ID NO: 18358 - DNA, 651 bp, Homo sapiens
ctgtggtgggctccacccagtttgagcttcccagctgctttgtttacctaatcaagcctgggcagtggcaggtgcccctcccccagcctcactgccaccttgtagtttgatctgacactgctgtgctagcaatcagggagactccgtgggtgtaggaccctcctagccatgtgtgggatataatctcctggtgtgccgttttttaagcccgttggaaaagcgcagtatttggatgggagtgacccgattttccaggtgctgtctattacccctttctttgactaggaaagggaactccctgaccccttgcgcttcmcgagtgaggcagtgccttgccctgcttcggctcacatacggtgtgctgcacccactgtcctgcactgactgtctggcactccctagtgggatgaacctggtacctcagatggaaatgcaaaaatcacctgtattctgtgtcgctcacgctgggagctgtagaccggagctgttcctattcggccatcttggctccaccctgatatgctttttctacagcatttcaggaactctgctatttctttattcttgtttttctacagcttcttaatgaatatacctctttattgtatttagtaggggactagactatataggggagggataaagagaact

SEQ ID NO: 18359 - DNA, 651 bp, Homo sapiens
ctgtggtgggctccacccagtttgagcttcccagctgctttgtttacctaatcaagcctgggcagtggcaggtgcccctcccccagcctcactgccaccttgtagtttgatctgacactgctgtgctagcaatcagggagactccgtgggtgtaggaccctcctagccatgtgtgggatataatctcctggtgtgccgttttttaagcccgttggaaaagcgcagtatttggatgggagtgacccgattttccaggtgctgtctattacccctttctttgactaggaaagggaactccctgaccccttgcgcttcccgagtgaggcagtgccttgccctgcttcggctcacrtacggtgtgctgcacccactgtcctgcactgactgtctggcactccctagtgggatgaacctggtacctcagatggaaatgcaaaaatcacctgtattctgtgtcgctcacgctgggagctgtagaccggagctgttcctattcggccatcttggctccaccctgatatgctttttctacagcatttcaggaactctgctatttctttattcttgtttttctacagcttcttaatgaatatacctctttattgtatttagtaggggactagactatataggggagggataaagagaact

SEQ ID NO: 18360 - DNA, 954 bp, Homo sapiens
tttttttttgagacagagtctcactgtgtcgcccaggctggagtgcagtggcacgatcttggcttactgcaagctccgcctcccgggctcacgccattctcctgcctcagcctcctgcgtagctgggactacaggcgcccaccaccacgcctggctaatttttttgtatttttagtagagacggggtttcaccgtgtattgtgggtattttttaaatcactgataccactttgtatttatgtcattttgtataaagaatatgttatttttaatgataaattttgggagaaaattaataaggaaaacatttcatctttcccaaagtcttaagttaaacataaaagtatgagcagaaagaacagaaagtcacttttttgcttactctgaaagaatctgggaagaacgtacccaagcgttcttgacctcttaagtgacactagttatgaaagaagacaccacccatcctcctgctgcacacttcaaaaacagactgcctgtggaggaatgtaaatgactctttgaaacagaaaaattcttgaaagcttactaatggatttctcttcaacaaaacaatttcaggaaaatggatagaaattttcctttctgagttattcacctcagtgaagtagtcttttagctctggatctaaaaaaaaaaaattaggttctacatatagaaaatcagatatattttatatggttttaaattaaaattaaaaatcagcctgcaataatgattagtgtattttttttggagtacatatctttattgatgtcagtaaacatgacctcatcttttttttgacawctgaaagtatctagatttttttctgtaactacttactgtctttttttttttttaaagcctatgttggccttttttaaatcactttagtctcaacattgtgttctgcagggcactgattctctgtgaataaacaaaaaagccttctat

SEQ ID NO: 18361 - DNA, 1475 bp, Homo sapiens
tgcccagtctccggtgtttctttatacgcagcgtgaaaatggagtaatacagataacacaagaattctttaaaatttcttgaccacaggcagttttgacaggaaatgagccttgcagtatggtaagtcacatctaaatttcacctrtattaccttatcatcagttcatcttctcctttttcatggataagcaatacttaaggctgagtttcttcaactgatgtcaatgaaaaataatccattatctgtaaatagtacagtacttctatttcagcatattagtttaactaacaatgaaaagagtagctcttgatttctgcacaaggaaaagtcaaacagattatatgctgaagatctaatgacaatttcatttgtcttgattttgagcctttgcctgctaattccatttgaatttccactcacctgtatctactgaagttttgctttgccagctgaagtgagaactgagaagcagcttttccttagcacacgtaagacctttaatagggagcaaacacattattatcatgtctcagtcattccaatttgattttctcaaccacatctaagcacttggcactggactgctctctgtccttggtacatacggtctatttttggaaccaaatcgaatttagctatttctaagtgctgatcaacaaaccagtgtctttgcataatgacattgtatttgtccatgtcaaatgaaaagaaagaaaagttgacttagtacaatttttcctaaagctaaatgtatttattgttaaggactttaaaggctgagattatttcctttctaattttttgtactgaaatgcctttccttccataaaaaaggaataatgaaaaattttactttgggttggtagaatctaggttttttggttgtttgtttgtttgtttttgtttttagaatcttgtttgaaaaaagtaaatgttgccaacccagctactcctctcccattgattttgagttgtaccattctgtgaaatatttaagaattcttttagtatccattaacaatgatcctgatcctatcatttacaataagcatttgagggcctttgccaagtttcttttcttcagaacaaataggacaccattcctttacctttaacttacagcccttttaagtgactttccttgggcttggcattcacaggtgctctttctttctcttactcaaggtatcagaagctttgattctagttccactaactcatttttaataggttgtgctacagtaaatacatcaagaaaatatgtatacgttattgtacatacataaaaatgtgcattatatgggtgatcaaatcatgtgttaattattgtctattagtaagtttaaattcctgtgctatggctcattgtcatcaagactatattcttgatgttaatcatccctaaaaggagtggatggtgattggctaaagcaatcagttcctttcacttgagggatttgaatataatatttg

SEQ ID NO: 18362 - DNA, 1475 bp, Homo sapiens
tgcccagtctccggtgtttctttatacgcagcgtgaaaatggagtaatacagataacacaagaattctttaaaatttcttgaccacaggcagttttgacaggaaatgagccttgcagtatggtaagtcacatctaaatttcacctatattaccttatcatcagttcatcttctcctttttcatggataagcaatacttaaggctgagtttcttcaactgatgtcaatgaaaaataatccattatctgtaaatagtacagtacttctatttcagcatattagtttaactarcaatgaaaagagtagctcttgatttctgcacaaggaaaagtcaaacagattatatgctgaagatctaatgacaatttcatttgtcttgattttgagcctttgcctgctaattccatttgaatttccactcacctgtatctactgaagttttgctttgccagctgaagtgagaactgagaagcagcttttccttagcacacgtaagacctttaatagggagcaaacacattattatcatgtctcagtcattccaatttgattttctcaaccacatctaagcacttggcactggactgctctctgtccttggtacatacggtctatttttggaaccaaatcgaatttagctatttctaagtgctgatcaacaaaccagtgtctttgcataatgacattgtatttgtccatgtcaaatgaaaagaaagaaaagttgacttagtacaatttttcctaaagctaaatgtatttattgttaaggactttaaaggctgagattatttcctttctaattttttgtactgaaatgcctttccttccataaaaaaggaataatgaaaaattttactttgggttggtagaatctaggttttttggttgtttgtttgtttgtttttgtttttagaatcttgtttgaaaaaagtaaatgttgccaacccagctactcctctcccattgattttgagttgtaccattctgtgaaatatttaagaattcttttagtatccattaacaatgatcctgatcctatcatttacaataagcatttgagggcctttgccaagtttcttttcttcagaacaaataggacaccattcctttacctttaacttacagcccttttaagtgactttccttgggcttggcattcacaggtgctctttctttctcttactcaaggtatcagaagctttgattctagttccactaactcatttttaataggttgtgctacagtaaatacatcaagaaaatatgtatacgttattgtacatacataaaaatgtgcattatatgggtgatcaaatcatgtgttaattattgtctattagtaagtttaaattcctgtgctatggctcattgtcatcaagactatattcttgatgttaatcatccctaaaaggagtggatggtgattggctaaagcaatcagttcctttcacttgagggatttgaatataatatttg

SEQ ID NO: 18363 - DNA, 613 bp, Homo sapiens
tcatgcaaaatatttcatacaatgcttaataagttacattatcacaaatgttcagtataatattagatttccctttcttaacttgtgaaaaagcactttagtcacagagaagctcgaaaggtagatacagatacttaaaaaagtaaaattgtaaaaggagctgtaaaaattttctttaaattatgacagctaaaaaacccatctcgtatcccattttagaagaagtattttaagcatcagaagcaacacacaaaatggtttgaaggaaatagagacaagatagacggtgtctaaaaaaagcatgaagtgattattgcagaattcaccttattgctaattatatgatgaggtgggaaatccaaatagctcctttgtgcacagactgcagattttctagaacatttagtaaaatataaaaatagtttttktttttaagtttagtttcccaatgctgatcagacaatgacctctattactgtttggaacaacaaaaaaaaaaagtctgacagcttatgagtgaagtctacaagtcactaaaaccctaaaaagagcatctcatgagaagtctataattgcactctgggaagtttaaaaactctagtgatgtttttaa

SEQ ID NO: 18364 - DNA, 945 bp, Homo sapiens
ttgagtatgcagccatggtttgggcagcagcaactgtcccgggagggcagggctcccaccagctccatggagcacgtggtcccagccacacctccctgctgcagccagtgagatggcatcctctgctgatcgtccaccatttccatcacagtcatggcggaaggtgaaggggaagcaggcatattttatgtagcaggatcaagagaaagagagagaaggtggaggtgctacaaacatttaaacaaccagatcttgtgaaaactcactcacaatcatgaaaacagcaagggggaaatccattcccttgatccaatcacctcctaccacatccatcctccaacaatgaggattatagttgcacatgagatttaggcagggacacaaattcaaagcatataaaatacaaacaaaatgtgtgagtaagagtatagattaaatgtaaaagggaaatgaccatagtacaagaatgtttaacagaaggcagctgaaaaggattggtcataggtgactgaattctggttctaattatctctttttagaccagtgataattgtaaaatttttactttaaagaaaaaaactactggataagcacatgatgtaggaagatatggagaaacagaaaattatgtataggagtactcggtggtttagtttccccacactcaatataaacccacagtgttatagctgcctaaaaagtttcagcctgaatggataactatggaggggaatgagatcagaattagtgtacttccagttaggaaaggtcacactcygtgaggaattacatgtcatgggtctcatttgctccgccatatgcagtgggatgggatcacttccatgagcataacccctacctccagctgaaactatccactagcagtgctcctccatatgaattcagtcttggattaggtatttgcatccaatatactatgattcg

SEQ ID NO: 18365 - DNA, 1577 bp, Homo sapiens
tttttttttgagacagagtcttgctttgttgcccaggctggagtgcagtggcatgattttggctcactgtaaccttcacctcctgggttcaagcagttctcttgcctcagcctcccagtacctgggattacaggtgcacaccaccatgctggctaatttttgtatttttagaagagatggggtttcaccatgttggcccggctggtcttgagctcctgaccttgtgatcagcctgccttagtctcccaaagtgctgagattacaggtgtgaaccmctgtgcctggccctcagcatgcgtttgatttagccaaagaatcaaagcattggtgaagaattgaagattggaagttacacattttttgctaagggaagtaatagagaaagaaaaatattcctggaggtaaaacttcagtttggattaatgtgaacatgaagaaacctgtagaaaccttcatttctcaagacaaagctcaaattcaaggttgtgaggaatgcagtcactgcttttgttaggggcagttgtgacagtgattgcagaaactgagactgcaaagcccgtattatataaagaatgtgcaagtgccatagaagacactgcaaggattgggtgctggagcagtgctggacctgccatcatcaccagagtgcagcagagagaatctcctctcttgccatcactaacccagcacttgactttgtcccactcctaaaagatcttggaaggaattaaaggtgcttggtggtttctcattccagcataaccttacttggcctgaccatgaaccatgcattagtctttggacagggcaattcaaatcacagaccacataacaaaagaattttgtggccatcagaactgtctccttaaacacaccatgggtgcactgtgtcctcagcttggtgaaaggtagatgtcacacacgagaaggtggtggagccaggcatgtgatggagcctcgaagagtgggaggtggcagctggctctgtgaggagggtgtgaagtcctccctgggaggagcagatgccagaaaaggaggtgagggtgggcagaagaggaggctgagcagcaagtgaatagacgtgctcgacctcagaggaggagagtcccatgtctttattggtaatattctaatgtggttgataccggagttattttctgtggctgaatggttcaactactctgaaatccatggggaaaaacaaaacaaaacaaaaaaaaactcatactaaaaacccttgagatgctaagttttaaagtaaaggaaatgttacaagattttctgaaaccaccaacctttagcagtattttcagaccttctccaacattttccactgcctttgtcagcaatcagagatgaccttcacactgaggcaatcttccacttcccttacccttttccttttctctctctttctctcctttcctcatccagtaactccagtcagactccattgtctccaggtcgactttcgtcatcatccacaactcctccacacaagccctgaacacgtgtccatgtaagtgacatcctttgtctttatttttttattttattttattttattttattttatt

SEQ ID NO: 18366 - DNA, 1577 bp, Homo sapiens
tttttttttgagacagagtcttgctttgttgcccaggctggagtgcagtggcatgattttggctcactgtaaccttcacctcctgggttcaagcagttctcttgcctcagcctcccagtacctgggattacaggtgcacaccaccatgctggctaatttttgtatttttagaagagatggggtttcaccatgttggcccggctggtcttgagctcctgaccttgtgatcagcctgccttagtctcccaaagtgctgagattacaggtgtgaacccctgtgcctggccctcagcatgygtttgatttagccaaagaatcaaagcattggtgaagaattgaagattggaagttacacattttttgctaagggaagtaatagagaaagaaaaatattcctggaggtaaaacttcagtttggattaatgtgaacatgaagaaacctgtagaaaccttcatttctcaagacaaagctcaaattcaaggttgtgaggaatgcagtcactgcttttgttaggggcagttgtgacagtgattgcagaaactgagactgcaaagcccgtattatataaagaatgtgcaagtgccatagaagacactgcaaggattgggtgctggagcagtgctggacctgccatcatcaccagagtgcagcagagagaatctcctctcttgccatcactaacccagcacttgactttgtcccactcctaaaagatcttggaaggaattaaaggtgcttggtggtttctcattccagcataaccttacttggcctgaccatgaaccatgcattagtctttggacagggcaattcaaatcacagaccacataacaaaagaattttgtggccatcagaactgtctccttaaacacaccatgggtgcactgtgtcctcagcttggtgaaaggtagatgtcacacacgagaaggtggtggagccaggcatgtgatggagcctcgaagagtgggaggtggcagctggctctgtgaggagggtgtgaagtcctccctgggaggagcagatgccagaaaaggaggtgagggtgggcagaagaggaggctgagcagcaagtgaatagacgtgctcgacctcagaggaggagagtcccatgtctttattggtaatattctaatgtggttgataccggagttattttctgtggctgaatggttcaactactctgaaatccatggggaaaaacaaaacaaaacaaaaaaaaactcatactaaaaacccttgagatgctaagttttaaagtaaaggaaatgttacaagattttctgaaaccaccaacctttagcagtattttcagaccttctccaacattttccactgcctttgtcagcaatcagagatgaccttcacactgaggcaatcttccacttcccttacccttttccttttctctctctttctctcctttcctcatccagtaactccagtcagactccattgtctccaggtcgactttcgtcatcatccacaactcctccacacaagccctgaacacgtgtccatgtaagtgacatcctttgtctttatttttttattttattttattttattttattttatt

SEQ ID NO: 18367 - DNA, 540 bp, Homo sapiens
caataccctcagacacatctgctggtgaaagtcattcccttcaaaagtcactccataaaattaaaagagttgaccattccatcagatgcacaaatatcaatacagggatacaagatacatgaaaaagcaaagaaacatgacaccatcaargaagcagaagaatcctccagtaactgacccctaaagaaatggaaatttataaattgcctgaaaaggaatttaaaataatgacctgaaggaaattatgaattgtggatgggggaagggaaagtctagaatatttgtatgtgaccaaagttaagttgttatcagcttaaaatattctaagttctttttacataagccccagaataaccacaaagaaaaaaattacagcagatacacaaatcaaaaagagaaatgaatcaaagcttatcactatggaaaaccaccaagtcacaaagggaaacaataaaagtagaagaaagaaacaaagtatctagaaaacagttaacaaaatggcaggagtaagttcttacctgtcagtaataatcttgaatg

SEQ ID NO: 18368 - DNA, 306 bp, Homo sapiens
ggtctgcctgtcaaaattttgacaagtgagtgtacaagaggtctggggtggtctcagtactcaggatgtaaatattcgcttaattcctctgttttcagctcaactgtattgacaaatcctatattcagaatgtaaatatttgcttaattcctgttttcaactctattgacaaatcctagtgcagagaccctctattttacagtctccagtgggcaattttcctcagctttcttccaaagtgagttgggtggaaaacaattgttaagygtatggactgggaaaggaggtcaaattgctttttcaaca

SEQ ID NO: 18369 - DNA, 536 bp, Homo sapiens
ttactttgtactgcagcaacttttatgtgtcctatctcccttggtagactataatcattattcaaattacttttgcattcttcatgatgcctgcatgttacatggtaaaaataataaatacttgatgccgaatttatcaatcagttaattcatcaaatttaaatgcttctgaaggggaaaaatgatatgtgagatagattccttagtttctgaaataactacagtacaagggagcccataatcaatgctatgtggtagaagagataacaagtactctaagacagccttacttaaaataaggatgactgggggtaagaggtcttctagaagaattttggtatttaacataggtagaatattataagcagaaatgcaaaggactacattccaagttcaatgtgaacagaggcacagagaggaacgcragttaaggtgtacagaaaacaatgagtagaacagttggaccaaaggagagggttcatgtcggggataccgaaggataaagctggaagggctagttggagggagatcatgtg

SEQ ID NO: 18370 - DNA, 1374 bp, Homo sapiens
ttgtcattttaggaattatcaataaaattgaaccactttgcagtgtgcagtgttttgccaatactattaacaaatttaagaacagttgtcaaagtatcttactcagctcacattcctgatttaaaacaaacaaacaaacaaaaaaactgctacctgtctgccttcctaatatttttttcccttattatttcattctctcttctcatgtatgatgtcttgacaactgttttaaatgtgtcccttgcctccctctccccacaggacaaagagtgtcttcccgctgaaatgccaacaccaggcacagcatgagggcaggtgggtaaaaaatcttagtcaaaggaaacgaattcctttgacgaccaacagtttcctcatgtgtgaactgtttatccttttctcatttaactgggtttgatagttttcttaaattacaagagttattcaaaaaatataaacattaaccgtttgttctacttgctgtgtttacccagtgtttgattttgtatttggctgcattataagcaaagcagaaatttttactttgtcatatagtcaaaccaaatattctttatttcctgtatcgataagaatgttactagcctgctaaaaatgatcacaattctttttcctgtgggtttaaaaaaactctcaactcttcctatgtaaattctctaatcaatctgattttttgtttgtccattgttttgtggtcttcccacgtctttgttgttaaaattcatgagatataataaacattgatttaattaagagaacatttggatttgtttataggtttacagtggcactggtatttcagaattaatggcttatttaaaagcttattttaaaaacactagaaatttttcttgtaaaacagyagttactacaaacagtggcttagtcccttgcacattcttttaaaagacctaagacagttctaggccatctggtcacctggataggtaagtcagaacacatgcaaggggaaggagaataaacctaattattttctccagagaaggtacacaaatcctttttgtcatcctaaaaacaagaaaggcctggctgaacattaatctcctagcactttgctttagctctctgcatatgacacagcataggtttcattatcccctgtatgaagaaagaaggggccaccttggcaatgacaagctgattccataactgtgctcctcagttatgagggcctgtgagatgttaaagttcctggggataaaggcttccaaagttaaagaaatgttaagaaagccagtaaataaagttaaacaagttcctttacagctagacttctctgagactttaataggctggtgtgcactctaaatttcaaaggagagttttatatgctgccca

SEQ ID NO: 18371 - DNA, 1374 bp, Homo sapiens
ttgtcattttaggaattatcaataaaattgaaccactttgcagtgtgcagtgttttgccaatactattaacaaatttaagaacagttgtcaaagtatcttactcagctcacattcctgatttaaaacaaacaaacaaacaaaaaaactgctacctgtctgccttcctaatatttttttcccttattatttcattctctcttctcatgtatgatgtcttgacaactgttttaaatgtgtcccttgcctccctctccccacaggacaaagagtgtcttcccgctgaaatgccaacaccaggcacagcatgagggcaggtgggtaaaaaatcttagtcaaaggaaacgaattcctttgacgaccaacagtttcctcatgtgtgaactgtttatccttttctcatttaactgggtttgatagttttcttaaattacaagagttattcaaaaaatataaacattaaccgtttgttctacttgctgtgtttacccagtgtttgattttgtatttggctgcattataagcaaagcagaaatttttactttgtcatatagtcaaaccaaatattctttatttcctgtatcgataagaatgttactagcctgctaaaaatgatcacaattctttttcctgtgggtttaaaaaaactctcaactcttcctatgtaaattctctaatcaatctgattttttgtttgtccattgttttgtggtcttcccacgtctttgttgttaaaattcatgagatataataaacattgatttaattaagagaacatttggatttgtttataggtttacagtggcactggtatttcagaattaatggcttatttaaaagcttattttaaaaacactagaaatttttcttgtaaaacagtagttactacaaacagtggcttagtcccttgcacattcttttaaaagacctaagacagttctaggccatctggtcacctggataggtaagtcagaacacatgcaaggggaaggagaataaacctaattattttctccagagaaggtacacaaatcctttttgtcatcctaaaaacaagaaaggcctggctgaacattaatctcctagcactttgctttagctctctgcatatgacacagcataggtttcattatcccctgtatgaagaaagaaggggccaccttggcaatgacaagctgattccataactgtgctcctcagttatgagggcctgtgagatgttaaagttcctggggataaaggcttccaaagttaaagaaatgttaagaaagccagtaaataaagttaaacaagttcctttacagctagacttctctgagactttaataggctggtgtgcactctaaatttcaaaggagagttttataygctgccca

SEQ ID NO: 18372 - DNA, 535 bp, Homo sapiens
tagccaactaactcttaatgagatctttggctctagaagtccttatttgaccacatgccagaagaatccatgtgagtactgcctgagtacctccaagttggaaaagtacgtttttttttttaactgagtgcctccaagttggaaaaatgttctttttttttaatgttatcgggttcaagggtggaacatttgtcctactaaagaacaccttttaagagctttgtggccggaagggtgaaaagtagacctccttctccttctcttcttttcgtcccctttgatycttttcctcttctcttttgatcttcaatccaatctttagccccaactcaccttctagatgcatttttcctatttttttcctcttctgctagataattgttggttgggacaatcccatcttaatcaatgttcaaattatgtctccatgttcatttccctgtaggtcatagaactctttgttagagtatcatgtggccaatttataggtctttattctttctcttctgcccaaaaatagatctttaggaatagc

SEQ ID NO: 18373 - DNA, 578 bp, Homo sapiens
agtcgtccttgcagctatgcaactttgttctggccaaaggggttaaggtgaaatgatgtgtcctcagaggaaaagggtccctccgtcctcagtgcactggaatggcacagccgtctggcatcactccacagtggtcgcatgctaggcatggcagaggaacacagcagaaagctgggcctcgctcaccayggtgctgtgccttctacctccttcagtgggagagaagcaagcattgtttaattatttaattaaacaatgtttaatcattattacttgctgcaacacccggaacctattttcttttttttttttttgagacagagtctcgttctgtcatcagactggagtgcagtggtgagatctcagctcactgcaacctccgcctcctaggctcaagcgattctcctgcctcagcctcccgagtagctgggactacaggtgtgcaccaccatgcccggctaatttttgtacttttagtagagatggggtttcaccatgttggccaggatggtcttgatctcttgaccttgtgatccatccgcctcggcctcccaaagtgctgggattataggcgtgag

SEQ ID NO: 18374 - DNA, 578 bp, Homo sapiens
agtcgtccttgcagctatgcaactttgttctggccaaaggggttaaggtgaaatgatgtgtcctcagaggaaaagggtccctccgtcctcagtgcactggaatggcacagccgtctggcatcactccacagtggtcgcatgctaggcatggcagaggaacacagcagaaagctgggcctcgctcaccacggtgctgtgccttctacctccttcagtgggagagaagcaagcattgtttaattatttaattaaacaatgtttaatcattattacttgctgcaacacccggaacctattttcttttttttttttttgagacagagtctcrttctgtcatcagactggagtgcagtggtgagatctcagctcactgcaacctccgcctcctaggctcaagcgattctcctgcctcagcctcccgagtagctgggactacaggtgtgcaccaccatgcccggctaatttttgtacttttagtagagatggggtttcaccatgttggccaggatggtcttgatctcttgaccttgtgatccatccgcctcggcctcccaaagtgctgggattataggcgtgag

SEQ ID NO: 18375 - DNA, 578 bp, Homo sapiens
agtcgtccttgcagctatgcaactttgttctggccaaaggggttaaggtgaaatgatgtgtcctcagaggaaaagggtccctccgtcctcagtgcactggaatggcacagccgtctggcatcactccacagtggtcgcatgctaggcatggcagaggaacacagcagaaagctgggcctcgctcaccacggtgctgtgccttctacctccttcagtgggagagaagcaagcattgtttaattatttaattaaacaatgtttaatcattattacttgctgcaacacccggaacctattttcttttttttttttttgagacagagtctcgttctgtcatcagactggagtgcagtggtgagatctcagctcactgcaacctccgcctcctaggctcaagcgattctcctgcctcagcctcccgagtagctgggactacaggtgtgcaccaccatgcccggctaatttttgtacttttagtagagatggggtttcaccatgttggcyaggatggtcttgatctcttgaccttgtgatccatccgcctcggcctcccaaagtgctgggattataggcgtgag

SEQ ID NO: 18376 - DNA, 578 bp, Homo sapiens
agtcgtccttgcagctatgcaactttgttctggccaaaggggttaaggtgaaatgatgtgtcctcagaggaaaagggtccctccgtcctcagtgcactggaatggcacagccgtctggcatcactccacagtggtcgcatgctaggcatggcagaggaacacagcagaaagctgggcctcgctcaccacggtgctgtgccttctacctccttcagtgggagagaagcaagcattgtttaattatttaattaaacaatgtttaatcattattacttgctgcaacacccggaacctattttcttttttttttttttgagacagagtctcgttctgtcatcagactggagtgcagtggtgagatctcagctcactgcaacctccgcctcctaggctcaagcgattctcctgcctcagcctcccgagtagctgggactacaggtgtgcaccaccatgcccggctaatttttgtacttttagtagagatggggtttcaccatgttggccaggatggtcttgatctcttgaccttgtgatccatccgcctcggccycccaaagtgctgggattataggcgtgag

SEQ ID NO: 18377 - DNA, 590 bp, Homo sapiens
tggggccctaggtgacaaggagtaaaagctgcaaagccaacaccagaactttgtctcttctattttctattgcagaggagtattcaaagctgttatcacatgaagctgtggaagcagttgcatttcaggaggtcaggaagaaatgtcgatgtttgcaaagttagatagtgcctgagaccggaggccaccagtatctacagattcaaaatactacaggttcaggaaaatcatgcccgatcccctagcaaggccagccctgaggatgagacagtatgccacggtcccactgtgatcagattcctgctgcaggacctctccccattggggatccttctgatctgttagcatccagatgagtgtttctggactccagcactctggggagagtctgtgtgaaggctcccacatctggccttcccttagagcaggaggataaggccctaaattataggcacaacctcagaagctggactctgatgaacatctggggggcattgcgatgyctgttgctaacagagagggaggaactatgctcatggaatttgtgaatcggccaaatgtagagtcgtagagttgtccctgtgtttgcc

SEQ ID NO: 18378 - DNA, 513 bp, Homo sapiens
tcaatcgcccaggctaggatgttgtggcagaatcatggctcactgcaactttaacctcctgggctcaggtgatcctcccgcttcagcctcctgagtagctggaactacaggtgcacgccaccaggcctggctaagttttgtattttttgtaaagatgggattttgctaygttgcttagactggtcttgaactcctgggcttgagtgattctctcccagcctcccaaagtgctgggattacaggcatgaggcaatgcgccctgtctccagttccatgaattttaacacagttatacatgtatagatttatgtacccactcccacaatcagggtgtaaacaatttcatcacctcccaaaaccccctcgtgctattttttatagttgttcactacccccacccctaacctctggcaaccacagatctgttctctgtccctatagtcttgtcttttttttttaaagcaagtttttatttatttatgtcagtagcacccctttcccagtcatgacaat

SEQ ID NO: 18379 - DNA, 513 bp, Homo sapiens
tcaatcgcccaggctaggatgttgtggcagaatcatggctcactgcaactttaacctcctgggctcaggtgatcctcccgcttcagcctcctgagtagctggaactacaggtgcacgccaccaggcctggctaagttttgtattttttgtaaagatgggattttgctacgttgcttagactggtcttgaactcctgggcttgagtgattctctcccagcctcccaaagtgctgggattacaggcatgaggcaatgcgccctgyctccagttccatgaattttaacacagttatacatgtatagatttatgtacccactcccacaatcagggtgtaaacaatttcatcacctcccaaaaccccctcgtgctattttttatagttgttcactacccccacccctaacctctggcaaccacagatctgttctctgtccctatagtcttgtcttttttttttaaagcaagtttttatttatttatgtcagtagcacccctttcccagtcatgacaat

SEQ ID NO: 18380 - DNA, 513 bp, Homo sapiens
tcaatcgcccaggctaggatgttgtggcagaatcatggctcactgcaactttaacctcctgggctcaggtgatcctcccgcttcagcctcctgagtagctggaactacaggtgcacgccaccaggcctggctaagttttgtattttttgtaaagatgggattttgctacgttgcttagactggtcttgaactcctgggcttgagtgattctctcccagcctcccaaagtgctgggattacaggcatgaggcaatgcgccctgtcwccagttccatgaattttaacacagttatacatgtatagatttatgtacccactcccacaatcagggtgtaaacaatttcatcacctcccaaaaccccctcgtgctattttttatagttgttcactacccccacccctaacctctggcaaccacagatctgttctctgtccctatagtcttgtcttttttttttaaagcaagtttttatttatttatgtcagtagcacccctttcccagtcatgacaat

SEQ ID NO: 18381 - DNA, 535 bp, Homo sapiens
ctcaatccagtttgaagggtatcagctttgctagcgtgatacatcatttgggattttaaaaatggtattgctaatatctgagtataaattttatttctaatattaaaaactttccaaattacacaaaagctgtgatcctcataagttttgtctctagaataaaattatgtgacattcctaatgcatgcattttgttttttgtgtatttgttttttaaactaagaactttgatgatgcactgaaactatttgacatagcctcatttcaaaggcagtcacatagagttctgctatctaaataaattaaagctgatatcacacaacatttcagttgggtaagcttgcaggcaatgcttgtctgggccacatatttataatgtctaatgtctttattggatgttgtttatctccttcttgaacacgatttgttcccycatcaaagtggaaacatgtcagtatgttcacaattttataagtgcatatactctatgtgtatatgtatgtacattcacatctttacgtctataagtagtaaa

SEQ ID NO: 18382 - DNA, 546 bp, Homo sapiens
cccattactccttcttcctgcagcttgaaggcaggtccacgcctcctcctggaagccttcccttgactgactcctcgctgagttcacaggtatctcatccrtgcccgacgttgtgcccccttccatgaggtgaagcgctctcaaaatgagagctttaggtcctgagtttagaatgcctgtttcttcatggatgtccttggctctttaaactcattgtgtctcagacccatgagatgatctccctccttctcatctacttcgacctctgattagctgatggcatgactgtgttcccagtcacatgggctagacacttcacctgcctcattgcctgtgtcctggctctattatgtcttccaattctgcaatgcagataggatgagggctctcgggggtaatgcaattcactgtgtatctgcttaggtatcagtcattcccaagccctcatctttggccagatgaaatgcctctgcccatgaagtttcaccttgttctctagcccaacatattgccctctcttctgtggacttttcatgccattgcacc

SEQ ID NO: 18383 - DNA, 546 bp, Homo sapiens
cccattactccttcttcctgcagcttgaaggcaggtccacgcctcctcctggaagccttcccttgactgactcctcgctgagttcacaggtatctcatccgtgcccgacgttgtgcccccttccatgaggtgaagcgctctcaaaatgagagctttaggtcctgagtttagaatgcctgtttcttcatggatgtccttggctctttaaactcattgtgtctcagacccatgagatgatctccctccttctcatctacttmgacctctgattagctgatggcatgactgtgttcccagtcacatgggctagacacttcacctgcctcattgcctgtgtcctggctctattatgtcttccaattctgcaatgcagataggatgagggctctcgggggtaatgcaattcactgtgtatctgcttaggtatcagtcattcccaagccctcatctttggccagatgaaatgcctctgcccatgaagtttcaccttgttctctagcccaacatattgccctctcttctgtggacttttcatgccattgcacc

SEQ ID NO: 18384 - DNA, 551 bp, Homo sapiens
  misc_feature (1)...(551): n = A,T,C or G
cagtttatgcccattaactaagttgattcytgttgattgatagtcacgtaagtcccctgtgggcttcggtgttttgcagtgttaggtaggactatttctgcatctgtcacattcctagaaggactgttttcagtctccagcaagctcccctgttgccccttctgagtcggaacccaccttctccaaatataactatgctctgatttctagcaccatcgattagttttgcctgttcttgaacctcctgtacacacagcttgttttcttgtgtctgacttcttttgttcaatggtatgtctgtgagatcaaaatgtgttgatgtatgtcagcaggtcagcagtttgttctttttccttgtgtagtattttattgcatgaatgatgattgttntaataatanataatnaataaatttttattttgctttttagagaanaggcttttcctaactctagaatattatttagtcaaagatatgttatgatttaaatgttttcctatcttacatgggtctctaaaacataaggaaaacaagagcccatgtttcttttt

SEQ ID NO: 18385 - DNA, 521 bp, Homo sapiens
tgagtttcaaatctgggctgttgtttaaaaagatcacacacagacacacacatacacacacgaatggacaatgagagttccttactctgtgcccaccttttcctggagacaggttgcagcattccctggggatgtggaggttcgagcactaattgaaggacaattcatggccaagaggattcacgcagaaggcctgggctatcgagtcagtaagtgagccactggcagcatgtgtcccggggtgggggctcagggccagctcactcgcaggggccagggctagtggggcaatatctactaaagttttcttacagggggacttgtgcaggagggaggtggagcctgacctcagggatggggtgagaaagtgtcaattggcacttgtaggcaagcatagaatagcagacaggttgttcccgcttctcagctgtgtccacaatagcctgaccttttggccaggacctgtaagacttsggaatggtctttctgaaaccctaagctccaagctgcagatgagctgt

SEQ ID NO: 18386 - DNA, 490 bp, Homo sapiens
catgacccaatctccttaaaggtcccatctttcaatatgtcatgttggagataaagcttcaacatgagttttggaggggacacatattcaaaccatagcaactggcatggagagggcagacccagggccgggggaggcaaaaggaggagaargggatttctgacaacttgagctgtagaataatcagcattaggatgtcagtgagttccccttacaggtggcgttggaatggtctaagggtctgtaaggaggttggactggccgcctatagagtccaggtttctaagatgtatttgtctctctgggctatagctgttgtcattagagaagatagtgaagctgctttgcttgagggccttcctatgatactctatggacaatccaagttctatgtaatatatattttatacctttgaatcaactgagtaaaaggatactataaaaatacctattagggaaacctcttagaaaacctgttagacagcatctg

SEQ ID NO: 18387 - DNA, 573 bp, Homo sapiens
atttcgtaattaaacataaagagataacttaaaattatacttagagaaagattaaactcttacacagtarcttctgcagtacactgcacagaacactggctctttgagatattcagtgaatatttattgcacaaggaagcagcatggtgtaaccaagagaactcttactttgattccaaccctagctccatcactcaccaactaaataatcttaaacaaactaacatcacttatgtttacgcccctgtaatatgagagaaataatagccatcataagtacagtcatccctgggtatacgtgagggggactggttccagcacccccacagataccaaaataggtgcatactcacttcttgcagttggccctgcggaactcaggtatatgaaaagtccctcagtatacacaggccttgcatcccgccaagcactgttatttctgatctacacttgattgaaaaaaaatccgtgtataaatggacccacacagttcaaacccacactgttcaagggtcaactgtacttgagcactgcaggatattttaaaggtacttatcaattattctcatggag

SEQ ID NO: 18388 - DNA, 573 bp, Homo sapiens
atttcgtaattaaacataaagagataacttaaaattatacttagagaaagattaaactcttacacagtaacttctgcagtacactgcacagaacactggctctttgagatattcagtgaatatttattgcacaaggaagcagcatggtgtaaccaagagaactcttactttgattccaaccctagctccatcactcaccaactaaataatcttaaacaaactaacatcacttatgtttacgcccctgtaatatgagagaaataatagccatcataagtacagtcatccctgggtatacrtgagggggactggttccagcacccccacagataccaaaataggtgcatactcacttcttgcagttggccctgcggaactcaggtatatgaaaagtccctcagtatacacaggccttgcatcccgccaagcactgttatttctgatctacacttgattgaaaaaaaatccgtgtataaatggacccacacagttcaaacccacactgttcaagggtcaactgtacttgagcactgcaggatattttaaaggtacttatcaattattctcatggag

SEQ ID NO: 18389 - DNA, 573 bp, Homo sapiens
atttcgtaattaaacataaagagataacttaaaattatacttagagaaagattaaactcttacacagtaacttctgcagtacactgcacagaacactggctctttgagatattcagtgaatatttattgcacaaggaagcagcatggtgtaaccaagagaactcttactttgattccaaccctagctccatcactcaccaactaaataatcttaaacaaactaacatcacttatgtttacgcccctgtaatatgagagaaataatagccatcataagtacagtcatccctgggtatacgtgagggggactggttccagcacccccacagmtaccaaaataggtgcatactcacttcttgcagttggccctgcggaactcaggtatatgaaaagtccctcagtatacacaggccttgcatcccgccaagcactgttatttctgatctacacttgattgaaaaaaaatccgtgtataaatggacccacacagttcaaacccacactgttcaagggtcaactgtacttgagcactgcaggatattttaaaggtacttatcaattattctcatggag

SEQ ID NO: 18390 - DNA, 565 bp, Homo sapiens
acttgaggaagccagccagtgtttcaaagtacgtccagaaaattcccacacaagtaacagggagttacacatagattttaagaagtgattctgtcaaccctttggctctccatgcagtttcacaagagtggggtaatttttttttcagaaagaaatttatattcaccttattggtacttcagttacatgtgaactcttgatagttctctattcccaacaaaggctgaaaacagctagcactctgagaagagaaaagccaaaacttaagctgccagtcacactgagagactccagtgaggaggatgctaagacttcaataacatacaaataaacaragtatacagagcaacaacctggatctgttttgaatttttttaagtgtttaagaagtatttgtgagtatcttgagtacagatcaggactcaaatattgcttacttccaggctaaaagaccttgggcaagtacttaatttctttgaacctcaggttcctcatctgtaaaataaggataaatgttgtgaggactaaattagataaggtatgtgaagggcgaaagaaagcatct

SEQ ID NO: 18391 - DNA, 508 bp, Homo sapiens
gcatttgattccactattgctttaaattcatttctattcaaataattggactgaagattttaaatggttataatttgcatggtagcatttcaggagattttgagttaaagtaattttaagacctgcctgcatcaggagatccttgtgtgtatgattaaagctcattcacctttaagcagatctaaaggagaaaagataatatttgttcataaaaaattcaggtatatttacaatgtgtagggtccaattgtagctttagaattcctttcattatgtgggttaaatcttagaaggtcaggtaataaaaaacttcatataacaactctatttcattttctaactatgaacttaacattttagtttcaaattaaggacaagaattggtatatcatgactgttttacataacatgttgtataaaataacagcagcacttagaatataagagattgtctcaattaggacaataacaaygtgcttttaattcggtgtaatttgtttcacctcct

SEQ ID NO: 18392 - DNA, 622 bp, Homo sapiens
caagagttttctctgtgccagaaaagtaccttacacatgatttcaggtaatccacgcaatagccttatgacttaactgctattatttgctctggtttataaatgaagaatgaagaggttaagtracttgtccaaagccccaaggctgttctctattttgagagcagttgcaaatagggtggagttgaagcatctgtgggtgatatagtttggctctgtatccccacccaaagctcacctccaattgtaatccccaggtatggaggagggacctggagggaggtgattggatcatggggttggtttcctccatgctgttctcacgataagtgagtcagttctcacgagatctgatggctttaaaaacggcagtgttccctactctctctcttccctgtcaccatgtaagacataccttgcttcacctttgccttcagccatgattgtaagtttgccgaggcgtccctagccatgcggaactgtgagtcaattaaacctcttttgtttatcaattatccagtctcaggtggtagtctttatagcactgtgaaaactgactagtgatcaaaggtatggagtaaggttgtcaggttagtgcagggactaggttttatctgaaccct

SEQ ID NO: 18393 - DNA, 521 bp, Homo sapiens
cctcctcctaagtaacgcccaccctcggttctgcccggttcctccgctcacctggagccgagggcgcgcccgggagcggcccccggatcaccgcccggcggactgtccggctgtcactcgttsctcgatttcgctccctctcgcttccgctgggggtccccgcaccttcgaggggtctggggagtcggccgacttatccctgggcagtttccgggcagcgggcgccctgcggctcgggaagaaaaactttcacgcggcccagagccccgctccgcgctccgccgaacccggcgcctcccggctccagcgacgtctcctccgctttctcgggaccgcagcttcctgtctcgctcaggggaacgaagccggctgggggcgatggctgggggcggcttatatgggactcagctcccggcatagcggcgcagcccctctcgctttcggcctccgtgcggcgaattttcccacctctctggcagcggtggatggggcacagcgcgaccccgcagcggcggcggcgg

SEQ ID NO: 18394 - DNA, 399 bp, Homo sapiens
ttttgatcctacataaattcttctagggactactcaaaagaagtactcaagccatgaagctcttacatcagttttctttgtatctattttctgagctattttttcagaaagggtcttttttgttttgtgtcttttattttaatttttccacatggaagcttaattattccaatctaatattatgattttttwacttaattttattgtatctttagattcaatatgaattaatgccatgttttttcatttaagattacttctcatcttttaatgggagctgcttatcctggccatctcttctctcacaatcctatcaatgtctttgtctttgtttcatgtttcagtattcaatattcccaccttttaggtaaataggagtcttctcttcttgtaaggccc

SEQ ID NO: 18395 - DNA, 560 bp, Homo sapiens
tggtgtgatctccactcactgcaatcttcacctcctgggttcgagcaattcttgtggctcagcctccagagtagctggaattacaggagcccaccaccatgcctggctaatttttgtatttttagtagagacggggtttcgccattttggccaggctggtttccaactcctgacctcaggtgatccacctgccttggcctcccaaagtgctaggattacagatgtgagacaccacrcccggccatgtttttagtcatctcttgtggggatgggaaatgataatactacttgaacttctcataggttaggctttcttatgggttaagtgctttagagcattgttttgctgtctcttctctaaccattatggagatttggggagctccttcagacccccaataaacttgtttgtggaggcctagggagtttcttcagaccttcaataaaacttgtttaatcctaaacaggtcctgttaagaagtttttcattgtcttgtcatgctttgaggcccaggaaaggcaaaactcttggtgggcttttgttacattccagcctttgt

SEQ ID NO: 18396 - DNA, 560 bp, Homo sapiens
tggtgtgatctccactcactgcaatcttcacctcctgggttcgagcaattcttgtggctcagcctccagagtagctggaattacaggagcccaccaccatgcctggctaatttttgtatttttagtagagacggggtttcgccattttggccaggctggtttccaactcctgacctcaggtgatccacctgccttggcctcccaaagtgctaggattacagatgtgagacaccacacccggccatgtttttagtcatctcttgtggggatgggaaatgataatactacttgaacttctyataggttaggctttcttatgggttaagtgctttagagcattgttttgctgtctcttctctaaccattatggagatttggggagctccttcagacccccaataaacttgtttgtggaggcctagggagtttcttcagaccttcaataaaacttgtttaatcctaaacaggtcctgttaagaagtttttcattgtcttgtcatgctttgaggcccaggaaaggcaaaactcttggtgggcttttgttacattccagcctttgt

SEQ ID NO: 18397 - DNA, 516 bp, Homo sapiens
ctctgaaatggtccttgttttctcataaaaacaggatgttgtatggttatctggaatttttcttacccaaacacattgttctccaaaaagccctggtatcgtctggtggagaatggtatcagagaaccaattccacaccagggaatgcagtgtgctggggaaagctgacatggagtatattgttacttttgtgaccaaactgaaattttctgctttgtcttttttttccccccaaaaggcctgatattgatattgtcaatttattcttatatctactatatatattttaaacatttaaaaaaawtttttaaattgtactaatacagggcttgtcaatctttttttctctttttggaacataggtttgccgtcttagatgtcgtagtgtgtgactttttgtttaaattgggatgctggctaaaatttacaagccttaatggccgctttctcctctttttatctcttgcctcaatgttttggaaatgacatcagagtacagaagtctagaaacccctt

SEQ ID NO: 18398 - DNA, 534 bp, Homo sapiens
ttcatctgggattcctcttgggccccacctcctatccttttcctacaacttttaacccagagacagagagatgaagagaggccaagaaactgagagtgtgagggaagatatacaaagaagagagacataggataagattttttttgaaatgaagacacaaagagatgagggagaaaaggaatagaaggaaagggagagtgaggagacagagaaagaaaaggaaagaatgccattcagcaggaggagagggaagagcagacccctgggcctgggtggccttgcagccgtggaggggagcccgccagcctggcagccagcgtctgcctcctgcacagggcccagaaagaggcagtagcagctgggccgagcatttggctgtctgctgagcccaagcctctgtgcctgaccttagcccagctgctcwaatcctcctgccctcctgcctgcagctgcccctgcactcccaagacccagaggctggggagtggagagtggagcccgccctcttggtcagctctgtcagagaggcaggag

SEQ ID NO: 18399 - DNA, 1157 bp, Homo sapiens
gtaatgagctttcaatttgccacagtccccaccatgccctatgtacccaatactgaggcagactgctagttgccatttactatttttcctgcattatttttttcttataaaaatactcattcttaatactcatatcttcctaaaatgaggggaaaattggtcaggaagaccataaatcttttgagaaaaattcatcgtatagctggcctgctttactcattgatattacctaccttgcttctgcagcctttcagtttgtgattctgaattcatcctactcatttttcaaaaaaaaaaaaaaaaaaagaatgaatgacattgaggcccagagagggaaggtgagcgaggactagaattcagggcatccaacaatgattgtccctctatacagggttacctctgtcatacaagaatacagaatcctgagaagtaaaagatgtgactcctaccctctaacagggtcacatattgaaaaatacaaaagaaacacaagacaacccaaggtatgcatatacctttgatagataggttgttgtaattatatatacactataggcatcaagagaggtgtgaaagccagcaagagagagaagggagacagagagctaagagagttcagagtgaaactgggggttttcccttacccttttgatttgagagcgaaaggaaaattaaaactttggtattggctgaaatgccaatcattttgacagaagtaagagcttctcagtggccacttgcagagaccaaacacaccatgcatctcaggaaaagataacactagggacccaggcctaaagagatattcttgtgataaaagcatcatggcccaagtcctggatgaagctcagcttctccatggaaagacacagaaacccttgcaaagacaaaatcctgtgctatatagtccccaggaacctagatttttaaaacccatcagatgcatcaatcgacacttgctttgcaattccaaatgttgatacatgtgagcctgtgttggcgaaagcaaaccaaggtaatgagctwcaaacaaaattcacattttcatcagcaacaggaatgcccaggctcagtaacttcttcactctgtgttgtcacaacttatgtcaaggagtactgagaaatcttcatgattaattttcccttctaaaaaccat

SEQ ID NO: 18400 - DNA, 558 bp, Homo sapiens
tcctgcagcgcctgctctggcacacctacgggcagtgcaccaggcagtgagggggacactggcctgcgggattcaaacggcaaggaggrgtcgggtgggcagagctcaccattctaggtccacactgggtgcctggctctaccaggcccaggccaagcaggtccagctgggcactggggagtgccaaggctccccgacaagtcacttcctggccatctaggtgaacggtagagtccactggcaccatgtgcggtgcgagcaggctgggctttccaccctggcactgcagcttcccacacagggcatccctggggaggaagtagaggggggtcaacagctgcagtaccccccttccccaaacccactccatagcttctgctccctccactcagctccactccctacctccctgcacagggcaggaagtggccctcgctgtcctggccgcagtttccatgagcatctcccgcagagttcaccacctggaaacaggcctcgggagctgggtgggagcctgaggaagcatgggccaggctgggggcagctcggagaggggct

SEQ ID NO: 18401 - DNA, 439 bp, Homo sapiens
ttcaaaatcacactcagcctgaccctaaagcctatgccctttctactcactgcttcagcctggccctcaaactttagtttcttactcacatgtaaactgtactgcctagccagactcctgtaacactggccttgttacatgtcttgtaaagtgtttattagatttgattccaattcatttatgaaccataacrtattgattttgaaactaatatatttcagatcttatctggttgtgtcatggctcacactgacataatattttctcttatagttgttgtttttcagaaggatttcattaatatttctttaggcatgaggctatattattataatccatattatactatttattcataaatttattattttcattttaacacatgctcataaagaatgtaggaaatgggaaacaaaaaatatacttaccataattacat

SEQ ID NO: 18402 - DNA, 439 bp, Homo sapiens
ttcaaaatcacactcagcctgaccctaaagcctatgccctttctactcactgcttcagcctggccctcaaactttagtttcttactcacatgtaaactgtactgcctagccagactcctgtaacactggccttgttacatgtcttgtaaagtgtttattagatttgattccaattcatttatgaaccataacgtattgattttgaaactaatatatttcagatcttatctggttgtgtcatggctcacactgacataatattttctcttatagttgttgtttttcagaaggatttcattartatttctttaggcatgaggctatattattataatccatattatactatttattcataaatttattattttcattttaacacatgctcataaagaatgtaggaaatgggaaacaaaaaatatacttaccataattacat

SEQ ID NO: 18403 - DNA, 491 bp, Homo sapiens
agtgtgagaccccaactcaaaaaaaaaaamcagaaaaacccattacagacacagtgaaaatttccttaaaacacatcccccctccattattgaggtatagcatagatggttaatttatttttaacaaatactgttcaaaattcagttactgaagcacaatttatgatttatttcttgagacaactttgcctttgatgatgacataacaaggtgttgttatgtcatccaacagcaggactgttggaaaatgtatttctcaaaccatcaaattcatgaaggaaacagtctcttttgattttccctattgaaatataacttcaccagaccaatctggttcaactgtaacaaaggttaagtaacctgagcatacccagtgtgcatgaaccaagcgtgcaatcaccagaggaacctaagtgctcaaacccaaggagcggggagtgaattaagaagtggacaccacatggcaggatccaggatccaatcagatcaat

SEQ ID NO: 18404 - DNA, 491 bp, Homo sapiens
agtgtgagaccccaactcaaaaaaaaaaaccagaaaaacccattacagacacagtgaaaatttccttaaaacacatcccccctccattattgaggtatagcatagatggttaatttatttttaacaaatactgttcaaaattcagttactgaagcacaatttatgatttatttcttgagacaactttgcctttgatgatgacataacaaggtgttgttatgtcatccaacagcaggactgttggaaaatgtatttctcaaaccatcaaattcatgaaggaaacagtctcttttgattttccctattgaaatataacttcaccagaccaatctggttcaaytgtaacaaaggttaagtaacctgagcatacccagtgtgcatgaaccaagcgtgcaatcaccagaggaacctaagtgctcaaacccaaggagcggggagtgaattaagaagtggacaccacatggcaggatccaggatccaatcagatcaat

SEQ ID NO: 18405 - DNA, 665 bp, Homo sapiens
atgccagtttttccttgggcagccctaatactaacctgccctatttagtaaccatggaaacaggagctgcctgccagccatattcagcagacacatgcttcctgttggcagcagcccctcagctgagaagggccaagagagtgagtgcagagtccttttcccaaagcaccacggtccctgctagaagatcaggctcccagtgaggtargccctctctccaacagggcatggagggagatggcaggagaaagatatgcctgctaggtacctgcttttcactgtttcagcacatctggaacataatactgcccatagccccaaaccctccccaaagcagcccagaatcagggcatcaagccttacactgaggcactcttgggctttgtcaagcggccccatggacagtgactctgcccatggctagaggacagtgactcaccccaggcttcaaggcctggcttgttcctgcccaaagggacatcggtcaggggtgaacaccagtaatcgtgatcagaacagctcaaaacatcttgtggcaactactaagaccctttatcctactccctctcccctaaagatcaatgctttctggctttttgcttcccctaaacccaggtgatctggctcttgctgaacaaagacagctttaatgagccagggcatga

SEQ ID NO: 18406 - DNA, 1014 bp, Homo sapiens
aaagcccgcaagaatgacaacaaaaatattattaacatgtttttcctttctatcatcatcattattataataaaacataactataaaattaatttgtattattactggcactaaattgaatttgtattagatttatgtaacttgaaattaatggtatccagaaaaactcaccacacaaggtgtcagtattaagagatggaactcttaggaggtgtttagataaaggactgagccatcataaatgggattagtgtctttttaaaagaggccccaaagagttccctgtttcttctggcatgaggacacagcaagaagatagtcatctatgaaccagaaagtaagccctcaccaggcagagactgccagtgccttgatcttggatttcccagcctccagggaggtaagaaatatatacgttttgtgtttataagccacccagtctatggcattttgtcacagcagcyttaaatgaaccaaaataatggattagagagtaaaattgtaaaccagatccccaagaccagctgaagtggaagatggcttcactattgaggattatgcattggatattctagtgacccaggattgtctttgtaattaaaaaaaaaggaattatatttttctgatgctgccttagcctaaaaagtacaagtgataccttctctcacgtacaacttttgcccctcaaactgacagactccaagaatcccactcatcttaaagcaatacccgatttttaaaattatattttaaatttcaaggttttccttaaaaaaacttcctacccaaattttagaagtcgggagacgtttaaaaatagtctatttccccattacacattagtaaattatggaaaacagtgcctaaaaaataattgaagagcaattttgaaatcaaatcataaagtggcccataatgtcaattttcactgtttaccctctttactagatactatttttcctctctaaatcttgaatggcctttagaaattttctcttcacccactattccaca

SEQ ID NO: 18407 - DNA, 536 bp, Homo sapiens
tcttgaaaatagaatgggccaataaattcctatgaagattcagttgaatgtcttatcagttcaatagatgtatgatattaaatattttaaatctaataagactggaagtatttaccactctcttaaatataaaaagaaaatatagcttaacgcacagttctaagattttggaacactttcaaattctcattcgacatcttataaaaatgcatactttacagcatttctatcagtttgaggtctgacaacctccaatatattctccttaagtacctgttgcartgtagatccctggatactttgctggcttctaatcttaaaatcggtgcagatagatatttgtcttatgcatgataacaagtttcctatataattactaggcacatgaaaatttgaaactcaacattccatattcattaagattcttaaaactattgaatattattcaaaacataataaatttttatggtgtttgggattatctgttgatggtttagtattttcatacattatgaaaaatgatacataaaaattat

SEQ ID NO: 18408 - DNA, 536 bp, Homo sapiens
tcttgaaaatagaatgggccaataaattcctatgaagattcagttgaatgtcttatcagttcaatagatgtatgatattaaatattttaaatctaataagactggaagtatttaccactctcttaaatataaaaagaaaatatagcttaacgcacagttctaagattttggaacactttcaaattctcattcgacatcttataaaaatgcatactttacagcatttctatcagtttgaggtctgacaacctccaatatattctccttaagtacctgttgcagtgtagatccctggatactttgctggcttctaatcttaaaatcggtgcagatagatatttgtcttatgcatgataacaagtttcctatataattactaggcacrtgaaaatttgaaactcaacattccatattcattaagattcttaaaactattgaatattattcaaaacataataaatttttatggtgtttgggattatctgttgatggtttagtattttcatacattatgaaaaatgatacataaaaattat

SEQ ID NO: 18409 - DNA, 521 bp, Homo sapiens
taatattaataatgcatgtgtgcatctgagagatgtcaaagcttttcagagtcaaaatgagaaaactttgaaaaatatatttcctttaagctcccctataagagagaaaactgacaatattgagaataataatcatgatgatgatgatrttaaataagattaggccagaagtttacacttgtattaatgcatttcctcaatagatttttaaattcggggacattatatcctaaacacctaacttgccatactcacagaaggtacagatataccctttggggatttttgtgcaacatcattgcttggtacataaaccttggtgttatgaagatctgcattttaaagaaagtagtttgatttatttatttataaatcaaagtataacatattttgccaagagattcaggttgcttcagaaactagtctctcaatgctcaagacagtcaaactcaaattagtatcatcttactgtggcagtaaattttgagtcaaatttgatgatgaaaattaatccttggtga

SEQ ID NO: 18410 - DNA, 486 bp, Homo sapiens
gtgagttttaaaaccctcataaggagaatttttactgatagaaatgctttctatattttattttataattaaccaaaggaataattggctttccaaggttaattacctctgccttctaaaaatactttttggttaaagaaaatatttgaattctttttgtttaaagaaagcaaggcacaatataccacattataacaaaattcyacacattgtacgtagatatagttttggttctgagctggggaacacaatttccttgaatgttatagtttttatattctattttagtgctataatttttccaagcaataaataatgtacttctactgaattcaaaattacagtaaacgtgctctctgcagataatttaacacctgtgtatttctatgccctacaactgcagactgcgtatctcagaggcttaaggatctgaattatattgcaaaaataatgagctgaagactgattgtaaatgtatatttatta

SEQ ID NO: 18411 - DNA, 554 bp, Homo sapiens
aaaccttgatgaccttatgaagcagagctcacctttctgccctggactgtttacctgaggcaaaaataatctttgaactcacgtaggctaatgcacttggggatctttgttataatgaatatacatatgcattgcagaaaaatataaagggtaaaataaaagtcattcagggtctcactacccaagagagacatactttgatctcaccttggccctttcaatatgctgctagggtaaacttccgaaaaaaaaaaaaagttggctgggcacggtggctcacgcctgtaatcccagcactttgggaggccgaggcgggtggatcacctgaggttgggagttcgagaccagccagaccaacatggagaaaccccatctctactaaaaatacaaaaattagccaggcgcggtggtgcatgcctgtaatcccagctacttggaaggctgagacaggagaatcgcttgaacctgggaggcrgaggttgcagtgagccgagattgcgccattgcactccaacctgggcaacaagagtgaaactctgtctcaaaaaaaaaaa

SEQ ID NO: 18412 - DNA, 1021 bp, Homo sapiens
gctatacattcatattgggaagaaattaattatataaaatgttatgttgctttaaatattctttgactttagaaaatgatttttctataaaaaactgctaatgttagaatcataactaaatttgtttatctggaatccagagttatagtcttttcagtgttaacttgcataatctattctgttttgatgaggaagagacaatggccagtaaacaagttgacgacagagaattctagaaatcaactttcagactgccataaactagatgactatattgattcatcatgaaatttatcttccaaacctgagcactttcgagagtgaaagagagaactatgcttggactgtagtgttaactgggacgttccaggtaaagtgaaatatatgaagaccctggttataaatcacagaaaaatcttagttaataatttaacatagactgtaagatatagtatttcactctttaaaaatgtcttaagcatgcactaamtgttttatggtgtgctagttctttgttagtgtgtacaaacatgaatctaatacacaggtctcagcttacaaataggagataaaagataggcatgtgcagcatggtttggctctttaagatgctgcttctggcccggtaagatgtatcaaggcagccagaaaaacttataattctcagaaccaagcgttcaatgctcttttgtcacttcctggttttgctcccaccttcctcttcctcacttcgtgatcttatcctccccaacccaggcttaacaggacctgaccactctttgcctctctcctccaacgattctggaaaaatggcagcttacaacatgttttatggatttctttttagccttttatagcatgagttaattttatttgcatatgtacactgatttgttagtgtgtgggagattgtttattagtcaattttctcttcgatgacttatttaagattttcagaccacagctgcaactcattttgtgttttattatgtattataattttattttaaaattgtaccat

SEQ ID NO: 18413 - DNA, 607 bp, Homo sapiens
taagtagtatgtttatgtattattcacagtagcaaataattgcaaaatgtcaacatttcatcttcttcttaagagcttctttagtgacctaattaaccattaagaagaaaagattttttaagtgtaaatatgaaaagtgagagtgtttcttagcagcaatttgtgatcttaaaatgtcacaagcaggcacatcacggaggtgctaccaaccagcacttttcaaaatatgactctgtgtcaaaagcgtgtgctgtggatttgtattttttgtctttattctgaaacaagcaatgcaaatatagatayggttgcctgagagatttccttctctttttgaaaacccttcaacattttctctgacagcctaggaaaggttgtttttaatctatttaatttgaggctgtattctccacagataatgccatattttctctttcacttcctgagcatgtacaggaaaaaaggcagaaatgtctctcctcacacacactacatttacatatatatacacacacccctaaacataacgtatatatgttcaatgcacacatgcaacacacattcacagacacacagcatacgctaatatacaacccaaacatgcata

SEQ ID NO: 18414 - DNA, 566 bp, Homo sapiens
tgacattgtaggatagtaaccaaaccacagagagtttagatatttgcagcttgttcaaacyaagaatctggcctaagcttccctgagtccagagtgcacaatattttcattatatcatgttgcctcactgcccagtataacaagtagaacttgtctttaatgttaatagtatagtgaaagtagaatatatatacaagcagctaaagaattatttggggaagacatatttcaaaagagtatgaattgaaatgggcatcagattaaacaaagattgttctaatggaacatatagaaataatcagaaaaaatagctaccacacacctggatttaacgagtgttgacattttgccaattgggatttcggatatatgaaagagaaaattgacatatttgaagtcttctttaaatcctttcctgatctcatttatccttctctctgcaaaggcaactactgtcttgagtttggtatgcccttgccatttatgtttcctatatatatgtgtgtgtgtgtgtgtgtgtgtgtgtgtgtatttcaataatatatataacttgtgtgtgtatttca

SEQ ID NO: 18415 - DNA, 566 bp, Homo sapiens
tgacattgtaggatagtaaccaaaccacagagagtttagatatttgcagcttgttcaaaccaagaatctggcctaagcttccctgagtccagagtgcacaatattttcattatatcatgttgcctcactgcccagtataacaagtagaacttgtctttaatgttaatagtatagtgaaagtagaatatatatacaagcagctaaagaattatttggggaagacatatttcaaaagagtatgaattgaaatgggcatcagattaaacaaagattgttctaatggaacatatagaaataatcagaaaaaatagctaccacacacctggatttaacgagtgttgacattttgccaatygggatttcggatatatgaaagagaaaattgacatatttgaagtcttctttaaatcctttcctgatctcatttatccttctctctgcaaaggcaactactgtcttgagtttggtatgcccttgccatttatgtttcctatatatatgtgtgtgtgtgtgtgtgtgtgtgtgtgtgtatttcaataatatatataacttgtgtgtgtatttca

SEQ ID NO: 18416 - DNA, 517 bp, Homo sapiens
ccaattgcctgagatgtgtgtggaatctaggttgaaccaaaggaggcaaaaacctaagagaaaaaaaaatgactgctatgtgcatttaggcagatagagccttcgacaatatcagaacttccctcttctcagtgtggcagaggaaaaggaagataactgactttcgttaagtgtggctcagacatagcaagagaaccactgaacccgaagtgattgtgcttactggaataaggcatatctccatggtgacccaagtggactaacagctgcagtccagatgggacaatgtcacagccattgtgaacagagatcactgtggataaggtaaggcaatggatgtcttcaaagatgcctataagggcaaaagatattgaagaccagatttgcctaccgccacctctgcccatgcagagtcaaccatatgcaaratctgaacattaaataatttataaagacagacggtgtatctgttaagctctataaaaaactgacatgtataagtaatcaaaacctatta

SEQ ID NO: 18417 - DNA, 517 bp, Homo sapiens
ccaattgcctgagatgtgtgtggaatctaggttgaaccaaaggaggcaaaaacctaagagaaaaaaaaatgactgctatgtgcatttaggcagatagagccttcgacaatatcagaacttccctcttctcagtgtggcagaggaaaaggaagataactgactttcgttaagtgtggctcagacatagcaagagaaccactgaacccgaagtgattgtgcttactggaataaggcatatctccatggtgacccaagtggactaacagctgcagtccagatgggacaatgtcacagccattgtgaacagagatcactgtggataaggtaaggcaatggatgtcttcaaagatgcctataagggcaaaagatattgaagaccagatttgcctaccgccacctctgcccatgcagagtcaaccatatgcaaaatctgaacattaaataatttataaagacagayggtgtatctgttaagctctataaaaaactgacatgtataagtaatcaaaacctatta

SEQ ID NO: 18418 - DNA, 560 bp, Homo sapiens
tgggtggccttggaccagccctattgtcctcccttttctcatttctagttctcaagaacagctgtagaatgttctgggaatgcaacattctgagataaggagggctggctggaacagcctgagctctgttctgggaccccgctttactgaaataagataaccttcaatgttttagcccagcaaatctcattgccccacagcataaaaccaaggttgagaggctttctggggtccctcagctgatacaagtggggtatgcatggaggacactccatctatcctgggcaaatttcttgagccttgcagactggcttacaatgtgtcacgggcttctgttgtcttgctgcctatctgtaagtagtaaaaagtctcttcatgcagcttgttgtatgcacaggtgttttctctcactggactcagacaagttggtgacccgcrcacaataaacctgctccacaacaagaggagaaggaattccaggtagatcgaccttctattcctctgggtataactctgatccgctgtgaggaatattattatattatttctggcagtgggcc

SEQ ID NO: 18419 - DNA, 594 bp, Homo sapiens
ttgctcgcctgccactcacctcctgctgtatggcctggtttctaacaggccagggactgggactggtccatggcctgggggttgcggatccctgtaacagatggtcaatttttcaaatactctgtatgtgcagaaaattgtatattctctgttgcatgtaggggatgtgtatatacagtctttgactgtcccatctttatccattccaaccagcagtgaatactgttaggaactctgatgataacctggttcattctcctttttaggtgacctgcattttctctctggaagtttttggaattttctctttgcattggtagtgttaaatttatgaaataatgcatctggttggaagtttgtccttatctcccatgattgacactctcagatccctttamattttaggtctttcaattttttaatatagtatatttatgtccactgtttctataaatatttcctccaatttgtttatcctttcatctgggatatctattgcctggatgttggcatttctacttctatcctccacatctcttatattttattttctcgtataccttctatttcttgatccctttccaaccgccttta

SEQ ID NO: 18420 - DNA, 592 bp, Homo sapiens
aaagtcaaactcagtgcatctcgccgagtcgctaatgccctggaccaagggcgggctggctgggaggcgaagtggccccatcgaaagtgactctgcaggcgtcagagggaccagtgtgggagcccttctccctgtggggagtggaggcctagagggcagtgctgtcgactcaggctgagtttgggggtggtccctgttttggtttgtaccccatatgccatggccaaatccctgtagcaataacttgcccagtgctgccggtcctgtgggatgagggtcccactcccggggccctgctcctcagggccagatccctgcccaccaaccgggcgaggctccgatcccctgccccatcacagctgactggctgaggcccctccctggctggtcctacagcgctgactgcacgttctacccactcatgacttctcccacaaggaagtttgcccaggtgcagaactcagagccacatgaagaggmtgcagaagaaaaggacgactcgtctggggctcttagaccctcaggaagcaacccaagctgccctgtgcccacactccagcctgaatttcctatcagacacagagctttacag

SEQ ID NO: 18421 - DNA, 531 bp, Homo sapiens
aaaattacctttgtttttcaaaagctatcttccctggatgtagaattctaagtggacctttttttggtttatttttgttttttttctttcagcactttaaagatattgcttcactgtcttcttgaacacattgtttctaatgagaaatttactgtcatccttgactttctctgtatggaacattttttttctttgggtaatgaacattttctcttatagccctgattttgaacaatttgtttatgatgttcctcgatgctggctttttgttttttcacatttgttgcatttgaggttcattgagattcttaaatctgtaggtttatagatttcatcatgtttggaaaaatttcagtcattatctcttcaaatattttctctgkcctctcttctccctccttcagggatcctgtctggctggaaaagggaagataagcttcctacagtgagcagatttgagataggtcttgagagttggttaggacttgaactggtagagatgtcaatcaaagacttcgcaacttaatatga

SEQ ID NO: 18422 - DNA, 531 bp, Homo sapiens
aaaattacctttgtttttcaaaagctatcttccctggatgtagaattctaagtggacctttttttggtttatttttgttttttttctttcagcactttaaagatattgcttcactgtcttcttgaacacattgtttctaatgagaaatttactgtcatccttgactttctctgtatggaacattttttttctttgggtaatgaacattttctcttatagccctgattttgaacaatttgtttatgatgttcctcgatgctggctttttgttttttcacatttgttgcatttgaggttcattgagattcttaaatctgtaggtttatagatttcatcatgtttggaaaaatttcagtcattatctcttcaaatattttctctgtyctctcttctccctccttcagggatcctgtctggctggaaaagggaagataagcttcctacagtgagcagatttgagataggtcttgagagttggttaggacttgaactggtagagatgtcaatcaaagacttcgcaacttaatatga

SEQ ID NO: 18423 - DNA, 531 bp, Homo sapiens
aaaattacctttgtttttcaaaagctatcttccctggatgtagaattctaagtggacctttttttggtttatttttgttttttttctttcagcactttaaagatattgcttcactgtcttcttgaacacattgtttctaatgagaaatttactgtcatccttgactttctctgtatggaacattttttttctttgggtaatgaacattttctcttatagccctgattttgaacaatttgtttatgatgttcctcgatgctggctttttgttttttcacatttgttgcatttgaggttcattgagattcttaaatctgtaggtttatagatttcatcatgtttggaaaaatttcagtcattatctcttcaaatattttctctgtcctctcttctccctccttcagggatcctgtctggctggaaaagggaagataarcttcctacagtgagcagatttgagataggtcttgagagttggttaggacttgaactggtagagatgtcaatcaaagacttcgcaacttaatatga

SEQ ID NO: 18424 - DNA, 531 bp, Homo sapiens
aaaattacctttgtttttcaaaagctatcttccctggatgtagaattctaagtggacctttttttggtttatttttgttttttttctttcagcactttaaagatattgcttcactgtcttcttgaacacattgtttctaatgagaaatttactgtcatccttgactttctctgtatggaacattttttttctttgggtaatgaacattttctcttatagccctgattttgaacaatttgtttatgatgttcctcgatgctggctttttgttttttcacatttgttgcatttgaggttcattgagattcttaaatctgtaggtttatagatttcatcatgtttggaaaaatttcagtcattatctcttcaaatattttctctgtcctctcttctccctccttcagggatcctgtctggctggaaaagggaagataagcttcctrcagtgagcagatttgagataggtcttgagagttggttaggacttgaactggtagagatgtcaatcaaagacttcgcaacttaatatga

SEQ ID NO: 18425 - DNA, 529 bp, Homo sapiens
atggacccaacaaratcatctcaatagtttgacaattcatttcccccaagttggtgtgtttcaggcttagataaaacggtgctttgaacatcaacaggtgaaatcttttgttaaaaaacatagtctagttcatccagccctcctcctctccctgttactcctcttcctccttctagtctttcctccagtgtgaagtgaaggaaatattaggacttggtgttgcccctaccatggtctgctttaatgtcctgtgaacttggacaagaatacacatacccgcatcaccatcttccaagaacacacgatagccaaaggtcacagtcaatttacatcggttacaacagaacgcatctctcactctgagtattctcatttgatcttaactgcatttaaatctcagtaaagaacaatgacttgttcctgctttataggcctaaaacacccaccaataaggtcctcttagaaaccaggcaaggcacacccaggtctctatgctaaacggaggaagtcatgcataacttttcagaga

SEQ ID NO: 18426 - DNA, 653 bp, Homo sapiens
acaggagcctggtttctcactattaaagtgggaggttacaagtaagcaaggggagaaggccagaatgatcatgtgataaaagaattgagtcgtagacatcagtatgaactaacacttatacacattacatttagaaatatttatagttatgtgtatacacagctttgtatacacacatttatttctttgctctgtaaactaagacggtctagaaccaatgatatcacagcagaaatgagcatatctaacactcaagtcttcaattcttgggtttttgttcatgatccgggatccaggagttgggccctggggctgggcattgtgtagcctccgggatggtgctgagcatccattcccaccctcctgcagctggggacccatcccttgacttgggacccctggaggcaagaacatggtcacccactttaatcacatggtccctatcacataatcagagggygctgtgcgttttaactcttcaagctagatgtgtaaacaattcgacatagataagatatagtgactagaagtcttttatttattttgagagagagtctctgttgcccaggcttggagtgcagtggcacaaacaatcaaacaataaccaaaatccagaagaatgaaaaggtcaaatgctgtcaaggatggggagc

SEQ ID NO: 18427 - DNA, 537 bp, Homo sapiens
accaggctggtcttaaactcctgacctcaggtgatctgcccacttcggtcttccaaagtgctgggattactagcgtgagccacctcgcctggccgatacatagccttttaaatcattaataagtgctagagtatcaagcatagaaaacaaaaaagatctgtaacaaagtcaggacttaaaaaaagaaatcctcaggctatgtctttgagagtttttggttaggttcagtgtgaactttgaagactttccttcgctttcagtcctgacttgatgggcagaggtacgtagggaaggacaggcatttctcaattccatttctaaacgttgcctaagaacacgctgtgtagaccacaggcttctctsctttcaggagcaggagagggtctcccagttcttttgagccttcccactaccagggggcaagttccctaattagttgatctaagaagcctaaccaacaagatctgtgcaaaatggattattcctgttccagttcgacgtaatagcaaggctgcctctttgctcaagaaaggaaaa

SEQ ID NO: 18428 - DNA, 538 bp, Homo sapiens
catttttacatttttatataccctcattcacttatcactgacaagtagcatttcttaagctgacaaagataagcatgaagcagatgtcaggagatggaaatgatcacagtatggagcacttcttttgtaaaatatgagttaattcaccagtcatgaaagcaaaggactgagaartgctttctttgtgtgtactgttggcaagtgtcacgaaagttccgccgaacaagattattaattcatgacctatttatctccctgccatagcaccttcttcagaaaggactaccatttctaccaggcagagcttccaattatgcatgagatatgaagtaaaggccaaactccatcaaaaacttagaagcaaatagtccccttgacaaccagatgtctatctttccaggttaaagctttccaagttctgatggatggtttctgcaacactgtgtttaccttcaaactcatgttgcttcaaggtctggttggcaactcatggagaaaaatacactattcttgagagcaagctgtatcttttatgaag

SEQ ID NO: 18429 - DNA, 538 bp, Homo sapiens
catttttacatttttatataccctcattcacttatcactgacaagtagcatttcttaagctgacaaagataagcatgaagcagatgtcaggagatggaaatgatcacagtatggagcacttcttttgtaaaatatgagttaattcaccagtcatgaaagcaaaggactgagaaatgctttctttgtgtgtactgttggcaagtgtcacgaaagttccgccgaacaagattattaattcatgacctatttatctccctgccatagcaccttcttcagaaaggactaccatttctaccaggcagagcttccaattatgcatgagatatgaagtaaaggccaaactccatcaaaaacttagaagcaaatagtccccttgacaaccagatgtctatctttccaggttaaagctttccaagttctgatggatggtttctgcaacactgtgtttaccttcaaactcatgttscttcaaggtctggttggcaactcatggagaaaaatacactattcttgagagcaagctgtatcttttatgaag

SEQ ID NO: 18430 - DNA, 534 bp, Homo sapiens
gttaaatcttaatttctattttgaaccatttttttcctaaaatgtaaactaggttatttttcttggttagcttcatctttgtaagctaccccaaatcattttattattttattttattttttgagatggagtcttgctctgtcgcccaggctggagkgcagtggcacaatcttggctcactgcaacctccacctcccgagttcaagcaattctcctgcctcagcctcctgagtagctgggattacaagcgtgtgccaccacacttggctaatttttgtatttttagtagagatggagtttcactatgttggccaggcttctctcaaactcctgacctctagtgatttgcccaccgtggcctcccaaagtgctgggattagaggcatgagccactgtgcccggcctcaaatcattttagaccaagctaggatacaagttaataacattacatgtataccttaaactgaaattcaaatcactttacgatgtaaatccaattgacttttcaaaccctaatttttaagaacatctttt

SEQ ID NO: 18431 - DNA, 534 bp, Homo sapiens
gttaaatcttaatttctattttgaaccatttttttcctaaaatgtaaactaggttatttttcttggttagcttcatctttgtaagctaccccaaatcattttattattttattttattttttgagatggagtcttgctctgtcgcccaggctggagggcagtggcacaatcttggctcactgcaacctccacctcccgagttcaagcaattctcctgcctcagcctcctgagtagctgggattacaagcgtgtgccaccacacttggctaatttttgtatttttagyagagatggagtttcactatgttggccaggcttctctcaaactcctgacctctagtgatttgcccaccgtggcctcccaaagtgctgggattagaggcatgagccactgtgcccggcctcaaatcattttagaccaagctaggatacaagttaataacattacatgtataccttaaactgaaattcaaatcactttacgatgtaaatccaattgacttttcaaaccctaatttttaagaacatctttt

SEQ ID NO: 18432 - DNA, 534 bp, Homo sapiens
gttaaatcttaatttctattttgaaccatttttttcctaaaatgtaaactaggttatttttcttggttagcttcatctttgtaagctaccccaaatcattttattattttattttattttttgagatggagtcttgctctgtcgcccaggctggagggcagtggcacaatcttggctcactgcaacctccacctcccgagttcaagcaattctcctgcctcagcctcctgagtagctgggattacaagcgtgtgccaccacacttggctaatttttgtatttttagtagagatggagtttcactatgttggccaggcttctctcaaactcctgacctctagtgatttgcccaccgtggcctcccaaagtgctgggattagaggcatgagccactgtgcccggcctcaaatcattttagaccaagctaggatacaagttaataacattacrtgtataccttaaactgaaattcaaatcactttacgatgtaaatccaattgacttttcaaaccctaatttttaagaacatctttt

SEQ ID NO: 18433 - DNA, 523 bp, Homo sapiens
catatataaacaaagtggtataatagtgaaaattggctggacacagtggttcatgcctgtaatcccagcatttttggaggccaaggtaggcagatcacttgaggtcaggagttcaagaccagcctgagcaacatgatgaaaccctgcctctactaaaaatacaaaaaaaaaaaaaaaaaattgccaggtatgrtgtcacatgcctgtaatcccagctactcaggaggctgaggcatgagaatcacttgaacctgggaggcataggttgcagtaaaccgagatcgtgccactgcactccagccggggcaacagagccagactttgtctcaataataataataataataataataatactcagtcctagagccacaaaaggttctgctaaataaatgtatactagagtgcgggagggcagggaggggtgtggctcaggcaggcttagactctacccagaaaggtctcctaggacataagaaaagtactggatctaacatcaagtctttctcagaaatctggtctc

SEQ ID NO: 18434 - DNA, 551 bp, Homo sapiens
accacctcagcctcccaaagtgctgggattacaggtgtgagccaccgcgcccggccgactatctcatttttaaacactggggcataggtattattattgtcctcattttactgttaaggaaactgaggcacatcagagtctaattattatcatttgcctgggatcacacagctagaagctggcagagccaggattcaaacccagytggattgcagaacctgtgctctttgctttcaccagggtggggcaggtggggaggaaaggctgagcaggggtgacgcgtgagccagacttaatgacgcggggctccccaggtgacgcaggagtggggaaagacacgagaggcagagagcaaaggttcagaggcagggacctccaagcagctcgcagcctgcggtgggtctgtgggctgaagcctggacaccagcctcggcctggagtcctcatgagccccactaaggtgtcaggagccccctagaccagccagggttctggggtgcaaacaggaaacaatgttggctgatttgagcaaaaaggagtttattgggagg

SEQ ID NO: 18435 - DNA, 520 bp, Homo sapiens
ttaattctcctttgccatgtaacctgccctacttgcaggttctggggattaggacacgggcatctttgggaggccatgattcttgcctactatggagaattccaattcctggaccacacctccctcaaagaagtagctgaaccagatatggagatgggaaagaggatttctggtggcaagttctattgatgctactgactgacacagatgactctacccatctagcgtctcatctgaaagcctaacaaagggattcaccatgaaaaaagaaaaacaagatgggaaatagcacataaaaagtgaacacataaagagagtaaatgcataagagaagaatttttttttaatttattacactttaagttctgggatacatgtgcagaacgtgcaggtttattacataggtataaacatgccatggtggtttgctgcacccrtcaacccgtcatctacattaggtatttcttctaatgttatccctcccctagcccccagacccccggacagccccagtgtgtga

SEQ ID NO: 18436 - DNA, 520 bp, Homo sapiens
ttaattctcctttgccatgtaacctgccctacttgcaggttctggggattaggacacgggcatctttgggaggccatgattcttgcctactatggagaattccaattcctggaccacacctccctcaaagaagtagctgaaccagatatggagatgggaaagaggatttctggtggcaagttctattgatgctactgactgacacagatgactctacccatctagcgtctcatctgaaagcctaacaaagggattcaccatgaaaaaagaaaaacaagatgggaaatagcacataaaaagtgaacacataaagagagtaaatgcataagagaagaatttttttttaatttattacactttaagttctgggatacatgtgcagaacgtgcaggtttattacataggtataaacatgccatggtggtttgctgcacccatcaacccgtcatctacattaggtatttcttctaatgttatccctcccctagcccccrgacccccggacagccccagtgtgtga

SEQ ID NO: 18437 - DNA, 597 bp, Homo sapiens
tgggcttattctaaaaagtgaagggagcggagtgatagggattacagaggcagatatttagaaatccaagaaacatttagcatcaagraaacaatctagaatctaaagccccagctatgagtcaagggcaggacttcagtttctaggagaagctataattaagataaaaacatggggctggaggtaacagatgaacactgaggcatagaagacaaataagaactacacgtagtcactagaacttggacaccaagtggggacttggtttcaggagcaagaaagccgactaaaaataccacacagagtctaagttagactggccactgttgtgacctgggctacaccacctaatagcctctttccttgagacagggcgaggctgagcctcaggttggggatcgggggccccaatgttgggagaggagggttccaggggctaggaatctgtgcagctcaccatttctgtacctggtccacactttaggatttggtcacatgccttgctcagatggagatgcctctgttcttttcctgagccttcagtgtcacaatcttatcacaaaaggaaatgacattatgctggtgtacctggccctg

SEQ ID NO: 18438 - DNA, 525 bp, Homo sapiens
ttgtgacagctggtctattttttattcttttggactcttaggggtggcccttccaggatccccaccaaggtctcatctccttactgggacccaaattctcattatgtcatttcagccctgtgagagtgccaaacattcagctaggctctccagcctcttaactatcacttcatactcagtttcttagcctcttagccctctactgttgaccgatcaccaaatgtgggaaaagcactaaggactgtcaggatcacctcctaggcctggtcactcaagtcctggctgaggtcyccaattaccttccaacaattgtttttgatggtggggggaaggggggacacatttttgtccagtttttctaactgttcctgtggggaggctagtctataacaagctactctgcctttaatgaatgttgaaaacctttttttttttttttttttgagatggagtctcactctgttgcccaggctctagtgcagtggtgcaatctctgctcactgtaacctccacctcctgggttca

SEQ ID NO: 18439 - DNA, 715 bp, Homo sapiens
tttgaaggactctagctcttctctttctcagggggaattgggtttttttacatacaactgagtttttgtttacacatttttaaatttcttttaattcctgttcccatcccagcaccctgagaggacgaggcaggcagataacctgaggtcgggagtttgagaccagccccacgaacatgaagccccatctccaccaaaaaaaataaataaataaattagccgggcatggtggctcagcctgcaatcccagccactcgggaggctgaggcaggaatattttctccctcccttagataaaagatagcatataccattgtgcactttgttttttgacctggggtggggtctcactctgtcactgaggctggagtacagtggkgtgatcttggctcactgaaacctctgcctcctagactcaagctgtcttcccaccccagcctccagggtagctggaaccacaggtgtgtgccaccacacccggctattttttttgtatttttggtagtgactgggttttgccatgctgcccaggctgatatcgggctcaggcgatccacctgcctcagcctcccagagtgttttcaaagtgctgggaattacaggtgtgagccactgcatccggcccattttgcacctttttaaacttctcttagagatcacttcatatctgtttatagaaatgttcttcatcttttttaaaattagtactttgtag

SEQ ID NO: 18440 - DNA, 715 bp, Homo sapiens
tttgaaggactctagctcttctctttctcagggggaattgggtttttttacatacaactgagtttttgtttacacatttttaaatttcttttaattcctgttcccatcccagcaccctgagaggacgaggcaggcagataacctgaggtcgggagtttgagaccagccccacgaacatgaagccccatctccaccaaaaaaaataaataaataaattagccgggcatggtggctcagcctgcaatcccagccactcgggaggctgaggcaggaatattttctccctcccttagataaaagatagcatataccattgtgcactttgttttttgacctggggtggggtctcactctgtcactgaggctggagtacagtggggtgatcttggctcamtgaaacctctgcctcctagactcaagctgtcttcccaccccagcctccagggtagctggaaccacaggtgtgtgccaccacacccggctattttttttgtatttttggtagtgactgggttttgccatgctgcccaggctgatatcgggctcaggcgatccacctgcctcagcctcccagagtgttttcaaagtgctgggaattacaggtgtgagccactgcatccggcccattttgcacctttttaaacttctcttagagatcacttcatatctgtttatagaaatgttcttcatcttttttaaaattagtactttgtag

SEQ ID NO: 18441 - DNA, 544 bp, Homo sapiens
ggtggcggtagtcccagctactcgggaggctgaggcaggagaatggcgtgaacccgggaggcggagcttgcagtgagccaagattgcgccactgcactccagcctgggcgacagagcgagactcctccgtctcaaaaaaaaaaaaaaaaaaaagtcttccagtttttaagtggattcaatcaacacaaaggcctctcctggcacctgtcaccaacaccaacagatggcggggcacatccatcctccaccccaccacagtctctcaggggctggcagcccttggccagaaactcacccacagccaggcaggtggtgatgttgcagaactgggccagctgtctggtgacagagtgcacctggatgcccagctctcgggtgggcactagcaccagcacgcgggtgactggagcctggcggggtttataaatcagacgctccaaaacaggcagggcaaaggcrgcagttttacctggagggagggacagcaaggaagcaatgagtagaagtttagctccctccagggttaggttttcaccagagcaca

SEQ ID NO: 18442 - DNA, 635 bp, Homo sapiens
tctgcctgggacatgtgcacaggggagattgtgaaatatctcttggcttatcaacatgatgatgtgattctcctctgttgcctggtacctttttccagttgggattgcaacatattgctgggcccagcaccgggtgatgttattcttctcccagggcccagcccacaaatggcgttgtggcatctctctgggtccatcacctaggtgctgtgactctgctcttctaactgggcactttccacaaaaggaattgtgacacatagctggacccagctccctggtcatggagctgtcttgtcttggtcctgtgcaaaggggtcattgtgatatattgcttggccaagcagctaggtgatatgactctcctgaatgggccctgctctcagagaggattttcacccatcactgggccagtcatataggtgatgtgtctctcctctgttgcctggaccctgcccaagtaagaattgtgacatcacttacccrgcacccaggtgataggactctcatgtctggttcctgcccacaggtgaaattgtgacatatacatggtcacagctcacaggtgaggtgataactcacatacctggatccagctaagagaacagattttgactctgatatctaggcttaga

SEQ ID NO: 18443 - DNA, 613 bp, Homo sapiens
cttcttgttgagaaaatgataaagtcacattacaggagaacatatgggaaaggaaatactgttgctgctatttttgaaaaatacaatctgccatatagatatttgaaaacataacmatttttcccactaactctttgagaatggaaacattggcttattttatttttatcctccctctttgttctatatcccaatctgcatgcctactccatgtcaagactaatatcataaatgttttatttaaaaaaatgggttttgttaagtttgaatagagagggtggaagggtaacctgtactttattaagtgaggagaacaaagagcatataaatctttacaagattatgttagaggtgtgaacaaacctttctttgtaattttattttttagagattgggtctttctctgtcacctaggctggagtgctgtagtgcaatcacagctcactgcaacctcaaactcctggacaccagcaatcttcccacctcagccttctgagtatctgggactacaggcatgcactaccgggcttggctaatttttatttttattttcttggagatattttatttcttgctatgttgtccagactggtctcaaactcctggcctcaag

SEQ ID NO: 18444 - DNA, 577 bp, Homo sapiens
  misc_feature (1)...(577): n = A,T,C or G
gtgattctggaacacaaattgtcctcgtgaccttgaaagggctgtatntccttatcagctgtatagccacctacaaccattaatacatgtaattcctaagtttaagaattttgcaggttattaaaaagaccttatattactaagctatgctcaggccaaaagaatgagcaccgtattcaggaatatactttctctggtgcatcttattgcaaccttaattttttaattattcttaccacttcaatgtgattattgactgaattatgtcattatgtcaaaggccaatccttaccatattccagtgggaaagaagacttaatatttagttaattacatttgtcctagtaagcctgaaattcctattgactctccaagttctcaatttctattgctcataggtgagtttattgacggatcttactgaacactgcagtcctcactacagtgcacactgtaattcaattgcctctaatataaaaaattcttaagttcagctctgtagaattacaggggtcaaaagttacaaacatgttcctgctgcttctgcctgtctrtaatttagtttgtaacctatgtc

SEQ ID NO: 18445 - DNA, 594 bp, Homo sapiens
cttgaggccatttctctccctaaatagaaccaataattaaaatagtgagtgtttcactcaggtgcactaattgagtctgaagctggatttcataagtaagcttttgttgttaaagaatacagctatttatctatctatatatcctttaacaaatrtataaattatatttaattatatattatatatttaattatttatatttatatataattatatgttatatatattggggatcatgggggcagttgtccccatgctattctcttgaaggtaaggtctcacaagctctgatggttttataaggggctatatatataattatatatataattaaatataacataattatatataattatattatataattaaatataatatatatttgttatatttctatctcagtttggggatacaagtcagacattcgttttctctcattctccagaaaataaaattacatttacaaattttatacatggtcaaaaaatagcagctaggttagagtaatttctatttcattttaaaaattcagaagttctaattattagcatcctgattatgatagctgcaaaaatccaagaatatttggct

SEQ ID NO: 18446 - DNA, 1863 bp, Homo sapiens
ggcctcccaaagtgctgggattacaggcgtgagccaccgtgcccagccagatttatttttatagagatggagaaggagtctcaccgttacccaggctggtctcaaactcccgggatcaagcaatcctccttcctcatcctcacaaagtgctacgattacaggtgtgagccactgtgctcagcctgcactatggatttttaatgttgacagtgtcttggaactagttacttccttaggatttactgctgtagaaaatatttatgccttttcatttttctcctaactccrtatcttctaagcaaccttggttctgtcacctacagtacttaccagaaatcggattcctactactggcaaaagagtacagtgagctccaacattagttatgttctactaaggaagaaagcaaaaactcagctggacatagtggcaggtgcctgtagttccagctactccggaggtcaggagcttgagtacagcctcggcaacacagtgagaccctgtctctaaaaactaaaattaaaacaaaaaaagagcaaaaactgcttctagtcaaaattacacttgaaaaccccttaaataactcatggggtagagaatgcatatgttgctgtcaatatatccaattaatctaggttttccaagtaccagaagtaagtggtcaggggcaccctgagcagccaattagaaatcagagtaccttgagctctctagcagcccattttagtgaaataaaatcaagtctgatgactgaacgacctgtggttttcaaaattctccactgtgactcacagtcaagagacatttctacaatccagtcatgatgtgcatatgtaactaaaatacgtttccacatcaacacttacccttaacagatgtaatgcactctgatactattcaattgcttaaaaatgctggcgtcacacaaagctacacgtatgataaaaatgcacagatgtacatctcatacagtgcacgtaaatccggccaaatctgaaggtgtgtggactatactaatgattttttcttggctgtgatgttatacaacaattatacaagatgttagcatggtgggggaaccaagtggaaggtatacaggatctctctgtattgtttcttacaaccgtatttaaatctacagttatctcaaaatcaaaagtttagaaaacaaaaatgcttgttgtgatatagtcacaccacaattaatgggtcccaagccagtatgaaacactgccatagatggaaggcagaaaccattagaatgaccatcagaccgttgcaggtgcccctaaaattctcctcttaattccttacaccaagcaaactttctgaagcaatttcatttcagggaccagagtcctgctgggggacagctgctctactaggctctgtactgtttttgacaactgctctccctgagagcagtcttttgggctgccatgtgagaaagacaaactgtggccaattagtctgcatcagacccacacctgaatactcatcaatgtcctgcaggaccacacactaaggaacacattttgggaaattccacacattattcacaataaaaagataaaccagaaaaccctttaatttctctgtcattgaccagggagcttcaggagcagccacagagtctcagggaccaagctttataaggaagcatgtaagtttgtattaatagctcgctgggttccatagctcatgcctataatcccagcactttgagaggctgaagcaagcaaactgcctgagtccaggagtttgagaccagcctgggcaagatggcgaaacctcatctctactaaaaataaaaaaaattagccaggcatagtggtatgcgcctgtaatcccagctatttggga

SEQ ID NO: 18447 - DNA, 565 bp, Homo sapiens
gcgaccaaggtttaggatattagagatgtgaatgccccaaaaggcacaaacacaagatccccaccccaccctccagcaccatgtttttctagttatcctgcctttatatctgcatttcttagactgtgagtggaatcctgcgcctgaagcttctgggcgtgtggggtggtctggggaggagagggtgaattgcacaatgtctgctcggaagctcgggaaattcccaggcttaggctctccccacaacctggcctgtggccagggctctcacaattcccatccccaacattactgtccctaaactggggcttgaggtcctgacccatggccaggctggtagtaggaaggggacagggggcctcggaggcctgtcttcttccctgcctctcagtgtccctggggctgaacagtgcttgctaggcaccaccctcccctggggccaggaaggaaggggtagagggargcaggagggcagagtgagcgggggagggtcgacggagacaaatcactggaaaagtgggcagagtcagttgggtcagatttcacagcctggggcttccacacg

SEQ ID NO: 18448 - DNA, 636 bp, Homo sapiens
gctttcttgttctctgagcaaagtagatcagctgcatattatatcagaatcataaggaaaatttaggtcttttaagtcttaattggggacctgggaaaaacagaaggtgatttcagtgaatacctggggcatcactattcaaatactttgtcatcctcctcaggggagggcaaaaatgtttttttayctttgactaaagacagactaaaaaaggcagaacaaatgtctactatagtgaagcaagtggcctaaggaagatatttacgttagatattaccagaaatggaggaattacaattctgttgatggttctgagatcttcaactaatcaacatctttatccatttggttggttgtttttggttttttgtttgttgttttgttttgttttgtttcactggatgaacagaatggttaataggcttactatggggtatgaaaaggcctttggctaaaaagccttcaactataggcttgtgtctttattttctctctctctctctcgctctctcttgcttcaagggatgttagggaagtttgggtaacagtttggcagaactttaataggtctgtccaattattttccttatgtcagtggcattttcattcacagagtgtcaagatctctgcatgggg

SEQ ID NO: 18449 - DNA, 636 bp, Homo sapiens
gctttcttgttctctgagcaaagtagatcagctgcatattatatcagaatcataaggaaaatttaggtcttttaagtcttaattggggacctgggaaaaacagaaggtgatttcagtgaatacctggggcatcactattcaaatactttgtcatcctcctcaggggagggcaaaaatgtttttttatctttgactaaagacagactaaaaaaggcagaacaaatgtctactatagtgaagcaagtggcctaaggaagatatttasgttagatattaccagaaatggaggaattacaattctgttgatggttctgagatcttcaactaatcaacatctttatccatttggttggttgtttttggttttttgtttgttgttttgttttgttttgtttcactggatgaacagaatggttaataggcttactatggggtatgaaaaggcctttggctaaaaagccttcaactataggcttgtgtctttattttctctctctctctctcgctctctcttgcttcaagggatgttagggaagtttgggtaacagtttggcagaactttaataggtctgtccaattattttccttatgtcagtggcattttcattcacagagtgtcaagatctctgcatgggg

SEQ ID NO: 18450 - DNA, 497 bp, Homo sapiens
tggacctctagctatactyttgtcctgaacccataaaatgtttgaacctggtctgaataggttatggcatgacagccaacatttatgactactgtgacactgaaagtgtcaatgagcaggtgtctggaaacgtggagctgtacttcaacatcctgctgatcatatctatggagctgtttgagggtgctctagaagtgcagtgctcagctcaaggaacatgagtgaggggaataggatatggttgagggtcctggtatggcatcttctttttgtaccctttgagtggcctcaagcaagctgcagaattactactctaatcatgcgagcatatttatagcttcatcactgtttaaaatactgggtttgagaaaatttgacttatatctataccaattcacattttctttcttatttttttaagttccggggtacatgcgcaggatatgcaggtttgttacataggtaaacgtgtaccatggtggtttactgcacctata

SEQ ID NO: 18451 - DNA, 559 bp, Homo sapiens
actggtaagggctaacatgtttaggtggtgatgtcactgaattaatatcattccataatcaaatgggggggcttgtgttaagacttcagattattcatgtagacaaaaggcaaaagtagatacagaggaaagaggttgtggactttgctagacatttttgttagccaccttcccccatgtaatgtttgcctcctatgccctaatcaaattctacatcatatcttcccgatgagagcagagaataaakaattcagaaatgcaccatctttgtccaactggatcggatcacagtttggcccacctgaagtcctcagttcctccagttggctattggtcctatttctgcaacagctccacctctttgaccttcaggtccaggggtgctaacagcttcctgctattactatttcatgtgcctcacttttccttgttggttccttcaaacctgtctatatttttttcaaatattgttatcttttgtttaaactgtccttttaaatgtgtcatttattttctgcaggaatgctaaatgatataggcaggtagggatttattttaa

SEQ ID NO: 18452 - DNA, 547 bp, Homo sapiens
gctttgttctagtcacacgtctcagaatatgtctggyattctgggctcaacaatgtgacttatgtgacttatttctttgttttgttttgtttgagatggaatgtcactgtgtcacccaggatggagtgcagtggcacgatcttggctcactgcaatctctgcctcccaggttcaagcgattctcctgcctcagcctcctaggtagctgggattacaggcatgcaccaccattcccggctaatttttgtatttttgatagagacagggtttcaccatgttggccaggctggtctcaaactcctaacctcaagtgatctgcccgccttggcctcccaaagtgctggcattacaggcttgagccactgcgcctggcctcatgtgacttatttctcaaatgttaaatgaagtataatatctatttttataaacaaatatttataggtatatcaactttttccctcagattatacatatcattttaaaactatggtatcccaaaacctacagaagtcatgggcttaccacagtttccaatttggtagcaaac

SEQ ID NO: 18453 - DNA, 547 bp, Homo sapiens
gctttgttctagtcacacgtctcagaatatgtctggcattctgggctcaacaatgtgacttatgtgacttatttctttgttttgttttgtttgagatggaatgtcactgtgtcacccaggatggagtgcagtggcacgatcttggctcactgcaatctctgcctcccaggttcaagcgattctcctgcctcagcctcctaggtagctgggattacaggcatgcaccaccattcccggctaatttttgtatttttgatagagacagggtttcaccatgttggccaggctggtctcaaactcctaacctcaagtgatctgccckccttggcctcccaaagtgctggcattacaggcttgagccactgcgcctggcctcatgtgacttatttctcaaatgttaaatgaagtataatatctatttttataaacaaatatttataggtatatcaactttttccctcagattatacatatcattttaaaactatggtatcccaaaacctacagaagtcatgggcttaccacagtttccaatttggtagcaaac

SEQ ID NO: 18454 - DNA, 528 bp, Homo sapiens
tagtggaagagaaaagagtaaatacagaaggtgagaggagaggagaaaaggaaagaggtgtcttcwgatggtttgaagtgatttgaagagttagagtgagagaaaatggaatcatgggagacagatatatacatggagaggggtaagagggattttaagcatatctttaaattgaagcctcttttggtgtttttgagaggattcaataaataatttgaatttattttcaattacttttaaatattggactggatgaaacaccaggttgagataggctacaaagtgccccagctttatatgggttgcagtccacattttcaaatgaagaaattgagaattggttaggttaaaaaacttgcagtagcttgttgaatttatatatatatgtataatgtatatgttatgtatatatgtgtgcatgtttttttcatagaaagttaaaataaagataaaaccggagaatgagaaagtttcatactttaatttctagtaatatgacagagtagacatcctgagataaataactta

SEQ ID NO: 18455 - DNA, 614 bp, Homo sapiens
tgtgagggtaggaatgctttctgattcacactgggactcccacagcctggccagggcaatgtgcacagtaggtggttaatagatttttggcttttggtctcagattcccataatgtcagtgttgggagggaccttagcaggatcacagtatgttctcrccattgcttgcatcaggtccactctgcgctgaaaaaaaattcactctgttctctgcagaagccacctctagtgacagtcaattgtctgagcctcagatactataatgcttggggtgggaatacccctgattgttgtatcagtccagagatgagatttgcgaaggttctgtaaaactcaaagtttccctttccctcttcagactggcatttcgctaccttacggtgcagcctgcttttagtttaaggcagcagaaaaatgttagaatgctgttcttcagaaacaaactgcattcctgtggtcccggaaggtcacatttcttattccattagcctggtttttctctttctcccaagccataccctccgaatgcactgtggaagacaaaccttctttctggatgttggcaggactgctttgttggaccagggcgctgggtgagtgagctcattatgccc

SEQ ID NO: 18456 - DNA, 665 bp, Homo sapiens
agctgctcacgcttctgaaacgggaaaaatcaactgcattcctgaatgggagcctcagagcattagaaaagataatgttctgattttttaaagctaaacgtatatggaaggaagctgaaagaggacttttgatgagtcacctaatgttgatgttgaaataaacctaatgaccctctggctaaaatctgttctcatttgggargcacctgaaccctcattctcccgccactgctctgacctctggaaagcaaggagcaaaggcacactcagcagctcccgctccaaaatgctctcccgagtcctcccaagcagccagaggacgactccacacccagaacccagagtggcctgggaaccaggcctcaggttcctggcccatttgtcatcgcccagggtcctcctgccaggaatccccccacatcctgccctgcctagagaagcccagctcttccatcaaagttctgctcaaatgtcactgcatgttacgtcttcctcacacactcccactagccttactgcatcatgcttggtttgctgagctatgtgtggggtctttccttgccaacccttctttccctgagaggtgcaatgacctcatattgaggctgtccactcccccactcccgaccccatccaccaagcctgggaggcactggcttaatgca

SEQ ID NO: 18457 - DNA, 508 bp, Homo sapiens
taggaaaatgattttccatcttggaccctatcactgccaagttgaagacacattttctgggtatttataacaggtagagtgagatgcggaggttccttcagggggctctacccacccagtgtctgagtgagcttgcctaggactaaggacagctgtggtgtgagctgtcacccacaggagacatctggatggcagcacagctgaggcactctgagagcaaattgagaccaaattcccggaggaagtccccttcccctgctctgcccacaggtgggggctgggcccagacacgtagttctctgggtaaactgccttaggggagaacaatcgtaacaacgacacacgtgtgtgcactcgcgcaaagggcaagggagacagctctagacagaggccctgagttccactgcgatgggggaaagagagagacagagacacacaaagagaaagacagaggtgggagtaccgcagagagctagcaggagcgagaagagaggcygacctcaggaaa

SEQ ID NO: 18458 - DNA, 613 bp, Homo sapiens
agatatatataatatagagatatatataatatatatagatatatataatatatagatatatataatatatatagatatatataatatatatagatatatataatatatatataatatatatagatatatataatatatagatatatataatatatatagatatatataatatatatagatatatataatatatatagatatatataatatatatatcttttgaggagccaatagatatatagatatatagatatatatagatatgtatatctatatgtctctatatatatctcgatatatacctatgcccttgatattgatctgtatatgaaattggctcctcaaaagaaaaaccgtgtscttatttgtataccgtagtgtgtgacacaatcaaaacctagttctatatttggaatatgcaaatgcccgttcaaaaggttgattatagttcttgatctctatctcaactttcccaactaaccagtagcgtggatgagactctgggagaatattttccttaatgttgttactgggaacatccatgcttttacagtgcagcattttccctgttctatagaggagatgttctcagtgtgtgcagctctagaaggca

SEQ ID NO: 18459 - DNA, 589 bp, Homo sapiens
ttttaataaatatctattatatgaattaataaaataatagtttcaatatcataaatatatagattagattactgcttaaaacaaccagtctctctttggtaaagagcagctagcttttctttaacatttttcttaaattcaatcctaaataggagcaccccaacctaccttttgaggaaacttggattcacatgcagctacaatcttcacaattattcgggcatcgaaaaaagtaattcacatctacatttttaatttattaatttgattctaccatcatgaacattaataattggttgtayacttttttttttttttttgagatggagtctcattccgtcacccaggctggagtgcagtggtgtgattttggcctactgcaacctccgtctcctgagttcaagcaattctcctgcctcaggctcccaaatagctgggattacaggtgggcacaactacacccagctaatttttgtatccttagtagagacgaggttataccatgttggtcaggctggtctcaaactcctgatctcaggtgatccacccgcctcggcctcccaaaatgctgggattacaggtgtgagcc

SEQ ID NO: 18460 - DNA, 462 bp, Homo sapiens
aatcattaaaacttgtttttctctccacctcaacagtggctttctttatagattctatgaatctgaaagatacaagttccaccagagrtcttggtagggttccacagccccaagctctgcaggttctgacaaaggataggctgggccctgccaggaaaactcacagaaccacatcaaggtgtttgtgctgctgctttaagagtttgtcctcaagacaaataagagtttgcctatttgggggctttggaaatttttttttaggattttggaagcctgttctgttacttgctagttgtgttactggacaagttagttaaccttgctgatcctgggaagtaatctcaggaaagcagggaaaggcaaaacagcgtgtgttattaagctgtgggaaactgggacttgatgcccctgggactctctaagcagtcctgcaaattgcatttcggaattaggataaccaac

SEQ ID NO: 18461 - DNA, 522 bp, Homo sapiens
gattacaacccaaggactatgactacttaaatatctagcaaaaaaaaaaggggagaaggggaagaaacatagtcattgaaacaagtaagtcaacataaataccatcttttgtagtgaatgaatggcaagcgcagtttgaacaggtacagtttgaaggacagtacgataccctgatagagatacctagaagtgtatgactggtacctatttctgatctaccactaagactttattctatcaaataaatccttcggagtctattcaattttcttcatctccatcttcaatggtattgagtrcatgacatcctaatttttcctctggattacttctgtaggagaccagaatatgtcaccccaaaacatccctctctgacataaggattattttgagctgaaggtagctgaacagatgcagatacaagaaaagcttcccgccctccctaatttgcctaaaagcacgatgtaagtttacaaagacaaaggtgtccttcctcctctctctaccagaaaggacaaaagt

SEQ ID NO: 18462 - DNA, 536 bp, Homo sapiens
tagctggaattacaggtgcccaccaccacgcctggctaatttttgtatttttagtagagacggggyttcaccatgtttgccaggctggtctggaactcctgacatcaagttatcagcccactttggcctcccaaagtgctaggattacaagcgtgagccaccgcacccggcctcacattctttgagttcaatcttactattgttaggggtggcaaatatctgagcctcacagcaccacatatgttaccagtggcaggtatccgagttaccagtggccaattgtatgggtctgcagcaaactcaattcttgccttctcagaagaaagaattcgactgagaggcataaggcagaaaaagagaacaaggcaagtttcagagctggagtggaagtgtatttaaaaaggctgtataacaggaaaaaaaggaaagtacacttggaagaaacccaagtgggcacgtgaaggtcaagtgtggtgtttaaccttgatcctagggctttacaggctggtccctttcccatgattattcccttagag

SEQ ID NO: 18463 - DNA, 536 bp, Homo sapiens
tagctggaattacaggtgcccaccaccacgcctggctaatttttgtatttttagtagagacggggcttcaccatgtttgccaggctggtctggaactcctgacatcaagttatcagcccactttggcctcccaaagtgctaggattacaagcgtgagccaccgcacccggcctcacattctttgagttcaatcttactattgttaggggtggcaaatatctgagcctcacagcaccacatatgttaccagtggcaggtatccgagttaccagtggccaattgtatgggtctgcagcaaaytcaattcttgccttctcagaagaaagaattcgactgagaggcataaggcagaaaaagagaacaaggcaagtttcagagctggagtggaagtgtatttaaaaaggctgtataacaggaaaaaaaggaaagtacacttggaagaaacccaagtgggcacgtgaaggtcaagtgtggtgtttaaccttgatcctagggctttacaggctggtccctttcccatgattattcccttagag

SEQ ID NO: 18464 - DNA, 536 bp, Homo sapiens
tagctggaattacaggtgcccaccaccacgcctggctaatttttgtatttttagtagagacggggcttcaccatgtttgccaggctggtctggaactcctgacatcaagttatcagcccactttggcctcccaaagtgctaggattacaagcgtgagccaccgcacccggcctcacattctttgagttcaatcttactattgttaggggtggcaaatatctgagcctcacagcaccacatatgttaccagtggcaggtatccgagttaccagtggccaattgtatgggtctgcagcaaactcaattcttgcctyctcagaagaaagaattcgactgagaggcataaggcagaaaaagagaacaaggcaagtttcagagctggagtggaagtgtatttaaaaaggctgtataacaggaaaaaaaggaaagtacacttggaagaaacccaagtgggcacgtgaaggtcaagtgtggtgtttaaccttgatcctagggctttacaggctggtccctttcccatgattattcccttagag

SEQ ID NO: 18465 - DNA, 537 bp, Homo sapiens
tatgggactgagcttttaacctgtgggatctgacaatatcttcaggtagacagtatcagaaatgaattgaattataggacactcaattgttatctgctagagaattatttggtgtgtggagaraagtccccacacatctgatcatagaattgttctttggtaagcatgagagtagagaaaaaaatcaatatgctctcttccctttacagtctgtcctttcaatactggtggtttcatggcgtcacacatttatgaaaacttattcaagtatacacttaaaatggatgcatttcatgatatttaaattaagcttcaataaagttgattttcttatatccattgaacatgtatagcttttttacatagccaatacatttgtaagaggaacattttataatgagataaccccgcaactacgcacacttaaatacacacacctgaataacaaaaaattttaaaagtagggtcatacaactgacaataccaactgtagggtaagattcataataagtagacctctcatactttactgattaa

SEQ ID NO: 18466 - DNA, 537 bp, Homo sapiens
tatgggactgagcttttaacctgtgggatctgacaatatcttcaggtagacagtatcagaaatgaattgaattataggacactcaattgttatctgctagagaattatttggtgtgtggagagaagtccccacacatctgatcatagaattgttctttggtaagcatgagagtagagaaaaaaatcaatatgctctcttccctttacagtctgtcctttcaatactggtggtttcatggmgtcacacatttatgaaaacttattcaagtatacacttaaaatggatgcatttcatgatatttaaattaagcttcaataaagttgattttcttatatccattgaacatgtatagcttttttacatagccaatacatttgtaagaggaacattttataatgagataaccccgcaactacgcacacttaaatacacacacctgaataacaaaaaattttaaaagtagggtcatacaactgacaataccaactgtagggtaagattcataataagtagacctctcatactttactgattaa

SEQ ID NO: 18467 - DNA, 631 bp, Homo sapiens
taacctgcacaatgtgcacatgtaccctaaaacttagagtataataaaaaataaaaaataaaaawaaataaataaaaaaaaagctctcacattgtatgtctaagaaatgtgttctaatatctttcactaagtgaaatcataagattatgaactgtcaaagctgtaggaatgataatgaccatctcaagtcatggagaaaaactggagaccagagaagttaaatgagttaaggtcacatggctagttagtggcagattagagactgaaaccttggtctcagatttggctttctaatgcaatgacctttccacggacccctgagtaataagctgatcatgccctactgctctgagttacagaaggccatgtgatctatcgcactcttgcatctattttttaaaatagaggtctgcttctcaacacttttgcatctaagtttctatttgtatttaaaagttatctaaatcactaattggagttgagatatataaggaagaaaagaagcaaatagattccaccccatccctccaattccaggtctttgacattctctcatcgttaaagcagtggctatttcagagcttaaaagaaaaaaattttcctttttaatgaagagttctagtggagacca

SEQ ID NO: 18468 - DNA, 744 bp, Homo sapiens
ttcagtcctgtgcttctgtttaagtgttcactcatgtgagacttggatgttactgctctgaatttgttcctgatttgtatgaggcatatgaaaatttttctgactgagaaaaaacttaaccccagttattgaggtcttcatgttttgctttgaatggaagatgagctgggattgacagcaaagaagaatgacagaacttttcaaggggacagaaatgttccgtttttaattataatggttatatgtatctatttttgtcaaaatttattgagtattgaactatacagcaattagtacaatttattttatataaatgctaccttaggaatgtttatctaaaaacttttataaaggcaactgtacttaccakaaataattcccttttctctatagaacatcaaccaaatgaactggtctaaataaaaagctctcagtcactctggagaaaacaagatctgaggcttctctgtacagtggcttccaaattgagactgtgctcatgcttggggatgtgcatgataatttattggtatgaaagcaataataggagaatttctacacttacattattgtatcctattgtttgaagttttatttttgaacattttacatttatatagaatcatgatgtaattggatatgaaatgcataaagaagatacgtatgtttttggtgcatgttcaaaaaatggtttgtggttgaaataaaaaaatttaaaagctaaagatcttgagctagaacaaa

SEQ ID NO: 18469 - DNA, 644 bp, Homo sapiens
atgttagctctcttgatagtattccatggcttctgtaggttttattcttttttttcttttatctccacttacyggatgatttaaaatgctcggtctttgagttcacttatttttttattctgcttcacttagtctgatgttcaagcctctattacatttttttagtttagctgttgtatttttcagctccaacatttctgtttggttctttttaaaatattttctgtctctttattgagcttctcattttgttcttggattgtcttcctgatttcattaaactatttatttgtgttctcttgtagttccccaagattccttaggcaattattttgattttttccaggcaatttatagatctccaattctttggggttggttactagaaattaattttgttcctttggtggtgtcatgttttcctgcttctttgtgatctttgggtgttgattttgtcagtgactaaacctgctggagtcctctgtggagttaaatactatagtttgtgcaatgataattgtgggttccttggtagtaaaagcagtgtggtatgtgcagctgataatgacaggagacagacagattcctaggcagacagggataagtccctggtgaatcccaaccttcaagccaaagacaacctg

SEQ ID NO: 18470 - DNA, 644 bp, Homo sapiens
atgttagctctcttgatagtattccatggcttctgtaggttttattcttttttttcttttatctccacttactggatgatttaaaatgctcggtctttgagttcacttatttttttattctgcttcacttagtctgatgttcaagcctctattacatttttttagtttagctgttgtatttttcagctccaacatttctgtttggttctttttaaaatattttctgtctctttattgagcttctcattttgttcttggattgtcttcctgatttcattaaactatttatttgtgttctcttgtagttccccaagattccttaggcaattattttgattttttccaggcaatttatagatctccaattctttggggttggttactagaaattaattttgttcctttggtggtgtcatgttttcctgcttctttgtgatctttgggtgttgattttgtcagtgactaaacctgctggagtcctctgtggagttaartactatagtttgtgcaatgataattgtgggttccttggtagtaaaagcagtgtggtatgtgcagctgataatgacaggagacagacagattcctaggcagacagggataagtccctggtgaatcccaaccttcaagccaaagacaacctg

SEQ ID NO: 18471 - DNA, 644 bp, Homo sapiens
atgttagctctcttgatagtattccatggcttctgtaggttttattcttttttttcttttatctccacttactggatgatttaaaatgctcggtctttgagttcacttatttttttattctgcttcacttagtctgatgttcaagcctctattacatttttttagtttagctgttgtatttttcagctccaacatttctgtttggttctttttaaaatattttctgtctctttattgagcttctcattttgttcttggattgtcttcctgatttcattaaactatttatttgtgttctcttgtagttccccaagattccttaggcaattattttgattttttccaggcaatttatagatctccaattctttggggttggttactagaaattaattttgttcctttggtggtgtcatgttttcctgcttctttgtgatctttgggtgttgattttgtcagtgactaaacctgctggagtcctctgtggagttaaatactatagtttgtgcaatgataattgtgggttccttggyagtaaaagcagtgtggtatgtgcagctgataatgacaggagacagacagattcctaggcagacagggataagtccctggtgaatcccaaccttcaagccaaagacaacctg

SEQ ID NO: 18472 - DNA, 531 bp, Homo sapiens
gactagatccaatgcccccagcttgctcctcaagcaatgatagcacctccatgagggaatcaactttattcccaggacctcacttggtgtttgacacctagccggtgttcagccttgagcaagtggaaagcacccaaccatggaatacagcatagctacattttataggcatttaccaaatattggccaaacagaaactaactggtcactcccgtctcctcttgccccacctcttgcattatgttatgttatgttatgttacgttatgttatgttagtgtaacccattacccccaaaactgtgtaataattccactgtgggagagaccaagtgtmcgccaatatccactctccccatcttccttcctctagctaaatctctagaagtttaactactcacaaactggcctaactgaagactacatttcccggactcccgtgcagctagccatggtcatgtgaccaaaggccaaccaatgggatgtgaatggaaatgacccatgctacttcctggttgtgaacttaagatgaa

SEQ ID NO: 18473 - DNA, 531 bp, Homo sapiens
gactagatccaatgcccccagcttgctcctcaagcaatgatagcacctccatgagggaatcaactttattcccaggacctcacttggtgtttgacacctagccggtgttcagccttgagcaagtggaaagcacccaaccatggaatacagcatagctacattttataggcatttaccaaatattggccaaacagaaactaactggtcactcccgtctcctcttgccccacctcttgcattatgttatgttatgttatgttacgttatgttatgttagtgtaacccattacccccaaaactgtgtaataattccactgtgggagagaccaagtgtcmgccaatatccactctccccatcttccttcctctagctaaatctctagaagtttaactactcacaaactggcctaactgaagactacatttcccggactcccgtgcagctagccatggtcatgtgaccaaaggccaaccaatgggatgtgaatggaaatgacccatgctacttcctggttgtgaacttaagatgaa

SEQ ID NO: 18474 - DNA, 531 bp, Homo sapiens
gactagatccaatgcccccagcttgctcctcaagcaatgatagcacctccatgagggaatcaactttattcccaggacctcacttggtgtttgacacctagccggtgttcagccttgagcaagtggaaagcacccaaccatggaatacagcatagctacattttataggcatttaccaaatattggccaaacagaaactaactggtcactcccgtctcctcttgccccacctcttgcattatgttatgttatgttatgttacgttatgttatgttagtgtaacccattacccccaaaactgtgtaataattccactgtgggagagaccaagtgtccgccaatatccactctccccatcttccttcctctagctaaatctctagaagtttaactactcacaaactggcctaactgaagactacatttcccggactcccrtgcagctagccatggtcatgtgaccaaaggccaaccaatgggatgtgaatggaaatgacccatgctacttcctggttgtgaacttaagatgaa

SEQ ID NO: 18475 - DNA, 541 bp, Homo sapiens
aataaaaactattgaattttacactttaaatgggtggaatttatggcatggaaattatttctcagtaaagatataatatgaatacatgatgttagtgttcatatcatatctagaccactattgctctgtaaatgagtttgtaaaataatccttaaggaatgtagatactgaaggactcagagtagtagackgacaggctgacatttttttaaagaaaaaaataatctgttgacaatgataaaaatggctgacagagcagtcagactcaaggtggagagacttacaacgatgtatttggaaaaattttaacaagaagaggacttgagccaagacaggtaagaaacgggaaaaggctatgatcctacctttagagtggaatgctatctatagaagctttctgtaaaagggaagctttctatagaaggcaactattaacctatatccttattacagaggctcccaaacagggaactacagaaagtcatcaagtccaagagagtagagtggtagaaagctcttaataatggcccattaaaatagc

SEQ ID NO: 18476 - DNA, 523 bp, Homo sapiens
gcaggtattcccctagttaagggaacacagaaataagtaggaaagttggtatagatgggaaactgtgagccacaaaaggacagcacctcgaaggcctgtgctccccagagcctttgygtccacatttcagaatgaaccatgagaagcaggacagagaggactctaaatggggtcagtgaggaggctcacacagtacaggtgtcagagctggaaagaaccttggtcagctcatctagtcccaatctcctttatttacacatgaggaaactgaggactcaagacatgacaaggcttgcctaacatctcccagtgggagaagaacggtatataccctattgccaaactttctgcccaaagctctttttacaacaccatcatgctccaattgctcgccaccctgaatttgattgctagggctgccataatgaagtgcctcatactgggtggcttaaacaacaagaatttatttcctcacagttctggaggctggaagtccatgatggaggtgccagcagggttggtt

SEQ ID NO: 18477 - DNA, 502 bp, Homo sapiens
atattactacagtacaaaaagaaaaaatgcagaactatgtattcaattgttttttaatagaactagtcatctgaatttgatccactggtcacagtttgatataataatattttatgtaaatcattgtccataactaatttgtaaattttaataaaaccaaaatgtctgcaataggtgaaatttaggaatttactaaacagtgccgcttatgtagctttttattttcctgatyttgtaatagttttaaagcaatgaactattttaaaggaataaattttaattttaaatgtatcttcaaattcagtaaaacatttcatgccgaactaaatttgcccttaccaacaaaaatcttacacttgttattggcactcagttttactgttttaaaatgtaagtacaaataaaaactccaagaaaccacatagattgttagagttaaactcaagctctcttccttcatcttggcaatcataatgctctcactgcttatttctaatctatg

SEQ ID NO: 18478 - DNA, 502 bp, Homo sapiens
atattactacagtacaaaaagaaaaaatgcagaactatgtattcaattgttttttaatagaactagtcatctgaatttgatccactggtcacagtttgatataataatattttatgtaaatcattgtccataactaatttgtaaattttaataaaaccaaaatgtctgcaataggtgaaatttaggaatttactaaacagtgccgcttatgtagctttttattttcctgattttgtaatagttttaaagcaatgaactattttaaaggaataaattttaattttaaatgtatcttcaaattcagtaaaacatttcatgccgaactaaatttgcccttaccaacaaaaatcttacacttgttattggcactcagttttaytgttttaaaatgtaagtacaaataaaaactccaagaaaccacatagattgttagagttaaactcaagctctcttccttcatcttggcaatcataatgctctcactgcttatttctaatctatg

SEQ ID NO: 18479 - DNA, 623 bp, Homo sapiens
tagaaacaaatggattttcttcttacacacataaagatttcctaaaattctgaaggtctctgttttgtctggagaatcctcacagatgaggccaattgctccagtggtcacatggtggactcctgttcatcatgggcaaattccatctcatgtattatttrtctttcccacaagaatgccagttctctggcagcagagactcttttcacctctgtgccagcagggtacctcccagaggagtgtctggcaaataaaaggtgtgcctggcacatggtaagctcagtacttacttagtgaattgctacaatctaaagaagatggtttttctaaaaataactgttaagtacaaacaagtagggactctgattacactctgaactgtatacttcatgctatattatatttagttttcattaccatggtttctttttccattttttaaactaaattgacagtttctactgtaatgaatgaattttaaaaacaaattattacttatatggcaaattctcttttctaaaatgtccaattcaggtactacttcaactttatattcttccctgacatgaccagaaaaaatacttggtctctaattttttctcatagtgtttcataatattgtg

SEQ ID NO: 18480 - DNA, 679 bp, Homo sapiens
ttgttgtatctgagaatccaatgtcttatacatgcagggaaatttcacagaaaagtaagcgtggtaggtcatagagaaggagcacaatactaaactgatcaatcagcaacagattcgtaggaggaagattagttctactggggarcttgtggtcacagggaacttctggaagcacaaggggagagtctgatctgaggtctaattaaggcagatacgagttaaggtaggaaaacatctatttagatgcaggattctaatataatttccttccttccttgcttccttccttgcttcctcccctccctccctccctccctccctccttccttccttccttcctttttacaaggtgaagacagtgaagaatccttactgttccttccttccttgcttctttccttccttccatccttcctacaaggtgaagacagtgaagattacttactgttacttactgtatctgcctatggtgtctttccattttttatttttatttttttgagatggagccttgctctgttgccctggctggagtacagcagagtgatcaccggctcactgcaagctccgcctttcaggttcacggcattctcctgcctctcagcctcccgagtagctgggactacaggcgcccgccaccatgcccggctaattttttgtatttttagtagagatgggg

SEQ ID NO: 18481 - DNA, 518 bp, Homo sapiens
tattcttggtctgattcagtatgtaagtgctgaatcaaactgctccttcgggtcatcatttccttatgagggctcacaggctacataaatcttgtagtaaataaatttgcttgtttttctcctgttgatctatcttatgtcaatttaattcttggactcaaccagaacccaaagggatggaaatggggttttgtctcccctcactatccacttgaacctctggtgacagttgaggcttagtggtgtcaacagttggaaagtaatgatgttgacaaagaaatgtgaggggtgaggaagtatgttaacaacgcccttcaccataccacrtctacctgaccatatttctttatcagagaaaaaaaggttccttgcccagtttcccaaccagtcagtaacaggaccggaacctaggttttctgattcctggtctcatgctgtttccattgcattgcttctgatgagtcttctataattggattgaattcacagcccccaccatttctaagcagagcccttca

SEQ ID NO: 18482 - DNA, 518 bp, Homo sapiens
tattcttggtctgattcagtatgtaagtgctgaatcaaactgctccttcgggtcatcatttccttatgagggctcacaggctacataaatcttgtagtaaataaatttgcttgtttttctcctgttgatctatcttatgtcaatttaattcttggactcaaccagaacccaaagggatggaaatggggttttgtctcccctcactatccacttgaacctctggtgacagttgaggcttagtggtgtcaacagttggaaagtaatgatgttgacaaagaaatgtgaggggtgaggaagtatgttaacaacgcccttcaccataccacatctacctgaccatatttctttatcagagaaaaaaaggttccttgcccagtttcccaaccagtcagtaacaggaccrgaacctaggttttctgattcctggtctcatgctgtttccattgcattgcttctgatgagtcttctataattggattgaattcacagcccccaccatttctaagcagagcccttca

SEQ ID NO: 18483 - DNA, 442 bp, Homo sapiens
agccccacttaataatgtcttcaccttgtggggtacgattttaacatatactatggaggagatacaaacattcagtccataacaacctagtatacacaatctgtggcattgtgttgtataatcgtatcttttgtacttatacctttgggactaaatcttcttttattaatacttatgtgagcttactcatcctcccacagaaagatcaatctgtaaagcagctcttccttcataggaaatgytagatcaatggcttttcctttgaaacccacttaatagcagtcatgtaacatgtaactgttatgtttccatgattactcactgaaccttaactccaaacaacagatacacaatttatgcagaaatcatcatagcaaggagcccatttaatatagttataggtatagatatgagaaaaagactatatgcaatactggcttga

SEQ ID NO: 18484 - DNA, 562 bp, Homo sapiens
acacaaaaattaatcagaaacacagacattgttcttaaggagctcccagtctgtatctgttctgcaaatgaatgaattacaccacgagaggttgagttctataagaaagaatgaatgaagttctggggggtctaacattctctggggactcaagaaaagttttatagaagaaaaaggtaatattttatccgaatcttcaatcttcagatatcctgaattctattagaagttgaagaaactccccaatatttttagtacacaaatattctaaaatggtttcagagtaatatgaaaatgaacatatatttccaaagtttgttcgaaacaaaacaaaacaaaaccatagccattttgaactgagagagtgaggggtgaataatkgctgttattgtatgtgtcaaaaatgggaatgtgtggaatcagaaatatcaaatatcatagaatcagaagtcaaatgataaaaactttcattcaatgagtcattcaactgatatttaatgcatgctgactctgtgacaagtattacagcaggcattaaggatatagatgcatagattaaaaa

SEQ ID NO: 18485 - DNA, 542 bp, Homo sapiens
ccaaagatttggcttaattttagagagttaaatagtagaagttgagattttgcaggagatgcaattgatgacaaggtcaaggtcaagcctatgactgcaaatgsaattggaagtttggattaggatttgttagctcaaaatggcttatagcggtttggtatgcttcatcccatcaccatcccgagaaagtatactttctgtttttctcttacctggaatgtgctcttcttccaagtccacctgtcactctcttattgtaggcttagggcccccctttcccaaaaccatgatgtggccagtgtactgggtttagcctcttgcagtctgtgctcacatggctcccagcacactgccttaaaatgcagcatttgtcttttcatcccaagtgcctagcaccatgcctggcctattggaagtgaagtgatctaacatggaactcagaaatattttacttcctgtgtgatgaacatcataagcatcatagtgccacatcaaggagcagtctaatctacctttttcactcacttcccaacaacttcttt

SEQ ID NO: 18486 - DNA, 542 bp, Homo sapiens
ccaaagatttggcttaattttagagagttaaatagtagaagttgagattttgcaggagatgcaattgatgacaaggtcaaggtcaagcctatgactgcaaatgcaattggaagtttggattargatttgttagctcaaaatggcttatagcggtttggtatgcttcatcccatcaccatcccgagaaagtatactttctgtttttctcttacctggaatgtgctcttcttccaagtccacctgtcactctcttattgtaggcttagggcccccctttcccaaaaccatgatgtggccagtgtactgggtttagcctcttgcagtctgtgctcacatggctcccagcacactgccttaaaatgcagcatttgtcttttcatcccaagtgcctagcaccatgcctggcctattggaagtgaagtgatctaacatggaactcagaaatattttacttcctgtgtgatgaacatcataagcatcatagtgccacatcaaggagcagtctaatctacctttttcactcacttcccaacaacttcttt

SEQ ID NO: 18487 - DNA, 517 bp, Homo sapiens
tgtgagtttttctttttttgcggggggtagggtgtctcactccttttgcccaggcttgagtgcagtggggtggtcacagctcactgcrgcctcaattctctgggctcaggtgatcctccccccatcagtctcccaagtagctgggactgcaggagtgcatcaccatacccagctaattttttatatttttagtagagatggggcctcgctatgttgccctggctggtcttgaactcctgggctgaagcaatccgcccacctcggctttgcagagtgttgggattacaggtgtgagtcaccatgcccagcaatgagtttttgtttttgttttttgtttttcttaaacaaggcttttcttttatctttaaacactttgttggttctctctgtttggtagttgtactatgtctaagttgtttattttgttaggagcattttgttgtaatcatgaaatattttgagattcaatacttgtgtttattcagtcataatattcttattatataatacttcctga

SEQ ID NO: 18488 - DNA, 517 bp, Homo sapiens
tgtgagtttttctttttttgcggggggtagggtgtctcactccttttgcccaggcttgagtgcagtggggtggtcacagctcactgcggcctcaattctctgggctcaggtgatcctccccccatcagtctcccaagtagctgggactgcaggagtgcatcaccatacccagctaattttttatatttttagtagagatggggcctcgctatgttgccctggctggtcttgaactcctgggctgaagcaatccgcccacctcggcttygcagagtgttgggattacaggtgtgagtcaccatgcccagcaatgagtttttgtttttgttttttgtttttcttaaacaaggcttttcttttatctttaaacactttgttggttctctctgtttggtagttgtactatgtctaagttgtttattttgttaggagcattttgttgtaatcatgaaatattttgagattcaatacttgtgtttattcagtcataatattcttattatataatacttcctga

SEQ ID NO: 18489 - DNA, 538 bp, Homo sapiens
caggaaatatgtaaaaatgaaatattcccaaaagtacaccttaaaattcctgtgtataggcagcaagagattatctttgacattttcccttgaattttaatgaaactatttatgaaatgtgctatgtatctccagcattatttagcagaatgcacaaaacgtattttaaactcttaggttagttctcagaaaacttataaagaaaacttataatggtgaaatagccttcaatgatttctaagattcctttccttattagtactttaaatttcacaaatatgcagctatagatacagatgtagatkatttgggacacttggctgaaaagatgccaatcttagtagaagtcatgaaacataaactttcctaacatcaatttattgatctatttacttaacctctttcttgaaaaatagagggtgtttgcaaatatctgggtaaagatggctaaaaatttcttgcttttccccttactgagaagtagggtctaattccactcctaaatttcagccagccttagctacctgcttgaccaata

SEQ ID NO: 18490 - DNA, 507 bp, Homo sapiens
tgtccaacgtggcctccgcccagggaatgccaccaacagccgcacctgccaggtgacttcacacagctgctgcctccctctggccatcagtcatcagtcagtggggccaggagcagygagcaccgtgtatggggtatggaggtggcttcaaacccaggccctggtccaagggccctcatgtctgacacaggcgagctcccagcaccctctgccttgtcaggaagtgtgtgacatgccttcctggcccacagaggtgggcgaagtgtgcttacctcagcgtgcccatggccgccactcactgttcacccgctcacactggatccccgcccagaaacacaccaggccagtcccaccccactcagaagtgctgctggtgcctcagggccagggagccatgtccaggccccagccagccccggggacctgacccagcccctccccctgagcccagggcaccgctgcacagccacctgcatctcccacccatggcatctcgcaggtgacctg

SEQ ID NO: 18491 - DNA, 507 bp, Homo sapiens
tgtccaacgtggcctccgcccagggaatgccaccaacagccgcacctgccaggtgacttcacacagctgctgcctccctctggccatcagtcatcagtcagtggggccaggagcagtgagcaccgtgtatggggtatggaggtggcttcaaacccaggccctggtccaagggccctcatgtctgacacaggcgagctcccagcaccctctgccttgtcaggaagtgtgtgacatgccttcctggcccacagaggtgggcgaagtgtgcttacctcagcgtgcccatggccgccactcactgttcacycgctcacactggatccccgcccagaaacacaccaggccagtcccaccccactcagaagtgctgctggtgcctcagggccagggagccatgtccaggccccagccagccccggggacctgacccagcccctccccctgagcccagggcaccgctgcacagccacctgcatctcccacccatggcatctcgcaggtgacctg

SEQ ID NO: 18492 - DNA, 1275 bp, Homo sapiens
  misc_feature (1)...(1275): n = A,T,C or G
atttgggggaaccgtgccatgcgcccctcagagcaggagcaatcttgagaaggcgcaggcagagagcagcgggcggcttctccagagcaagtaattaagtcccgtgactccctagaactcagtgttcagttctgaaaaaaaacttcgggttcaaactccctaagtctatggtccttgcatcagacgcctcttccctgggattgctgggaactgaggaaggaagggcgctgcagagctaacgatagcaaggggctcagagctggccaccccagctccctggtggcaggagagctaatgtgagctgatggaaactgagaagcagcagataaaggaaaagccatctgccctgcctctattgcctaaaagtagaacataaatccgcaaaagtgaccatttccctctccaacagaaaggacagaaattcatcaccagggaccccaggccctcaacagcctggaaccagccccagaggcatttgtgtggcaaacctctgcagccccggcctcccttcctgtagttgccccagagaggcctcctcaaaacgtgtttcctgggaactcaaagtcctttgctttggtcttgcagcttcttggaaaaygattgttcttttgctgaggggctgtgcagcagagttctaacgatccattcgagtttccatcttggggcgctcagggggctccctcgtggaagcaggagtccaggctaataacccctgtgagttttcctcctgtgactctgccttttgtcagtctaatttcaatgccccagaaaattaatctaagatgcagggagagaaaaggtttcttcttcccctacagatggatgtcagtcatctctattcagccaagaagtagttaacctaaacaatgaaaacaccaccggttccagtagagacttgagactatctgatgagagttatgtgtctctgggaggaagttttcaatacagaaatggatttattttatgaaacttaaaagactaataatctgcaagcctataagaatgttttaattctgtaaaatattttacaataagaaaagaaactagagactaagcaacatatgatcagttaaacttgaataacaatatattaatattggtcaataacaaggaatgatctctctagtaactgccgtttccaagcatagtagagaaggataagcatgtttctttnnnnnnnnnnnnnnnnnnnnnnnnnnnnnnnnnnnnnnnnnnnnnnnnnnnnnnnnnnnnnnnnnnnnnnnnnnnnnnnnnnnnnnnnnnnnnnnnnnnntc

SEQ ID NO: 18493 - DNA, 528 bp, Homo sapiens
cgggagttgccgctcctcagtggggagaggggcacacattacccgttggatgctgtgattgttgagttttcaggttgacttttcttttcatcgcttgtattgatgtttccattatctctgctgctcgggcaatcactccgcttgttggctcaggaagtttggaaaaagacagaagctgagctggagaaaggattcctcttttcttgaggtttctatggcacataaagaagatataaaatagattatttgtctatggtakctttggtacttaattactaattaattaagcagacatttattgagtaactactgtgtcccagacaatgtgacaggcactgcggggtgtgcacaggtaaaacatgtgcagttgctgtccacggggtcactgggtttaggaacaggaatagggtgtaagtgatgcatcagtattgaatgatgaggaaaatggcacagacttgccctttacaaaactgccaaatcagaatgaattggattctcataacaattgcggacaggccatcacatcca

SEQ ID NO: 18494 - DNA, 550 bp, Homo sapiens
tggaactcccaaccaagggctttttctgctatctatggttcctaatcttttctggggtcatggcctctttgagaattagatgtaagttgtagaccctctctgcagaaamatatacacttaccctccaaattttgcctgtagtttcagggggtcagaggtctttggagcgcacgtctctgtaggaacacaggtcaaggattcctgtgttacccaagagctggggagttttggaaggaagtcaagtggagtctacagagaggagcgagctcagagcagggccggtacgcaccggatcatgtcttcaatcatcttgccaatggaaatctgcagagtgcccagcgactcgtgggccggcagaatgtaggccaggcgggtgaagctgagcatgctggtggcagtgaagagcacctcagccaagaactggggatcctcggtgtgccactcgcttcattctgcacggggtggaatgggggctgtggctgggagccaagagccaagaaagaagaactgggggattcagggctgaattgaagggacactcaccagccat

SEQ ID NO: 18495 - DNA, 485 bp, Homo sapiens
agatccggagctcagaaacagcacaagtgtctgcactggccaaggtggtccaaagggctgcatggaagtgggcactcttggccaggtcctggggggtgggaaagagtgtgtctgggtgagctcaggcttttctcccacccctcatttcctgttccttacttggcctggcatgccagtttcaatgagacgtttcagtttctgttctggaccatgttcggtatggaagagcacagcgtggtggacgtgcctcagtttctggtgcccgagtttgcaggccgggccctctatggcatctttaccatcatcatggtcattgtgctgctcaacatgctcattgctatgatcaccaactccttccagaagattgaggtatgtaaacagaggccagtttaggccagggmcaagaagggaaaaaggaatggagaggaatagggtgcaaagaggcaagacatgtggcgccatgctctgcctccactgttgtcttg

SEQ ID NO: 18496 - DNA, 538 bp, Homo sapiens
aaggagtatgtgttgcaacacatcagagctccccccacatcccatatatcagccaagcagatatttaattttgccaataatttatttcatcggcttaaatattgtccatgcctaagggcctctttgaaaatatgaacatccctaggcagggtggaccactccccttaaaataaatgtgatagcaaaatattttcttcctaggcaggaaggkttcagaattgatttggaaatcagagatttctcaaaggaataattaaatctgttcacagtaggagaaaagtaacatatggatattagtgatttcgtttacttttattaagaaaagagactattagaaccatgccctgggaactcagggtgtaaaagacagtgtcacctcacaattctgcagaggacgacccctaggcaaaaatgttctactaaataggacaggtttgagtacaagggagcactggatgatgaactagtagaatgtccaagttggaagaaaatccaacccttccttttgtagaagcagcagcagaggccaggggcggga

SEQ ID NO: 18497 - DNA, 518 bp, Homo sapiens
taattctttacacatatttccaacttgctttcgaagtgttgtgctgatttatgaagtcacccctgacgtagcagatagtctgcttcatagagccttttccagctctgggattgtgttaaatcygtaaattaacttggaaggaaaaaagtatgttactctattcggtcttgcaattaaatatatctattgttctatttgttactgctgcagttattattttgatatatatgtatatgaattataggtattatacatacatacatatatatgttagatgcaggcaataagaggattcctcaggcctttctcttctctttgcttttaatgttcttccttacctgcttttctgtcttctcccagcccagcacactctccaggcctcatctgcctgcacacccacataatatcttaaaaattcacaaaggtaataataaaacacaaaaactgagtggcagagatagcaagtgcactgaggcttgaataaaactctgtgctagagaccaagtcactggattcac

SEQ ID NO: 18498 - DNA, 518 bp, Homo sapiens
taattctttacacatatttccaacttgctttcgaagtgttgtgctgatttatgaagtcacccctgacgtagcagatagtctgcttcatagagccttttccagctctgggattgtgttaaatccgtaaattaacttggaaggaaaaaagtatgttactctattcrgtcttgcaattaaatatatctattgttctatttgttactgctgcagttattattttgatatatatgtatatgaattataggtattatacatacatacatatatatgttagatgcaggcaataagaggattcctcaggcctttctcttctctttgcttttaatgttcttccttacctgcttttctgtcttctcccagcccagcacactctccaggcctcatctgcctgcacacccacataatatcttaaaaattcacaaaggtaataataaaacacaaaaactgagtggcagagatagcaagtgcactgaggcttgaataaaactctgtgctagagaccaagtcactggattcac

SEQ ID NO: 18499 - DNA, 528 bp, Homo sapiens
cataactggtcttcaacttggaagctagcatacacatgaccttgaggaatgacccatgatagacggctgtggaaagacaagggcaaaaaggccaaaaaggcaatgaatgttttatacaatgactctctcaaaacaggtgaagagaggcatgagrtgaaacatacaacgctattagggaatccaggctcgggggtgagaagcacattctcaccagtgtgcaagcagggtggtgaagatacaggcatagagagagacaaagaagaggtgcatgacaagctagcgggagagaaaggacagatattcccaaggaaacctaaagaaagctactctgggcaagtcatctccaggcctcagttttcttagcttcaaaatgagaagagtggattatttctcagtgttatagcaactcacagaaactaactctagcaggccattgcaaaagcaagaatgtactggaaagatgctggaacatgtagaatccaaagaagggtggaaaactaggccacagaagcaacagagaccagaaag

SEQ ID NO: 18500 - DNA, 528 bp, Homo sapiens
cataactggtcttcaacttggaagctagcatacacatgaccttgaggaatgacccatgatagacggctgtggaaagacaagggcaaaaaggccaaaaaggcaatgaatgttttatacaatgactctctcaaaacaggtgaagagaggcatgagatgaaacatacaacgctattagggaatccaggctcgggggtgagargcacattctcaccagtgtgcaagcagggtggtgaagatacaggcatagagagagacaaagaagaggtgcatgacaagctagcgggagagaaaggacagatattcccaaggaaacctaaagaaagctactctgggcaagtcatctccaggcctcagttttcttagcttcaaaatgagaagagtggattatttctcagtgttatagcaactcacagaaactaactctagcaggccattgcaaaagcaagaatgtactggaaagatgctggaacatgtagaatccaaagaagggtggaaaactaggccacagaagcaacagagaccagaaag

SEQ ID NO: 18501 - DNA, 528 bp, Homo sapiens
cataactggtcttcaacttggaagctagcatacacatgaccttgaggaatgacccatgatagacggctgtggaaagacaagggcaaaaaggccaaaaaggcaatgaatgttttatacaatgactctctcaaaacaggtgaagagaggcatgagatgaaacatacaacgctattagggaatccaggctcgggggtgagaagcacattctcaccagtgtgcaagcagggtggtgaagatacaggcatagagagagacaaagaagaggtgcatgacaagctagcgggagagaaaggacagatattcccaaggaaacctaaagaaagctactctgggcaagtcatctccaggcctcagttttcttagcttcaaaatgagaagagtggattatttctcagtgttatagcaactcacaraaactaactctagcaggccattgcaaaagcaagaatgtactggaaagatgctggaacatgtagaatccaaagaagggtggaaaactaggccacagaagcaacagagaccagaaag

SEQ ID NO: 18502 - DNA, 996 bp, Homo sapiens
atatccgaaagtcaagattttgataacatgtcaaacaacccaagcaatttcaattccagaaatattgtgaggcaaatatgcaaaaaaggttcatttcaggattcattacgggttgtcaaaagacagaaactaactcaaagatccttcaattgggtgttgttattgaattaaattcctaaacagcagggaactgtgccatcatttaaaaaaagatcaatatttaaattaacataagaaggtatttataatataggaaggttaagaagcagttttacgatacaaaatacataatagaaatgttggggagaaacgaaacaaacgttctaggccttgatctctaacacaatcatcatgccctagagaatctgattttggaaaatcactcgttgaattcgcttactagtgaaacgacagcagaagcgtgcaactcaaggaagacgaggaatgagagtgatgggaagtatgaattctaagaaatcaaagggggtaacactctggagtgtaaggcagggcttaacactccrgaaacagaataatggaatccctagtgtacacctgattcactgtgtggtacaaaatttccacactgccttgttcgagaaaatgaaaaagcaggggaggacaggaggaccaaattcaaataaataatacttaggttccataattatctcatttcaccattagacagggtttcagaattgtcttatcaaaatggaaggcagaacatgggctactaaaaataaataactgtaattaaaataaacagattatttgtttcaaaatttccttcccaaagacatttgtggagctaaggtttactcaaatttttacttaatctccatagtgtgagtcaaacaagtaagaattagttaagtttactatctaatagtgagaataggaaagtagtttctgatccaaattatagccaatgctttaaaaaaatttatctatgaaaattttagttctataatggtttctccttgccatccatcatag

SEQ ID NO: 18503 - DNA, 533 bp, Homo sapiens
ttttttttttttttttgttgctgttgttgagatgcagtctcactctgttacgcaggctggagtgcagtggcacgatctcrgcttactgcaagctccacctcccaggttcaaacaattctcctgccgcagcctcctgagtagctggtattacaggtgcccaccaccacgccaggatgatttttttggattttcagtagggactaggtttcaccatgttggccaggctggtgtctaactctagacctcaagcgatctgcctgccttggcctctcaaagtgctaggctgcaaacatgagccatcatgcccagccgattaaatctattttcaacagctttcaaatctagtctgcaaattgcaaattttgaagagacagcaaataagacctttgcaacaagaattttcaaagtaattcaacatttttaacgttcgctttggcttacgttataaccactactacatgcccacattctggtgaacattttaggtattttatgggttctatcattgcatgaaactatggaaatatatcttt

SEQ ID NO: 18504 - DNA, 533 bp, Homo sapiens
ttttttttttttttttgttgctgttgttgagatgcagtctcactctgttacgcaggctggagtgcagtggcacgatctcggcttactgcaagctccacctcccaggttcaaacaattctcctgccgcagcctcctgagtagctggtattacaggtgcccaccaccacgccaggatgatttttttggattttyagtagggactaggtttcaccatgttggccaggctggtgtctaactctagacctcaagcgatctgcctgccttggcctctcaaagtgctaggctgcaaacatgagccatcatgcccagccgattaaatctattttcaacagctttcaaatctagtctgcaaattgcaaattttgaagagacagcaaataagacctttgcaacaagaattttcaaagtaattcaacatttttaacgttcgctttggcttacgttataaccactactacatgcccacattctggtgaacattttaggtattttatgggttctatcattgcatgaaactatggaaatatatcttt

SEQ ID NO: 18505 - DNA, 533 bp, Homo sapiens
ttttttttttttttttgttgctgttgttgagatgcagtctcactctgttacgcaggctggagtgcagtggcacgatctcggcttactgcaagctccacctcccaggttcaaacaattctcctgccgcagcctcctgagtagctggtattacaggtgcccaccaccacgccaggatgatttttttggattttcagtagggacyaggtttcaccatgttggccaggctggtgtctaactctagacctcaagcgatctgcctgccttggcctctcaaagtgctaggctgcaaacatgagccatcatgcccagccgattaaatctattttcaacagctttcaaatctagtctgcaaattgcaaattttgaagagacagcaaataagacctttgcaacaagaattttcaaagtaattcaacatttttaacgttcgctttggcttacgttataaccactactacatgcccacattctggtgaacattttaggtattttatgggttctatcattgcatgaaactatggaaatatatcttt

SEQ ID NO: 18506 - DNA, 529 bp, Homo sapiens
ggaaaaatgttggaatcaaagggtgttaggatatctgcacaagtaaatggctcaacttcaatgatcgcaatttctataaactcaaaaagyataaaggggaggaaggtcatgtctatgtctagttagcgacctttcataacaactgaaaaactggaacctcttgcactgcagccaagtccatagcaataaaattaacctccattgcctcttctctgtcagggcagagcaggaggctggggacaggagatgaggtggggagccattcttagacccaaataaaaaagttatcgctttccagaaatattataatctgccacttaaactagaaaattcatacttaaagagaaaatctgaatctgccttctgaaaagtgcagattccttgccagaattatctgactttcatgccagattcaggcacagacatcttttatctgctggatttatcatgatctatcctggagttctatctaaggcctcatcaaccaccaaatcacgttcttattgttcacagattctcagtgtttgca

SEQ ID NO: 18507 - DNA, 634 bp, Homo sapiens
aggccacatgtcagaaaaaaaataaatcgccacccttttctcaactatttccctaatcccttcatcttcacacaaaaaagaagaataaacacagacaactcagcaaattggaatctttaacttttgaatacagttatttttcccaacttgattttcaagtgcacgacccggtaacactggctatccagatatttagcaaataatccagataagatacatatacataaatgcatcacatttcataacttaaaaattgctgctataatatgctaattttcctaatatatgaatatataaagagcttgtcactggaagtgtccgtacataggcaggtcaaccacttgtcacgcaggactataaaagagataattcaggactcaaaatggacacaaagagcattggacttcctgctatctgagatacattccagcctaagacagtggagcaccattgtttaaaagaatgcaaacttttgattacgataaccctacataccaattctagatttgccacttctttcctcagcttatgttttctgatgtgtcaaatgggagtaacacttaawatagttgttaaaattaaatagaacagtgtaatttgttagcatagtgtccagcatgtactaagagttcaa

SEQ ID NO: 18508 - DNA, 634 bp, Homo sapiens
aggccacatgtcagaaaaaaaataaatcgccacccttttctcaactatttccctaatcccttcatcttcacacaaaaaagaagaataaacacagacaactcagcaaattggaatctttaacttttgaatacagttatttttcccaacttgattttcaagtgcacgacccggtaacactggctatccagatatttagcaaataatccagataagatacatatacataaatgcatcacatttcataacttaaaaattgctgctataatatgctaattttcctaatatatgaatatataaagagcttgtcactggaagtgtccgtacataggcaggtcaaccacttgtcacgcaggactataaaagagataattcaggactcaaaatggacacaaagagcattggacttcctgctatctgagatacattccagcctaagacagtggagcaccattgtttaaaagaatgcaaacttttgattacgataaccctacataccaattctagatttgccacttctttcctcagcttatgttttctgatgtgtcaaatgggagtaacacttaatawagttgttaaaattaaatagaacagtgtaatttgttagcatagtgtccagcatgtactaagagttcaa

SEQ ID NO: 18509 - DNA, 553 bp, Homo sapiens
cacaatgaaagtcacaacaacgctggacctggagaccacatgaatattttactttgccacacttgttggaggtgaagaaggcagcagtactagttcagattagccttatcatgttgtactgtttcataattcaaagaaatctcgttgtgttgagtaacttgggattcagcaggaattcaacagtacctgttgtctagaataagaatataagtcaaaggaatctctcctttrccctctcttatgaagtttagggtgtaacaactgctttctgttcattacagctttgtttcatttttccagaaacactggttagatctgttttaaatcagctgccaatcagcttagctacaactggtaaacaatgtcgttctgctgaggcctggttagacttctagaggaagacgagcggcagctcagctcggaagaactggtttttattgttgtttttgtcattgtagttgttattggtgtttgtggtgtgtgtttgtgtatgtgtatgtgtaggtatggcagtgagaatttttaaagaaattttataagaaatataaatttt

SEQ ID NO: 18510 - DNA, 553 bp, Homo sapiens
cacaatgaaagtcacaacaacgctggacctggagaccacatgaatattttactttgccacacttgttggaggtgaagaaggcagcagtactagttcagattagccttatcatgttgtactgtttcataattcaaagaaatctcgttgtgttgagtaacttgggattcagcaggaattcaacagtacctgttgtctagaataagaatataagtcaaaggaatctctcctttaccctctcttatgaagtttagggtgtaacaactgctttytgttcattacagctttgtttcatttttccagaaacactggttagatctgttttaaatcagctgccaatcagcttagctacaactggtaaacaatgtcgttctgctgaggcctggttagacttctagaggaagacgagcggcagctcagctcggaagaactggtttttattgttgtttttgtcattgtagttgttattggtgtttgtggtgtgtgtttgtgtatgtgtatgtgtaggtatggcagtgagaatttttaaagaaattttataagaaatataaatttt

SEQ ID NO: 18511 - DNA, 561 bp, Homo sapiens
ccgtccttctctcctttagagggttagtctgctccttgatgtggcaatcttgcaggggcaaattctgcctttgtgaaggaggcctgaggttgttcagtactgcctgtgactcattatgtgaatctaattttgatttaggtcaagaatgctaacagtgttaggaagttcactgtagcctcacatccaagccaacttctccagttcagctttactagtaatagtgctggtatttcactttttttctgtctgatgccttgcaatgttggttctgaacttggtcctctaaacccacaacagttggtgattttctgtctcctgccacagtgtctcttagtcattctatctcacccctttaccttgtcctcagccatagagttttttcttttcccactctgtgagtatacaggtacagggagatctgaaacccttccagactggtggatgagctctgcctgatggttatgcggcaggcactcctctcaaaagcatttcatatgcctacttgttatcttttcattagaaataaatttagttrggaactctgtgcctggcactctcatc

SEQ ID NO: 18512 - DNA, 540 bp, Homo sapiens
ttttgtaggtgaagattcattttttcttcaaatataaaaaagtttgaattctgtctgcrtgccctagaaaataaaactgtggacttgtcaactcccattgttcttttttttttttgagacagagtcctgctctgttgcccaggttggagtgaagtggtatgatctcagctcactgcaacctctgccttccaggtttaagcaattgttgtgccccagcctccccggtagctgggattataggcccatgtaaccacacccggctgatttttgtatttttagtagagatggggtttcaccatgttgcccgggctggtcacaaactcccaagctcaagtgatctgacttcctcggcctcccaaaatgctgtgattacaggcatgaggcaccatgcctggcccccatcattccttaagcagaaagatggagcagccgggccagggcctgaccacgctgtcggttttggttccttagtgtgaggagtcgggtgctggcaacacaagcgtgtttaacatgctcagtgttatgaaagcgaggtccaga

SEQ ID NO: 18513 - DNA, 541 bp, Homo sapiens
tatgatggcagcaatggaaatgaatcaatgaaatatccttaaaaaaaagatttccaaagaaataagatcaaatgagcaaattctcagatgttgaacagaaataaattctggtgcatcatccaaaaagatcaaagaaaaagctctctctaaagtaaacagagtgatatttttgtttgggtgccataacttttctggtaacttgtcagtcttaataagaaggtgtaaaaatctctctgcatgacacagaaacatcattcctaaacctgaagcaaagtcacgttgagcagaaaacagttttaaaagaactcaaagaaagatcagaaaaaattgcctatatcagtgttcaaattctaagaagcaaaaatgttttaagactcagggatattataattttcagaacatttatcattttggtcaactgaaaattttcataaactatgagtaygcaattgctcccaagcatatctcagtgccaaccaaattctactccaataattcagaaatgctacgcattagattaaactccaagaacaaaaaatta

SEQ ID NO: 18514 - DNA, 836 bp, Homo sapiens
atattgtcattaaatcctcacaacaactccttttaaaggggtggaaggtagggttcaggaaagtaaaaaaaaaaaaaaaaaaattaactatgtttgtatagttgattaaatgataatgaaaagtcaatattcagatccagttctggctttaaagaactatcttttatctagttagtgatttaagaaaggttttataaagaagcagccatttgagatgaggcttgaattatgggtaggattagataaattggagggagagagggaagtgtattcccccagttttaaaattcatacgcaaagtgcagaggtaagaaagaacagaatgagttcaggtagtagtgaatagccaagttagacaggttcatagtgtgtgtgtaatgagctaataatttagtaataactgtcttttattgtgtcagaccccgttttacatacttttatgtatactgtctcatttagtgctcgtggcaatgctgtgaggtaatatatcagttaacttttattgcataaaacgccaccttaaaacatagtggcttaaattagctcacaatctgtgggcttggctcaactgagaggagctttagttggtstggcctgggctcactcctgcagctgtagtcagcttggttgactggagagaatgatctaagacagcctcagttacatttctagtgatgggcagctggagggcaaacatagctcctccacgtggctactccagagagctagctcgagttcattcacagggtggtctcaggttttcaagtgtgtaaaagaattccctaggcttcttggaggcctaagctcataaattgcagaagttcacttccacatat

SEQ ID NO: 18515 - DNA, 518 bp, Homo sapiens
aagaaaagctaggaacagagcgagaccccatcttaaaaaaaaataagaataagaataagaaaagccaagggaagattttcttattgtgaaaggaagaactacataaatctgcttcgatgcctgccttctaattatcagctaatctacttccaatataagttatgttatgctataacttagtgtgtgttgatttaatattttatttacctcatttagatagcctcctaatatccagtttgtctctctagtgttctttcatcattttattcacatctaattcaccctgcatattgttagcagattagtctaaaaattaataaataaaataagcaagcaaaatttttgatcacttctctttactgtttaagcaaaaacactactatcagcatcaaccagccaaccagccaaccacccaaccaaccaayaataaacacaaaaagaaagtctcagctcctaggtttggttttcaaacacttacaattttctgtctaagcaacttttcaaccagctttactacc

SEQ ID NO: 18516 - DNA, 559 bp, Homo sapiens
tgactaaactacagtgtaaattatgacaggcattcaagagtcagacagtatcagggctacacctctagctgcaaaccaataaatttgttctgttgcagaagtctaaatgtrtaggataataactctatttctcagtccagcttcatggatcctgtagaaaaacaatggttcagctatttgtctctttatacagatataagtcttcatcattatcatcatgatcattattttatcatgattacttgattataagctccatgagggcagggatttttctctattttttcatgtagaaatacccagtcactagaaaagcatttgacacataaaatgtactcatgtactcagtgtaaatgctatacacttcaaagtttattatttgcatatgtattttattcacactttcagtaagtatttgtggagcatttcctgggtgacatacagtattctaggaactgcagacaaaatagtaaatagaaaatagaaggtctttgccttcatagaacttgcttcttaaagcagtagttctcagattttgctgcacattggaatcacctaa

SEQ ID NO: 18517 - DNA, 747 bp, Homo sapiens
tggacaggtaattgtctatttttatatgtaatctatctacttaatttctattttattacaatctctatctctatatagcgatttgccattgaagaggaaactactgacttttaaaattctttttttttttttttgagatggagtctcgctctctcgcccaggctggagtgcagcggcgtgatcttggctcactgcaacctccacctcatgggttcaagcaaattcttctgccacagcctcccgagtagctgggattacaggtgcccgccaccatgcccagccaatttttgtatttttaatagagatgggatttcaccatcatggccaggctggtctcgaactcttgacctcgtgatccacctgccttggcctcccagtgggctgggattacaggcgtgagccactgtgcccggctgayttttaaaattctaattgacataaattttaaagtttactatatttttcatttgcaatcaaagcttatgtaacttttataattaaaaacattaaaaggtagtgatgtgctatactcttcaaatactgcattttataaaactatctgatatatataataaagttataaaacttgttcaaaaagaattaattcatcaaaatttaactagttacatgtttttaaagtacatggtgtttcagaataattctaagcagagatgtgcaaagtttaagacaattttaaacttattaagtgacttaaaacataaaagaaataaatggaattctcaggtt

SEQ ID NO: 18518 - DNA, 1429 bp, Homo sapiens
acttctgtctcccaggtaaaagtttttatttgcaccctgsaagatagttaaggctagaattaaaatcaaaggtcctcaatctttacttaaattataatatctgaaaaatgtcatacgcaaatgacgtacatccaaaatgcttcctaagccaccattcctcatctcatgagactcatcaggctggttggactctcgctgttctacacgggacagcacagaaggaaaacgcacacacaggagcagatgaaggatgggctctgtgggctccgagctggggttttcgctgtctcttgggacactgctctagaagaatttccagtgcacatgaacacagatgacttatcagagaagcaaaacacagcaagcggcacaacaaagcgaagccagaggcggttttgcagaggaagccaacgagtgctctaaggtgcagagcactggactggagcatggccatcctcagcatcggcaccagctccaaggcaccagccctcccctcggccttactgaaatccactctaaagaagtcatccaagtaaaaagccaattcttaccttatataaaaacagaaatcccaaaccatctgggtctctttcaccaagctatctccatattctttaatttttccaaaatcagaccaggcatggtggctcatgcttgtaatcccagcattttgggaggccaaggtggactgcttgaactcaggagttcaagaccggcctgggcaatacagcaagatcctgtctctacaaagaataaaaaaatttgccaggcatggtggtgcatgcctgtagtcccatctactaggaaggctgaggtgggagggtcgcctgagcctgggaggttgagactgcaatgagccatggccacgtcacaccactccactccagcctgggcaacagggtgagaccttgtttcaaaaataaaaaataaataaaaaataaaaattttccaaaatcgcgtttccccccaattctagaaataatatctactgtaagcaaggaaaaatacagaaaaataaggttttgcctataatcctatgacctgtgagcagtaactgttaacatttatatattccctctactctcttttaaaaatgtttacaagggaggctgaggcaggagaatcacttgaacccaggaggtggaggttgcagtgagctgagatcgcgccactgcactccagcctaggcaacagagcaagactccgtctcaaaaataaacaaacaaacaaaagtattgacataatttgagaacacagtgcatatcctactttttcatgcattaaaataaatacatctcctttatgttattaaaaactattcataaatgtaagtgtaatgtatatatatggaattctctcttactgacacatgtctgatgcagaatgttagtataacaccctgaccaccgacttagtgcacaaagcctgt

SEQ ID NO: 18519 - DNA, 1429 bp, Homo sapiens
acttctgtctcccaggtaaaagtttttatttgcaccctggaagatagttaaggctagaattaaaatcaaaggtcctcaatctttacttaaattataatatctgaaaaatgtcatacgcaaatgacgtacatccaaaatgcttcctaagccaccattcctcatctcatgagactcatcaggctggytggactctcgctgttctacacgggacagcacagaaggaaaacgcacacacaggagcagatgaaggatgggctctgtgggctccgagctggggttttcgctgtctcttgggacactgctctagaagaatttccagtgcacatgaacacagatgacttatcagagaagcaaaacacagcaagcggcacaacaaagcgaagccagaggcggttttgcagaggaagccaacgagtgctctaaggtgcagagcactggactggagcatggccatcctcagcatcggcaccagctccaaggcaccagccctcccctcggccttactgaaatccactctaaagaagtcatccaagtaaaaagccaattcttaccttatataaaaacagaaatcccaaaccatctgggtctctttcaccaagctatctccatattctttaatttttccaaaatcagaccaggcatggtggctcatgcttgtaatcccagcattttgggaggccaaggtggactgcttgaactcaggagttcaagaccggcctgggcaatacagcaagatcctgtctctacaaagaataaaaaaatttgccaggcatggtggtgcatgcctgtagtcccatctactaggaaggctgaggtgggagggtcgcctgagcctgggaggttgagactgcaatgagccatggccacgtcacaccactccactccagcctgggcaacagggtgagaccttgtttcaaaaataaaaaataaataaaaaataaaaattttccaaaatcgcgtttccccccaattctagaaataatatctactgtaagcaaggaaaaatacagaaaaataaggttttgcctataatcctatgacctgtgagcagtaactgttaacatttatatattccctctactctcttttaaaaatgtttacaagggaggctgaggcaggagaatcacttgaacccaggaggtggaggttgcagtgagctgagatcgcgccactgcactccagcctaggcaacagagcaagactccgtctcaaaaataaacaaacaaacaaaagtattgacataatttgagaacacagtgcatatcctactttttcatgcattaaaataaatacatctcctttatgttattaaaaactattcataaatgtaagtgtaatgtatatatatggaattctctcttactgacacatgtctgatgcagaatgttagtataacaccctgaccaccgacttagtgcacaaagcctgt

SEQ ID NO: 18520 - DNA, 1429 bp, Homo sapiens
acttctgtctcccaggtaaaagtttttatttgcaccctggaagatagttaaggctagaattaaaatcaaaggtcctcaatctttacttaaattataatatctgaaaaatgtcatacgcaaatgacgtacatccaaaatgcttcctaagccaccattcctcatctcatgagactcatcaggctggttggactctcgctgttctacacgggacagcacagaaggaaaacgcacacacaggagcagatgaaggatgggctctgtgggctccgagctggggttttcgctgtctcttgggacactgctctagaagaatttccagtgcacatgaacacagatgacttatcagagaagcaaaacacagcaagcrgcacaacaaagcgaagccagaggcggttttgcagaggaagccaacgagtgctctaaggtgcagagcactggactggagcatggccatcctcagcatcggcaccagctccaaggcaccagccctcccctcggccttactgaaatccactctaaagaagtcatccaagtaaaaagccaattcttaccttatataaaaacagaaatcccaaaccatctgggtctctttcaccaagctatctccatattctttaatttttccaaaatcagaccaggcatggtggctcatgcttgtaatcccagcattttgggaggccaaggtggactgcttgaactcaggagttcaagaccggcctgggcaatacagcaagatcctgtctctacaaagaataaaaaaatttgccaggcatggtggtgcatgcctgtagtcccatctactaggaaggctgaggtgggagggtcgcctgagcctgggaggttgagactgcaatgagccatggccacgtcacaccactccactccagcctgggcaacagggtgagaccttgtttcaaaaataaaaaataaataaaaaataaaaattttccaaaatcgcgtttccccccaattctagaaataatatctactgtaagcaaggaaaaatacagaaaaataaggttttgcctataatcctatgacctgtgagcagtaactgttaacatttatatattccctctactctcttttaaaaatgtttacaagggaggctgaggcaggagaatcacttgaacccaggaggtggaggttgcagtgagctgagatcgcgccactgcactccagcctaggcaacagagcaagactccgtctcaaaaataaacaaacaaacaaaagtattgacataatttgagaacacagtgcatatcctactttttcatgcattaaaataaatacatctcctttatgttattaaaaactattcataaatgtaagtgtaatgtatatatatggaattctctcttactgacacatgtctgatgcagaatgttagtataacaccctgaccaccgacttagtgcacaaagcctgt

SEQ ID NO: 18521 - DNA, 517 bp, Homo sapiens
ccagatattttaaattcatttctctaaggtctccaaaagtatgtaaattcctttaaaagaaagggctttgttctgaatcctgctctatgtctaaaacacagatgagtacctgacatactatagttttttttgctttacaaatatttgttctatgaatgaacaaagaaatgaatgaataaatttacaagtgtcaaaagttaccaaatttatcagaaattcttgctaattatttttttttcctatgaatctaacctgttttccccttccgtgaatctaaccctgaagaaagacaagcttggtgccttcatcattatcttctctttatagcaatcactgcagaaggtgttgatagatatttaacacatctttgagatgyatcctggctgtgcccaaggtaacttggaggtggcagcattaatcatttgccatatgataagcttctgttgttcgcttgtggtgcatggagttcataatgcccactttatatgcaatatgcttgaaaaatgaaaattgttga

SEQ ID NO: 18522 - DNA, 647 bp, Homo sapiens
ccaaaatctggaaaactctaggtaaactacaaggtcacacatcaaacacacaactttttttttttttaatgcaaaaagatctcttttaggtcaggtaaggagacagattatttggcatcatatttctattacaagttccagattactcagtggctgtttgttcrtaatccagttatagactggattgatctgtaaccttgagtcattctcctctctcgtgtctcttatgaattctaagttgaaagcctgatgctagggaagttgaaagtgtgagtagttcagtgaaaacaaaacaaaagaaaacaacagaggtaacaacgtacttaagcccccctgtactggggcctctggaaggacactaagagcatgactctgttttgattttaatgtggaggttttccacttactggtgctttcttctctttctcatgcagccgtgaatccatgtgccttttcccgctgcagccatctctgcctgctttcctcacaggggcctcatttttactcctgtgtttgtccttcaggatggagtctgtctcctgatctcctgaattgcttgagaggtatagtatgctccttatgtgagctctgaagatggagctggtcatagtttgtgccaagcagtggaaactctaaaaccaattgcg

SEQ ID NO: 18523 - DNA, 647 bp, Homo sapiens
ccaaaatctggaaaactctaggtaaactacaaggtcacacatcaaacacacaactttttttttttttaatgcaaaaagatctcttttaggtcaggtaaggagacagattatttggcatcatatttctattacaagttccagattactcagtggctgtttgttcgtaatccagttatagactggattgatctgtaaccttgagtcattctcctctctcgtgtctcttatgaattctaagttgaaagcctgatgctagggaagttgaaagtgtgagtagttcrgtgaaaacaaaacaaaagaaaacaacagaggtaacaacgtacttaagcccccctgtactggggcctctggaaggacactaagagcatgactctgttttgattttaatgtggaggttttccacttactggtgctttcttctctttctcatgcagccgtgaatccatgtgccttttcccgctgcagccatctctgcctgctttcctcacaggggcctcatttttactcctgtgtttgtccttcaggatggagtctgtctcctgatctcctgaattgcttgagaggtatagtatgctccttatgtgagctctgaagatggagctggtcatagtttgtgccaagcagtggaaactctaaaaccaattgcg

SEQ ID NO: 18524 - DNA, 647 bp, Homo sapiens
ccaaaatctggaaaactctaggtaaactacaaggtcacacatcaaacacacaactttttttttttttaatgcaaaaagatctcttttaggtcaggtaaggagacagattatttggcatcatatttctattacaagttccagattactcagtggctgtttgttcgtaatccagttatagactggattgatctgtaaccttgagtcattctcctctctcgtgtctcttatgaattctaagttgaaagcctgatgctagggaagttgaaagtgtgagtagttcagtgaaaacaaaacaaaagaaaacaacagrggtaacaacgtacttaagcccccctgtactggggcctctggaaggacactaagagcatgactctgttttgattttaatgtggaggttttccacttactggtgctttcttctctttctcatgcagccgtgaatccatgtgccttttcccgctgcagccatctctgcctgctttcctcacaggggcctcatttttactcctgtgtttgtccttcaggatggagtctgtctcctgatctcctgaattgcttgagaggtatagtatgctccttatgtgagctctgaagatggagctggtcatagtttgtgccaagcagtggaaactctaaaaccaattgcg

SEQ ID NO: 18525 - DNA, 573 bp, Homo sapiens
gaagagttaggcttattcctttactataccaaaaaaaagatcattggagagtccatttttttaaaaagtgcaagttgttaacatggcacaagtttagtacagtttcagcacagaattttgtgcatggcttctgcttgaaaagacttgggactatccaaagaattatcttcaatatatttatatctctataaaatctcaaattgggttcttaagtgcaaaattgagactcaaagtcaattaagacataccttttccttggttaaaaagaaatcagaagatgacctgataatcactacaaaaataatctttcatgaagaagatggtcagaccaaggaagatatcacatttgtgaaaaggagggtattcaaaggccataaaaggcagaacttcaaaatattttaaaaagccraatgaactaaaatgttcacctgtgataaataatagcaacattgaacatttctcaagcacagagagtaatgtcccacccctgtactaagtgtgcacagtgagaaatgtcccacccctgtactaattgttggggattctaaaatgagtaagacaggatccttgatc

SEQ ID NO: 18526 - DNA, 556 bp, Homo sapiens
tttttagtagagactgggtttcactatgttagccaggctggtcttgaactcctgacctcaagtgatccacccgccttgtcctcccaaagtgctggaactacaagtgaragccactgtgcccagccattgttaatgaacttctaatcctcatttttttaaatgtattaatacttaaatactttatacccaagattcttgtgtttcaaggaaagcttttaaatgtttatgtggcattttaatgaaacagagaagcaaaggtacattgtttatttaatctgtttgtcaaagtagatcatattcatcactgctaggaaaatcttaccagattgtaccttttatagaattttgaaaaagcatttattcttccccttccctcacacacttccagccaattattttaaaataatgctaacttctcttttttaaaatactacctacatttgggaaccatgattacaatttcactcagatatttccatcaaatatttctcagtacaccctgacctgatgaaactgaccctcacaacaaatccatcatcaactggaatcaagtgaa

SEQ ID NO: 18527 - DNA, 550 bp, Homo sapiens
atacatagataaatgtaaaagagagtataattgaatgtttgcatataattccttttttttatctgatttgagaaacaactgcataatgcaataattgtaaatttaagttgatggacatacaatgtataaagatgtaatttgtggcaataagagcacaaagaagcaaatgagactatacaggagcaaaggttttgtataccatygaaattgagtaggtattaatctaattgttataaattagattgttataaattaagatgttaatgttaatccccaggacaaccactaagaaaattacatagatatatatatgtgggtgtgtatatatataattatacttatatataattatgtatattatatatttatacatatatattatatatgtgtatatatacacacacatatatatacaaacattttatatataaataaatatgtatttatttatatttgtgggactcccactatgcatttgtaaacgcacatgtatatatgtttactagaaacacacacacatattaaaagaaattacaagtgtattaaattg

SEQ ID NO: 18528 - DNA, 542 bp, Homo sapiens
gaaatagtggaggtcaggggtgggaggtaataagagtgtgctttctaggtagtggtcatctaggggaaagtgagggtagtgtgctttyttttcttttaaataaaaagacttgaattatttgtttcttcaatccacgtgcatatataactttaaaaataaacaccaatgtaatttattaactaagaaataaaaatacttgatgatcaagccagttggaaaaattagatacttagcttttcaaaagactaagaaaatccatcacaagccactgaggctttaaaagcattgcctcaagaaagcaggatttaaaaaaaaaaaaaaaaagctatataaaacacttaagatattgccttcagtcccctgggtggccatccaccttgtttaaggtctccaagagatttaacatcaaggaagctccaacagtatgcactatccaactccctaacctgtctacctggaatctctgccttacaccctactgttaagctgaggccagtctggtttagaaggaaccttaacctctctcccttcaccagagctgg

SEQ ID NO: 18529 - DNA, 815 bp, Homo sapiens
tgagatgatttaaatcttcacagatgattctaaggtacatctaaggttgagagcaatgatttctaaaggactctcccaggtgagcaagggaggaagacgctgatattacatgggggagacaacatcatctctttgataacttgcactatctgtgctgggatagtcacctctcaggtgaccccaatccagtttgttgtcccagttttagcatggaaaatcctatgccgcaggaaacttctcagtcccagccaaataaggaaggttggtcaccctattattgcccacccacattggttcagttcttctgcataatggaaggagggatgagcttccaggcatttcaggaaagagaacaggaaggagctaagggagtgaagagacaaaacagtagaggatggggcctgtggtcccgccatagaagtgtacagtttaaggaccctcctaatttcacggaagttcattaattcaaaaatacctgatacgaataacttttttcctttggaaaactggacaggtgagtttcattccagggttgaaatagtgtgggatactagcaaatctctagaggctgaaggctccttgagatgataagctccccacgaatttgcagatatcttgtaagagggctttggagttggtggaactggtgtggtttgatgccatgattatcttagaccttggagcaaggcagctccaggtgacagctgagccctactgaggaaggagaaaaaggtctggaggaagggaacctaaggctgattcatgctgactagatatcagaggckctccacttttcagcaccttctttttctgca

SEQ ID NO: 18530 - DNA, 670 bp, Homo sapiens
caggagctgtgatcactccccggattttttgcttttatgaaggtgttttttgtgtgaatagttgttcaatttggtgttcctgtggggagagcaactgacgagggcttctagtcggccaccttgctccacttctgtattttttttctcactgttctatcccctgaatctacaacaatgcttggaatgttggaagtgctctatagatacttgttgactgaatcataratgaatgaattttcctagatgacttttagcagtttgtagtcataatgaacatttctaattttaacatttaaacttctagggtaaattatattgtctgaaaggggttttctgtttttctgctgattgacaagtaaatgtcaaatgccaaatatagctatacacttgtattactccagtatcaaggaggtaaagccaaaagccaataaaatggtagagttacatttagaatttggttgctggtatgaaagcacagattgacagtactgaggtatctagttcatgaatgcttctgctggatttccaaaggtcaaccctactcttaaaagcttggtcttccgtcaggggctagagagcaaagagaagtgtgaagtatgcttaagatccattatatcagtagcatctcatatttacacacccagcacttcatttttcatacaataccttt

SEQ ID NO: 18531 - DNA, 1748 bp, Homo sapiens
tataaaacattcaaaatctatatatactacttgctaatatccagctttgtcttatataaaatatatatacatttacgtacatacataccacattttgttcatccattcattggtgtacatttgggtcgtttctaccttttgactattgtgagcagtgccagtaggaacattggtatacaaatatttgttcgcatccctgctttcagttccagaagtgcaattagtggatcatatagtaagtctatatttaattttttagacaaccacaatatatttttgaatgtttttttcttattacaaargtaatgtattcagaattagaaggaatgtagaaaataatgagaagtacaaagaaggagatgaaaatcacagtctgatttctcatgaatgccattaacatttgctatttttgattgtcttgtttaatgtgcataaacatatttgcaaaattaggattgaagcatgtatacaaatttgtctcctgcattttaaaaattgagcattgtactatgaatattttcctaaatcataaaacagcctatcaaagcacgttttcttagctgcttaatatgatgcatgatatgtatatctaacataaatatccagtaataaggaaatgatggattcataaagaagaatgttttccagtcactcaaaataatgttctcacaggctatctcgtggcattagaaaattctcacaaaacataatgttaggtcaaaattcaggagatgaaactatattcctaatccagtttgtacaaaagctctcagacaggcaggagcttagcctaagagcagtgtaaactattagagggattttagtaggggaatgacataccagattttcattttgtaatcttaccctgggctgcatgcagtggctcatgcctgcaatcccaacactttgggaggccaaggcaggcaaattgcatgaccctaggagttcaagaccagcctgggcaatatgacaaaactccatctctacaaaaaatacaaaaaattagctgggtgtggtggtgcatgcctatagtcccagcctacccagaaggctgaggcaggaggatcacttgagcccaggaggtcaaggctgtagtgagctgtgatcatgccacagcactccagcctgggcaatagagtgagaccctgtctcaaaaataataataataataaaataaaatcttaccctggctcccagttgcaaagagctagaagcagatatagggctgtcaggaggtttttgatagttcgggtctggggtagagttgttaaagtgatgagaaagactatcactgaagaccaggcttggaggtggagtaaacagtctgtggaatggaatgaatgtggtgtgtgagaaaagggaggtgtcaaggatgttcctaaatgtttgctttttgcgacagggtaaggaacactgctggagggattaaaatttagggatgtggaagatgttgggatatagaagtttgacatactagaaagataatccaagtagagatgtcaaataggctgttgaatttaaatcccaatgttataaatatggatgtgcccaaatgagctgagagaaaagtccacccagatcctaacagagggtttctctaagttgtcagagatttttattatcttttagtatagaattttatatttcctaaattttctataatgttgatgtgttatttttataatcaaatttaaatgttgctaacatatattcatcatagcattctttatactggtttaaaaatggga

SEQ ID NO: 18532 - DNA, 1748 bp, Homo sapiens
tataaaacattcaaaatctatatatactacttgctaatatccagctttgtcttatataaaatatatatacatttacgtacatacataccacattttgttcatccattcattggtgtacatttgggtcgtttctaccttttgactattgtgagcagtgccagtaggaacattggtatacaaatatttgttcgcatccctgctttcagttccagaagtgcaattagtggatcatatagtaagtctatatttaattttttagacaaccacaatatatttttgaatgtttttttcttattacaaaggtaatgtattcagaattagaaggaatgtagaaaataatgagaagtacaaagaaggagatgaaaatcacagtctgatttctcatgaatgccattaacatttgctatttttgattgtcttgtttaatgtgcataaacatatttgcaaaattaggattgaagcatgtatacaaatttgtctcctgcattttaaaaattgagcattgtactatgaatattttcctaaatcataaaacagcctatcaaagcacgttttcttagctgcttaatatgatgcatgatatgtrtatctaacataaatatccagtaataaggaaatgatggattcataaagaagaatgttttccagtcactcaaaataatgttctcacaggctatctcgtggcattagaaaattctcacaaaacataatgttaggtcaaaattcaggagatgaaactatattcctaatccagtttgtacaaaagctctcagacaggcaggagcttagcctaagagcagtgtaaactattagagggattttagtaggggaatgacataccagattttcattttgtaatcttaccctgggctgcatgcagtggctcatgcctgcaatcccaacactttgggaggccaaggcaggcaaattgcatgaccctaggagttcaagaccagcctgggcaatatgacaaaactccatctctacaaaaaatacaaaaaattagctgggtgtggtggtgcatgcctatagtcccagcctacccagaaggctgaggcaggaggatcacttgagcccaggaggtcaaggctgtagtgagctgtgatcatgccacagcactccagcctgggcaatagagtgagaccctgtctcaaaaataataataataataaaataaaatcttaccctggctcccagttgcaaagagctagaagcagatatagggctgtcaggaggtttttgatagttcgggtctggggtagagttgttaaagtgatgagaaagactatcactgaagaccaggcttggaggtggagtaaacagtctgtggaatggaatgaatgtggtgtgtgagaaaagggaggtgtcaaggatgttcctaaatgtttgctttttgcgacagggtaaggaacactgctggagggattaaaatttagggatgtggaagatgttgggatatagaagtttgacatactagaaagataatccaagtagagatgtcaaataggctgttgaatttaaatcccaatgttataaatatggatgtgcccaaatgagctgagagaaaagtccacccagatcctaacagagggtttctctaagttgtcagagatttttattatcttttagtatagaattttatatttcctaaattttctataatgttgatgtgttatttttataatcaaatttaaatgttgctaacatatattcatcatagcattctttatactggtttaaaaatggga

SEQ ID NO: 18533 - DNA, 536 bp, Homo sapiens
tgctctcaagggcaaatatcaaagattctggctctcycacaactaaaaataaagtgttgagtctttttttttaaatggggccacactttattccataaagtagaataaatgttcccattattgagtctttttctttttttttttgagagggagtttcgctctcgtcgcccaggctggagtgcaatggtgcgatctctgctcacttcaacctttgcctcccaggttcaagcaattctccagcctcagcctcctgagcagctgggattaaaggcatgcgccatcacgcctggctaattttgtatttttagtagagacgaggtttctccacgttggtcaggctggtctcaaactcccaacctcaggtgatctgcccacctcggtctcccaaagtgctgggattacaggcatgagccaccgtgcccagcccccattattgagtcttaatgccagaagaaaggtgaggatttttaaccaacagaggacattactgtttttctaaatttagagatttggaatgaaatttatctttaaccctc

SEQ ID NO: 18534 - DNA, 536 bp, Homo sapiens
tgctctcaagggcaaatatcaaagattctggctctcccacaactaaaaataaagtgttgagtctttttttttaaatggggccacactttattccataaagtagaataaatgttcccattattgagtctttttctttttttttttgagagggagtttcgctctcgtcgcccaggctggagtgcaatggtgcgatctctgctyacttcaacctttgcctcccaggttcaagcaattctccagcctcagcctcctgagcagctgggattaaaggcatgcgccatcacgcctggctaattttgtatttttagtagagacgaggtttctccacgttggtcaggctggtctcaaactcccaacctcaggtgatctgcccacctcggtctcccaaagtgctgggattacaggcatgagccaccgtgcccagcccccattattgagtcttaatgccagaagaaaggtgaggatttttaaccaacagaggacattactgtttttctaaatttagagatttggaatgaaatttatctttaaccctc

SEQ ID NO: 18535 - DNA, 536 bp, Homo sapiens
tgctctcaagggcaaatatcaaagattctggctctcccacaactaaaaataaagtgttgagtctttttttttaaatggggccacactttattccataaagtagaataaatgttcccattattgagtctttttctttttttttttgagagggagtttcgctctcgtcgcccaggctggagtgcaatggtgcgatctctgctcacttcaacctttgcctcccaggttcaagcaattctccagcctcagcctcctgagcagctgggattaaaggcaygcgccatcacgcctggctaattttgtatttttagtagagacgaggtttctccacgttggtcaggctggtctcaaactcccaacctcaggtgatctgcccacctcggtctcccaaagtgctgggattacaggcatgagccaccgtgcccagcccccattattgagtcttaatgccagaagaaaggtgaggatttttaaccaacagaggacattactgtttttctaaatttagagatttggaatgaaatttatctttaaccctc

SEQ ID NO: 18536 - DNA, 536 bp, Homo sapiens
tgctctcaagggcaaatatcaaagattctggctctcccacaactaaaaataaagtgttgagtctttttttttaaatggggccacactttattccataaagtagaataaatgttcccattattgagtctttttctttttttttttgagagggagtttcgctctcgtcgcccaggctggagtgcaatggtgcgatctctgctcacttcaacctttgcctcccaggttcaagcaattctccagcctcagcctcctgagcagctgggattaaaggcatgcgccatcacgcctggctaattttgtatttttagtagagacgaggtttctccacgttggtcaggctggtctcaaactcccaacctcaggtgatcygcccacctcggtctcccaaagtgctgggattacaggcatgagccaccgtgcccagcccccattattgagtcttaatgccagaagaaaggtgaggatttttaaccaacagaggacattactgtttttctaaatttagagatttggaatgaaatttatctttaaccctc

SEQ ID NO: 18537 - DNA, 547 bp, Homo sapiens
attacaggtgtgagccatcgcacccagcctgaattgtataccttttttgtttgaggcagagtcttactcygttgagaaggctggaatgcagtggcacaatcataactcactgcagtcttgagctcctgagctcaagcaatcctcctgcctcagcctcctgagaagctgggactacaggcttgtgtgccaccatccccagctagttgctttttttttttttttttaaagagatcaggtcttgctatgttgcccaggctagtcctgaactcctggcctcaagtcatcttcctgcctcagcctctcaaagcattgggattataggcaagagcggctctgcccagctgaactgtatactttaaatgggtgaagtgtaactttaaatggctgaagtatatctccataaagctgttacaaaaaattaattgtggtgctagatactatggaaagtatccaaaagatgcttcctcacatcttggcaattacgagtcaaatgggtgatagaagcataagctgaatgtcattccaggcggcaaattcatttaaatca

SEQ ID NO: 18538 - DNA, 590 bp, Homo sapiens
gctgtatagtcttgggaaagtcactcaatctctcagtggctccgttttctcatacgtaaagtgagaatattagtatctacataaactgtcggacgtaaaaagggagaacttaatacatrcaaaactcttataatagtcccctgtacataggtactcaatgaatattagctgttactgttaccatttatacttagaattgccgtataatttatcatccatattgaaacactttttggatttgaaagggatcactattaagaattatgcagttatttaagaaataacttcaacactgatgactcaaccccttttccaaagaatttcaaatactaatacagaagataaacttgtaagcaagcattcaaatcaatcatgaaaaatgttataatagcagtaaagtcgaagattaattgggacatgtctaatttcatattttgataaataagaagatttcacagagaaggcaaaccttgaacaagattcataagtaaatgggaactttaatcttctaaactagaagaaaaagaaaagtgaaataagggcaagttatttaagaaataacttggccgggtgcggtggctcatgcctat

SEQ ID NO: 18539 - DNA, 518 bp, Homo sapiens
taacatcaagcaatataattgcacttaatacaccaggcaactctaaattacatgtgtatacacatatatacacacatacgtaacttatgtatagataaaaacatacactcattccatcctcacaacagccttctttgtaaatatctagatttccattgtgcagatgggaaaactaaaggacaaagagctwgggtaactagggtctcccagctagttggtggtgaagccagaatttgaactctgacagtctggtttccaggttgtgctggtgacatccccctgccccctccacagttcacattggctttggtgcctaaactgaataaagagcacagttcaaggtgctttctgtgcccacattgcacccagtccagtggccaaatcctctgcaggtaccttgataaacatccagtaaggaccaaacaggtgcctcctgccctatttatagctcccagcatggccagctagctataattagcaaagctcccctaggactggagctaaattaaactggtggg

SEQ ID NO: 18540 - DNA, 587 bp, Homo sapiens
gacagaggactctagtctctcagatcaagaacagccctcagaaagccaatatggctctcagtgattctaagtgcagacactggcattgggctgcctgattcaaatcctgcctctgccacttgctacatgtgtggccttagacaagttacttaacctcagttcccctacctgcaacatgaggttaatgacatttcctgcctccaggactaatgtgaattgctcacaacggtgcctgacacataaaggtgtgtgataaaggccagatattactggggaccaactaacactrtctttcctagggagccactggcatctgaggctggcagccttctcttgattctccaggttgccctgtgtgcagcaggatgccaacttgtcctggccccgaggaagtgaatgctaggagttgctcctctagtctaggtgacaatcaagtcagttcagtggtagggacaggattcaaaccaagctttgtctgaccctaagcccatggctttcactaccattctacactaaactatcacctgcaaaacccacagtgggcataaaaagcctcttttgtcaaggacagtgagggacatagtaac

SEQ ID NO: 18541 - DNA, 512 bp, Homo sapiens
acattgatatgcatgtaaaataggcccctgttcttccattaactagaaaataaaaaagtgcccagaagggaagtttccatttctagcagcacgtwaaaaagtgccagagtttgatcaggaagtggtatcagggtcaagatgagggaaaggacatcagaaaaaaaagtagaattatcctgttcacttcaaggaagacacacagcataaggcgggttttagaaaaggattaagagaaaattggcagacagaattagggagattgcttaatcaatatcacaatataacgatgctgggtagaagatgcatggaagaagcatggattatctcaatgacgattttattttgaagatagtgtgattatcacccctggggatgctggaacattacactggggatttagtcaccaactgaagcagatctctgggttgaatagatcaccatgaaggttgtttccaaccttaagttttcttaaatttcagaagttcaatgagttcttctccaaggatcaagga

SEQ ID NO: 18542 - DNA, 512 bp, Homo sapiens
acattgatatgcatgtaaaataggcccctgttcttccattaactagaaaataaaaaagtgcccagaagggaagtttccatttctagcagcacgttraaaagtgccagagtttgatcaggaagtggtatcagggtcaagatgagggaaaggacatcagaaaaaaaagtagaattatcctgttcacttcaaggaagacacacagcataaggcgggttttagaaaaggattaagagaaaattggcagacagaattagggagattgcttaatcaatatcacaatataacgatgctgggtagaagatgcatggaagaagcatggattatctcaatgacgattttattttgaagatagtgtgattatcacccctggggatgctggaacattacactggggatttagtcaccaactgaagcagatctctgggttgaatagatcaccatgaaggttgtttccaaccttaagttttcttaaatttcagaagttcaatgagttcttctccaaggatcaagga

SEQ ID NO: 18543 - DNA, 512 bp, Homo sapiens
acattgatatgcatgtaaaataggcccctgttcttccattaactagaaaataaaaaagtgcccagaagggaagtttccatttctagcagcacgttaaaaagtgccagagtttgatcaggaagtggtatcagggtcaagatgagggaaaggacatcagaaaaaaaagtagaattatcctgttcacttcaaggaagacacacagcataaggcgggttttagaaaaggattaagagaaaattggcagacagaattagggagattgcttaatcaatatcacaatataacgatgctgggtagaagatgcatggaagaagcatggattatctcaatgackattttattttgaagatagtgtgattatcacccctggggatgctggaacattacactggggatttagtcaccaactgaagcagatctctgggttgaatagatcaccatgaaggttgtttccaaccttaagttttcttaaatttcagaagttcaatgagttcttctccaaggatcaagga

SEQ ID NO: 18544 - DNA, 505 bp, Homo sapiens
atctgcttatgagtcttagatgcaaaactgacatatctttaattgggtgtgccatcgtatctgtcctcaggcttgttagctaagcccagttagtgatttgccaccactgccattgcttggtggtagaatagggtaaaggattatcatgccagcatcccttgtccgctgtgaccttagtcttagtgaacaaattttcttgtgtgctttctaaaatgcccatgacccttatttcatactkaggaaatagaagtcacaaagatttcctgaggacctcatcattatgtggagctaggaaaagtactgtggtttatagctctgtggtttacacaaagggaaatccaattgatttgcacaaatacacaaaacaaaatatatttaagtgccatgaagagaaacgatgttctttaggaattaagaggaggttcagaaggaaaatggtgttgattgaatctggccaactgagcttggacaatcagtgacctcagggaaaggagtgttaggaaag

SEQ ID NO: 18545 - DNA, 529 bp, Homo sapiens
ggttaaaatgatctaagtaggggaaaataaaggacttgattgtttccaaaaatgtgagacagagcacttagattttaaaatctatgggagatgttttgggataaaacttgcaaccctgtggttaaggcttactttttttatttaacacttaatgccttgtgtgttatatattggtacgctctttttgagatgtgaccacttgttatcgaaggcttcctctcaggatgctctgtaaaatgctcctgcatcagctttgtttatcctgtaaaactgggcatgtttccccattgccctgtgcttcartgtggtttctcccaatgccttaacctttttctttctcttctaggtttctccatttcttcttgcattatctggtaatagtagggaactagtattggattgaatgaatagtcttccattttggaaacgttcatccactctcatatttattttttggtgcctgcatgtttgaagactgaagcaggctaaaagctcttgatgaaatttgagggtgctgaagatgttccca

SEQ ID NO: 18546 - DNA, 660 bp, Homo sapiens
tgtccaactttataattattcatgttagaggaattgactggtattagttatatcatcatatttggaagcaaaattcttctgcttaattattaaaaagaatgtagtattcaagcccaaatctctaaggatatatttaaaaatcttgttttccttgttctattaactgtggttatctcagttataagttattctcttcgttaaatttgttttcttctttcatggcattgctgtttctcaaattgtgattcttgattggatgtgcatatcaatcaaaatcataacaagaaacctatagcatggtcaaaatcagaggaaagttaatttacaaagatgtgggagtagggaaatgtcaggattattttgtttagtctaaacagaacaagtcagtctctataatgatacctgtaagacattaaacatgggaattgttgcctacattttctgccaggcwtagcaaagaagaattggatcagtatttatagacaagaagagaaagaaagggacagacaggcagatagacatggagagagacagagacgaagaaaaagatgaaaaagatagatacagagacagaaagatagaaaaaaaactccttgttgtgtttaacaatctggctttaattgttctagcatccatgtatttcttgctatttgttcgttg

SEQ ID NO: 18547 - DNA, 551 bp, Homo sapiens
ctcaaaaagttgtattaattctttagaaattatgaatkttttgattgcgggaatagctcctctttcccaccttgagaatagtgtaagtgcaatagacaattgttgactgataagacaagctaaggaagattgattgctaagcttctaatatgtataggttgaggcctgggaatctttctaacatagttatgggttctatcaaaatggataattgggggcatgacaaaaacaaatttttaaactatcagggattgaactacaaggcggttgtcatcagaggaaagaaatgaagaaataaaatttgagaaaagtctaacagttacttacatccatggagtaatgctcaatctgatagatggtggtcagcccctgggtcgtgaaatagtccagacatgatgaacagcccaacctcgctaagaaactgcagagggaggagggaagaggaaggaggaaacagaaaaagaaagttcaccccaactgcattggcgagataagggaaaacccaatatattttgcccttggatgccccacatcagagatgaggattgggt

SEQ ID NO: 18548 - DNA, 1412 bp, Homo sapiens
tgtagcggttccctctgccagctatttttagcattgttgctgccagctgacagcagagacaaaggcaccgaggcaccttgagaatgacaaatggcgatttcartgatgaaaatagaaaggctaattttcttccaggaaagaaaaggaagaaaacgtctgtagttgcaaagttgcttgggcttgaattgaatttttaatttggaacatatacactgccacgcacataaaggatttcctttcacacacacacacacacacacacacacacacacactcacatgctcatcattctcccagatcaaatacactctttttttgtgaagctttatctgatgcttctctctgctcctaataagccctcctctctctagatatagcatctccattattgtgatcctcacctggtattgtaaatgtttgcttctctgcaggccgtgagctcctctcactcaaggacttattgttaaatctccattgtctagtattaggaaaaacaagcagcccctgccatctagaagccaaccgggcactcacagttaggcatgtcattccctgttggacataaacaatctcattgaataccagaatcagacaaggttactctgagaccatgagaaagtgagacaaaacaagaacacttcataattttgtctgagcacagacaaaaacaaggtagctctgccaaccacaaaatatcatgtcttctctcttgcctaaaatgaatgactgctacttcttaatcaatccatcaatcaatcacatctttattctttccagtccgcccttcctatagacaaggtttattgagatgttcaataatataattaccccactttctgagagcagccaacctagagaaaatctctgcttctttagacccacccccaagtctccaacaaatatccgaatcccataataggttgtttctagcaccctgttactgagtggtctggaagctttcatggaactacaaaaaggggaagctacaaaaacgtcagaggaagagtggaaggaaggaaataaaaatgtccagggtagtatcttccctttgatcttccactcatagctaagggagctatgtactagccacacctgcgtaggtgtaattttatataaatgggattatattagtgaaaacatgaataagaacattttgagatttcataaggaggtcctcaataataaatttcttttagacctggtgatttttatgttattgctttttccattatgttcacataatagttcagagatttacttgaacctgccttacgccaccttttgccactaggttaacaaattcttcattacaataatctcatatcggcctgcaatttctagggcccagtcagctttggggttgtcatatttctgcttcttaatggttaccttgggctcctggcttctgttcc

SEQ ID NO: 18549 - DNA, 1412 bp, Homo sapiens
tgtagcggttccctctgccagctatttttagcattgttgctgccagctgacagcagagacaaaggcaccgaggcaccttgagaatgacaaatggcgatttcaatgatgaaaatagaaaggctaattttcttccaggaaagaaaaggaagaaaacgtctgtagttgcaaagttgcttgggcttgaattgaatttttaatttggaacatatacactgccacgcacataaaggatttcctttcacacacacacacacacacacacacacacacacactcacatgctcatcattctcccagatcaaatacactctttttttgtgaagctttatctgatgcttctctctgctcctaataagccctcctctctctagatatagcatctccattattgtgatcctcacctggtattgtaaatgtttgcttctctgcaggccgtgagctcctctcactcaaggacttattgttaaatctccattgtctagtattaggaaaaacaagcagcccctgccatctagaagccaaccgggcactcacagttaggcatgtcattccctgttggacataaacaatctcattgaataccagaatcagacaaggttactctgagaccatgagaaagtgagacaaaacaagaacacttcataattttgtctgagcacagacaaaaacaaggtagctctgccaaccacaaaatatcatgtcttctctcttgcctaaaatgaatgactgctacttcttaatcaatccatcaatcaatcacatctttattctttccagtccgcccttcctatagacaaggtttattgagatgttcaataatataattaccccactttctgagagcagccaacctagagaaaatctctgcttctttagacccacccccaagtctccaacaaatatccgaatcccataataggttgtttctagcaccctgttactgagtggtctggaagctttcatggaactacaaaaaggggaagctacaaaaacgtcagaggaagagtggaaggaaggaaataaaaatgtccagggtagtatcttccctttgatcttccactcatagctaagggagctatgtactagccacacctgcgtaggtgtaattttatataaatgggattatattagtgaaaacatgaataagaacattttgagatttcataaggaggtcctcaataataaatttcttttagacctggtgatttttatgttattgctttttccattatgttcacataatagttcagagatttacttgaacctgccttamgccaccttttgccactaggttaacaaattcttcattacaataatctcatatcggcctgcaatttctagggcccagtcagctttggggttgtcatatttctgcttcttaatggttaccttgggctcctggcttctgttcc

SEQ ID NO: 18550 - DNA, 525 bp, Homo sapiens
aaaagcattgtctaaaccccttgggctacacagatgaccaataaaaatgtgcttcctaggaaagtttatgttctagaaggaggaaatagtagaatctctgaaaaagacctgttgtcctccataggagtgttccaggcctggccttactaatgaagagagcaccaagaggcaggatagtccatgtttcccattgaagkacaaggacaaggctgttgagattagtgtacctttgtacctaattttcacagcacttgaaatggtggtcgaaggaaggaaactgaggaagaggaaggagacaggcaggcaaggtgtgtgacctcagaatgtctgagaagatgccagacattccaaactgcacatggggtgtgtgacctgccaggatatttcctgccttatgaactcatttaaagggaaagacatacaacataccatcataccatcattagatcatcacttcatttagttacacatttaataaattatctttacccaaaaaacaaaggatatatggaagcaagcagcaaa

SEQ ID NO: 18551 - DNA, 530 bp, Homo sapiens
agtaaggatgtcatacagattgccacagaaggaagaatcccttggatgcaaaggcaatggcacgggcaagagcagagtggtgaaaatgggtgtgcccgggtrtcagtgaatggtttaatttggtgtgtggccgtttcccatatacgtgggtctgctcagtcaaagaaagctggccttaatctgaaacaaaaatcaaataatcgacagagtgagactccatcacaaaaaaaagaaatcaaataatcatagaggaatagaacaaagagaaaagacgatccaatcctctcattcctgtactatcactctttcctatagctcattctataacctcaggaaagaccatcactggagatgttattagggccactaggataaactttggaccagatagtttaggccaatcctaatttcatacattctatccaattatccccagtattcccattaatacactcacacatgtaggctgagaaacacttagaaacttccctgtagagaaacatcttcaccactggccttcctttgggcca

SEQ ID NO: 18552 - DNA, 565 bp, Homo sapiens
ctgtcctaccacatatcacaccctgctattacgctagtcaatgctgccctggatagaactgtgatagggggtgggaggtgtcataagacagagacttaatcagtttatttagttcctcaactttagcttatgaggcattcttcacattgaaggaatgtgattcagatttgggggctgtgggaagctactgagcagattcagcataagttaccacatgtcagctctgcagtcttaaaaattatacaagttgctttaagtttctcctttaaagtactcatggaagtcatcatcttctccatcattttcatcaatgtccttagtctttattgattattttgctgggggtggtatgatcttactcatttgttaagtaagtcaaaaaatcttatttttgactagactcagaagtagaagcttacagaggggacaacctgtgtctctggtaayctgctcctggagtttttctttagtctccttcattctcttggccaaaagtttaacatattttgtggctctttcttatttttcttagtatgctgtttcttctgagcaataccagtgtttg

SEQ ID NO: 18553 - DNA, 1456 bp, Homo sapiens
taaacattgtgggtagaatttatcaggagcaaagttcactgagagtcaatcttttgtgaggattttcgaactttctatcattcatttacaggtaagtgtagtttacctgctctggggaaatgatgtttattatttaaaaatcagaaatgaaagaagaaaccccaaagtaagatgatttatttgctttttggtaaactcgattctgttttgtaacatttgaaacatggattttatgagtgagtctattaaaatgtatactccctctagtgtgtgttaatcattatttctctgctgggcctacggattacctgtctgcattgtaatgcaacattccttaatatttacaatagaaataccagtggttcataagacatctcatatttctgtgaacaaaatgagatttacaagaaataaggacttgtctgtagaaatacatttcaaaatattaaagtcctcataaaaattcctagatttatttaaatcagtattgatttagactaatgaaataaaatatctgaccccagtgattgtactttgatgctccaaaaggtagatgaaatcattgcaagtacagttttagtataaatataaacagagcaaaaaataggtacttcatttataattgtgttcaatgcatcagacatttattaagtctctactttgtgaaggtccttttcagtttctgggggaaggagaaggggaagggatgtagagatgaagtcagatccctgtccttgggtgaggaggactgagacagacatgagcacctgtaactatttttttagagtgtgaagatccattactataacataaaagcagtaagtgatcccgaaataaggagatgatgccaaaccaaactcaggccatgagatttctagctctgccaagttcttatcactattgagaggtcagtcttataaatatttgagtagagaaggaaagggggagggtatggaaattgcctaaatttaggagtaagagggacaaaggcccttttaggaggarctgtcctactggagtcaaatttaatcattgaatcctatatggaactcagagtactgttcaaagagtactgttcttgggtgcttatagaatagtgagggagaaaaaaatataactggtttcccaagctacactgaaggaaaattcggttgagcccctgtttcactacctgatctattctggatggaatgtgctctaagaatttccacgtttctttttttcagcatccttttctttactgaacgttcttagcttcagcctttctactcacttctcaacttcaccaaactgtatcccctgttgacttttgcaggaaatctatcacattaagttatatatttattgaggatttggagggtcatggctgtgggatatgatgaggtttctctttaaataacctgatcaatcttttattctttaattcatagtacccccctccttttctccttttctc

SEQ ID NO: 18554 - DNA, 1268 bp, Homo sapiens
aaaagtctatatctacttttaaactgctgcgtattaaaaattaaatatgttatgcaaataaatccaatattgattttaaagatatgaactattatttaaaattacttaaaatatgtatatatgtacacattatatttccaattttattaaatgtaaaacataataaaaattttaataacatgaaatgtcataactcatgtccaaccagaatatctattatcatctctgaagatgtagctaaaatattgaattgtgtcataacctctccctgatatggattatttctgctatgtctctcttgcattctagaatgagaacctaagacattatgtgcatagtagtatgataagcccaatttttcaatttaaaaattagatgactattgaaatggccacaacagtttcagcatctttgatatatacttatccaagcagaatttaaagttggaaaaaaaatctatcatcaataaaacataccttttgttttgtggttttcttaaaaaagttaatcatggaccactcaaatgctacaacagactccccaaacaccagcgatttgaaaagaaaaaataaacagaacttttagaaataaaaaaaaaaaattgaaaatgaaacaagaggaaaacttttaaaaacagattaaacagaactgaagaaagaatcagtgaagagaaacagagtgaagaaattaagtagttggagcacagatcataaacaagatagaaaaataagggaaaaaattaaagacataaaatatggaatgagggaagctaagataactttaaacagagaacgagaagtggagtgtgaaaaaaaggaaaaacagtctatatatgaagagaaatgactaaaaaatgtccaactggtgaaagcaattaaaagaatacatgcttaggcacatcatggtaaaactgcagataaccaggtaaaaagaggaggtgaaaagcagcttagaggaaaaaagccagatcctctacaaataaagcctcacctcactggtaacaaacyccttcacatcagtaatagaactcagaaaactacaaaatattgtcctcaaagtgctgaaaaattgtgtctgaataaactgtatttctagaatgaaagttaaatctacaaaaatatctgtatttaataataataatttctaaatggtagggattttattgaaaaatgaaaattaaaaaattaagtcacaagagtgataagatccaagtgttctaagatcctagtactacagtttaactttagacttcaactatatatgataca

SEQ ID NO: 18555 - DNA, 309 bp, Homo sapiens
actctactcagaaagatctttaacatcactaaaatctggccgggtgtggtggttcacatctgtaatcccagcactttgggaagctgaagcaggcggatcacttgaggtcaggagttcaagacatgtctggccaacatggtgaaaccccgtcattactaaaaatacaaaaattagccaggcagatcacttcaggtcaggagttcgagatcaacctggccaacatggtgaaaccccatctctacyaaaaatacaaaaatcagccgggcatggtggcgggcgtctgtaatcccagctacttgggaggctgag

SEQ ID NO: 18556 - DNA, 594 bp, Homo sapiens
tgatgagawgacgaaagaagagaaagggccaagaacctttggaagttctaccgttaggaagtagaagaaaggaatggaaggtggaaaagaatgagtaggcaggagagctgagaaagtcaagcattccagaacacaggggaggagaaacttgagggatgaaagcccgatgaattctacaaggagaacaaggagaatgagttttgattggtaaaaggcactggatgggcaagtaggaggcttttggtgacgtttaaataagagcatgtgtttgagtaatggaaacaacaaggataaattgccccttcaaaaactctgataacaaaagggaggaaaaagaagaaataagaacaagggacagataatttttatggaataatcccaggcttgtctgcataatttaaaacattatgggctaggcgtggtggctcacacctgtaatcccaacacttggggaggccaaggcaggtggatcacaaggtcagaagatcaagatcatcctggccaacatggtgaaatgttggccattgcttctaaaaaatacaaaaattagctgggcatggcagtgtgtgcctgtagtcccagctactcaggagg

SEQ ID NO: 18557 - DNA, 594 bp, Homo sapiens
tgatgagaagacgaaagaagagaaagggccaagaacctttggaagttctaccgttaggaagtagaagaaaggaatggaaggtggaaaagaatgagtaggcaggagagctgagaaagtcaagcattccagaacacaggggaggagaaacttgagggatgaaagcccgatgaattctacaaggagaacaaggagaatgagttttgattggtaaaaggcactggatgggcaagtaggaggcttttggtgacgtttaaataagagcatgtgtttgagtaatggaaacaacaaggataaattgccccttcaaaaactctgataacaaaagggaggaaaaagaagaaataagaacaagggacagataatttttatggaataatcccaggcttgtctgcataatttaaaacattatgggctaggcgtggtggctcacacctgtaatcccaacacttggggaggccaaggcaggtggatcacaaggtcagaagatcaagatcatcctggccaacatggtgaaatgttggccattkcttctaaaaaatacaaaaattagctgggcatggcagtgtgtgcctgtagtcccagctactcaggagg

SEQ ID NO: 18558 - DNA, 510 bp, Homo sapiens
tgcacactatgggcacaaaggcacagtgtgagagccgcaagcagaagatgagcactctattaattattgactgtcctagctttcttgggacacaggaaattgcttaataatayacagagttgccaatgatgtcaattctgaatccaaatcaaaggaacacataacaaatggtgccctttacactaatcctccatagggaacggcatgtgtactttttacaagaatcactacaccatttttattcattgtttggttttaataacagtctaaaaagatgctttattaggaaaaagtcttatgaaaggtatcatcaatacatgccaaggatttctaaacaagaatatgtacaggcagggagtttaccattaaggttcagtcatctaacagcaactgggtgctctaaacctaactgagtttgctcagccaatcactagtgaaccggggtaactttgactcctagatccgatgcttggagtaataaaggtgatgccaaacttacaaacagctcgc

SEQ ID NO: 18559 - DNA, 1233 bp, Homo sapiens
gtcaacactcctggagcacttctttctttggctgccgactcttaagaagctctgcaagggagggataacacctttgcagggacctaatgggctattgtggttaggttccagaaccttcagactttctctagggataattcactgatgaaaacaagcactgccagccccaagcttaccctaacctttgcagggacgtggggcagaagtacaaagggatgcccacataccatctgtataaatatttaaaagttattcctcaagctaacaaaccattaaatagcatgtccttgctaaatacaacttcatcctgacacagagagcaggttccaactgagaattccctgtcccatctgcagcctgccccccgactcccacctttcttgccttactccacgaggggccattgtgtgcagacctccagccaccagggccaggttttgtattatttcttgcaactgcatgtgaatctacaattatcccagtgaaagtttagataaagaggaaggaagaagggggaaggaggaggaggggtggagagagagagagagagagacagagagagcgagcgagctgtgcagtgtgacctatagacccaaagtcactgtgcctgataggctctttgtttgagagcctggcctggtccccctcagcccgccccctcctcacagagcaaggagcccacaggccagtggcttttgccaagcactcgcttagtccacagtcttgccgaaatggcctccagcacgcttctagggcctgcgagggccttctccttgtgtccgactcccgagtgggtcttgctgcactgccggtgtgtgcacctctgggcccaagaaggccagcaggtagctgtttgtcggaatcatgaacagatcttgatctgggaaatgaagacctggaatgycggtaaccctgcgtggcagtgatcccgttggggaaggaggagaggaacactgcttttcttccttcttttagccataagattctggaaaggagaaccagaggaaggcagagccaccccctggtacagtccctgaactctagtgaatggggcatggttcatgaaatacattagaggcaaagatcaaccactctgcttcaattaaccacatgcaattgtgacatcaaacaaaaacgtcagacgccattccaaagattaaattgtataaatctgaaataaagcaagatatgcttcattatttcactctttaaaccatgagctatttgtccctc

SEQ ID NO: 18560 - DNA, 480 bp, Homo sapiens
atattgtcaagttcattgaactatagcttgccatattttacttgattttatatagctttgcttatcttgaaactctttactttggattatgttttgtgtcatacctttatttctctagaaaggatgattctttgatatttgttttaatttttattttaaacatattacattaaacatgcatyacatatatctgttaagtatatgaaatatacattaaccaaatgtaaacatatgcacaaatctgcaatagtgtaattgttcctcctctataacaacatccagcttgcacagtcatcaactcacaccaatcttatttcatgatatccaccacattccttgcagctattattttaaagcaaatctcacagaaaaatgtattggagagtgtttcatcaggatgtatctttaaaacataaatgttatttaaaaaataaaagacaggccaggcggtggcttacacctgtaatcccagcactttgg

SEQ ID NO: 18561 - DNA, 480 bp, Homo sapiens
gatccatcagaactgccttattgtgaaaaatctttattgcttttatggttgattgttttttccacatgggatagttagctttctgagacaggagttttctaatttccagagctggggtataaacctgcttgccaacattctagcttagtggcagaacaaagctgagtgggtgtttcagtatttaatgcagtgcttctcccttcagtcatttttggtgtttccaacttcaaagtctcaattcctttagagattaaatctctgatctttcgttggagagattaggggaagatatctgtgcagcaagaagcaggatatgatctaattactttttgtacaggttttaaagcaagtttcttttttagtgtcacttaaaacgccagatttccaatwctttatctccacctcccaatcctttatcttcacctcccaatctttcttgtactgctatggtatcaatcagattatttctttacttcctga

SEQ ID NO: 18562 - DNA, 565 bp, Homo sapiens
agcaaaagagagaaattctagaaaggaagaactcattgaataaaatacaaaatatatttgaaagcttcagtagattagaacaagtggaagaaagaatgttaggacttgaagaagttttttaaaaaataccccartcagacaaaaataaagaaagaaaaattttaaaaaatgaacaaactctacaggacaccataaagcaaccaaatactcaaattatcaaagtcccaaaaggcaaagaaataacaaaagagttagaaaacctacttagtaaaatagtgtgggaaacttcctaggaagagatttagacatccagatgcaggaagctttcagagatctttaaacagatacaatgcaaaaacatcttctatactgcagattgtagtcaaactgtctaaacacaaagagataatcctaaaagcagtaagaaaaaagcatttagtcacctcgaaaggaatccccattccactaacagtggatttttcagcagaagagataatttgtattactgcttcaatctaactaattctattctttcctggctgagaatgagatgaaattgaagcag

SEQ ID NO: 18563 - DNA, 618 bp, Homo sapiens
attaattttcataatcgaggtgggcaggataaaatacacacgaggcaaacagaaattggctgatgtattttattcccccaaaatattctatgttacaaaatcaactaaaaacgtatttataaagcaaatgttagacccaggaatatatatgtagcataggtttaaggcaaagatgatgtacccagtgccaagaacagtggcttatgtctttaatccaagcatattgggaggcctaggtgggagaatggcttcaacccaggagttcaagaccaatgtgagtgacacagtaggaccctgtctctaaaaaaataaataaawaaaaaattagcgaggaatgggggcatgcacttgtagtcccagctacgtggaagactgaggtgggaagatcatttgagctcatcaggtcgaggctgcagtgagccatgatggtgccactgaactcctgcctgggtgatagacagacactgtctcaaaaaaataaaaataaattaagggtttgtatccagaaaaaagaactaaaacctgtaagaagaagacaaactatgaaatagagtaatagacaaatgatataattaaaaattcataaaattttaaaaatgcttaaccttactgctaatc

SEQ ID NO: 18564 - DNA, 580 bp, Homo sapiens
ggccacactctgcagaattataactgatatttatattgaataatatatwaatttaaaaagactttgaggtgtggtggttgggaaaattgaaatatgataagcctaaaatattttttcaggttcactgcaaagttgtactgaagtgttttccataagaccctcattttatttgtctgtttatcaggttttgctccctggtacaacatacagtgaataaagggtattgtcagatataattactaaacttaatagaattttgaaactactttttaaatatattcattaaagatatctcttaatattgtaattgtgtctgctttttcatttaacattgagttacataagagtatttgaatgtcaactcattagacatgactttaattgaaaacctgaggaattaaagtaatttataaaaagaagaagtggaagtaatagaaaatgaggaggaaattttattataggacttctttcaggacttcccattttgcttgtgttataggtaatgatggtgggtgtaagggtcatcgttggtgtgacactgtgtgtgctacttacctgctatgtgagctttggccacttg

SEQ ID NO: 18565 - DNA, 580 bp, Homo sapiens
ggccacactctgcagaattataactgatatttatattgaataatatataaatttaaaaagactttgaggtgtggtggttgggaaaattgaaatatgataagcctaaaatattttttcaggttcactgcaaagttgtactgaagtgttttccataagaccctcattttatttgtctgtttatcaggttttgctccctggtacaacatacagtgaataaagggtattgtcagatataattactaaacttmatagaattttgaaactactttttaaatatattcattaaagatatctcttaatattgtaattgtgtctgctttttcatttaacattgagttacataagagtatttgaatgtcaactcattagacatgactttaattgaaaacctgaggaattaaagtaatttataaaaagaagaagtggaagtaatagaaaatgaggaggaaattttattataggacttctttcaggacttcccattttgcttgtgttataggtaatgatggtgggtgtaagggtcatcgttggtgtgacactgtgtgtgctacttacctgctatgtgagctttggccacttg

SEQ ID NO: 18566 - DNA, 580 bp, Homo sapiens
ggccacactctgcagaattataactgatatttatattgaataatatataaatttaaaaagactttgaggtgtggtggttgggaaaattgaaatatgataagcctaaaatattttttcaggttcactgcaaagttgtactgaagtgttttccataagaccctcattttatttgtctgtttatcaggttttgctccctggtacaacatacagtgaataaagggtattgtcagatataattactaaacttaatagaattttgaaactactttttmaatatattcattaaagatatctcttaatattgtaattgtgtctgctttttcatttaacattgagttacataagagtatttgaatgtcaactcattagacatgactttaattgaaaacctgaggaattaaagtaatttataaaaagaagaagtggaagtaatagaaaatgaggaggaaattttattataggacttctttcaggacttcccattttgcttgtgttataggtaatgatggtgggtgtaagggtcatcgttggtgtgacactgtgtgtgctacttacctgctatgtgagctttggccacttg

SEQ ID NO: 18567 - DNA, 580 bp, Homo sapiens
ggccacactctgcagaattataactgatatttatattgaataatatataaatttaaaaagactttgaggtgtggtggttgggaaaattgaaatatgataagcctaaaatattttttcaggttcactgcaaagttgtactgaagtgttttccataagaccctcattttatttgtctgtttatcaggttttgctccctggtacaacatacagtgaataaagggtattgtcagatataattactaaacttaatagaattttgaaactactttttaaatatattcattaaagrtatctcttaatattgtaattgtgtctgctttttcatttaacattgagttacataagagtatttgaatgtcaactcattagacatgactttaattgaaaacctgaggaattaaagtaatttataaaaagaagaagtggaagtaatagaaaatgaggaggaaattttattataggacttctttcaggacttcccattttgcttgtgttataggtaatgatggtgggtgtaagggtcatcgttggtgtgacactgtgtgtgctacttacctgctatgtgagctttggccacttg

SEQ ID NO: 18568 - DNA, 577 bp, Homo sapiens
gagatgcagggacagggaagggagaaaggttattttaacatttcattcacagtccctgggattctttggagagcaccttaggaatgttcttaacctgagtcctcttactaagtattatcacatagtctgccaggctggcattattaaccctactttgcagctgaggcaactacaagagatgaccctatcgggctagtraagtggaattcgccatgtactgcatgcagtcatgtactgcagtgaccaatccgggtctaatttctttgatgatatcattgacggggtagcaggggagaggcaagtgcaagagaagaaacggggtgaaacccactgcagggaagcttgggctggggcaggatcggggagccagggtatggggcatggttgggactgaaacccttgttaacactggctttagcaaaagaaatgggcaccacaatcccagaggacttccagaagcttcctccctcccccgcacctgggcacagagccttacctcccctgcaccctggccctgtctctctatttggcaagactcccatgtcatctgctcctctttacttcgggtccctcttgg

SEQ ID NO: 18569 - DNA, 519 bp, Homo sapiens
gaatgtgctatttcttcgcatctcttccatacctattgctcttaactgatacggcaaaaagaaataattttgacaaattatctcctggacagatgaagattttatcataagatatgccttaacagaaattcctttttctttttaaattaaattagtttaatattactattacctgattggctcagtcggtcacaggccatcatttccagcagattttgtccagcttyaccttttattaatttaatctttggtcttggaacctaataattttagaatcaaaaatcttaatttgatgatacccatacttctaatagtaacatggtcttgtctattacactgtactttttttgataatgaataaacagttaaccattaattaaactgaattggaaaagactgcaaaaactgggaaccaaggaatttatataacctatgaaagataggccaggtacaggcgtggtggctcacacctgtaatcccaacactctgggaggccaaggtgggctgatcacttgaggt

SEQ ID NO: 18570 - DNA, 519 bp, Homo sapiens
gaatgtgctatttcttcgcatctcttccatacctattgctcttaactgatacggcaaaaagaaataattttgacaaattatctcctggacagatgaagattttatcataagatatgccttaacagaaattcctttttctttttaaattaaattagtttaatattactattacctgattggctcagtcggtcacaggccatcatttccagcagattttgtccagcttcaccttytattaatttaatctttggtcttggaacctaataattttagaatcaaaaatcttaatttgatgatacccatacttctaatagtaacatggtcttgtctattacactgtactttttttgataatgaataaacagttaaccattaattaaactgaattggaaaagactgcaaaaactgggaaccaaggaatttatataacctatgaaagataggccaggtacaggcgtggtggctcacacctgtaatcccaacactctgggaggccaaggtgggctgatcacttgaggt

SEQ ID NO: 18571 - DNA, 519 bp, Homo sapiens
gaatgtgctatttcttcgcatctcttccatacctattgctcttaactgatacggcaaaaagaaataattttgacaaattatctcctggacagatgaagattttatcataagatatgccttaacagaaattcctttttctttttaaattaaattagtttaatattactattacctgattggctcagtcggtcacaggccatcatttccagcagattttgtccagcttcaccttttmttaatttaatctttggtcttggaacctaataattttagaatcaaaaatcttaatttgatgatacccatacttctaatagtaacatggtcttgtctattacactgtactttttttgataatgaataaacagttaaccattaattaaactgaattggaaaagactgcaaaaactgggaaccaaggaatttatataacctatgaaagataggccaggtacaggcgtggtggctcacacctgtaatcccaacactctgggaggccaaggtgggctgatcacttgaggt

SEQ ID NO: 18572 - DNA, 519 bp, Homo sapiens
gaatgtgctatttcttcgcatctcttccatacctattgctcttaactgatacggcaaaaagaaataattttgacaaattatctcctggacagatgaagattttatcataagatatgccttaacagaaattcctttttctttttaaattaaattagtttaatattactattacctgattggctcagtcggtcacaggccatcatttccagcagattttgtccagcttcaccttttattaatttaatctttggtcttggaacctaataattttagaatcaaaaatcttaatttgatgatacccatacttctaatagtaacatggtcttrtctattacactgtactttttttgataatgaataaacagttaaccattaattaaactgaattggaaaagactgcaaaaactgggaaccaaggaatttatataacctatgaaagataggccaggtacaggcgtggtggctcacacctgtaatcccaacactctgggaggccaaggtgggctgatcacttgaggt

SEQ ID NO: 18573 - DNA, 546 bp, Homo sapiens
aggagtttgagactagcctgggtaacacagtgagaccctgtctctattaaaaaaaaacatatttttaaatgtatatacagaaagtycccccgagctcaatcaatgtttatgtatagtattaatataccactccccacaaataggtttctaagtcaaaggtattgtcagaagttcaaatgactggaccactcagtgctttgtgatattattttgatgatttttttgactgcattccattccaaaaactaatttactctgagtagaagcagagttaataaagtatgcaaaaatactaatctggcttatttaagtagtctagtgacatatctgagaaaaattttgtgtgagattcaataaaagctgagatttaaagaacaggttactgctggtctccccaagttaacatactttacctgagacatacacaaaattaacttttatccatctctctctctctctttttttttaaagtatttgcttgaggcataatcataatcaacttctaaagttacattttacttgatttgttgtcccaaatgtagacaa

SEQ ID NO: 18574 - DNA, 546 bp, Homo sapiens
aggagtttgagactagcctgggtaacacagtgagaccctgtctctattaaaaaaaaacatatttttaaatgtatatacagaaagtccccccgagctcaatcaatgtttatgtatagtattaatataccactccccacaaataggtttctaagtcaaaggtattgtcagaagttcaaatgactggaccactcagtgctttgtgatattattttgatgatttktttgactgcattccattccaaaaactaatttactctgagtagaagcagagttaataaagtatgcaaaaatactaatctggcttatttaagtagtctagtgacatatctgagaaaaattttgtgtgagattcaataaaagctgagatttaaagaacaggttactgctggtctccccaagttaacatactttacctgagacatacacaaaattaacttttatccatctctctctctctctttttttttaaagtatttgcttgaggcataatcataatcaacttctaaagttacattttacttgatttgttgtcccaaatgtagacaa

SEQ ID NO: 18575 - DNA, 546 bp, Homo sapiens
aggagtttgagactagcctgggtaacacagtgagaccctgtctctattaaaaaaaaacatatttttaaatgtatatacagaaagtccccccgagctcaatcaatgtttatgtatagtattaatataccactccccacaaataggtttctaagtcaaaggtattgtcagaagttcaaatgactggaccactcagtgctttgtgatattattttgatgatttttttgactgcattccattccaaaaactaatttactctgagtagawgcagagttaataaagtatgcaaaaatactaatctggcttatttaagtagtctagtgacatatctgagaaaaattttgtgtgagattcaataaaagctgagatttaaagaacaggttactgctggtctccccaagttaacatactttacctgagacatacacaaaattaacttttatccatctctctctctctctttttttttaaagtatttgcttgaggcataatcataatcaacttctaaagttacattttacttgatttgttgtcccaaatgtagacaa

SEQ ID NO: 18576 - DNA, 656 bp, Homo sapiens
tgtctttactggatcattgaaatagtaagataaattcaactttttacattgttttcttttcctccagttagggcttgaggtttgtctctggagagtgactgtcaattggagccctgcctttctggggttctggtcagggcgttgtggatgcttaacatgtgcctttcacaggacacttccttaccccagcagtggccaggtgtgcatcccacgaccaggcctccctctcacagaacatctgttgagactaggagatgcctggtgactgttgcctgacctgtgtcctgtgtatttctgacaagagccactctcagagaccctggccaggaggagagttaggttccagtgtaggtcagctcagacacatggaggccacaggaccaaacatgggaaatcacagaagtggttttattactcacagatccagagagaagagggtagctgaraagagggtttagctgtgtccccagccaaatctcatcttgaattcccacatgttgtgggagggaacaggttggaggaaattgaatcatgggggcaggtctttcccatgctgttcttctgatagtgaataagtctcacaagatctgatggttttataaaggggagtttccctgcacaaactctcttgtcttgtctgctgccatgtgagacgt

SEQ ID NO: 18577 - DNA, 656 bp, Homo sapiens
tgtctttactggatcattgaaatagtaagataaattcaactttttacattgttttcttttcctccagttagggcttgaggtttgtctctggagagtgactgtcaattggagccctgcctttctggggttctggtcagggcgttgtggatgcttaacatgtgcctttcacaggacacttccttaccccagcagtggccaggtgtgcatcccacgaccaggcctccctctcacagaacatctgttgagactaggagatgcctggtgactgttgcctgacctgtgtcctgtgtatttctgacaagagccactctcagagaccctggccaggaggagagttaggttccagtgtaggtcagctcagacacatggaggccacaggaccaaacatgggaaatcacagaagtggttttattactcacagatccagagagaagagggtagctgaaaagagggtttagctgtgtccccagccaaatctcatcttgaattcccacatgttgtgggagggaacaggttggaggaaattgaatcatgggggcaggtstttcccatgctgttcttctgatagtgaataagtctcacaagatctgatggttttataaaggggagtttccctgcacaaactctcttgtcttgtctgctgccatgtgagacgt

SEQ ID NO: 18578 - DNA, 535 bp, Homo sapiens
acacccatcgtgcaaactgcttcctgttgtgggaaaacaggtttccatatgtgtcttattgggaaacacataggcaatttctatgtttttactgcatctatttcatggatatgggaactgaatagtgcccatcaaaggctctcctgctgttggaaattgatctgagagcgcggaaggacataattctttctttgttcctgggcagcggtggttgagggatcattttgtggcagctacagtggcaatgatggaggcagaatggagggmtcagtaccaagacaaggagagacttggcctcacaatggcagcattgcaggggtgcgctctacagagcatttgctcacatggttttgggcattgtctctaaatacattgtttccccaataggttgacccattctaaataactccttttctctttaaaaaaggaaacttcatttgtatgacttgcaattgtaaatgacaccaattggccagttatcattcaaattctctgttacttaatcctgccttttcctgacgtatgcaacttcccc

SEQ ID NO: 18579 - DNA, 535 bp, Homo sapiens
acacccatcgtgcaaactgcttcctgttgtgggaaaacaggtttccatatgtgtcttattgggaaacacataggcaatttctatgtttttactgcatctatttcatggatatgggaactgaatagtgcccatcaaaggctctcctgctgttggaaattgatctgagagcgcggaaggacataattctttctttgttcctgggcagcggtggttgagggatcattttgtggcagctacagtggcaatgatggaggcagaatggagggatcagtaccaagacaaggagagacttggcctcacaatggcagcattgcaggggtgcgctctacagagcatttgctcacatggttttgggcattgtctctaaatacattgyttccccaataggttgacccattctaaataactccttttctctttaaaaaaggaaacttcatttgtatgacttgcaattgtaaatgacaccaattggccagttatcattcaaattctctgttacttaatcctgccttttcctgacgtatgcaacttcccc

SEQ ID NO: 18580 - DNA, 535 bp, Homo sapiens
acacccatcgtgcaaactgcttcctgttgtgggaaaacaggtttccatatgtgtcttattgggaaacacataggcaatttctatgtttttactgcatctatttcatggatatgggaactgaatagtgcccatcaaaggctctcctgctgttggaaattgatctgagagcgcggaaggacataattctttctttgttcctgggcagcggtggttgagggatcattttgtggcagctacagtggcaatgatggaggcagaatggagggatcagtaccaagacaaggagagacttggcctcacaatggcagcattgcaggggtgcgctctacagagcatttgctcacatggttttgggcattgtctctaaatacattgtttccccaataggttgacccattctaaataactccttttctctttaaaaaagsaaacttcatttgtatgacttgcaattgtaaatgacaccaattggccagttatcattcaaattctctgttacttaatcctgccttttcctgacgtatgcaacttcccc

SEQ ID NO: 18581 - DNA, 546 bp, Homo sapiens
attaaaatcaaatcatcttgcagcacaccgagaaaaaggttagacttttaaaataatttcaaagtcatgaaaagagcaaatatgctcaagaaagagcctagcaacgctcaatgaccaattccccttttatatagtttggtatctgaattagaatgccagaatctacaaattcctctgggtgwgggtgctgcattttgaggattttataacactgccatcaccaagctctcttttgttattcactttaaggagataatttacgggcaaccagggaacataaaccaaagtagatgtctatctagatatatagatacatctccatatcattgacaagataccttctggcctagtgtgagtacaatctatgggtgtggttggagagaacatgtgttccacctgaatggcagatcaagattattccttctcatctgctgcaatggctcagtgtgttaaggagaggagcgagacagcaagaactgcattcacttagtcatacagaccaaaaggaggaatgtcgcccagccctcttaactgacccagaacaca

SEQ ID NO: 18582 - DNA, 529 bp, Homo sapiens
agaagcaaacaaatctgcccaacacccctgacatgtgggtttcacagaaaatactgaggtcagagtagcgtgttaaatgataccacagtgatgacacaatcataaaaatctacactgtggactctgtcctagtttctttaacgaattgcatggaaaaaaaagatggaaggggaagaataagaatgaagaatgctttagagactctgcaatccatcgtaatatccgtacaaggattctgctcttttaaaaaaagaaaaatggtgtgaaaaaatatgtaggactggccaggcagcgtggctcacacctgtaatcccaacactttgggaggccgaggtgggtggatcacttgaggtcaggagatcaatcctggccgacaagcctgaccaacatgccaatatggtgaaaccccgtctctactaaaaatmcaaaaaattaaccaggcatggtggtgggcacctgtaatcccagctaattgggaagctgaggcaaaagaatcgcttgaacccaggaggcggaggttgcagtgagc

SEQ ID NO: 18583 - DNA, 521 bp, Homo sapiens
ttctgattccataattacaagacacctaaatttacaaaagtcatcaaacttttcaagtcatgggrtcctgtccttagctctaaagtaaaaaagataaactatgttcttctaccccacaggttgctataagggtaaaaatgacataggtaaaaatctttggaactactaaagtcatgtgcatgtattaacaaaagtaccaaaagtagactttagggttagaggatacagacaccctgcttccattgataaaggtctaagagatactgtatggacattgaatacttgtttgagttgataatatatccctgagttaattgtctagcagccagtgttccataatccagaatttattgtctgcagtgtttattaattacctatttgacatttaccatgttaatttattttcaattatatattttgcccctacagctaaattaaagcatttgactcaaaacatgtaggtaaaatctttctttaatcttgttgatatcaatatacagtaatctatcaattttttacag

SEQ ID NO: 18584 - DNA, 877 bp, Homo sapiens
ccatggctcttcatattctgcaattcaccatcagaaaggggcatgctcttctcattcataggtaaatgtacagtacaacctttcatgataacataccaaaattttagtttatgtaagtttaggttactcttatctaacttttatttttaggttagagaataggaattgttgttaatagtgaaagtttgccatagtgatctaaaagaggagaaaaaaatggaaattgaaaatgtaaggattcataaatctaccttaaacacttactggaaaaatgataataatccttcttactaacacattttacgtgtctgcattttttascaccgtatctaagcaaatagatgagatggcatgagctcgagagagaaaagcattctgtaacagagaagcaacataagggctccacttgtgtgtgtttgagatttttcataatgctgtggcttttcttatcaaattctttctcctcttcatcagcttcagagtccatgcactttgtcatccacatcatcatccattatccatttttctgccaggctgagaaaacactgaaggatgaaaacactttcaactgacattgggagagtgaaataacacactgaacaagcagtggctcagggactctatttcttcctggtgtgtaaatgactgcagccacgctgttcagtagattgatggaaagatgaagggacagagtagcctacattccaccaatctatctcaaggatgataagaccttcatgacccttgaaaggacgtttctatttcttatttttaaaaaatgttcaactgtttaaatattagtgaagataaatgttaaaaacattagtaggatacaaaagttgcaatcttaaaactatcacatttaggctactgtaga

SEQ ID NO: 18585 - DNA, 573 bp, Homo sapiens
ccaccacctttgtactgctggcatctattaaggctgcaattctgtggttctgctgctcattcccaactgacttgttacacagtcaaatggggcaatttatccccttcagaaaactccatgtcttcttccataggaaaaggacaggctctctcacataaaaccactggaaagattactttctcaaggaaaacaaacacattctcgctgtgatgtctcatgacacagccactcttggaagaactaactggatctcaacaggacagatccaaagaccgaaaccagccccaccccatccccataggaaatcttcttatgggggataaagggtcacttgmtcaagtcagagaaaatggtatctccctaaagagcaatcgacagtccagccaagctgttggcatgagaaagaggctgtgagaattacagcagcatcttcccaagacagcggggcatggccatgggaacgccaggaataagctatatttggagaaattgccttgtgtttggtattaggaggttttgtcagcagataccaggactctgggcatcaggcagaagtttaaagacaggatttca

SEQ ID NO: 18586 - DNA, 558 bp, Homo sapiens
ggaattatttttataagsatatccttatgtaatattttgtttctaacagagaattgaatgtttaaagattaaattattctatccagagaataaaaagcaattatttcacaaggaaaccatgtgtatgttgacacgacattttaaaatctagattttaaaataggtcccatataattttgagtcaattagaatatgtttgtatcagtctgtctacagttttacacctgtcaaaaggtacttgaactaaaagaagtaccttgaacaattttgaaatttattattcctctgaaactgattaaaagaattatggtagagtgaaattctgattggcataatttgggagagaaattattccttggagatcaacctctgccaagatactttataatgacattgagactttttgatttacaaaacttgttatataaaaaatactaagatgatgacagataatacacagactaattaaaattgtactagaattaattgtctaaataaattacaagggtacgtcgtacatctaaatgtatgtttatatattttatttgtgcattttat

SEQ ID NO: 18587 - DNA, 558 bp, Homo sapiens
ggaattatttttataaggatatccttatgtaatattttgtttctaacagagaattgaatgtttaaagattaaattattctatccagagaataaaaagcaattatttcacaaggaaaccatgtgtatgttgacacgacattttaaaatctagattttaaaataggtcccatataattttgagtcaattagaatatgtttgtatcagtctgtctacagttttacacctgtcaaaaggtacttgaactaaaagaagtaccttgaacaattttgaaatttattattcctctgaaactgattaaaagaattatggtagagtgaaattctgattggcataatttgggagagaaattattccttggagatcaacctctgccaagatastttataatgacattgagactttttgatttacaaaacttgttatataaaaaatactaagatgatgacagataatacacagactaattaaaattgtactagaattaattgtctaaataaattacaagggtacgtcgtacatctaaatgtatgtttatatattttatttgtgcattttat

SEQ ID NO: 18588 - DNA, 558 bp, Homo sapiens
ggaattatttttataaggatatccttatgtaatattttgtttctaacagagaattgaatgtttaaagattaaattattctatccagagaataaaaagcaattatttcacaaggaaaccatgtgtatgttgacacgacattttaaaatctagattttaaaataggtcccatataattttgagtcaattagaatatgtttgtatcagtctgtctacagttttacacctgtcaaaaggtacttgaactaaaagaagtaccttgaacaattttgaaatttattattcctctgaaactgattaaaagaattatggtagagtgaaattctgattggcataatttgggagagaaattattccttggagatcaacctctgccaagatactttataatgacattgagactttttgatttacaaaayttgttatataaaaaatactaagatgatgacagataatacacagactaattaaaattgtactagaattaattgtctaaataaattacaagggtacgtcgtacatctaaatgtatgtttatatattttatttgtgcattttat

SEQ ID NO: 18589 - DNA, 558 bp, Homo sapiens
ggaattatttttataaggatatccttatgtaatattttgtttctaacagagaattgaatgtttaaagattaaattattctatccagagaataaaaagcaattatttcacaaggaaaccatgtgtatgttgacacgacattttaaaatctagattttaaaataggtcccatataattttgagtcaattagaatatgtttgtatcagtctgtctacagttttacacctgtcaaaaggtacttgaactaaaagaagtaccttgaacaattttgaaatttattattcctctgaaactgattaaaagaattatggtagagtgaaattctgattggcataatttgggagagaaattattccttggagatcaacctctgccaagatactttataatgacattgagactttttgatttacaaaacttgttatataaaaaatactaagaygatgacagataatacacagactaattaaaattgtactagaattaattgtctaaataaattacaagggtacgtcgtacatctaaatgtatgtttatatattttatttgtgcattttat

SEQ ID NO: 18590 - DNA, 558 bp, Homo sapiens
ggaattatttttataaggatatccttatgtaatattttgtttctaacagagaattgaatgtttaaagattaaattattctatccagagaataaaaagcaattatttcacaaggaaaccatgtgtatgttgacacgacattttaaaatctagattttaaaataggtcccatataattttgagtcaattagaatatgtttgtatcagtctgtctacagttttacacctgtcaaaaggtacttgaactaaaagaagtaccttgaacaattttgaaatttattattcctctgaaactgattaaaagaattatggtagagtgaaattctgattggcataatttgggagagaaattattccttggagatcaacctctgccaagatactttataatgacattgagactttttgatttacaaaacttgttatataaaaaatactaagatgatgacagataatacacagactaattaaaattgtactagaattaattgtctaaataaattacaagggtacgtsgtacatctaaatgtatgtttatatattttatttgtgcattttat

SEQ ID NO: 18591 - DNA, 703 bp, Homo sapiens
tatcaaagcagttggcacaagagtgtacaaaattccctaattgtgtctatgtggagaagacatagacaaacagagaatagcaaaacagaaatagcaaaaaagcacaaataaattttacctgtatttttaagtaaaagccaattagagaaggaaaacatgaaatttgtgttttatcaaaatttttctctttctcataatatagttgaaaatattactgcaaaaaatttgaagcactggtatgttcacaaaaaaagtaaaatataaggtcaaaaccatgggaatgcagggagcagacaaaatacacctaaacackgaaactgattttgccctacagacatgtagcaaaatgaatgagtgcagattcctactgtcatacatcacataggatagtaaagaaatacatagtttttcccaagatagggcatcacacagaagctcttccctaaagctaggaccaaaatttatatcctcagtataaagaagaatcagaggtaaattagtcccatttcacattccctggaaatggcaaataaaaatgacttgagattggacagatttaaagaaactcaatcattaatgatttacagcaattaatttaaaaattgtttaaatgtgcagtccaaacatatgtccaaacacctttaggccaagaattaatataatgtggtcccagaatggtggtgcctttagaagactcacaaca

SEQ ID NO: 18592 - DNA, 703 bp, Homo sapiens
tatcaaagcagttggcacaagagtgtacaaaattccctaattgtgtctatgtggagaagacatagacaaacagagaatagcaaaacagaaatagcaaaaaagcacaaataaattttacctgtatttttaagtaaaagccaattagagaaggaaaacatgaaatttgtgttttatcaaaatttttctctttctcataatatagttgaaaatattactgcaaaaaatttgaagcactggtatgttcacaaaaaaagtaaaatataaggtcaaaaccatgggaatgcagggagcagacaaaatacacctaaacacggaaactgattttgccctacagacatgtagcaaaatgaatgrgtgcagattcctactgtcatacatcacataggatagtaaagaaatacatagtttttcccaagatagggcatcacacagaagctcttccctaaagctaggaccaaaatttatatcctcagtataaagaagaatcagaggtaaattagtcccatttcacattccctggaaatggcaaataaaaatgacttgagattggacagatttaaagaaactcaatcattaatgatttacagcaattaatttaaaaattgtttaaatgtgcagtccaaacatatgtccaaacacctttaggccaagaattaatataatgtggtcccagaatggtggtgcctttagaagactcacaaca

SEQ ID NO: 18593 - DNA, 703 bp, Homo sapiens
tatcaaagcagttggcacaagagtgtacaaaattccctaattgtgtctatgtggagaagacatagacaaacagagaatagcaaaacagaaatagcaaaaaagcacaaataaattttacctgtatttttaagtaaaagccaattagagaaggaaaacatgaaatttgtgttttatcaaaatttttctctttctcataatatagttgaaaatattactgcaaaaaatttgaagcactggtatgttcacaaaaaaagtaaaatataaggtcaaaaccatgggaatgcagggagcagacaaaatacacctaaacacggaaactgattttgccctacagacatgtagcaaaatgaatgagtgcagattcctactgtcatacatcacataggayagtaaagaaatacatagtttttcccaagatagggcatcacacagaagctcttccctaaagctaggaccaaaatttatatcctcagtataaagaagaatcagaggtaaattagtcccatttcacattccctggaaatggcaaataaaaatgacttgagattggacagatttaaagaaactcaatcattaatgatttacagcaattaatttaaaaattgtttaaatgtgcagtccaaacatatgtccaaacacctttaggccaagaattaatataatgtggtcccagaatggtggtgcctttagaagactcacaaca

SEQ ID NO: 18594 - DNA, 703 bp, Homo sapiens
tatcaaagcagttggcacaagagtgtacaaaattccctaattgtgtctatgtggagaagacatagacaaacagagaatagcaaaacagaaatagcaaaaaagcacaaataaattttacctgtatttttaagtaaaagccaattagagaaggaaaacatgaaatttgtgttttatcaaaatttttctctttctcataatatagttgaaaatattactgcaaaaaatttgaagcactggtatgttcacaaaaaaagtaaaatataaggtcaaaaccatgggaatgcagggagcagacaaaatacacctaaacacggaaactgattttgccctacagacatgtagcaaaatgaatgagtgcagattcctactgtcatacatcacataggatagtaaagaaatacatagtttttcccaagatagggcatcacacagaagctcttccctaaagctaggaccawaatttatatcctcagtataaagaagaatcagaggtaaattagtcccatttcacattccctggaaatggcaaataaaaatgacttgagattggacagatttaaagaaactcaatcattaatgatttacagcaattaatttaaaaattgtttaaatgtgcagtccaaacatatgtccaaacacctttaggccaagaattaatataatgtggtcccagaatggtggtgcctttagaagactcacaaca

SEQ ID NO: 18595 - DNA, 266 bp, Homo sapiens
ctttcccttgatgtctcagaataaaatgatgaaaccagaaggagagagaaactttgatttttgtrtttcaaatttctattatttattatttaagagtatatgatttggagtcagggtaaaattgagtcctcacctcaactctgtaatttcacagctatttgttcttagaaaaattcctcaatgtttcagatcctcaagttctttctcgttgagaaaatgaagacggtaatatccatctcatgcaattttaggaaaattaaataaag

SEQ ID NO: 18596 - DNA, 1458 bp, Homo sapiens
tgagaagcatttggaagtcgattcaaaaggatttaatgaacagtttattgtgggaatgaaaaaaggaagttgtccatgtcaattcttaggttttaagcttcaaaaaagtatgtagataatggctatagtaatcaaaattaagaataatagagggaaatagtttgaagagaggaaatgatagatatttttggccatattaaaactgaggtatctacaggacataccaaaatatctaactcagtaggaaaaatattattcagaaaggacatttggtttatgaagaataaagacctattggattaagtggaatgttttacttaaaagtagtttcctactcttttcaggaatattattggcaattaatcwttgacctctaagccagttcacattaaaaataagaccacaccaaaagacattttagattgagaaactaatgtgaacaattcatggggagaaaattgaaatatggcaatagtctattgtacagctgtcttgaaggggaatttgaaggccataactgtcgaaggattttcctaacttacagaagcctgtgtacactaccagaagaattgatgtttgcaattccacccactgtgtactttttcatgatgagagaaatcattcaggacaacgcagttagcaaaccataactcaaaatcgatagacccccaccccccgcatttttgttatttcatgataagataatggcaatatataaaataagcataatactaatagtatataaaccataaagtaaaatgtttaacatatattattttattcaaccctaaacatcctctattataacttggtgagaaaagcagtaacatctccatgttaaatattaaagaaccttaaaactagaataaatgcaaagaacatgacacgcggtatggatgacctttttttctgaaaatagtttaaattcctttcccctataccagtattagactgagaaatggagtctctcctgagaaccatctaagtactggtatatctgcttgaatcacaaacacatgattataaggcaaatgtaatccatatctatgttgttaaaaaagatgaaaatccataaagtactgtgatcatatttagagaattttcaatcaaatgattctgtcaattcctaaatatgctgatagcaacaaagaaacagatgtttggttttattccattgccagtgatatgggaaaaaaaagctattaataagcataaattctactaaagttgaaagacatggaatattcatataaatggagtacattttaccactttttatactcaagaaaataacatgaaaaataactgtacagggtactaggcttaatactcagatagtgaaataatctgcacaacaaactcccatgacacaaatttacctctgcaacgaacctgcacatgcaccccaaacttaaaataaaaattaaaaaagaaaaaaatagttatatagtaaagaaa

SEQ ID NO: 18597 - DNA, 1458 bp, Homo sapiens
tgagaagcatttggaagtcgattcaaaaggatttaatgaacagtttattgtgggaatgaaaaaaggaagttgtccatgtcaattcttaggttttaagcttcaaaaaagtatgtagataatggctatagtaatcaaaattaagaataatagagggaaatagtttgaagagaggaaatgatagatatttttggccatattaaaactgaggtatctacaggacataccaaaatatctaactcagtaggaaaaatattattcagaaaggacatttggtttatgaagaataaagacctattggattaagtggaatgttttacttaaaagtagtttcctactcttttcaggaatattattggcaattaatctttgacstctaagccagttcacattaaaaataagaccacaccaaaagacattttagattgagaaactaatgtgaacaattcatggggagaaaattgaaatatggcaatagtctattgtacagctgtcttgaaggggaatttgaaggccataactgtcgaaggattttcctaacttacagaagcctgtgtacactaccagaagaattgatgtttgcaattccacccactgtgtactttttcatgatgagagaaatcattcaggacaacgcagttagcaaaccataactcaaaatcgatagacccccaccccccgcatttttgttatttcatgataagataatggcaatatataaaataagcataatactaatagtatataaaccataaagtaaaatgtttaacatatattattttattcaaccctaaacatcctctattataacttggtgagaaaagcagtaacatctccatgttaaatattaaagaaccttaaaactagaataaatgcaaagaacatgacacgcggtatggatgacctttttttctgaaaatagtttaaattcctttcccctataccagtattagactgagaaatggagtctctcctgagaaccatctaagtactggtatatctgcttgaatcacaaacacatgattataaggcaaatgtaatccatatctatgttgttaaaaaagatgaaaatccataaagtactgtgatcatatttagagaattttcaatcaaatgattctgtcaattcctaaatatgctgatagcaacaaagaaacagatgtttggttttattccattgccagtgatatgggaaaaaaaagctattaataagcataaattctactaaagttgaaagacatggaatattcatataaatggagtacattttaccactttttatactcaagaaaataacatgaaaaataactgtacagggtactaggcttaatactcagatagtgaaataatctgcacaacaaactcccatgacacaaatttacctctgcaacgaacctgcacatgcaccccaaacttaaaataaaaattaaaaaagaaaaaaatagttatatagtaaagaaa

SEQ ID NO: 18598 - DNA, 1238 bp, Homo sapiens
aattatactttctctgtgaccagactacatagactaaaaatccactctcaccacttaattacatgtgaacatgaacagactcatctagcctgactttgtcatctttttcttatttgtcaaatagagataataacagtagcttttcataaggttgttgggaagattgaatgagttaagataaagcactcaaactatataaatgtcttattgtactcagagctatgttaagtgttagrtattattacatttattatcggtattcacattttattattgttgtattggtgggcatacaggctgctttggatacccttggaatcatgttaatctttctctacctttttattctcagcatctagttcaatgccacacacacacaaacatgcttcacaaatgtctgttgacaaatcaggtaaatggcatggcttactgatgtctaactgtggagatagttatcactcatgggcccactgagagcaaaaagaaagctgacaatggtaaaataaactcagataggactcagaaggacctgtttttactgacttggttttaggatatatctacacatagagaagggttcggacaattatagttagcaaatcaagcaacaacagtgtttcagacactttgataccaaaataattttcctcactttaaatatagcagtttttccataaaaatggcatgcatcagccaggtaaaaaagataccatgtgtatatatcactcatgtgtatatatcatcatgcatcagcaaggtaaaaaagataccatgtgtatatatcatcttttttcctgcagaaaaaagatgacactcaaatttggtaatttgaggaatgtctaaaacaagcactatttgaatagatgtgggcaggttataggaaaattgaaaaggaaggcagtaacctacagactatgcctgaaaggatggagggaaataagagtttgcaggaatctggagggaaaactgtgtggagagaacacttgacaagaaatgtgacctctggtgggcagatgcagtcagcttggagagaggaagccagggaaacaagtaccttacttctctcttcctcagataccttttcctgccatcattcctccagaagtttctcttgacagccaaacaaccaggagccagtagacagaaaactctaagttagaattcacacacgtcagtttcatcgccacagagcagggtagggaaggctgaagagtattttggagagcaagggaagatgt

SEQ ID NO: 18599 - DNA, 1238 bp, Homo sapiens
aattatactttctctgtgaccagactacatagactaaaaatccactctcaccacttaattacatgtgaacatgaacagactcatctagcctgactttgtcatctttttcttatttgtcaaatagagataataacagtagcttttcataaggttgttgggaagattgaatgagttaagataaagcactcaaactatataaatgtcttattgtactcagagctatgttaagtgttaggtattattacatttattatcrgtattcacattttattattgttgtattggtgggcatacaggctgctttggatacccttggaatcatgttaatctttctctacctttttattctcagcatctagttcaatgccacacacacacaaacatgcttcacaaatgtctgttgacaaatcaggtaaatggcatggcttactgatgtctaactgtggagatagttatcactcatgggcccactgagagcaaaaagaaagctgacaatggtaaaataaactcagataggactcagaaggacctgtttttactgacttggttttaggatatatctacacatagagaagggttcggacaattatagttagcaaatcaagcaacaacagtgtttcagacactttgataccaaaataattttcctcactttaaatatagcagtttttccataaaaatggcatgcatcagccaggtaaaaaagataccatgtgtatatatcactcatgtgtatatatcatcatgcatcagcaaggtaaaaaagataccatgtgtatatatcatcttttttcctgcagaaaaaagatgacactcaaatttggtaatttgaggaatgtctaaaacaagcactatttgaatagatgtgggcaggttataggaaaattgaaaaggaaggcagtaacctacagactatgcctgaaaggatggagggaaataagagtttgcaggaatctggagggaaaactgtgtggagagaacacttgacaagaaatgtgacctctggtgggcagatgcagtcagcttggagagaggaagccagggaaacaagtaccttacttctctcttcctcagataccttttcctgccatcattcctccagaagtttctcttgacagccaaacaaccaggagccagtagacagaaaactctaagttagaattcacacacgtcagtttcatcgccacagagcagggtagggaaggctgaagagtattttggagagcaagggaagatgt

SEQ ID NO: 18600 - DNA, 1238 bp, Homo sapiens
aattatactttctctgtgaccagactacatagactaaaaatccactctcaccacttaattacatgtgaacatgaacagactcatctagcctgactttgtcatctttttcttatttgtcaaatagagataataacagtagcttttcataaggttgttgggaagattgaatgagttaagataaagcactcaaactatataaatgtcttattgtactcagagctatgttaagtgttaggtattattacatttattatcggtattcacattttattattgttgtattggtgggcatacaggctgctttggataccctkggaatcatgttaatctttctctacctttttattctcagcatctagttcaatgccacacacacacaaacatgcttcacaaatgtctgttgacaaatcaggtaaatggcatggcttactgatgtctaactgtggagatagttatcactcatgggcccactgagagcaaaaagaaagctgacaatggtaaaataaactcagataggactcagaaggacctgtttttactgacttggttttaggatatatctacacatagagaagggttcggacaattatagttagcaaatcaagcaacaacagtgtttcagacactttgataccaaaataattttcctcactttaaatatagcagtttttccataaaaatggcatgcatcagccaggtaaaaaagataccatgtgtatatatcactcatgtgtatatatcatcatgcatcagcaaggtaaaaaagataccatgtgtatatatcatcttttttcctgcagaaaaaagatgacactcaaatttggtaatttgaggaatgtctaaaacaagcactatttgaatagatgtgggcaggttataggaaaattgaaaaggaaggcagtaacctacagactatgcctgaaaggatggagggaaataagagtttgcaggaatctggagggaaaactgtgtggagagaacacttgacaagaaatgtgacctctggtgggcagatgcagtcagcttggagagaggaagccagggaaacaagtaccttacttctctcttcctcagataccttttcctgccatcattcctccagaagtttctcttgacagccaaacaaccaggagccagtagacagaaaactctaagttagaattcacacacgtcagtttcatcgccacagagcagggtagggaaggctgaagagtattttggagagcaagggaagatgt

SEQ ID NO: 18601 - DNA, 1238 bp, Homo sapiens
aattatactttctctgtgaccagactacatagactaaaaatccactctcaccacttaattacatgtgaacatgaacagactcatctagcctgactttgtcatctttttcttatttgtcaaatagagataataacagtagcttttcataaggttgttgggaagattgaatgagttaagataaagcactcaaactatataaatgtcttattgtactcagagctatgttaagtgttaggtattattacatttattatcggtattcacattttattattgttgtattggtgggcatacaggctgctttggatacccttggaatcatgttaatctttctctacctttwtattctcagcatctagttcaatgccacacacacacaaacatgcttcacaaatgtctgttgacaaatcaggtaaatggcatggcttactgatgtctaactgtggagatagttatcactcatgggcccactgagagcaaaaagaaagctgacaatggtaaaataaactcagataggactcagaaggacctgtttttactgacttggttttaggatatatctacacatagagaagggttcggacaattatagttagcaaatcaagcaacaacagtgtttcagacactttgataccaaaataattttcctcactttaaatatagcagtttttccataaaaatggcatgcatcagccaggtaaaaaagataccatgtgtatatatcactcatgtgtatatatcatcatgcatcagcaaggtaaaaaagataccatgtgtatatatcatcttttttcctgcagaaaaaagatgacactcaaatttggtaatttgaggaatgtctaaaacaagcactatttgaatagatgtgggcaggttataggaaaattgaaaaggaaggcagtaacctacagactatgcctgaaaggatggagggaaataagagtttgcaggaatctggagggaaaactgtgtggagagaacacttgacaagaaatgtgacctctggtgggcagatgcagtcagcttggagagaggaagccagggaaacaagtaccttacttctctcttcctcagataccttttcctgccatcattcctccagaagtttctcttgacagccaaacaaccaggagccagtagacagaaaactctaagttagaattcacacacgtcagtttcatcgccacagagcagggtagggaaggctgaagagtattttggagagcaagggaagatgt

SEQ ID NO: 18602 - DNA, 615 bp, Homo sapiens
ttaagaaacttcatttatttttaactattcattagcagcaaatctgcagttgttaaacatggattttctctgaatgccaattccagttgcttcttacttctcagatgtagggtgtttgtctgaaaaattgtttctgagggaagagtatgctgaatagaattttttctgatgactaatataaaaatagcatgaggtctggaaacaatttaaacttctgccacatattcagttagccagagaaatggtgctggaactactgacaattttaggcaacaaaatgttttatccaaagagaagagaatgttatatcttaaaaatgaagtgataccatttgtttcttgtggaaacaatgccaattttcttagaactcttagtttgatggttgtaattctgactaaacaaagagttcatactaatgaagaacttccttttaaaatttatttcaaaagtactgtgactcaaagrgtatgggaacaaataaaaccagaactctatctgaatactatttactgaatgtaaaaagacagtggataacataatttttaatgccactttgggatagggaaacatataaagcccacatatctggagatgcatctttgtattaaatagtca

SEQ ID NO: 18603 - DNA, 615 bp, Homo sapiens
ttaagaaacttcatttatttttaactattcattagcagcaaatctgcagttgttaaacatggattttctctgaatgccaattccagttgcttcttacttctcagatgtagggtgtttgtctgaaaaattgtttctgagggaagagtatgctgaatagaattttttctgatgactaatataaaaatagcatgaggtctggaaacaatttaaacttctgccacatattcagttagccagagaaatggtgctggaactactgacaattttaggcaacaaaatgttttatccaaagagaagagaatgttatatcttaaaaatgaagtgataccatttgtttcttgtggaaacaatgccaattttcttagaactcttagtttgatggttgtaattctgactaaacaaagagttcatactaatgaagaacttccttttaaaatttatttcaaaagtactgtgactcaaagagtatgggaacaaataaaaccagaactctatctgaatactatttactgaatgtaaaaagacartggataacataatttttaatgccactttgggatagggaaacatataaagcccacatatctggagatgcatctttgtattaaatagtca

SEQ ID NO: 18604 - DNA, 635 bp, Homo sapiens
taatttwaaaaaattgtacaattttgggttaagccaactattaatttatcccaaatcatttgaaatataaccacctcctatttattggaattatctcttaagatagccacaaaaatagccttgtggatactttaaaattatattaatgatgtagaaacatacgttgaccaagaatgaaatgaacatatgcaaaatggccagatagttccagaaacttgaattattattcaaaccacaaaatctttcagaaatcattgcagaagaatattgggtcatgaattagtctattttctgaagtagggttaatttgaaagctgtagtataaattcaaaggtagggaaaaaaggataaaatcaccaggcttatttttaaaagccacatattacaaaaagcagaaagaatttgtagttttttcttcaatatattgtatctatgaatggatgcacagagttttatggactcaaactcatgatgatgaaatacagtgtttactgaaagttgttttccttattaataaatgtttctatgatacacatttgataatacttctttgtttcattttaaattatttttcttccaagaaagtacatgcaaaataaacttgccatttttacaagcactgttctcttactaat

SEQ ID NO: 18605 - DNA, 635 bp, Homo sapiens
taattttaaaaaattgtacaattttgggttaagccaactattawtttatcccaaatcatttgaaatataaccacctcctatttattggaattatctcttaagatagccacaaaaatagccttgtggatactttaaaattatattaatgatgtagaaacatacgttgaccaagaatgaaatgaacatatgcaaaatggccagatagttccagaaacttgaattattattcaaaccacaaaatctttcagaaatcattgcagaagaatattgggtcatgaattagtctattttctgaagtagggttaatttgaaagctgtagtataaattcaaaggtagggaaaaaaggataaaatcaccaggcttatttttaaaagccacatattacaaaaagcagaaagaatttgtagttttttcttcaatatattgtatctatgaatggatgcacagagttttatggactcaaactcatgatgatgaaatacagtgtttactgaaagttgttttccttattaataaatgtttctatgatacacatttgataatacttctttgtttcattttaaattatttttcttccaagaaagtacatgcaaaataaacttgccatttttacaagcactgttctcttactaat

SEQ ID NO: 18606 - DNA, 563 bp, Homo sapiens
tggacactggtgttctcaaacccagcatggaggtcacctttgctcttgtcagtgttacaactgaagtaaattgtgttgaaaagcaccatgaagctttgagtgaagctcttcctgggcacaatgtgggcttcaatgtcaagaacatgtccgtcaaggagattcgtcatagcaacgatgctggtgacacaaaaagaaaacccacaaatggaagcagctggcttccccgcttaggtgattatcctgaaccacccaggccaaatmagtgtggactatgcccctgtactggactgccacacggctcatattgcctgcaagtttgctaagctgaaggaaaagattgatctccattctggtaaaaatctggaagacggccctaaattcttgaaatctggtgatgctgccatcgttgatatggttcctagaaagctcatgtgtattgagagcttctcagactattcacctctgggtcgctttgctattcgtgatatgagacagacagttgctgtgggtgtcatcaaatcagtggacaagaaggctgctgaagctggcaaggtcaccaagtc

SEQ ID NO: 18607 - DNA, 598 bp, Homo sapiens
agtacagacggcaatactgctatttagcattaggtactaatatcatgttataggccatcaaaatctaagttaaaattcattttgtttcttaaatttaagacactaaactgctacacttcccaaatacacagaaattgcaaaaaccctgggaatcttgcttaacaaaatgctatacgtcatgttttaggatgcaatcaaattcatttactttcaatgccttaaaggatgaacaaattactcaccaactttctgtaaacacttgcagtatgttaaattatctgaaataatttttcctaattcagggaaatgccagccataccattctctacatcgcataatgtagttgtttagttctttatccaagtcatctaacaaggctgtagtagattaaaaacaaacaaacaaaacttaaagggatttattgtggtaaaacatacacaacataaaatttaacacttcaggctgggcayggtggctcatgtctgtaatcccagcagacaggcatatcacgaagtcagaagttcaagaccagcctggccaacatggtgaaaccccatctctattaaaaatacaaaaattagccaggcatggtggtgca

SEQ ID NO: 18608 - DNA, 598 bp, Homo sapiens
agtacagacggcaatactgctatttagcattaggtactaatatcatgttataggccatcaaaatctaagttaaaattcattttgtttcttaaatttaagacactaaactgctacacttcccaaatacacagaaattgcaaaaaccctgggaatcttgcttaacaaaatgctatacgtcatgttttaggatgcaatcaaattcatttactttcaatgccttaaaggatgaacaaattactcaccaactttctgtaaacacttgcagtatgttaaattatctgaaataatttttcctaattcagggaaatgccagccataccattctctacatcgcataatgtagttgtttagttctttatccaagtcatctaacaaggctgtagtagattaaaaacaaacaaacaaaacttaaagggatttattgtggtaaaacatacacaacataaaatttaacacttcaggctgggcacggtggctcatgtctgtaatcccagcagacaggcakatcacgaagtcagaagttcaagaccagcctggccaacatggtgaaaccccatctctattaaaaatacaaaaattagccaggcatggtggtgca

SEQ ID NO: 18609 - DNA, 552 bp, Homo sapiens
tgcctgtatcaaaacayctcgtgtaccccccgtaaatatatataccgactatgtacccacaacaatttaaaaaaataaaataaaatgacttctccccatctgtagattatctttaatttctttaaggtttattttacaggtcaaattccaacataaccatatttatcaatcttctattttatacttagtttttttatgtcttatttaagaaatcctacctttcccaagactttcacctttaatatttgactaaaagtctttttgttgttgttactgttcttttttttgtttgtttttgtttttgtttttgttttagacagagtcttgctctgttgcccaggctggagtgcagtggcacaatctgggctcactgcaacctccacctcctaggtgagttcgagtgattctcctgcctcagcctccggagtagctggaattacaggcgcccaccaccacacccagctaatttttttgtattttcaatagagacggggtttcatcaggtgagccaggctggtctcaaactcctgacctcaggttatccacccgcct

SEQ ID NO: 18610 - DNA, 552 bp, Homo sapiens
tgcctgtatcaaaacacctcgtgtaccccccgtaaatatatataccgactatgtacccacaacaatttaaaaaaataaaataaaatgacttctccccatctgtagattatctttaatttctttaaggtttattttacaggtcaaattccaacataaccatatttatcaatcttctattttatacttagtttttttatgtcttatttaagaaatcctacctttcccaagactttcacctttaatatttgactaaaagtctttttgttgttgttrctgttcttttttttgtttgtttttgtttttgtttttgttttagacagagtcttgctctgttgcccaggctggagtgcagtggcacaatctgggctcactgcaacctccacctcctaggtgagttcgagtgattctcctgcctcagcctccggagtagctggaattacaggcgcccaccaccacacccagctaatttttttgtattttcaatagagacggggtttcatcaggtgagccaggctggtctcaaactcctgacctcaggttatccacccgcct

SEQ ID NO: 18611 - DNA, 552 bp, Homo sapiens
tgcctgtatcaaaacacctcgtgtaccccccgtaaatatatataccgactatgtacccacaacaatttaaaaaaataaaataaaatgacttctccccatctgtagattatctttaatttctttaaggtttattttacaggtcaaattccaacataaccatatttatcaatcttctattttatacttagtttttttatgtcttatttaagaaatcctacctttcccaagactttcacctttaatatttgactaaaagtctttttgttgttgttaytgttcttttttttgtttgtttttgtttttgtttttgttttagacagagtcttgctctgttgcccaggctggagtgcagtggcacaatctgggctcactgcaacctccacctcctaggtgagttcgagtgattctcctgcctcagcctccggagtagctggaattacaggcgcccaccaccacacccagctaatttttttgtattttcaatagagacggggtttcatcaggtgagccaggctggtctcaaactcctgacctcaggttatccacccgcct

SEQ ID NO: 18612 - DNA, 538 bp, Homo sapiens
gaccacctcaatggatattattgtgaaatttcagaatgcttgtagtaaatcaggtataccagaaaccctggccacagaaaaagcagagccacactgagagctgacagtggcaatggggaccccacaaggacaactgtactgctgattacagaacaaccagtccagatggagcaggaggacccacaggtatgcatcaaagaaaaaaaaatatatcacctgatgaatttgtgtatagagagtcagagggtgcatccaggagaagaacactgaaaagcaagcaggcaaagaaaaaaatacccaagaaattattaactccaaggatgataaatattgcattcataagttattcatagtccattatgttgctcagctgtgaataatatttacaaagacaaaataatgtaaayactgaaataatggattaaactgagataatgatgtaactatggtgtgtattaatattgactgtgtatattagagaggagaggagttgcagggagtgacaaaggtaagcagggggatggagaggtgcagaatg

SEQ ID NO: 18613 - DNA, 1830 bp, Homo sapiens
  misc_feature (1)...(1830): n = A,T,C or G
atttttatgggtgcctcgagtagtgccatgatggccctaaatatttttttaaactgtggagcccttacaaaattaaaattcctactgggaagagactgagtgttggggttggtgagaccagatttcaaatgtgaactctgactttatgaaatgtatagatttgggcaaattacatgacctcatctgtaacacagggaattagctatctctttggtgtgtgtgtgtgtgtgtgtgtgtgtctatgtgtgtttaggtgtgtgtttaacatatatcatgatgtaatgttttaaataggccaggtgccgtgggaggttgagatgggcagatagcttgagctcaggaggtcaaggccagcctgggcaacatggtgaaaccttgtctctacaaaaaaatacaaaaaatgagctaggcatggtggctggtgtgcctgtggtcccagctactcagaaggctgaggctggaggattgtttgagcttggaagtggaggttgcagtcagccgagattgcaccactgctctccagcctaggtgacagctagaacctgtctaataaaagaaaaaaaaaaaaagaaagaaagaannnnnnnnnnnnnnnnnnnnnnnnnnnnnnnnnnnnnnnnnnnnnnnnnnnnnnnnnnnnnnnnnnnnnnnnnnnnnnnnnnnnnnnnnnnnnnnnnnnnctcagaatatayaaaacaaagagtgaaccctaatgtaaaatgtggactttgagtgattaagacatgtccatgtaggttcaccagttataacaaacgtaccacccttgtccagacattgataatggaggaagttatatctgggtgggggaagatgatatgcagaaaatctgtacgttctgctcaattttgctgtgaatctaagactgttccaaaaaatgaagactattttaaaaacacatacacacactgtcttatggtatcttccctcagttattaggcttcttccactgccaaataatcttctttttcaccttagccacagcctcaccttcagtatgccttctgtctcatccacatggtagtcattcccttactccatggtctcagaagtttagttcatcatggctggctactgtctaggtccataaatgtagatgtagctctccaacagagaccctggacggtaggggtttgaacttctcctgtaactaattctgtaggatgatggattaaaaacacgctttggatgaagaaagatgcctcaggacatcctatcttagtcacccaccagatgtgagacaaaagaaagttatggtaaaaaaatgtcagttctgcgacttctgtaactttcaacagttatttctgccctctagcataatcctagtaatgagtaatatacattaaatcgccagtgaacaggggcattgactgcatttttaaaaattatttaacttaaataccctctagtcttaagatagatttctttgaatctggcctcattttatttgctgccttcctttgctttaaaattccgacctaactcactaagcaaacaacagaggctcaaaatgttcaagaacctccaaaattaggtacgttcattgtggaaggatacatcatatcatcattctttcaagtaattatgaaattctatattttacttgattgactatgtctgaaaaaagataggaaatataaaagaactagaactctgtttagttgcatcctcactatcttccaagcactgtgccaggctgtgagaataaagtcttgaaaatgatactgtatttgcccttgatgtgccagtattagtagaaggaaaatgactgttatgacaattactaggctggaagtgagaaaggaaaataaa

SEQ ID NO: 18614 - DNA, 1830 bp, Homo sapiens
  misc_feature (1)...(1830): n = A,T,C or G
atttttatgggtgcctcgagtagtgccatgatggccctaaatatttttttaaactgtggagcccttacaaaattaaaattcctactgggaagagactgagtgttggggttggtgagaccagatttcaaatgtgaactctgactttatgaaatgtatagatttgggcaaattacatgacctcatctgtaacacagggaattagctatctctttggtgtgtgtgtgtgtgtgtgtgtgtgtctatgtgtgtttaggtgtgtgtttaacatatatcatgatgtaatgttttaaataggccaggtgccgtgggaggttgagatgggcagatagcttgagctcaggaggtcaaggccagcctgggcaacatggtgaaaccttgtctctacaaaaaaatacaaaaaatgagctaggcatggtggctggtgtgcctgtggtcccagctactcagaaggctgaggctggaggattgtttgagcttggaagtggaggttgcagtcagccgagattgcaccactgctctccagcctaggtgacagctagaacctgtctaataaaagaaaaaaaaaaaaagaaagaaagaannnnnnnnnnnnnnnnnnnnnnnnnnnnnnnnnnnnnnnnnnnnnnnnnnnnnnnnnnnnnnnnnnnnnnnnnnnnnnnnnnnnnnnnnnnnnnnnnnnnctcagaatatataaaacaaagagtgaaccctaatgtaaaatgtggactttgagtgattaagacatgtccatgtaggttcaccagttataacaaacgtaccacccttgtccagacattgataatggaggaagttatatctgggtgggggaagatgatatgcagaaaatctgtacrttctgctcaattttgctgtgaatctaagactgttccaaaaaatgaagactattttaaaaacacatacacacactgtcttatggtatcttccctcagttattaggcttcttccactgccaaataatcttctttttcaccttagccacagcctcaccttcagtatgccttctgtctcatccacatggtagtcattcccttactccatggtctcagaagtttagttcatcatggctggctactgtctaggtccataaatgtagatgtagctctccaacagagaccctggacggtaggggtttgaacttctcctgtaactaattctgtaggatgatggattaaaaacacgctttggatgaagaaagatgcctcaggacatcctatcttagtcacccaccagatgtgagacaaaagaaagttatggtaaaaaaatgtcagttctgcgacttctgtaactttcaacagttatttctgccctctagcataatcctagtaatgagtaatatacattaaatcgccagtgaacaggggcattgactgcatttttaaaaattatttaacttaaataccctctagtcttaagatagatttctttgaatctggcctcattttatttgctgccttcctttgctttaaaattccgacctaactcactaagcaaacaacagaggctcaaaatgttcaagaacctccaaaattaggtacgttcattgtggaaggatacatcatatcatcattctttcaagtaattatgaaattctatattttacttgattgactatgtctgaaaaaagataggaaatataaaagaactagaactctgtttagttgcatcctcactatcttccaagcactgtgccaggctgtgagaataaagtcttgaaaatgatactgtatttgcccttgatgtgccagtattagtagaaggaaaatgactgttatgacaattactaggctggaagtgagaaaggaaaataaa

SEQ ID NO: 18615 - DNA, 724 bp, Homo sapiens
acaaccttgagcaagcctctcttgtagctccttaggggacccacctgaaactcataattctgacctcactgaccagcaccaggaaccaggaattgtgcacatcactgtgcccgctgaagaatagctgacccaataccttcactaatgctcagactgaattcttcatattgcctctgtacctctcctcttctctacattaattcctggtttctgatagagatccagttactatagcaacaaaaccggccttccaagacgatgtgtaagtctgaagtgcgtgaggcaacctgccattgcaggtttttgcttgattttatacaggagtacatttgtgttttgtgaagagaagtgatgatcaaatgatttccaaggttttattcttacgtgaatactggaattctctacactgatttccatgaaatagaaccaaatayagtaggaaagttatgcagcaaaaaggcatttctagaaaacaaattattagattacaaaaatttcctaagcttacctccttccttttttttctatcttccttcccttcttctatctgcctatcattttttccttccttccttccttctagttaaaaaaaatacgtattataaacatccaacctctcacagaactactgtatgggaggaaaccaagcaaacagctagaatggtgctttaaatgctatgacagagaggagtacagtagtaggaactcagagaaatgccaccta

SEQ ID NO: 18616 - DNA, 724 bp, Homo sapiens
acaaccttgagcaagcctctcttgtagctccttaggggacccacctgaaactcataattctgacctcactgaccagcaccaggaaccaggaattgtgcacatcactgtgcccgctgaagaatagctgacccaataccttcactaatgctcagactgaattcttcatattgcctctgtacctctcctcttctctacattaattcctggtttctgatagagatccagttactatagcaacaaaaccggccttccaagacgatgtgtaagtctgaagtgcgtgaggcaacctgccattgcaggtttttgcttgattttatacaggagtacatttgtgttttgtgaagagaagtgatgatcaaatgatttccaaggttttattcttacgtgaatactggaattctctacactgatttccatgaaatagaaccaaatatagtaggaaagttatgcagcaaaaaggcatttctagaaaacaaattattagattacaaaaatttcctaagcttacctccttccttttttttctatcttccttcccttcttctatctgcctatcattttttccttccttccttccttctakttaaaaaaaatacgtattataaacatccaacctctcacagaactactgtatgggaggaaaccaagcaaacagctagaatggtgctttaaatgctatgacagagaggagtacagtagtaggaactcagagaaatgccaccta

SEQ ID NO: 18617 - DNA, 2132 bp, Homo sapiens
aaatcttaccatgatttagcactaaagtttgataaagaagaaagttcccaaaacatgaatgattgcaaaaaaggcattgcattcctccaggcctctgtcccctcacctgtgaaaagaaagaggtggccaaattaacttgatgaaacataactgtcagttgctgaaatgcgactgaaactcaggaatttgcttttttgcttatgtctcttctgagattgtaggtttcatgtaggaagaaggtgagaaagaatagtcctagataaataaatgattctcaactgattactagatctaaaagggatccattattgaataatgcagcaagaatgtcccaaatattcaccaatagttttgcagccttattccctgataatagaaagttatctttaacctcttcccactacatttatcccttcactatgggacaacaactgagactagattctattcagaccagcacaagtttggaaatttctctttactttctctccagatgcccagatgtaagagtgtgtggtaggggaagaaacatttatttttaccttcatatcctccattcctaaatattaaataccatccttgttataaaatgtaaaagccaacacgaattatagatttatttggattttaggagactaactagagacgatcacttccatggcaagggaggatatttgtgtattgtaatatacagaactgtaagtgcactcaacatttgttctgtggtgttgtttttcattaaccagttagacagggaatgctaatgatgtgttgggggaagatgtcaatattcatgatgctgctggaaatgtatataaaatgtggtttccattactccccactgggagcaataagtaatgctgtgtacaagggaaggacagcttgttcatgaatatgagcacagcagcaaattgtatggcaaggcaaaactcccaggattttatgactcttaacgattccagccctcaagtgtcactatctgtgacttggctgtgagtaatgagacgctgccttgcctttgtccaaattttactgggagcattgaaaggcacgttgcgtaccacctattgccatcatgcactggaaatctctaggatgccatgtcaggcaggaaaatgctgttggtgatctcaaaattattgccaattgctgggataaaattgttgttagagtcacattcccattccttcattcagcaaggtgaaaaacagctcattgtttatacaccctacagtgatgaattatgaagacattctaatggaaagtttgccatggaaactgccagtaaaatgtggctaagagacatcaaattacagaaggtacctttcaataattagaagtgtttatgaactaggtacatggtgagagcatgtacatataaaacaagaggtaaaaatattctcaaattaaatctccacagtaggagaaataaggggctaaggcagagactgcattttggaagaagatgttctgtactatgctaaaatgctttctggtattgttacattggtatttttaaatagtaataatgcttttacttttattttttctaatgggaagtataatcatgtattttatttagaaaaccttaaatattaaaagccataaaagaagtggggggaattaatgttttttatgcaaagtggcattctaaaatgtgtggtgtattaggtaacctggaggtgccactacaatgcagcctgtatttttgcctagatcacagtggcaaatgttaactgaagtaggaatgtgaarataggaatccagttttgccactgtgagctgtgtgatcctgggcaatttattacatcttgaggcacagttctcattatctaaagactgggcacaaagatctctgcaccacttacctcataaatgggtgaggagaaagatgaaaggaaattattatcgaagtgttttgattaaaatatactggagtaagcagaatgataatgattcgttcatttattcaacaaacattttactacatccctaatgtattacgggcgctactttgggcgcaagaaattcagtagttaacaaacacttcttgcccttatgatcttacatctttatgtagatgaaaaaacagacaaattggctcatatataatataatcttaggtagtcaca

SEQ ID NO: 18618 - DNA, 636 bp, Homo sapiens
cctcaactcaagctatggaaaataattcagtctccttttaattaaccattatcactcacagcctaaaaattatcactcagagcatgagatattattataaacagaaatggagactatgtactaattctatgtcacagcctgaaagctccttttttgggaaaaccatgatattaagctgtaatatcctcgtttgatctgttctcctcaagttgaagcaacacaattctaactgactgagkaatgcagtaaaatggtgctttctctagtttcagctccttcctgtgatccgaagctatagaggtctccacctattttttatttacaaaactcattaaccaacaaaccaaacatggtctcccatccagctgacctgaaaaccctcctgatttcaacttgataagaaacattgaattaattaaatctaagcacgggttgtcctgaactgagacaatggctccctctgtgagaactgcaaacacaaacctcagaagctttttatggccaggttagcatgaacagctgtcccctcagctgcctttcaattagttgagaaggtggaggctgcctgctaagtcaggtttgggatgcactgaggctctaccagtggatgtggtgtataatgagcggggcccattg

SEQ ID NO: 18619 - DNA, 669 bp, Homo sapiens
tatagtgaccatagcatatgtgaaggcagtgttaatagtgacaaaggtggcttcatgtgcatactatctgtttagttgtgcaaaattccatgctcccaaagggccctgtttaatactctgcagttactctcttgaaattctcaataatttttgaataaaaaactatgcatttccctccctccctccctccttccttcccttccttccttccttccttccttccttccttccttccttccttccttcttcctccctttccttctttctttgacagtgtctcactctgttacccaggctggagtgcagtggtgcaatcatggctcactgcagcctcaatctcctggactcaatcctcccacctcagcctcatgagtagctaggactacaggcatgagccactatgcctggccccacttaataaattactgtgtggatttgataaaatattgtgtgtaaaatactctatatagccttggtgaatacttagtaagttatagcttgtattgttattctgttgcaatatyttgctaaatcatttcaatagatgtaatataaaaatgggttcatgattaaataatttagagatttaaaaaatttctgcaggatatctcagaattttgtgtaatatgatgacctataaaaagtaaatgaagtatgtagtttgtccaa

SEQ ID NO: 18620 - DNA, 233 bp, Homo sapiens
ggtagtttctttctttctttcacatatatatatataaaaaccttagaatgaccttcaggaccygcaagagctggccttctattaactacctgatctcatctgttcttagtctcctctccactgattcattctgcctcactgaactccctgttatccctcttacacattaggctcactcccaccacttcatgtactgcttcttcttcttccagggattataaaggaaacatggg

SEQ ID NO: 18621 - DNA, 570 bp, Homo sapiens
tgctaactcacttctgcaaaacttaacttgaaaaagatccctttaattgagggagaataatatctaataagtatcaaggcacccatgccacatggaatcaaagttatttgaggctgacaattgtcctgttttcatagccaacatatatctgtggctaaagaagaaaggcttcaagtgcaggtacaatcacagatccttctagaacctcctattgacaacatcatctatggcaaaagaaacacttgctgccatccatagcctgttttggattacctacttctacacaagattcagtgtaactcaagagcttattccaattgtaaatttctttctacagaggaaaaaatgtgctcattcattcaaatacatacattcaatacattcaaatacatacacatatatgtatatgtgccatgctttattctaggtactggtggctatatatatayacacacacacacacacacatacatatatacatatatatacattcatatacacatatgtgtatatatacaggacatgtatatacatatatacacatatacacatatatacatatacacatac

SEQ ID NO: 18622 - DNA, 641 bp, Homo sapiens
tcatttctacctaaggaataactcaattgatatgattaaaaaactaagtcacacttttttggcaggtgtcaattacaattgacacgtaacatcttgcttttatttctgcagctgcacaggcccctcattatacgctacaagttttaacatagcagcatgtgatttaaagtcaagttttgtcaaaggaggtcatgatcccattaaggacaaggtttcaatctcagatgctaacaggtgccagtctgggaacttaaatgagcgaagtcagcaccttataagacaaagagggaatgaggacaatctaagagatcaaggaaatggatgcctcatgtaaaggatcaactattatgaaatccacttacttgctgcccgggagcaatgtgtggtcggtgttgccagctcttgagatytcttttttttttttctggaaatttagatttgttttaaatgtaaaatctctcaacttttaagtcttggcaatccactcaacattttttaagacactgtaattatcaaatgtgccatgcttgtaggccatctttggcacacgagcatttagttagtaatttaggcgtaatctcttttacgatatagagttacagcatgtgggaggtagaattcctcaggtttgtaattgaaaa

SEQ ID NO: 18623 - DNA, 543 bp, Homo sapiens
ttggcaaagaaaaatcaatgttttataattttcaagaaaataaagcagttctaagtttttcattccttattttatttgcacttaaagcaaaactagaaaagcaatttcatgattttaaaaaagaaaaaataatattatctggctctaactctttgaatctagttatttcttttaaaattaaaattttgccttcaaagtgtcgctatttcaacctgtgcaagtwaagttactcataaacacactgtagaatattatttttttcaaggaagcaaattttgtcctaatttacagtagtgaaatcatctaaatatgcacatttccaaattctcaagattcgtaagaggaacttaatgaaatggaaatctcattggtaattatactcagctcagcctgggagttcatggtgctgtcagcctgtgtggtcatgggtagctaagcaacacagccaactagcacctttgtggaggatatttttagcttcattgcacatttttcatttatctattggagattgatttgttttgcaatttattttgaaattcc

SEQ ID NO: 18624 - DNA, 588 bp, Homo sapiens
atttatacttttattctcaagaaaaaaatcagaaaatatctggcattagtacaaaatccagctatttccactactgtggaactacctttcttgatcacttcagattgtcttatattattgaacctggcagaattttcatccacctataggcgttaggatagttcagtgttatctccgtttacaaaatagttacttatgggaaggaacgtctctgtctttatcagttttttgccttcaaactggaaaaataaactattaaactatggctttgatgttttcggaagttaatgaagagaccttcttggtcatatatcctctttttgtagattggtggctgtaccatcattaaaatttagccagcctgctgtttgaacttatgtatggcaaagaggggaaggcattggaagaacagcaatctgagtgaggaaaaaacagtgaacaagagaaagccttttagaaattaactgaaagaagggagaactaggtaattcactactaagaaccygttgttagtgctagaaccagtgtcagtctaaataaagagatgctatgcttcattttgaaagatcttctttacacctattttca

SEQ ID NO: 18625 - DNA, 1246 bp, Homo sapiens
agcatcaagagctatgtgagcatcacagaagcatctagcccagcctcagaagagtagtcaaggaagtttttacaaaagctgtgatgcttcagctggacctaaaggaaaattaggaattaggagagaagaggagtattcagggtggaggagggactagcatgtgcaaatgtacagaggcaaaagatagcaacctggaagatgtttagtgtcatctgaagtggtgtgaagggaagaaagttatatgaaaatatgctgaaaaggaaggtgggagctggtcatgggccttcagcaaacccattaaaggcagcactatggacagacaacagcaaaccaatgagcatcttaaagatcctgccttgatggtgtttacagcacagtggagtgacagataagtcattaagcatttacaaaggcatatgctaagtaccacgacatggatatgcacaggcagaagactgacaaagtaaatgaattcatggattttgcctacaatttatcctcactcatccacaaataagtattaagttctttctattatgttgggcactgggaatatggaaacatatgagaatcatttcctgttcttaaggaactcatctcctgagatgacataaaagaaagtcaacctttatatccaagcatggtaagtgtcctggcaaagatactcaggcgcaatgggaggagagagaaagaaaatacaccatcctggggacaagaggaggctataaggtagaaatgaagagttggtcatttattaaagacaaggtaggagttagttctatgggtaggagcaacccgtctgggcagatggactggtgcacacatctgtcagtgtgaaccttcacgcatacagtgttgcagtacatatggaaatgctctgtgacatggctcatagcacaacggctctccattatggsccaccataatttcactttaatagacctcaaatcagttgtctcctgagagtggaccatatattcagatggtctctctggccatgatttcaccacttgtcttcatgttttaatcacacactctaataaaacacgagccttttaaagacagtcaatcattcagagatcaaagtcacatgggagggtttggttgtctgccaaattaaaacctggccttgaattgcaagggaaagaaagattgcccttaagataaatatttggagtataggagatacaactagactgtgatatttttaagttatggaatatcgcgtttgaagctgcagctcctg

SEQ ID NO: 18626 - DNA, 1246 bp, Homo sapiens
agcatcaagagctatgtgagcatcacagaagcatctagcccagcctcagaagagtagtcaaggaagtttttacaaaagctgtgatgcttcagctggacctaaaggaaaattaggaattaggagagaagaggagtattcagggtggaggagggactagcatgtgcaaatgtacagaggcaaaagatagcaacctggaagatgtttagtgtcatctgaagtggtgtgaagggaagaaagttatatgaaaatatgctgaaaaggaaggtgggagctggtcatgggccttcagcaaacccattaaaggcagcactatggacagacaacagcaaaccaatgagcatcttaaagatcctgccttgatggtgtttacagcacagtggagtgacagataagtcattaagcatttacaaaggcatatgctaagtaccacgacatggatatgcacaggcagaagactgacaaagtaaatgaattcatggattttgcctacaatttatcctcactcatccacaaataagtattaagttctttctattatgttgggcactgggaatatggaaacatatgagaatcatttcctgttcttaaggaactcatctcctgagatgacataaaagaaagtcaacctttatatccaagcatggtaagtgtcctggcaaagatactcaggcgcaatgggaggagagagaaagaaaatacaccatcctggggacaagaggaggctataaggtagaaatgaagagttggtcatttattaaagacaaggtaggagttagttctatgggtaggagcaacccgtctgggcagatggactggtgcacacatctgtcagtgtgaaccttcacgcatacagtgttgcagtacatatggaaatgctctgtgacatggctcatagcacaacggctctccattatgggccaccataatttcactttaatagacctcaaatcagttstctcctgagagtggaccatatattcagatggtctctctggccatgatttcaccacttgtcttcatgttttaatcacacactctaataaaacacgagccttttaaagacagtcaatcattcagagatcaaagtcacatgggagggtttggttgtctgccaaattaaaacctggccttgaattgcaagggaaagaaagattgcccttaagataaatatttggagtataggagatacaactagactgtgatatttttaagttatggaatatcgcgtttgaagctgcagctcctg

SEQ ID NO: 18627 - DNA, 703 bp, Homo sapiens
atgactccttcaaataaaaaatactgtcagtaagttagaagattttaaaaattttttcttcaatatatcaatataagtaactacattaaaaaataatttgtgtacattatagttaagatagattcataataactgacaattgactttaaccaatcatttgtaatggctaaaaaagagaataatcttagttgtcaaaatwcatgcaataactttcttttctattatcattctcttttttgagccattatggttggtattgggttaggtaaagtaagaaacatacagctgcggtttcataggtacagagagctcagaattctgtgagaattgagtgatgagccactcattcctgccatagcttgaggtagtcataagaatattttataagccaaccttcaccagcatctttcttggtaactacctgcatcacataacagctgggaagtgtgtgagggtgggggaaagatacggaagagactgactcaagaagattctgatcctatcttttcagatctcgaatctttttaatattttaaatatgccatagctaaatgtctctatgccccatatcaaacattaaattcagaatgatcagaatgagccacataggacaaataagccttcttcactttcttatttcacctacactcatgtgtggctctaagtaatactgaagcaggagaacattctcagggacatgctc

SEQ ID NO: 18628 - DNA, 474 bp, Homo sapiens
agaagcacccacttaaattttaggaagggccttaaattctgcatccaatacacctcacttgcttctctgttgtccaggcccttgtggtgtgttttaatgtgagccttaacttgtaatatagttttcaaatattttggattagtctcgagatcattgtccttcatcctgcaatagaacttttttttcccccatgagagagctttaagctaattcccagtacttggaaggacaattctggccattgggtatataacaaaacatggcaacagttttttgagccagtaaaayttggttttaaatggtttaaatcatttttaaaatgatttaaaaatacttttctcttgaaggcctgacatgatcagcactgggcgtgacccaaagatggaatgaagaacatgaatggatgactgtttccttagcaacgagaaccatatgtttcctttgaaacaagaaaccaaaagaaaagttcccatc

SEQ ID NO: 18629 - DNA, 474 bp, Homo sapiens
agaagcacccacttaaattttaggaagggccttaaattctgcatccaatacacctcacttgcttctctgttgtccaggcccttgtggtgtgttttaatgtgagccttaacttgtaatatagttttcaaatattttggattagtctcgagatcattgtccttcatcctgcaatagaacttttttttcccccatgagagagctttaagctaattcccagtacttggaaggacaattctggccattgggtatataacaaaacatggcaacagttttttgagccagtaaaatttggttttaaatggtttaaatcatttttaaaatgatttaaaaatacttttctcttgaaggcctgacatgatcagcactgggcgtgacccaaagatggaatgaagaacatgaatggatgactgtttccttagcaacragaaccatatgtttcctttgaaacaagaaaccaaaagaaaagttcccatc

SEQ ID NO: 18630 - DNA, 513 bp, Homo sapiens
ccaacagcagctaaaaaaaaatgaagagatttcatgtgtgtacacgtttagctgaactgttaaatttttttgtttttggtttctccgttaattttcacttgtggaaagggcttgaactttgtcttgttgtgggacagggaagaattatattattttgagatataaattgatgataccccgtgggtcccactttcctttttatggccagcaggcatgagggagtaaaagttagactatcaggtctagagctggctcctgggagaggagtaaagctttcaactcctattttacagtgaaaatggaagatgaccatttkgtctgggcttgaaaggagatcacaaggttccaatgaatatgggaaggaggcagcgtggaagaactctttagataacaatagttctcttaggaggtcagggatcagtaccctggctcaagtgaggatgactgagtagaagcaagacccaagcaactgtaaacccgacatgaataagacaaagggggtctcattgatca

SEQ ID NO: 18631 - DNA, 530 bp, Homo sapiens
atggaaacaacatctttatctctgaggaaactgaacagtcactgttaaccaccaactgaggtgttaacttataacccctttttgtgccagatctttttatctgattccctgcaggatatatctaggcatcaggacaagattaaacaaagatgtcaacttaaataatgatcctgtgactggctagagttaaatgatccagagaaatagtacatgctgtttacttcccagggagccgatggattcataatacgggatttttacagggtrtgtaccttaaattagatgattgtggttgagtgtaatgtagcaaaataacccatttggttcatcagaaaatgatcatatttggaatggtctttctcacctttaaattggcagagctggactagaggttgtgtaagatctcttgcagtgtagtgcatcttgctttgaaaaatttggccctgcccacattcaaactatgctttgtcttatgcaatagactgaatggcattgtctttttaactttgggcaattattttgcacatatg

SEQ ID NO: 18632 - DNA, 549 bp, Homo sapiens
gcaggcagcctggtgcaatgggacagtgtgtggcttggggtcaggaacacttggactctcacctctaccacccccttcctatctgaaggacctgggcctcagttttttaatctgtaaaatgggactaatgccactttgaccacaggtttcccaaggtacatggcactggattagtgggagctcttgttggaatgtcacatgtatcatgaccacaggattcatattttccaggaatcctcaacatccatttgttcctatggtctcataagtgcattcacacttggcggaccacgaggcccagttcttgcttcaggaatmacaaaccagtaactgcccagctgggtttcatagcaaagatgcagcagggctatttttgcttttctttctccaacaagagattttccaggcaaatcaactggaaatgattgtgtgagggaattgaagctctgggggcccttgcagaattctttctgttagttcactggcaacaaactttttgtaagttggccaatcttcgccctaaagacactatgcgcaactcagccttga

SEQ ID NO: 18633 - DNA, 2046 bp, Homo sapiens
ttgcctagaagtatatgacacagaaagaggtaaggatggaggagaggaaggcctgaaggaccctgacacttaggagaggacaggcttgcaaaggaatagagcaggagagaccagaggtgatactgaaggagtattgtgccctggagggcagagcaagggtgattgaaggaggatgtgatcggccgaggaaaaatgatgaatgaagaatgccctttggatcgagtgactggaaggccaatggagactcagcgagaattgtttcagatgacaaagcctgaggctctgagaaaaaagacgattcaagccatatgctaagaaagggctgaccaagactgacacctgggtttccttcaatctttctaacaaccttcaggcaagaattttggtaggaatcatggtctatggagctgcagggttggttttatctcttccgcaaaaatgcagtcagtcgtttcccggtattggttccaggatcccccaatatcaaaatccacagatgctcaatgtccttatagaaatcagtgtagtatttgcatagaacctacactcttcctcccgtagactttaaatcatctctagattacttgtaatacctaatacactaagaatgctatataaatagttgctattctgtattgtttagggaataatgaaaagaaatgtctaaaatgtggggcaggaggtcagcaagaaagcttccttcctgtgccagcttgaggagtccttgggaagccaccagcactgttgataatgaggacacttagatgccaagtggcctctcgggtctgtcttctgctaataagactaaagaggggaagtgtaaagaatttgcaccccaatcctctggtgggctggggcaggatgcagccacactcttcttatttctattttgtatttttgtttgaagaagtcatctcccagatgaaaagtcagtttgaaggcacactgggggtttgtggcatgagtttgtcaactgctggagtaaagagctctgatagatggataaacagccttctggttttttgaaagctgttttcagttcccttccaggatctgcgcttgggaagaaataagccacccctcagaacctcagaagatttacttcaacatctgtagaagtattttaatttcttccttgagtaggtttggcttggccaactgaaactgtggttaaactatttttaatcatgttaataagaaaattgtcctgcccagaacaggaaagcgttgtctgtttttattgtgctgcataaaaataactgtctccagccttcttgttatgtagtgggcgatgacatacattattttacttagtcctcctccgaggaactcagtaggcggatgatcttagttcattgggctgctttagcaaaagaccacaacctggctggcttataaacagcagacatttatttttcacagttctggaggctggaaggtccaagatcaaggtaccagcagattcaaagtctagtgagggctctcttcctggttcatagatgaccccttctcaaagctctctggggcttcttttattgtggcattaattccattcatgagggccctgtccccaggatctaggcacctaccacaggccccatctcctaacaccatcacactggggattaggtgtcaacttatgawtttgcagggggcacaaataatcaggccacagtacagatagaattgtctattttgcccctgaagatactttagctctgagaaatgaataaggtgactggtttcactgggaggtgggaggagagctgggagtgaggggaggaaatacaaacacgatggaatgtactaccacccctaggagaactcaccgttgaatgtagggattcttgactagcaaggcccttggagatcagctggagcaatctgctcattttatagctaggaaaggaggcccagcaggaggggacggtgtgcccaaggctgagagtgtggtgagtgctgggttcctcccaatacccatttccaccaggcaaaatgtcccagcatcccttgcagatgtggccatgcaactaattctggccagta

SEQ ID NO: 18634 - DNA, 2046 bp, Homo sapiens
ttgcctagaagtatatgacacagaaagaggtaaggatggaggagaggaaggcctgaaggaccctgacacttaggagaggacaggcttgcaaaggaatagagcaggagagaccagaggtgatactgaaggagtattgtgccctggagggcagagcaagggtgattgaaggaggatgtgatcggccgaggaaaaatgatgaatgaagaatgccctttggatcgagtgactggaaggccaatggagactcagcgagaattgtttcagatgacaaagcctgaggctctgagaaaaaagacgattcaagccatatgctaagaaagggctgaccaagactgacacctgggtttccttcaatctttctaacaaccttcaggcaagaattttggtaggaatcatggtctatggagctgcagggttggttttatctcttccgcaaaaatgcagtcagtcgtttcccggtattggttccaggatcccccaatatcaaaatccacagatgctcaatgtccttatagaaatcagtgtagtatttgcatagaacctacactcttcctcccgtagactttaaatcatctctagattacttgtaatacctaatacactaagaatgctatataaatagttgctattctgtattgtttagggaataatgaaaagaaatgtctaaaatgtggggcaggaggtcagcaagaaagcttccttcctgtgccagcttgaggagtccttgggaagccaccagcactgttgataatgaggacacttagatgccaagtggcctctcgggtctgtcttctgctaataagactaaagaggggaagtgtaaagaatttgcaccccaatcctctggtgggctggggcaggatgcagccacactcttcttatttctattttgtatttttgtttgaagaagtcatctcccagatgaaaagtcagtttgaaggcacactgggggtttgtggcatgagtttgtcaactgctggagtaaagagctctgatagatggataaacagccttctggttttttgaaagctgttttcagttcccttccaggatctgcgcttgggaagaaataagccacccctcagaacctcagaagatttacttcaacatctgtagaagtattttaatttcttccttgagtaggtttggcttggccaactgaaactgtggttaaactatttttaatcatgttaataagaaaattgtcctgcccagaacaggaaagcgttgtctgtttttattgtgctgcataaaaataactgtctccagccttcttgttatgtagtgggcgatgacatacattattttacttagtcctcctccgaggaactcagtaggcggatgatcttagttcattgggctgctttagcaaaagaccacaacctggctggcttataaacagcagacatttatttttcacagttctggaggctggaaggtccaagatcaaggtaccagcagattcaaagtctagtgagggctctcttcctggttcatagatgaccccttctcaaagctctctggggcttcttttattgtggcattaattccattcatgagggccctgtccccaggatctaggcacctaccacaggccccatctcctaacaccatcacactggggattaggtgtcaacttatgaatttgcagggggcacaaataatcaggccacagtacagatagaattgtctattttgcccctgaagatactttagctctgagaaatgaataaggtgactggtttcactgggaggtgggaggagwgctgggagtgaggggaggaaatacaaacacgatggaatgtactaccacccctaggagaactcaccgttgaatgtagggattcttgactagcaaggcccttggagatcagctggagcaatctgctcattttatagctaggaaaggaggcccagcaggaggggacggtgtgcccaaggctgagagtgtggtgagtgctgggttcctcccaatacccatttccaccaggcaaaatgtcccagcatcccttgcagatgtggccatgcaactaattctggccagta

SEQ ID NO: 18635 - DNA, 515 bp, Homo sapiens
cacattttaaacatatttaaggtmatactatacctaaaatgttataccatgatttttttttcattttacaataaagacagtattttattacacaaagaactctttgcaagattagatatttctgaaaaaatagtaagttagaagacaaaataaaatcaagagatgaaaaatacttaaaaaattaacaaagcatcagtgaactgtggaacaatgtcaaggggccaaatatacatgtaattggaatccctgaaggaaaggagaaagaaagggacttaaaaatatttgaagtaaaaatatccaatatttttacagtgtgaaaactatgaacccgtaaatacaagaagctcaatgaatcacatgcagaagaaacataaagaaaattagacttcatcatatattcaaattgctcaaaatcaacaataaagagaaaaccttaaaagcagctagagaaaaaaagacacaatgtgtccagaaggatagagattggggtgatagctgatttctcattgagaacc

SEQ ID NO: 18636 - DNA, 515 bp, Homo sapiens
cacattttaaacatatttaaggtaatactatacctaaaatgttataccatgatttttttttcattttacaataaagacagtattttattacacaaagaactctttgcaagattagatatttctgaaaaaatagtaagttagaagacaaaataaaatcaagagatgaaaaatacttaaaaaattaacaaagcatcagtgaactgtggaacaatgtcaaggggccaaatatacatgtaattggaatccctgaaggaaaggagaaasaaagggacttaaaaatatttgaagtaaaaatatccaatatttttacagtgtgaaaactatgaacccgtaaatacaagaagctcaatgaatcacatgcagaagaaacataaagaaaattagacttcatcatatattcaaattgctcaaaatcaacaataaagagaaaaccttaaaagcagctagagaaaaaaagacacaatgtgtccagaaggatagagattggggtgatagctgatttctcattgagaacc

SEQ ID NO: 18637 - DNA, 515 bp, Homo sapiens
cacattttaaacatatttaaggtaatactatacctaaaatgttataccatgatttttttttcattttacaataaagacagtattttattacacaaagaactctttgcaagattagatatttctgaaaaaatagtaagttagaagacaaaataaaatcaagagatgaaaaatacttaaaaaattaacaaagcatcagtgaactgtggaacaatgtcaaggggccaaatatacatgtaattggaatccctgaaggaaaggagaaagaaagggacttaaaaatrtttgaagtaaaaatatccaatatttttacagtgtgaaaactatgaacccgtaaatacaagaagctcaatgaatcacatgcagaagaaacataaagaaaattagacttcatcatatattcaaattgctcaaaatcaacaataaagagaaaaccttaaaagcagctagagaaaaaaagacacaatgtgtccagaaggatagagattggggtgatagctgatttctcattgagaacc

SEQ ID NO: 18638 - DNA, 759 bp, Homo sapiens
tggcaatttcataataatgagggtgcatgataatagctaaagataattccacacgttacgatgtgtcagatcttcaattcttgcacgtgctgcttggattatgaattactgttttacaggtgagaaaacagattcagagttaaggaccttcccagagacacacaggtaataggagaagtcaaaatttcaacctccacaatctggttctagagaccagtatttcatttgctatgcttattttgaatggtcaggcaaattcctagggctcccgagatcatttcattaagactgaatgcagcatctacatggtaaagatccacctgattatgtagagccccagaggaaatcctcaaaggcataaagagaaaataaaatacaggggaatccttaaaagcatcaggagaaaaaaaaagacagatagaatcagaactttttttctgtttttgtgtctcttagaagattgataygctcatctatgtaaagaccaaagtctttgactgttatatctttaaaaaagaaaatttttcttgtcatttcttaaacaaatacagaggttatcctctcctgcaggccctggggtgtcagcagggttgcagggctggctagggggattgggtaattctaataaaagctattcagctattgagcttaatggtgtttccatttaagggttggcattctaatgactgttttttagagcctctgaggataaatgctttttaatttgacctttagaataggagtctttatgggattaca

SEQ ID NO: 18639 - DNA, 1298 bp, Homo sapiens
  misc_feature (1)...(1298): n = A,T,C or G
tgagtagctaggactacagacatgtaccaccactatgtcctgctaatttaaaaaaaaaaaaaaattagtagagagaaaatctcactgtgttgcccaggctggtcctgaactcctggcctcaagtgatcctcccacgtctgcctcccaaagtgctgtgattacaggcgtaagccaccgcactggcactcctcacctctaaagttagggaactggaccagtattctctaggatccctgacatagctaagtaaatttatggatcaggccaggagacccaagagaaacacaaaactcattccgggttactcaytggtcctaagattatgatccccttgaaagcacttcataaacattaagttgcttttcctcaccacagggctccaggatacatgccttctttttcttttgttatacattaaatagcagagaaataaaagcagtagcttagcctgaaagccccagggaatgggcactgaaaagattttcaaagtgaagttgttactagttttcgatccccaaactgaatcatgacacctggtctcctgttcgcccggtggtatatcacaacttcttagagaaacagctataatgttctgggacttatgctaattctttgttaataaggaaggtgggaccatttagaaactgtggtttccttcccattaaaacacacacacacacacacacacacacacacacacacacacacacacacacagaataagaaggtaggaatcagttatgggtatgtattacatttttcaagtcttcatcgccactaggaagctctttagtgaaaagatgcaatcatggaaggcagactgaaagggttcatacagcatgcagaggtatcttgctataaaccacaaataaaattctaaggcccccccccacctaccatctaaatggacttcctcctcaaccagggctcttaaaacgtaacctgaaagactgattcaggccaagaagggaagctggggtcagacatgcctctntatactctatatacctctccgccattaacatcaacacagacttcagtctgataagaaacattntacagcctgttctttctgaagcctgnnnnnnnnnnnnnnnnnnnnnnnnnnnnnnnnnnnnnnnnnnnnnnnnnnnnnnnnnnnnnnnnnnnnnnnnnnnnnnnnnnnnnnnnnnnnnnnnnnnnacggtttttaaaaaatttgtggtgttgtataaaattgacctattactaatttcttatttaattgcattatggcggaaaataaggcctggcctatataatttcaattttgtttaaat

SEQ ID NO: 18640 - DNA, 558 bp, Homo sapiens
tagtgtgaattgcagggaaagtggtgaaagatgtttcagagccagtgttcccctccactattcctaatcagattaaaccctgcctgtaaggttgattctttaaacgataggtaaacacctttctcaaatttgtaggcttaagactcatcatggggaatttctttaaaaggctggctttgggacctgtccccagagactcttttttggtaggtttaaggtagagcccaggaatccatgtttttaagaagtaacacaagtgattctatggcaggtggtgwtaaaaggacgttttaagaaataaccactacctgaaaggatattggaacactcctagggaaggaacagaatgcaagtcttagatttcttatatatgtttacctttgctcaaatgtcaaaataattaaaaagacttattaccttactgggttcttgttctgttccacaatttttttttttctgataaacaagttaatactatactactgttaatcatcatcatcttcatcaccattatcaacatcaataataatggaaaaacattcgaagtgtgttcatttg

SEQ ID NO: 18641 - DNA, 558 bp, Homo sapiens
tagtgtgaattgcagggaaagtggtgaaagatgtttcagagccagtgttcccctccactattcctaatcagattaaaccctgcctgtaaggttgattctttaaacgataggtaaacacctttctcaaatttgtaggcttaagactcatcatggggaatttctttaaaaggctggctttgggacctgtccccagagactcttttttggtaggtttaaggtagagcccaggaatccatgtttttaagaagtaacacaagtgattctatggcaggtggtgttaaaaggacgttttaagaaataaccactacctgaaaggatattggaacactcctagggaaggaacagaatgcaagtcttagatttcttatatatgtttacctttkctcaaatgtcaaaataattaaaaagacttattaccttactgggttcttgttctgttccacaatttttttttttctgataaacaagttaatactatactactgttaatcatcatcatcttcatcaccattatcaacatcaataataatggaaaaacattcgaagtgtgttcatttg

SEQ ID NO: 18642 - DNA, 580 bp, Homo sapiens
catcagtccagacttaacagcctcagagccacacaatcccaatcccattagaaaagattatgcatttttttcattcccatgagtttaggttaatataaattttagatataaccactagaaccattaatatgcaaggtaatttgtcacaattcccttcataattaactttagctcacaaactctatcagaagcatttaagcaggaaatcaacagtatattagacaaggctttaaaccagttttattttatatactgagccttacttatagctatgcgataaggtaatatcaagtctatgcagaaaatattttatcttctagtaagttttattattatggatttaaaattttaaataaatactgttttgcagtttaaccgatatgtttacaaattagtggtagttaaatatattcttaaaacaattttggagttattttactgaaagatctattcatagtatgacctggacaatcttggaagtatacgaagtgttagttacatgtgggctataaatttatgatgttaattttagtattttctctagtatgtttmtcattgctatctttaaattaatttgatg

SEQ ID NO: 18643 - DNA, 505 bp, Homo sapiens
aatagacttcaccactgggtcacatcaagcacagagcaaggacttggtggctttttaaactcaacagtggaatcctcctaacgcttgccattaacagccaaaatggacctcaggagtcacctggcccaaccttagattttatatgccactctgctgtggaaatggccaccagccataaataggcaaatagagaggcatggtgtttccctctttttcactacccctgtactttctttgggagccgtgggtaagtaaacctgtaagctggcacagttttacatcacagatcctaagactttctgaaaggtcagctrtcctcatcacttctctctgtatcttggttacactgacccaaaacaccagcctccagttcagcagaacatttgatactgtatagtgatagggaccatgacattattaagtgatcaaccttctaaatctgacagacatcacatggacccatattagccagcttttaaaatgcaacattaatgccttaaggtca

SEQ ID NO: 18644 - DNA, 684 bp, Homo sapiens
ccaaacatggtgatgttctgagttactgtaattaaggacttcaacatgcaaattttgggggtgacacatttcagccctagcagtcccctgactagtatgtattcgttgagggaatgaactgtgtttcatgcacctgggtacctgcagaacctcatgtggaacaaaagtcagtgcttaaagcctttgattcttaagggaaaaacaaaaataggacaaatctgatttctgcttctgtgctcactctatataggccctcagtcccacagtgaaatctagggtccatggtgaaaatgtgcatatgggaagatgaggatggcggggggacgagacagacacactggataggaataggtackctggcacatagcaataatagttatgacatgtggctttttgttgaagaatgtgtaatgctcgtaactattagagttgtgtaatggaaatttgtccacatacgtatcatgttttgtaatcaagaccacgatgtgatagaaagcagagggagaagacatggcctcctcctgggagttcctgtctttctctgctgtttccaaacagccccagctgcccatgctgtgcagagctgggcttcagcttatctctgtagctttcttctgcccaccctgttgctgggtgtcccagtccagccagatgcacggaggtgctgggccagcctgtggctat

SEQ ID NO: 18645 - DNA, 664 bp, Homo sapiens
catacatgaatcatagttcacaaactcaggaaacagcacatctctttatttatataaattaatttgatttctgatcccagtgctaataataccaggctggtagaaaatctaacctcaatgactttcagagtttccggatgtctccctgaagctctcgcacggttatggaggtctgtgtgcactgctgcaggtctgtgacatgccccctggactcgcatcagtttgctaattgctgagacatcctcttccccctgcatggccccagctgggccccattgctgccatgagactccatctccctaaatgagctggacggcctttggattcttggattctcccctgggtccgtcagcatctccatgtgcttycaggaagccatgaccaagactccctctcctctaagaccctcagacttcctgctcttgattcacgtacctctccctcctgcccctctgcggtatcagatctccaagcaggacacctcatcattgaagtgcctctcagggacctacagccttatctcctcagtgggtttagaatcaagtcaggcagcctcaagccttcctgggggcaaagaatctcgggtctatctgcttgaaggaggtggataaagggagaaaattgggccgaaagcccataaatatctcaacagcctatttagcca

SEQ ID NO: 18646 - DNA, 747 bp, Homo sapiens
  misc_feature (1)...(747): n = A,T,C or G
tactgctaactccactgtattagtccactctacattactataaagatatacctgagactgggtaatttagaaagaaagagatttattgacnacagttccacatggtggggaggcctaggaagcttacgatcgtgacagaaggcgaaggggaagcaaggcacgttttacttgttagcaggagggagagggagagagagagagagagagagagagagagagagagaaaggggaaactgacagttttaaaccatgagatctcgtgagaactcactaccacaagaacagtataggggaaactggccccatgacccaatcacctcccaccaggtccttctctggacatgtggggattacatttcaagatgagatttgggtagggacacagagccaaaccatatcatccacgtatgaataatttgtccttaatttttttattttcctgcaacttcccttgcctgccttctgtctaaattaaggcaacagcccatgagctgttgaataccacctgatagggtttgtcactctgtattttttattgttgttatgaaactgagctgtgtctacctttcccaagttggcttaaaaacaagatgcatttgtatcgaaccaatattttcctrgtatattttggctaaagacataccacagactgaagagatttgaagagggccttctctcccaggtaagagaattaagaatatattatcattggtatcccttcagctttggtctgaacacccaaataag

SEQ ID NO: 18647 - DNA, 538 bp, Homo sapiens
aagccactggaagattttcaaatggaaaatacaatcagattcgtttccaaaatctcattctggctattatatggaaagcgactgtttcacatgtgtgttcaaggtcccagctcagtttttctacccagcagcatgttcccaattcacaggcataaaaagattgaacctcttcttgaccaatgctgactagtaactcactggcccttctacaattatctggaaattatttcaaaaattaagatttaaaaatataattattggctgggtgtggtggctcatgcctgtaatcccagcactttgggaggccaaggcaggcagatcacctgaggttgggagttcgagaccaacctaaccaacacggagaaaccctgtctctaccaaaaatacaaaattagccaggcgtggtggtgcatgcctgtaatcccagctactcaggaggctgaggcaggagaactgcttgaacccgggaggcgggaagttgcggtgagccgagattgtgccattgcacwctagcctggacagcaagagtgaaactcta

SEQ ID NO: 18648 - DNA, 788 bp, Homo sapiens
tcctactataggttctataactggataatggatctcagtgaaataaacctccggttttaccacagggctggctcttccccttatgacaagtttggaatgtaattttgtagtttgtattcaagggtttcctaagagttttgataataattgaagtcaaatgactaattttaaactgccaatgtctcctccaatatataaaaaagrtaagttagtaactccctgtatcttctgattgagccaaggccaatttttctaaatataagccaggttttgcaagttcatgcagcctggtggttgaaatgggcatatcacttgggagcttaggatctggaaggttaaaagtgatgccaaggcatgaaaatcaaagtgttaaaggcctcactgtgaaacagtgatcagcagagcatggaccccttagtgggatcagtgtctccatcctcatcctatatgtatcttctttcttaaaatcaatgcttgacaacgtgcccaaagtccagttacttcgccagttctccctttccacctccctattttcctttcatctcttccttgcattacaaaagaaaaaagacctctcttgcttgtctggaatcaccactatgaagcatcagttctcaatgctttggtctcaagatccttcgtttgtttgtttgtttgtttctttttggttttttgtttgtttgtttttgtgtgtgtgtgacagagcctgactctgtcgcccagcctggagtgctcactgtagcctcaacctcctaggctcaggtgattcagccatctcaacctgccaa

SEQ ID NO: 18649 - DNA, 530 bp, Homo sapiens
aaacgtgaagttccataaaaatgcaacccactaaagtaagktggtgactgtgtataagggacatgtggcagatgtgacatgggcagcgtgtccttgggcgtatctcttctttgctaaaagtgtcagaagcagaagaggtaggtgatggtttccaaagagtggcttaactagaatctaagatgatagaggtcatttaatgtgttctcctaattttacaaatgagaaaactgaagtctggtgaggcaaagtgacttgtctaaaactataagcagtaaagcttgatttagggctggaatctcatttttcatatctgctgttcttttctctatttgggggaaagccacatcaccaagtagagcataaatatggtggccctgattccagggaaatgagctaggccattattatatcatctccaaatgccctgtcttatccgtccaaggtgcaagatgccttttttgacccactgattggtaggagacatgtccagactggaaaaaggtagggtcactcatgcctaatgctccagc

SEQ ID NO: 18650 - DNA, 539 bp, Homo sapiens
acaagcgaatctgccttggaaatgctaggcagggtctttacgatgagcttgagctgagtattgagaaagcgtaagaagtatgcgtgctgtatcctcccagacgccctggtggattatgacctcatgcagagaacatgctatttgggatcactgcccctatctctagcacatctgctgaaggttcccctgttggagaattctgctcaagtccggattgttagtctctgttgaaacaaaaactgagtttctaaaattggttgtctggaatgaactagagctgactggggcagactaccttttgttaaatagcatcatcagctgacgtccatccttaggattttacccttattttctcctctagtttttatataacaagtgtttckagatggccttcattcctcagatctctgaactagattatggccattggggaacagaggcttccaaagagacaaagcataaagctgttttcagagagattgtgtaggaaggatgtttctagttaacactaaatatgttactatgagaaaaaataaagc

SEQ ID NO: 18651 - DNA, 539 bp, Homo sapiens
acaagcgaatctgccttggaaatgctaggcagggtctttacgatgagcttgagctgagtattgagaaagcgtaagaagtatgcgtgctgtatcctcccagacgccctggtggattatgacctcatgcagagaacatgctatttgggatcactgcccctatctctagcacatctgctgaaggttcccctgttggagaattctgctcaagtccggattgttagtctctgttgaaacaaaaactgagtttctaaaattggttgtctggaatgaactagagctgactggggcagactaccttttgttaaatagcatcatcagctgacgtccatccttaggattttacccttattttctcctctagtttttatataacaagtgtttctagatggccttcattcctcagatctctgaactagattatggccattggggaacagaggcttccaaagagacaaagcataaagctgttttcagagagattgtgtaggaaggatgtttctagttaacactaaatatgttactwtgagaaaaaataaagc

SEQ ID NO: 18652 - DNA, 578 bp, Homo sapiens
tttttcttattttcttatttcccagtagttgttgataccaaaacaaaaatgattcttagaaaacaaaaagcctcatttcaaaaggataggataaattgtgagaatctacatttctttccgatggtgattttgagaggaaagcaaccccagtttgaagcaattgatagtgatcaaaaaagggatgcaaaccaactaacatttccagaggaccagccatgtgcaaaccttggtgccaaatgctgcaaagggccaagcataagtctgcagctaaataagctcatggtctagttccatgattcccaagtcatgagtatcaaatccctgaggtatatataccaagcattatcagcctactaagtcatattagtaacaattagtcaattaagtcataattagccaacaaagtcatcttatacatacatgcacaaaaaaataaatataggatgatactgttataactaaaattgaaaagtttttaaatgcagtggtgtcattatgtattatattaagcamcaaggactgtaactacaattacataatatatgcaaccatgaagttctttgtattaaaaaggggta

SEQ ID NO: 18653 - DNA, 868 bp, Homo sapiens
gatagggctgaactcttgcgtgagtcaggagtctttgcagcaaagggggtggagagaggggaaggaaaggaagagacagaaagagagcagcaacacgtgcaaaggaagccaggactggatgagatggaggccactggtgcccccaagatcagggactctacagatggggctgcctaccataccataggctgccgagacctctcctctgtcttcttcacatgcccactcctgctccaaacctcccatacaccacatgcttgctgtgaagagatccctttgcagaaatctcaagggctgacatttttaccatctggaggcgtggaaccaggacagcacccataggaacaggagctaaagtcagagataacatgagggcatggtgtctagggaaatggtggaaattctgaggagtactttggatttctagaaggcattgaatttggagtgcaagccaagcttatgtctaaataagcctagagcccacagtggtcactgggtttcacaagcaaaggtcatgaatatagaatgttcttgcatgagtggtggcgaggttggtctgcatcactggtcatctgctgtgaattttttcaggggaagctcacatcctcggaggcyttcgcctcaccctagaaagatacaaaatgccctggagaaatgctgtattcacagcacatttgcacaggacactgtgtcagtcactgatctggaacactttgcttgcttacctccttgagctattggtgcaataaccatatgcagatgggctagcacaggctcctgggctccctgagtcagttccacagaacccgggatcaacaaggagttacgagagttccatggaacaaatagaagacatgattaaatacat

SEQ ID NO: 18654 - DNA, 512 bp, Homo sapiens
ttttttgagatggagtttcattcttgttgcccaggctggagtgcaacggtgcgatctcggctcactgcaacctccacctccccggttcaagcaatgctcctgtctcagcctcctgagtagctggggttacaggcgcctgccacaatgcccggctaattttttgtctttttagtagagatggggtttcaccatgttgtccaggctggtgttaaactcctgacctcaggtgatccacctgccttggcctccaaaagtgctgggattacaggcgtaagccaccatgcccggctagttctcagatatttgcaggtgcctctcatttactcagaactccttatgaagtaagcaataytggccccatcttggaggagaagggagaagggaggccagggcatagagaagttaaatgtatgattcaatgcggtgcagcagacaacagtagatccaggcatggaacttgaggctatcccagtccagtcctcatccccactgtctacttgttttttcctcca

SEQ ID NO: 18655 - DNA, 571 bp, Homo sapiens
ctttcatatttagggatgttcacttactgatcattcattgtgctgtgcattttccacccacatgcaatacttgaataattaaatttctttttaaaatatacctttcygttgatcctgctagctagtggcctttttcccctctttttttaaatatcaaaattccttaagagagctgtctggactcattgtttccaattactctcctctcagtcactcccttttttggaagtgaattttttttttttttttggaaaggttcaaacatatacaaaagaagagaaaattgtagagtgcacatcacccagattcgacaatcataaactcatagtcatgattcatccataccccatcccacacacactcccattctattattttgaagcaaatcccagacattgtattatttcattaataattattttagtctatatctttcaataatatataaccaaaatatcatcatatctaagcaaaatatcttccaaaatatctattcagtgttccaaaataccatcattatatctaaaaaattaacaataattccttaatatttgtaaatattcaatcaggg

SEQ ID NO: 18656 - DNA, 523 bp, Homo sapiens
gccttttgaatgctttacccaactctctgacacttagcaatacagcctatgcttcaaaatatatccaggtgytccttctcctgcgcctgtcaccatccgcacaaaaacaagagaaccgctccaggttcttccaatccctaaaaaaaacaagcatctccaccttgatccccgcaatcaacactctgagctgacacttagcttccttttctggaagtgttaatgaaaaaagcctgcactgtttggttgtattttctctgatcatttattttattcccttttaaagtaccataggttctgcaaatactgtttgtagctatatattatgtctacatgtccaccaccagcagtaagacttgacaaattatctaaattaattatccagacttggctttggttactatttcaaaacacgatgcattgaatttgaggcattggcacatgaaaatattactcatgcttgttgctaattttaaatgagaaaatgttttaaattcagacatatattcaagtacactttatttac

SEQ ID NO: 18657 - DNA, 535 bp, Homo sapiens
atgaagggagcatggagtgtttagggaacaggcaagtagtttggtgcaggcagagcacaggggcacatgaatggagagaaggaggtgagcctaggaattcagacaagggctatatcagaaagtatttatcctagaagtgatgagtggctcttaaagaatattgagctagagagtgtttcgtttatatgagaaaaaaacctaaaataagcagcatataaaggttacaccacataaatacattggaaaaagactgtatgaacttcatctgagctgagagccaaaggatgtggacttgacctyggaggagatccgtggagcctaatgtatggagcgtgcatctagagaagcctcatggaaaggagtagttccgtgtcaagggtcttacccgttgtattggctaccagtgccagatagctgtaggagtcaagccagaggccacagacatttttccccattcatgaatgtagcccttttcctgggcaagtagccatgcaagctcctcttctccttgcttttttcacaagtgccttaaaaa

SEQ ID NO: 18658 - DNA, 562 bp, Homo sapiens
atgataacttcagttcttctccataaatgccttcagcaaatacccagtgcttatgtgctgtgtgtatgtcttaaaccttaactttcatgaaatctcattccatcktagttcttcatcaagtccatagataaaatcctctctaagcgtttctgaagtatgtatccctgaacaaatttagtgaaataaaatcattaatctgtgttgatcccattttgccatacctttcactttacctcactgtctccttttgtgaaatattttaagaaagcaacgtccctcacaggactgttttgaggaatgcctcatggctgtgaaggagtttgtacaatgcaacattttgcttagcccttcagtacattttacttggattgttttcaagaactttattttttttgagaagaagtcttgctctatcacctaggctggagtgcagtggtgcgatctcagctcactgcaacctccacctcctgggttcaagcgattcttctgcctcagcctcccaagtagctgggattacaggcacctgccaccaggcctggacaattttttttttttttttttt

SEQ ID NO: 18659 - DNA, 533 bp, Homo sapiens
gtgtgaggcaaagacatagttccttcatgttgatcattagtctctaagacttatagttgactccccttacagaggatgcagatctaagtcaggtaataaagtaatgtgaatcagaaagaaattaaaattgagaaatcagtgctaccaaacactaagaggactgaggagtgccaaaaaaaacgttactcaaggggaaagctctcttacttctggtaccaaataagattggataagtcagaaaaacctgagtgagatggtctgtgaattcaacttctgcctccgttattacgtgacttggtggctttgaggaaagactaaaaccaagacaaattggcagagtcagtgcataagagcctatgctgtgaagggccacacagctctaaactgtaggacacagccctgacttgaaagggccgtttccatcagacacagccatggtgtaatayctcccatgtaaactaacaaaaataaaattaaatgaaaacaaaatctctgttggccacacagctccttctagctacttgtcacattat

SEQ ID NO: 18660 - DNA, 533 bp, Homo sapiens
gtgtgaggcaaagacatagttccttcatgttgatcattagtctctaagacttatagttgactccccttacagaggatgcagatctaagtcaggtaataaagtaatgtgaatcagaaagaaattaaaattgagaaatcagtgctaccaaacactaagaggactgaggagtgccaaaaaaaacgttactcaaggggaaagctctcttacttctggtaccaaataagattggataagtcagaaaaacctgagtgagatggtctgtgaattcaacttctgcctccgttattacgtgacttggtggctttgaggaaagactaaaaccaagacaaattggcagagtcagtgcataagagcctatgctgtgaagggccacacagctctaaactgtaggacacagccctgacttgaaagggccgtttccatcagacacagccatggtgtaatacctcccatgtaaactaacaaaaataaaattaaatgaaaacaaaatctctgttggccacacagctccttctagctacttgycacattat

SEQ ID NO: 18661 - DNA, 527 bp, Homo sapiens
tggatttattatgtggtacattctttgtaggacaaaatgtgttcatccaaaagaaacattttcttctaacagagaaaaaccaaaagacttactatatttttatttttgtctttattgggacacttggacactgtttaatgcccaattccagtgatttatctcaggattttaattcaataacttcattttctccaaatttttttttccccaaattgtatcccattttatgtggcctaacttgtaatctatcataaactattttctgcaagaatcagaatacatatcttcataaaytagtgctttaactgaaggcctaaaatttcagcccctatgttacatgatgttttccttatagaacaaatcaactccttttagtaacaagatctgataacctgcaagccaaagcctaggttatcaattgattaatgctgacttgaggtaagaggtaataaaaaacagaataagatgtcagaacctctttccttccctacacctgcaaagtaagtatcccttcaagtagacaataa

SEQ ID NO: 18662 - DNA, 557 bp, Homo sapiens
cctaagtttcaaatacacagaggaaaagcaatccagtaatagattccagagaacatatcctggtcagaaacagaacattgcaaagtctcattcccagtgarggtggagggtaagacgggagagcagtacttaaaattctgcttaagggaagcatcatgcactagaaaacattgtcttcatcaagaagtgaagtatcaaggcccaaatatgtcagtgactcaaatcagagaggggaaaaatccttctttaggaggaagcaaattaagggcttttaattagccaatttatttgacgctgacataacacaccagggcttaaagtactagggagtggagaaaatatgagaacatcatcagtggaaatatttgttttatggttctcctccacttatgcctccctaatttctgctattctattaaaaggtctttaagagggatgactaaatcaagggggcaaaccttcaatatgttgttggcataccaataattatactaacaacaataataacagtaaatttattcactgaactgctgagcaccaaggtaagtgtttacatt

SEQ ID NO: 18663 - DNA, 910 bp, Homo sapiens
tgacctactcagtgagtgttgatgacaaaggaaagaaattggagagaggagcaggatgctgttaagaaaactaagaaggaacagaaacttagaggaaaatcaggagaatgtggaatcacagaagacaaggggcatagagtttgatgaaggagggagcagccatctggagttaatgctactgggaggatttgactacatgcaggctgtctgagactttaacatgagacattatagtttgaaaggtgggcacagaggctgtggttggcagctcctaaaatagatccctacctctgtaaacttgtgtatttccctccctttggatgtgracagacttattgatttgcttctaataaatggaatatggcagaagtgattagatgtcacttctattaagctacaaaatgactatgacttctatcttaagctttttctgcaggcttgctcctttgctgagagaagccagctgccatcatgtaagcttgtctattcagaagcccatgtgtcaagaaagaatctccccccaacagccagccacagtctgaggcttggagtggctcctctcccagtgaaactgaagatgtcttctgccccagtttacagcttgattgtagccacaggcatccaactaagccaagccaatattgctgacccgtagaaactatgagccctgactaagctgccaaattttagggtaattctttacacagcaataggtaactaacacctaagctgaattgcaaagagttgaaaagtgcctgcagtgagcatagacaactcagtcaagaagtttgctatgggggtgagtagaggaattatgtggtgagtagaggaattacatggtaagtgtggaaagacgatcagagcattttcttcttcttttttttttttttctgagacagagtctcactca

SEQ ID NO: 18664 - DNA, 818 bp, Homo sapiens
tagggcagagctggcactcagtgaatcttaattctcttttctgggttccccatcacaaaacagttgggttgaaagatttgtctaagaattggactgccttggcttgaagacaaagtctgaactcctcagcctgacacacagagctttacgtgatttgacctccatgtatctctcctagctcaaccgactcctgtccttcaccacaaggcttaccctgttctctctgtcgccaggttggagtgtagtggtgcagtctcwgcttactgcaacctctacctcccatgttcaagcgattctcctgcctcagcctcttgagtatctgggactataggtgcgtgccaccacacccagctagtttttgtatttttagtagagacggggtttcaccatgttggccaggatagtctcaatctcttgacctcatgatctgcctgcctcagcctcccaaagtgctgggattgccggcgtgagccaccatgcccggccatggcttaccctgttctaaaggagcataaggagctgctcacttctcccctggaccccatccagatgagacatccacctagactcctggagtccccacgtcctccaggctgggcaaagtatttgtcctgtgcaagtgcccacacacctgggtctcccttaacacagcacttgtcataattttgtaaacctctttaatgcccatctcctattttagattataatctcctcaaataggaatattccactacattattcttatatacaccagtcactgctctaagctctttccatgttgacctcattttactattcttataaccctataagatatg

SEQ ID NO: 18665 - DNA, 556 bp, Homo sapiens
ccgaatgaaaccgtaacatgaagatgtgggttagacagcaaagaaaagggaaaataccagggccctcaaagctgtagaaacgcccttaagatctaaaagcagctgccacgcttttctcaacagctgatggcttgggccactttgcttgatggtagagaaaaccgcagaccctgtgcctattgttgccccatacctgaggcttacagtgctcctcgatccagctgaagacacaygctgacagctcctggaagctggccactgagatggaggcattgaaggactggaacagggaatccatgatgccttgaaacacgttgaacttgacctggtcagagacctggtcctccccttcatgggggttgtcctggtgtgccttcacaatctgctcatagttcctaaaagcatgcaggccagggctgaggtgctgcagcagctccgcccacccaagaagaatgacgggactatcctgtgtactcccaggaatggcagccccagagagcttctgggtggggttcagtatcagggagatactgcttccaggtcaggaaaggtggcc

SEQ ID NO: 18666 - DNA, 510 bp, Homo sapiens
taaaatgttraaatgtttctataccaattggcaaatagccactgtccccatctctttgcctgaaccctctccatgacaactcccccagcctctcccccagggatgtcccaccattttcccacaatgtggcagcgagaaggtttatgcccagttcaccagcaggcctccagggccctgatccatcactatagccaagtccatttccagttgatcatagcttatgccctacgaaactccctaagttaaatatcactcttgattttgtcatggagtcattaggaatattccaaggggcaacatgcagagctcacctggcacctgatacaagttaaccatcaggactgaattataagagaacctaagctcttagtgtagaacagagacaagcaataccagtgcggggtcatgctcagcctttcctctctctagcttccagggtggagtcattcttgcttgcagtgtcttgaagagaaaagccaaggaagccagagtcagagatgtctccacaaa

SEQ ID NO: 18667 - DNA, 1811 bp, Homo sapiens
tctaaggccacacagtcattacaagaagggtcagaactagaatcacagagttctaattgtgagtcacagagtccagccctgtctccaggacagcttgcctttgaatcactatgacgtggctcagcgttacagatttcctagtggtgtccaagaaactgacacccatcactgcaggctggaaatggctcaacatcattcatttgtattacacatctaagagctataaaacaaacccagtgtgaaggcaaagtttccccatttgtctccagaataagacagactattgcaaaaacagagctaataaaactctgtcaacttcaacaacttggttagaggtcctgataacaagtgacagccttagctttttacagacaacttatagtgccttggaagcatgtcatgtgcagaatccgctacagtgtctttgaaaatagcacagtcaaacattcaaaatttaagtgacgttaatggggaagagaggaggaggtggtggttatagccatgtctacactactctttacagaagacatagatgtcagtggtccttcactcgtctcagaaaacaactcacgactacagcagcttgcatgatgaaatggaaggttaggatgcaaggggaaggtggagggtggaagatggggttggtgggtcatattagatagcaatatgaagcatactgttccccagttttgaggaactggggatctcactagttctcatggtgtgagccaaggaaatagactcttatgtgatgttaycaaagcttttctgtttaatgttttattcaacatcaaatgagaacatagaagcattgcttctaggaagggaagacaacccctgactcctacacgagtattctgctccaggaattgcaaggaagtttaaggattaggagagatgggggtagaaggaatgggtgaagtcaggactcagtatggttggccctctatatctgtgggttccgtatctgtggattcaaccaacctcggatggaaactattcagaaaaaaaaaaaaaggatggtttcatctgtactgaacgcatcataggcttttctttcttgtcattattctctaagaaatacagtataacaactatttacaaagcatttacattgtattaggtattataagtaatctagagatgacaaagtacactacataagaggatatgcataggttatatgcaaataccatataattttatataagggacttgaacatctgtggattttggtattcttgggaggttctggaacccatccccagtggataccaagggactgtgtatttggagttatgagaaaagaatggtcatgttttgattatcttgtagagaaaggagttcttggtaaggccttccctccaagctaattcaaagttagtgctccctgagaagcaggatctggccagaatttgagagagcgggatgctgggagaagaggtctatatttttaaaaaatgcttaggggagcaactaaaccagcaaaagttaaaccaaataaaaccatcatgcccacttacctctttaatttactctcccaaacagatcatcatttgagctattccactgaagtcaagcatgaaatctatttagctggatagctacccatttcctgtgacctgcaaaagagatgccctattctttcaggatccttggaatgccacatgcccaggcccactggaaaactgggaaggaaaactggagccacatgcctgggcccactgagattcatcacccttcccctacaaccctgtgtcaaggaaacacaaagatagagtggatttcagcaccacccaatgcagacgcat

SEQ ID NO: 18668 - DNA, 533 bp, Homo sapiens
tgggaatctatgggagggtactgcaatgttgtccctgccattgtctctccttctgctaatctgaacacccaggcagccaaggtgctcaaagatctctggagcagacagagctccaagcagaaggggtctgggatccttggccacccgacaggcakctcgcctatactgtggctctgacactgcagttactgtaaacttagggacttccttattgctcagttgcccttccaaggggaccttatcaactataggttttgggcagctgcctagagttgagggctgaccctaaggggccctaggcctccctctatcctactgcccaaccattcttccgtgatcttgcaaacagcattccatcgggtataagtgcttcagccatcttggtttcatctttccctccaccctctgctgaactattaaagcattttattccacaaacaaatctgatcttacaaccgctctgacctgaagcttgctgtgaggcagaagaatgggaggaatgcactgggatcagtgttactgcgggtgcattg

SEQ ID NO: 18669 - DNA, 596 bp, Homo sapiens
atgtcttcccaggaaaagaactactgtataaatgttattttctcaaaacaattcatagataactataaaataaacagtaaatatttctgtatttttaataaatgtaaaaataaatactaaccttccagctagcagtacaatgccaatcaccactttcacttttatcccagacctataagaaaataaaaggcagatattttatacaaaaattcctacaaattgatacaaaaactataagactgaatcagtgtacaaggaaagcggtgaacatatagttaacaaaagaayacaatcagcaagtaaacattcattcattcaattaagtatttattgagaggctgggtgcgatggctcatgcctgtaatcccagcactttgggaggccaaggcaaacggatcacctgaggtcaggagttcgagaccagcctagacaacgtggtgaaaccccgtctctactaaaaatacaaaaattagccaggcatggtgccgcatgcctatagtcccagctactagggaggctgaggcaagacaatcgtttgaaccccagaggcggaggtcgcagtgagctgacatcacgccactgcactccagcctggg

SEQ ID NO: 18670 - DNA, 526 bp, Homo sapiens
gttactctactgtatttctagttctcatataaagtaagataaygtgcatccaagcaccaagatttcagtctctactgctaattattatttaaaataatcaagactccttggagaagacctgagtccgtgtttgaagcaatggagtcaagatcgacttggggcatcttataatcttattccttaaaaaaattcaacaatctatttttggcttatggatgctaagcaaaggaagtaggaaccatgagagccaacatggattcatttgttaaatcttacagttcagaagagtaatcttgattttagcaaaccatttgtcaaaatcatgtgatactgtcaattccttgcaaatagacaaagaaatgtagggtgagttttaggacaatgaaatggattcagagctcactaaacaatagattagaagatgatttacaagtggacagaaagaatcccatggcatttggaaagacctaatccttgactcttggcttttttagtcaacatttctatcaacagctagaatgatgac

SEQ ID NO: 18671 - DNA, 526 bp, Homo sapiens
gttactctactgtatttctagttctcatataaagtaagataacgtgcatccaagcaccaagatttcagtctctactgctaattattatttaaaataatcaagactccttggagaagacctgagtccgtgtttgaagcaatggagtcaagatcgacttggggcatcttataatcttattccttaaaaaaattcaacaatctatttttggcttatggatgctaagcaaaggaagtaggaaccatgagarccaacatggattcatttgttaaatcttacagttcagaagagtaatcttgattttagcaaaccatttgtcaaaatcatgtgatactgtcaattccttgcaaatagacaaagaaatgtagggtgagttttaggacaatgaaatggattcagagctcactaaacaatagattagaagatgatttacaagtggacagaaagaatcccatggcatttggaaagacctaatccttgactcttggcttttttagtcaacatttctatcaacagctagaatgatgac

SEQ ID NO: 18672 - DNA, 529 bp, Homo sapiens
tgtgagacgaatatatatctgattgcttcctctgccctattttttcactgagccatattaaggcgtaaatgactattcctgtaaattgtatattcagtgaaaggctaatcagaaactcaaaagaatgcaatcatttgtcttttatctacctatgacctggaagccccttccccgtttcaagctttcccgccttttcagaacgaatcaatgtacattttacawgtactgattgatttctcatgtctccctaaaatgtatagaacgaagccgtgcccgtccaccttgggcacatgtcgtcaggacctcctggggctgtgtcaaggtcgccttcataaccttggcaaaataaactttcaaaattgactgagacctgtctcagattttttgggttcataactcagacttggtagttttcagtttattttttaaaatagaatatgtgcaaaatatatatcatattggttttaaagtacatgttcctctattatctgctactgtaacatattattttaaatcacagcttaatatt

SEQ ID NO: 18673 - DNA, 477 bp, Homo sapiens
cactaaaacaaaactagagtctatttgaaaaaggcaaactmaagtaaataaaaagatataaaatgtacaaaataggtacaaaaattcttcaatatgatgatcaaatcatggaatttcagattgtaaaatgatagtttctactagaaaatagttatattaaatagtattacccatatatagaattgttaaggatgtttttagaatatccagaagagtatggtacttacagaaaatatatcagtgtttcctaggcaagcattggtctattgaaattacatacctaagcacttcatacatatttattgaacatttatcatacattaaaaactgctgatcactacaaaatagctgtaagacaaaaatacatgtttaatgaagcttatggtcccttttatcaaaagaagagatcacaaaacttcaatctctgtaataggccaaacttaattaacaagctaccttgaaatcagaactgatcaa

SEQ ID NO: 18674 - DNA, 477 bp, Homo sapiens
cactaaaacaaaactagagtctatttgaaaaaggcaaactaaagtaaataaaaagatataaaatgtacaaaataggtacaaaaattcttcaatatgatgatcaaatcatggaatttcagattgtaaaatgatagtttctactagaaaatagttatattaaatagtattacccatatatagaattgttaaggatrtttttagaatatccagaagagtatggtacttacagaaaatatatcagtgtttcctaggcaagcattggtctattgaaattacatacctaagcacttcatacatatttattgaacatttatcatacattaaaaactgctgatcactacaaaatagctgtaagacaaaaatacatgtttaatgaagcttatggtcccttttatcaaaagaagagatcacaaaacttcaatctctgtaataggccaaacttaattaacaagctaccttgaaatcagaactgatcaa

SEQ ID NO: 18675 - DNA, 477 bp, Homo sapiens
cactaaaacaaaactagagtctatttgaaaaaggcaaactaaagtaaataaaaagatataaaatgtacaaaataggtacaaaaattcttcaatatgatgatcaaatcatggaatttcagattgtaaaatgatagtttctactagaaaatagttatattaaatagtattacccatatatagaattgttaaggatgtttttagaatatccagaagagtatggtacttacagaaaatatatcagtgtttcctaggcaagcattggtctattgaaattacatacctaagcacttcatacrtatttattgaacatttatcatacattaaaaactgctgatcactacaaaatagctgtaagacaaaaatacatgtttaatgaagcttatggtcccttttatcaaaagaagagatcacaaaacttcaatctctgtaataggccaaacttaattaacaagctaccttgaaatcagaactgatcaa

SEQ ID NO: 18676 - DNA, 518 bp, Homo sapiens
tccaggaatgagataacttaagtcttctcagaaatgtagtccagagtaaggtgagatgggaggatagactcacagatggaagttggataggtgaggggaaaggggttgggcactttttttttaagacaaggtctctctgtgtcacccaggctgaagtgcagtgggtgctatcatgggtcactgcagcctcaacttcctaggcccaagcaatccccccacctcagcctcccgagtagctaggactataggtgcgtgccaccacacccaactaatatatwttttcattttttgtaaagatggggggtctccctgtgttgcccaggcttatttccaaaggcttttttttgtttctaagacagggtctcgctctttcacctaggctggagtgcagtgatgcaatatagctcactgcagccttgaactcctgggctcaagcaatcctcccaccttagcctcctgagtaatcaggaccacaggcatgcaccaccacgcctgcctaatttttttttagagacagg

SEQ ID NO: 18677 - DNA, 518 bp, Homo sapiens
tccaggaatgagataacttaagtcttctcagaaatgtagtccagagtaaggtgagatgggaggatagactcacagatggaagttggataggtgaggggaaaggggttgggcactttttttttaagacaaggtctctctgtgtcacccaggctgaagtgcagtgggtgctatcatgggtcactgcagcctcaacttcctaggcccaagcaatccccccacctcagcctcccgagtagctaggactataggtgcgtgccaccacacccaactaatatatattttcattttttgtaaagatggggggtctccctgtgttgcccaggcttatttccaaaggcttttttttgtttctaagacagggtctcgctctttcacctaggctggagtgcagtgatgcaatatagctcactgcagccttgaactcctgggctcaagmaatcctcccaccttagcctcctgagtaatcaggaccacaggcatgcaccaccacgcctgcctaatttttttttagagacagg

SEQ ID NO: 18678 - DNA, 599 bp, Homo sapiens
ccaggctagagtgcagtggcgtgatctcggctcactgcaacctccgcctcccgggttcaagcaattctcctgcctcagcctcctgagtagctggaattacaggtgtgtgccaccatgcccggctaatgtttttgtattttagtagagacagggtttcaccatactggccaggctggtctcaaacttctgaccttaggtgatccacccgcctcagcctcccaaagtgctgggattacaggcgcgaggcactgctcccagcctggcatgtytttagtagagatagggtttcaccatgttggccaggctagtctcaaactcctgacctcaggtgatccacctgtcttggcttcccaaagtgctgggattacaggcatgagccaccgctcccggccaatactatttttattatccctattttacagataaagagacagagacacagagagataaagtaatgtgcctgtagtcacacagctggtaagtgacaactgtgggatgcaaacctaggcaacctggctgtaagtctgtgcacttaacccattatacatatggcttctccaatagaataagagggaatagattcaggacaggcaaaacca

SEQ ID NO: 18679 - DNA, 1335 bp, Homo sapiens
atttcttgtcatatattcttctttgtttttacaaatctttaaatatgttttttaaaaacattttaaacttagagtccaggccagatttagcccagagttgtagcttgccagtcttttttcagaaattttcaatgtgctgtaccattagctttccctctttaagatagtgacatgtacttcaccagtataacttagacttgtagataccctagtgtgccagtcttcctgatttcttttgacaaaaattgcaacctttttttgtttggaggtaataaatatgttggatagattttattgttatcactgttctcactagagcctgattagcatgaaatacatgtgcaaagaaaaatgaggaataagcagagccacttaatttttttattcagcaaacagaaggaatgggaaactaaacttaattgcctatgtaccaagtgtaagccattttaatataactccttatttaatccttgtgataatcaacaggatggcatacacattttttcagatatttaacctaataatagttaacctaattaagacattttctagaattttctgcaatgatgggcttgttttatatctgtgctctacattatggctgttgagcacttgaaatggaactaatgtgactgaagtttttatttattaataattttaatttcaatttaaataaccacatgtggctagtagtaaccatactgggcagcacaacttgaagagcttcaataattgattcaagtttagacagtaagttccgtgtaactcctaagctcatatttatgtgtgtgtgtgtgtgtatatatatatatatgtatttttttgttgagacagagttttgctcttgttgcccaggctggagtgcagtggtgctatttcggctcrctgcaacctccacctcctgggttcaagtgattctcctgcctcagcctctcaagtagctgggattacaggcatgcaccaccacactcagctaattttgtattttcagtagagacagggtttcaccatgttggtcaggctggtcttgaactcctgacctcaggtgatccacccgcctcggccttccaaagtgctgggattacaggcatgagccaccactcccggccctaagctcatattttttttccattgtgccatactgcctcctcaataaaagtcaaggaatctatgaagacagtaggaaagaatgggtggacctttattaccttacagagtaaaaaatgtggagaaagtacttaggcaattttcaaggtatattaacttttaggccatgagctcaattagtaaatccataatctggaatattagatcataattatcagcaatatctat

SEQ ID NO: 18680 - DNA, 553 bp, Homo sapiens
ccattcctctatatgtcactcaggtatcactgaaaactacaaaggatgaggctttgagtattagacatccatctgtgtgggtagtagcaaaggcagaatttttggtcacaggaagaataacatctctgtatttaaaccaaaatcttcatgtttccaaataaaccattcccttccagcctctttaaccgttaacttctaagggagatgtatgattttgtataagacatacttctgtaaatcaaagaaactttttactggctttgtttattccattgactggaattctggaaatttaactgtctgcacttgctgtgagagttacttgttactgcctsttagcagtttgtcaaagctgtatctaaaagtaattgagccatgctccattgcagctgacacccctgcttggcctctggaaagaagcaaagctcatctgtttttaggcaggagttggtgtgctggagaggcagtgatgctatgtttttgtgcctctcagacttagcagcaagtgttgacagttaggtttctggacactcacagagcttcatggacttac

SEQ ID NO: 18681 - DNA, 500 bp, Homo sapiens
acacacacacacacacacacacacacacacagtgcgcacatgaggagggagcccagtgaactgatctttcccaccattaacttctcactcataggatagttgatctttacagggaccaacttgctaaactagcagtcacaacatcaaggttgccaagacgtagatcctcctcccataaacaaggcattggtttggatttgacggcatcaggctggcmtatgttggggttggccaggagcaggaggagctcaataggatttttagttgaaagactgagaccatgacaaggggcaacatcaacccttcccctttactgagcaagctgactgggaacagaattcaaacagtctgtccaaattaggagggctggaagcagatagatgttgaagtaaagagccatggagatattaacagaaagtagtaggttgagcaacgaagtgtcctttaatttattcacaaaacatctggacacctagtatgtaactgactctgtcaatatt

SEQ ID NO: 18682 - DNA, 507 bp, Homo sapiens
tgaggagcatgtgatctcctccacatttgctgtctggaagcttttgaatttacaatggagataaaatgagaaagtttgctaattctgaattacaatttcatccttattccattttctctgtgttttagcaccataaattttatatttctaagaattttatttttcacattcaaatgttttgttattactggaaactactttataaaacttgttaagatttaccatagtaaaaatggtccttcaatctgtcttacttaaatattcttcagaggtttccctgaagagaattgagcaattatttgcaaatgtgagtggkacacaaattgagggcaaagttaaacaatcataaaatagcctgtttattttttcacattgaatactttcgtcattggagtcacaaagctatatgctgctggatataaaactgtcggagaattaaacatttcatgtaaataaaataccaaaaattaggtactcaagcatattttaaaaatttatatcatgcag

SEQ ID NO: 18683 - DNA, 507 bp, Homo sapiens
tgaggagcatgtgatctcctccacatttgctgtctggaagcttttgaatttacaatggagataaaatgagaaagtttgctaattctgaattacaatttcatccttattccattttctctgtgttttagcaccataaattttatatttctaagaattttatttttcacattcaaatgttttgttattactggaaactactttataaaacttgttaagatttaccatagtaaaaatggtccttcaatctgtcttacttaaatattcttcagaggtttccctgaagagaattgagcaattatttgcaaatgtgagtggtacacaaattgagggcaaagttaaacaatcataaaatagcctgtttattttttcacattgaatactttcgtcattggagtcacaaagctatatgctgctggatatawaactgtcggagaattaaacatttcatgtaaataaaataccaaaaattaggtactcaagcatattttaaaaatttatatcatgcag

SEQ ID NO: 18684 - DNA, 460 bp, Homo sapiens
gagtttggaagcctggaattcactatcctaggccattrtaggccaggcttgaggattatttggcaaaatgacacccttaaaaagttaacaaggtcctggtctatttgctcctggctaatgccatggagagtacccagagtcagagatcttatcatgtcatactttttgaaacaaaacactccctgggaatatcaacctcctagcatggggcccagtgctctggccatcccctgatcccttcaatttgatgcttctgtcttggcctcaactggagaaaagccaaaataatagggtgggtggggaggactcaaactactcattcctcataataacaacaaaaatattaggagtaacgtgtattgattgcttactacggggcaggcactgttctaaagtctttatatgtattattaactcacttaatcttcataagcagccctgtgagacaggaactgttacc

SEQ ID NO: 18685 - DNA, 942 bp, Homo sapiens
tttcaataaggagttgctaggataaaagtcaaaattctccagcataaattcactgacagggatttctgtttaatcttttcaaaattctaatacccaatttgtttcctctagagaataactcgtgtagaatcataacctctttggtggaccttgatttttccatctgtaaaagtatagaactagttttgacttaacagtcaacaaatgcctaccctctccacatctagctgattagagcgccctcatgtgcgcatttgctgtaatgttttagaaatctgaaaaagacaatattaatctcagcagtaatacaataaataatgtcttcatttgcacatttatagcaaatgctataaatatatagctccaagtattactcagtaaaagctaaaggcaaatgctgtagtaggttaatcttactgtcgttcactatcaaacctttcatatgccaattttatcctaaaacagtgaagttattgttttggtttcaattttaatttaatgacttaaaggattttttcccttaaaacttctaagtatttcattataatattatttcatcattaggcttaaaggaaaatatgtggtcaattgagttgttatttattatacatgatagcttgacatcatctttttagggatggaaaacagctccagggaccaagtctaactcagttttttgatataagaatttacctgtcggccgggygcaatggctcacacctgtaatcccagcactttgggaggccgaggcgggcggatataggtcagcagatcaagaccaggagttcaagaccagcctggccaagatggtgaaaccccatctgtactaaaactacaaaaattagccaggcgtgatggcaggcacctgtaatcccacctacttgggaggctgaggcaggagaatcacttgaacccggttcaagtgagccggctgcagtgagc

SEQ ID NO: 18686 - DNA, 533 bp, Homo sapiens
acaaagatgaataacaggggtaataccagtctgaggttggacagttgttgggcagttgttgggcagacgtcctcacagaagtattgtgtgcctatatgtgtgcgtataaagttgcaatggcctttttgcaaggttgtggtttttgcagccttttgtgcatgagagccctcccttcctgtccttctcagttctacttgtcagggtttttgccacaactccattttgattctgacaactttcagaagccttaggaaactagacagtggaattatgggatttgctctttagccagttgcattttatttgaactggctttagcaatgagcactaatgaaaattagccactgctggctgggtgcagtggctcatgcctatgatcccaacactttggatcacctgaggtcaggagtttcagaccagcctggccaacatggcgaaacccygtctctactaaaaataaaaaaattagccgggcatggtggtggacgcctataatagtccagctacttgggaggcggaggcaggagaatcgc

SEQ ID NO: 18687 - DNA, 1165 bp, Homo sapiens
tgaccagcagagagttctcagagtaatacttttcagtggtcatttaaaaaaaaattagccagccaggcgcggtggctcactgtagtcccagcactttgggaggccaaggcaggcagatcacaaggtcagtagatagagaccatcctggccaacatggcgaaactccatctgtactaaaaatacaaaaacattagcttggcttggtggcgtgcacctgtagtcccagctgctcaggaggctgaggcaggagaatcgcttaaacycaggaggcggaggtcgcagtgagccaagtttgcgccactgcactccagcctggcaacagagagggactctgtctatattataggctcatgcctataatcccagcactttgggaggctgaggtgggcagatcacctgaggtcaggagttcaagaccagcctgaccaatatggtgaaaccctgtctctactaaaaatacaaaaattagctgggtgtggtggcatggcctgtagtcccagctacttgggaggctgaggcaggagaaccgcttgaacccaggaggtggaggtttcagggagctgagattatgtcactgcactccagcctgagcaacagagtaagactctgtttaaaaaaaaaaaaaaattaagtgtgctgtcttagtatcttgttattatgtcctaacagccatacacaacttattagaaggatatcctgtagtgcctgtgatgagtctctaggcttaatctaatggcttctttagctgatgaatcttcgtgatggagtgctgtgtgttgaattactcctctcccctacttcctcctcctactcctatcctaaaattaataagacgttgtgcctatttttcatcctctaggattgttattgtcattgttaaagacttcggatataactcctacctaggtccctcaaaccaatagtttgagaaactactgtcaactcaggtataatgtattaattttctgatcaatagtcggtactagctgaagcatatactgaaagatatatcagggctgaacaatttgagatttttataaatcatgatttatctctattttgtttctaaaatccaaatattaatcaagttttataccactctttgatcagaagtacttagaactaaaagtcaacttatcaagcttaaagccatagggttacacta

SEQ ID NO: 18688 - DNA, 533 bp, Homo sapiens
tagagtttataaatgcaactgtcagtcattaagtgagtagcttgggcagagttctgtgcgaggggcagcagaggatgcaaaggcctataatytccctgtcctctttggcgcttactgtccactgacagggaggcagaatgacaagaacataaaactctaggagtattggaggattaagtgaaaccatatgtacaacagtgaggcctggtgccctgaaagaaggtattcgttgaagctcttttaacactctctgatgatggttctacaaagcaggatacggcatgagaagccggaaccaagcaccatgggatgcacagagagaaagcttacatccatttggggagatcagagacttcatgaagaagcggctccgattgtggctttgtcaggatagtggggatcttgggtggcaggatgatgggatggcagcaatttctagctgtcactagctgtgagaccttgggaaagttggtcattttaagcctcaggctcctcatgtctagaatgcaaagtaatactcattacagttttct

SEQ ID NO: 18689 - DNA, 671 bp, Homo sapiens
tgataaagagaacacatacaaaaaacttcagacatcaaatctggaagctttcagatgcaagtataagatttctggtttccgcaatccagcaccaactctcataaatagcttctctagttaaaactaatgtaaaagtcctaatggtagctaaacctcatttataatatacaagaaaaatgtcatatcagtaaaggaatatggtgattatgagaacctaatacaacatgcctaagtgaagaaagtaatagcaatatccataattcatcatcaaataaaaaggcacttgaaaacattgctcagtttgatctactggtacatttagtttgggggtgaatatacatatttatttatgataagcaattgaaatcatcaaactaatttctttgmgctaaattgtcatttttaaaattttgcactcacaaagaaaatgtctattacaatttttcttcctatgtgttttcctacaattagtaaaggagcttacagttgtcaattatatccaaatccacttgacatttaaatttatccttggcaattaataaattgtcatattttgtctttgaagaatttggagactactctgtttcctaggagccaaaaagcacaggttgctttgaaaagactgagtttctggagaagtcactctaccatggaaatttaccaggaagttg

SEQ ID NO: 18690 - DNA, 1932 bp, Homo sapiens
acaaccactttctaggaaaactctgaattggaaaaatgttaagttcaggtgtgttggtcatgtgagacacagaggaggccactcaacagagcacatgagataatgtaagcggtgtatttcttacaggtgaggttcactgggcaccatcgtagggtctacctgacacatcaagtattctctaatctgcagatttctcagtcttcacttattttttgtgaacttgacttttttgaaaacacaggtcagatattatgtaggttttcccacaatatgaatttgtctcatgatttctcatgattaaactgggacataaatacattaaaaccatgcatgtgtgtttgaagacaagaaaaataaacattatagatattagaaatataaacatagaggtaaatgtaataaacacaaattagaggataacaaataattcacagtaatagctattttcagtgattaaggaagatggtgaagctcaggagatgcactatgggccatcaaacatattgctcatgttgttttataaggtcaacagtgactttaaagataaagaaaccttataaatttaagaatagttttaggtttacagaacagttgtagtacatagaatttccacatatcctacgaagtttccatttttatgaaattcttacattaatgtaggacatttgtcacaagcaatcagttttataacactataactactcttcatactttattcatttttttttagttttgacttaatgtcctgtttctattccaggatttcatccaggatacctcatcacaggtacatgtcatgtctccttagaattctctgactgtcacagtttctcagagtttccttatttttgatgccattaatattactaatgtgggatttgtctgatgtttctctaatgataagactggatttgtgggtttaggggaggaagatcacgaggaaaagtgtcatttttatttatttatttaattttgagacagtgtctcactctctcgcctagcctggagtgcagtgtcatgagcttggctcactacagcctccatcttctgagcttaaggatccttccctctcaacctccagggtagctgagactacaggtatgtgccaccaggctggactaatttattgttgttgttgtttgttattttttttggtagaggcaaggtttcaccatgttgcccaggccggggtcaaactcatgggctcaagtgatatttattttgttatagagatggggtcttaatgtggtgtccaggctggtctgggattacaggcgtgagccactgtgcctggccaaaaagtgccattctcatcatatcataccaagagtaaaaactgtcaacaagggtagacagtcattattggcagaatgtctacaaattcctttaaaccttcaccgtaaacatgtgcctattctcttccaattatttcatgtgtattaatttattcacttaaacatgcatcttttatttatatcattatctaaatatggagatttattttacaatgcatatgtgctatttttttttttgagacagagcctttctgtgttgccaaggctggagtgcaatggtgcgatctcagctcattgcaacctctgccccctgggttcaagcgattctcgtgcctcaatctcctgagtggctgggattacaggcatgagacactacacctggctaagttttgtatttttagtagagactgagtttcaccatgttggccaggttggtctcaaactccatacctcagatgatccaccctcctcggcctcccaaagtgctgggattacaggcatgagccaccatgctcggctgctattttttttttaattgcacaaattgttccartgttggctattggaaggtttttaagttgtcccttctatcactttgaaatacctgcataattaaagtttgatgttgtgtggttgg

SEQ ID NO: 18691 - DNA, 503 bp, Homo sapiens
aaaaataatgtcaagagatttctctaagaaaagtattgcagaagttaaaggaaaaatacaatagcatgtatatatatatatatatacatgaagttcagaaagcaggattaatggatggaaagaaggaagatgaatgcatggataatttagggatacatatataaatgtggcagtactataagtaaaagcaagcaaaaaaattagcacacaatttagagcagtctggagtgaatgaaaagaaatatgataaaataagcatataatagcctctaaggtattagtaatgttctgtttcttaasatgagtggtaaatatcagggtatagtaaattattaaataaattattaaattattaaaaataaaaaattatttttaaactgtgtatatatacacatacatatacatatgtatgtctgtgtatgtttgcatatatgtatacatatatgtatagtattcttttatatatgacatgttatacaatggaaagtaacagaattttcaac

SEQ ID NO: 18692 - DNA, 594 bp, Homo sapiens
tgaatgctataattaatatcctagataaatgagtatgttgcatctatgtaaaagaatgggataccttggggaaaaataaagtataataaagaactttcatatatatatatatacacacacataaatatacatatatatatacatayatatacacacacatatatatgtgtgtgtgtgtgtgtgtgtgtatatatatatcccaaagcagatagtatacaggttagaaaaaagttaaagttgtcattcagaaagttgaacaaaacacaaagatatgaaaatgtgataggaagaaaaggttaaacatcaatccccaaagtaaaatactaaatagagttatacataaaagagggatagagataaaagagggaatgggtagggaaaagttagcagaggtattacaaaaaaaatccagaaatgaaaatgctcatcatgcattcactttgtgaaaaataatgcatatttagacacattattgtaaaatttcaaaatatcaaaaataagagaacatcctaaaaactttcagaggagaaacaaaacagatcagctacaaccaagaatcagatcaccatcagacttattaacagtaataattag

SEQ ID NO: 18693 - DNA, 589 bp, Homo sapiens
ttttcccaggttgcttcacatcctgcttctttttgttaacatttctgcctaattgtcaccttctcagataggccttccttatttaaaagatcatctcaccctattcttttatcttgatkttgttttctttatagcaccttgacctgggaaaaccgaagtactatgtgtgtgcacataaatatattgtgtaagcgtatgttaactgtccacagaacccaatcagcatgaaagctgcaggacagcagggtctttgtctgctttgctcattcctattttctccaaatctagggaagtgtttggcatattatagggtattcaataagtaaatgacacaaacattttatatgatttcaatgtaggagttcatctttttttccaccaaataagtaagccagtatccccattattggctacaaaatacttcatcacttacctattaattgtgtggtgctgtctttatcatagaccaagttcccatatttacaagcattggtttatgagtcttctattctgtttctctttctctttgctccactttttgaagctgacttatttataaacctaacataagtttttggaagtctgtcaa

SEQ ID NO: 18694 - DNA, 990 bp, Homo sapiens
ggctccatcattgattaaataaaaaagagaactttctttcagacctttggatagtccacagatggattgaaaaatacaaaggtgcaataacttacaaataagatctgatctgctctctctagggatccacattggaaatttggtctgctgttttcaagactggtgctgatgtgaggagggattgggacaaggacaaataaaaactccacaaaactttcctactatttgtcaccttccttattctatttgtttatctctgtgttaatagtacagggtactgaatataatatattcaccatactttatctgtttttggaaagctgttgctttcttggttagaaggattttagcatttttagatgtttgtgacttctattagatttggtcatgtaatttttaatgatgacaaaaaggtctgtttagggatttagggaaatattatagatattcatgagagatgacattgagtttttttctaagaacatatgcaatcttggcccttcttttcttctttgacattacttaataaagtttaatttttccattgggatggtaaaatatccttattagtcttttgtcatacttaactacatatgttctacagtaaaccagttgctagcttccaaatgttctctcttagtgtagtcacatagcacaggctaaatcccccaaggcacaagggtcactcattacagacacagtgaccagagtgttttttccctttttttttttttgaggcggagtttctctcttgttgcccaggctggagtgcaatggcgcaatctcggctcaccgcaaccttcgcctcccgggttcaagcaattctcctgccgcagcctcctgagtagctgggattacaagcatgaaccaccataccgggctaattttttgtatttttagtagagacagygtttctccctgttggtcaggctggtctcgaactcctgacctcaggtgatctgcctgccgcggccttccaaagtgctggga

SEQ ID NO: 18695 - DNA, 465 bp, Homo sapiens
gtgcagggctgcttatccaattttgactttcttaggttctcttgacatggttggttttctgtgtgtgcagttgacccacatcccatggaaactttcaagcatggttttcatgaccacattgagaaacatgccttccctggggcttacccttgagctttccttaaggaccgtgtttatgtctgtgagaaattctttatatctatgagctgaatgttgcttatatttccaaatgtttttcttcaaaaaatgtgtctatttctgcatctttatacaaatttaattgtcaaaaatgtgaaggaatatagattttactgaaatctttctttatatttayagagatatagtgttgtattttcatctggtgaactttatgacctgaaaggaattgggaaactgctctcaaaatagaaacctcccgaaggatactctcccttctctttaaagacttatttatacgtgacagca

SEQ ID NO: 18696 - DNA, 465 bp, Homo sapiens
gtgcagggctgcttatccaattttgactttcttaggttctcttgacatggttggttttctgtgtgtgcagttgacccacatcccatggaaactttcaagcatggttttcatgaccacattgagaaacatgccttccctggggcttacccttgagctttccttaaggaccgtgtttatgtctgtgagaaattctttatatctatgagctgaatgttgcttatatttccaaatgtttttcttcaaaaaatgtgtctatttctgcatctttatacaaatttaattgtcaaaaatgtgaaggaatatagattttactgaaatctttctttatatttatagagatatagtgttgtattttcatctggtgaactttatgacctgaaaggaattgggaaactgctctcaaaatagaaacctcccraaggatactctcccttctctttaaagacttatttatacgtgacagca

SEQ ID NO: 18697 - DNA, 673 bp, Homo sapiens
attttttgcgcgggaaggtggggggacggagtttcgctcttgctgcccaggctagagtgcaatggcataggggactcaaggagtcaacctatggcagggaggacacgtcattctgagtgtaagggccacagggaaaggtggcagggcccgtgcttttaaaggctgaaatcccggtggttcaggcckgtcgtcccagcactttgggaggcccaggagggcgggtcacttgaggtcaagggtatgataccagtgtggccaacatggagaaaccccgtctctactaaaaatagaaatattagccggctgtggtggtgtgcgcccgtaatcccagctactgaagaagaatcactggaacccaggaagcagtggtttcagtgagtcgagagagcgccactgcactgcagcctgggtgacagagcgagagagactcagtccaaaaaaaagaaaagaagaaaaaaaaaaacaaaacagacccaaatattgcattgtcgctgaactttcccccgaaaggccagaaaccccctgactcaggtcaaggaggtggtgtttcattttacttctctctctctctctcccctcctccccccctccccccaacttttatttcttgtccaagcatacatgtgcaagattgttacataagtaaacttctgacgggggggttcagtgtgca

SEQ ID NO: 18698 - DNA, 673 bp, Homo sapiens
attttttgcgcgggaaggtggggggacggagtttcgctcttgctgcccaggctagagtgcaatggcataggggactcaaggagtcaacctatggcagggaggacacgtcattctgagtgtaagggccacagggaaaggtggcagggcccgtgcttttaaaggctgaaatcccggtggttcaggcctgtcgtcccagcactttgggaggcccaggagggcgggtcacttgaggtcaagggtatgataccagtgtggccaacatggagaaaccccgtctctactaaaaatagaaatattagccggctgtggtggtgtgcgcccgtaatcccagctactgaagaagaatcactggaacccaggaagcagtggtttcagtgagtcgagagagcgccactgcactgcagcctgggtgacagagcgagagagactcagtccaaaaaaaagaaaagaagaaaaaaaaaaacaaaacagacccaaatattgcattgtcgctgaactttcccccgaaaggccagaaaccccctgactcaggtcaaggaggtggtgtttcattttacttctctctctctctctcccctcctccccscctccccccaacttttatttcttgtccaagcatacatgtgcaagattgttacataagtaaacttctgacgggggggttcagtgtgca

SEQ ID NO: 18699 - DNA, 522 bp, Homo sapiens
gcacatttttatatttttagtagagatggggttttgccatgttggccaagctggtctcgaactcctgacctcaagtgatccgcctgcctgcacctcccaaagtgttgggatcacaggcgtgagccaccgcacctgaccagtaacgacagcttttaatggtgaaaaacagaamaagctgagaaggctacagtgaggactggaatgttgggctctgatgtgtggctttgatgtgtatatgtttgagcttctcccttttttacatccctggggaaattttaacttcattctgttaagcttaaatgcttttatgagaagtatcctaatttaataaagtcttatctagaaaacgttttatgaaaaatacctaagatgtagaatagggagtagaatagaatctggtgggtaaaagtgggctgtatacataattttaaagaaaagaaaaagagaaaaatgtattttctggagcaaattcaattaagccaatttaatttcttgatcttcttgattatttttaatagaata

SEQ ID NO: 18700 - DNA, 532 bp, Homo sapiens
gcccccggagtgagctgaggctcttcaatgaactggttcaggttgtaaaggacatggagtagagaccgtgcctggcaagaccccagggacagcagctgctgctaccacccttaggtacaagcaggatctgcccaaggcacttgcacttatgtttcagggagcaaaagtctatttaattttgctctacaaaagggagatggggctttatcaaaaggagctgattaccttcagccctggatccaggtgtatctccttccaggtccatggaagacatactgggtgacatcaggaagacatgagaggctaggctcagtgcctctccagtggttcctgattcaaaaacggatggtgcccacccacccaggaggtgctggggtgctgtgggagggtggggctcccacagctcttaagagtattattggcaagttatccagtctttctgagccttagtttcttccttggtaraatagggataataatgataccgactttatagaagtgtgagaactaacgcctgccaaatagtagggca

SEQ ID NO: 18701 - DNA, 532 bp, Homo sapiens
gcccccggagtgagctgaggctcttcaatgaactggttcaggttgtaaaggacatggagtagagaccgtgcctggcaagaccccagggacagcagctgctgctaccacccttaggtacaagcaggatctgcccaaggcacttgcacttatgtttcagggagcaaaagtctatttaattttgctctacaaaagggagatggggctttatcaaaaggagctgattaccttcagccctggatccaggtgtatctccttccaggtccatggaagacatactgggtgacatcaggaagacatgagaggctaggctcagtgcctctccagtggttcctgattcaaaaacggatggtgcccacccacccaggaggtgctggggtgctgtgggagggtggggctcccacagctcttaagagtattattggcaagttatccagtctttctgagccttagtttcttccttggtagaayagggataataatgataccgactttatagaagtgtgagaactaacgcctgccaaatagtagggca

SEQ ID NO: 18702 - DNA, 532 bp, Homo sapiens
gcccccggagtgagctgaggctcttcaatgaactggttcaggttgtaaaggacatggagtagagaccgtgcctggcaagaccccagggacagcagctgctgctaccacccttaggtacaagcaggatctgcccaaggcacttgcacttatgtttcagggagcaaaagtctatttaattttgctctacaaaagggagatggggctttatcaaaaggagctgattaccttcagccctggatccaggtgtatctccttccaggtccatggaagacatactgggtgacatcaggaagacatgagaggctaggctcagtgcctctccagtggttcctgattcaaaaacggatggtgcccacccacccaggaggtgctggggtgctgtgggagggtggggctcccacagctcttaagagtattattggcaagttatccagtctttctgagccttagtttcttccttggtagaatagggataataatgatacmgactttatagaagtgtgagaactaacgcctgccaaatagtagggca

SEQ ID NO: 18703 - DNA, 532 bp, Homo sapiens
gcccccggagtgagctgaggctcttcaatgaactggttcaggttgtaaaggacatggagtagagaccgtgcctggcaagaccccagggacagcagctgctgctaccacccttaggtacaagcaggatctgcccaaggcacttgcacttatgtttcagggagcaaaagtctatttaattttgctctacaaaagggagatggggctttatcaaaaggagctgattaccttcagccctggatccaggtgtatctccttccaggtccatggaagacatactgggtgacatcaggaagacatgagaggctaggctcagtgcctctccagtggttcctgattcaaaaacggatggtgcccacccacccaggaggtgctggggtgctgtgggagggtggggctcccacagctcttaagagtattattggcaagttatccagtctttctgagccttagtttcttccttggtagaatagggataataatgataccgactttatagaagtgygagaactaacgcctgccaaatagtagggca

SEQ ID NO: 18704 - DNA, 538 bp, Homo sapiens
tatatttttttaaagaaaaatttatgagcttatgagcaggtattgcccaaaccctggtatatagcaactttatcagggaaaaatactaccttctgagacctctaagcagtcatctagctagacttctagtagcaactctgcatcaccacatgttggagggtatgttttcytttttagacttcaaaaatgatagctgtcaatgtggtcgaataaaaccaactagagccactgacatacttgttatcttgcaaattgaaaaggaggttaaggccgggtgcggttgttcatgcctgtgatcccagcactttgggaggccgaggtgggcagatcacgacgtcaagagatcgagacaattctggccaacatggtgaaacgccgtgtctactaaaaatgcaaaaattagctgggcgtggtggtgtgtgcctgtagtctcagctaattgggaggctgaggcgggagaatcacttgaacctgggaggcagaggttgcagtgagccaagattgtgccactgcactccagcctggtgacaaagcgaga

SEQ ID NO: 18705 - DNA, 538 bp, Homo sapiens
tatatttttttaaagaaaaatttatgagcttatgagcaggtattgcccaaaccctggtatatagcaactttatcagggaaaaatactaccttctgagacctctaagcagtcatctagctagacttctagtagcaactctgcatcaccacatgttggagggtatgttttcctttttagacttcaaaaatgatagctgtcaatgtggtcgaataaaaccaactagagccactgacatacttgttatcttgcaaattgaraaggaggttaaggccgggtgcggttgttcatgcctgtgatcccagcactttgggaggccgaggtgggcagatcacgacgtcaagagatcgagacaattctggccaacatggtgaaacgccgtgtctactaaaaatgcaaaaattagctgggcgtggtggtgtgtgcctgtagtctcagctaattgggaggctgaggcgggagaatcacttgaacctgggaggcagaggttgcagtgagccaagattgtgccactgcactccagcctggtgacaaagcgaga

SEQ ID NO: 18706 - DNA, 537 bp, Homo sapiens
agagttttaattcaggcaaccctaagtaatgtgtagaacattatcaccagcagagaaaatgtccccatgcctctttccagcagggccctccacctcagaagcagccactaatatgacttctatcacaagagttttgcctattctggaaattgatgtaagtgaaatcttgcagtgtgtactctattgtgcctggtttcttttcttcagtatatttttgagattcttctatgttattagttgtggtaatagtttcttcttttttttgctgagtagtatcccattgcgtgattatagtattgtgtctttatcctattttatttcaatttttttatttgtctacwatctcagtccatcaagaaatgaagcatagtgatatttttacctttcctatgaatcattacaataattttgtaaactgtcttatttgccctttgtattgtattttctgttaaaagaaaaaaaatgagaaggaagtcatttaattcccattatactctaagtgccaagctaagatactctatttaatcctcaccacag

SEQ ID NO: 18707 - DNA, 537 bp, Homo sapiens
agagttttaattcaggcaaccctaagtaatgtgtagaacattatcaccagcagagaaaatgtccccatgcctctttccagcagggccctccacctcagaagcagccactaatatgacttctatcacaagagttttgcctattctggaaattgatgtaagtgaaatcttgcagtgtgtactctattgtgcctggtttcttttcttcagtatatttttgagattcttctatgttattagttgtggtaatagtttcttcttttttttgctgagtagtatcccattgcgtgattatagtattgtgtctttatcctattttatttcaatttttttatttgtctacaatctcagtccatcaagaaatgaagcatastgatatttttacctttcctatgaatcattacaataattttgtaaactgtcttatttgccctttgtattgtattttctgttaaaagaaaaaaaatgagaaggaagtcatttaattcccattatactctaagtgccaagctaagatactctatttaatcctcaccacag

SEQ ID NO: 18708 - DNA, 665 bp, Homo sapiens
tggggaaagactccacagatgttttgagacctaagtttggccttgagtgaggggtaagatttggagtgtaggaaagagagtggcaggactgtattgaagctgaaagtgtacactgatgacctggtttgttctgccttgctccattttggtgagagagagagggattcttttgcattttaatttctaacaaggaccttcaggcctggtttgggtgtgggaagactggtgtttacttcccctggcaagtaagcagaactggggagctctgggttttctgcagcagaggatcaggtgagaggaaagatgtcttatggagaggagacactgagcactaacagactggctggttatggggcatggaaatcattggttggagtgagttagcttyctgtcagctcttaagaaatgatgacaggcattgttttacaggcagagccatgattagaagaaggtaagggaaattcattccaaaaatgaagaggaaaaaaaatccagatcaagaagcatattccttgtcttagggctagggttgaggagctggtggttgtcagtttctgtaatctagggatttgtgttttagtattcatatggggttagacaatgagtgtttggcctaaatgaggggggaggatgagttagacctgagacacttgaataaaagcaag

SEQ ID NO: 18709 - DNA, 504 bp, Homo sapiens
ttgccataaaaggtaacatatttacaggttcccataattaggatatagaaactattagtgggccattattctgccttccacagacatacctgaaagagtgaggccagaggtcatcttttatatcaaatagtgttgaatccttaagttttaaaaattatatatataaygggtgcagcacaccaacatggcacatgtatacatatgtaacaaacctgcacattgtgacatgtaccctagaacttaaagtataataataaaaaacaaaagaaattattaatatttcaatgtggataaaagaaaatatgcataaagtttttcttacccccatttgtttaactccagcattcatagtttgtgatttaatatttaggattaaaaaaatggaatgagtttgttttattcaaatccatttcaatacatccaagcaactattttactcaagcatctcatttccccatgaacccatctgttatggattgaattgtgtcaccctcaccaaaatta

SEQ ID NO: 18710 - DNA, 556 bp, Homo sapiens
tctttagaattatatgctggctctttcttagcactgtgtcttccagataaataatagcgtttgtcaggtatgaaaaatgttcagtttaaattatatttaaattttgggatttatccaaatttagattaccatttgggaattgatagttgtaaaatatgaagtttccccccaccccaggagcatggtaactctctcctttgttctggtcctttctcttagtaaaatgtacttcttatttacagtgatcattttttgtgaggtttataatttktgttggctattgtgaattggatgccttaaacatattttctaagtgttagaaatatttttgaattgtttattccaatgaatactattaattttcctatattatcttgtaatgtcattttactgcactccccaatttcccttaacattcttcaggtgatggttttggagccctttaattcttaaggaacatttttaggcccgatgtgggataaattacaaaataattatcacttggtccccaactttttaataaaggatggtacatccatttgttacacagacagca

SEQ ID NO: 18711 - DNA, 988 bp, Homo sapiens
gagcttatgaaaaactccaagatcatttttttcaatcttcaaaaattaatggatttataaaaatgtgaggagagatttgctatttcatttgttattcaaaccagaaacatattgaaattctaccagctaagcactggactgaaagtttctcrgggcagatttcaaattagggtacaaatacaatttacaaatgtatttaaaattctaatttgcattgatcacacaagagagagctaaaaaagagcaactggtgagaagtccctgttcatctttctgttgtgattgtctgaccattttactctttcctagggtgccaaatccatttaaaattagagcaaaaacatctagccaagtaaaccagacattctttatatgaataattgcatctaatgtatgctaaagattgagaagatgatggtctaaaggcaactaaatgtatcttagggaatctttagttttgagaatgaacaaagctggaatttaaaaacaatgcccagttgagtatctggtgtcttacttagatgtaactgattttaaagctgggtttataaattcctgctcacttgcttagatcttttgacaaatgtgtttttgagaagaaaacagagaaaaacaaagattttgattttaagcatttttatagggtgcagtcaccaaatgaatgaaagaagaggaattacagccagagagagtgtgatgagagagatggactgtgaacctagtacatttgattttaaacatatgacattgcccttctatattttctgaagagattgctaacctattgaagtggttgcttagccacggatgtgcttttctgcatacgattaaactatgttatcttcccttcctacctccagacttttttagtggccttgcatttttgaggattttgttgttgttgtttttaatgccatatgaaaaggggtattctttaatcctttaggcattgagagctagtttctacagtaagattatgttaataata

SEQ ID NO: 18712 - DNA, 524 bp, Homo sapiens
gtagaccggagctgttcctattcggccatcttggctcctccccccagcataatgttttttttaggattcatccatgttgtagcatgtatcagtactttattccttttcatggcaaggtaatattccattgtgggtataccacattttatttatctgttcatcaattgatgacatttaggttgtttctgccttttgaccattacaaataatgctgctatgaacatttgtatacatatttttgtgtgggtatgttttcatttctctggagtatatacctgggtgtggaattactggatgatgtttmacctttgaggaacttgcagacttttgattagtgatatacggaagctgctaaaatgttaacatgttgtaagcatggctgttagtgatgaccatatttcctattttttaatcttccagcctagaacattccatattctgcttcacacacggtgactcactcactactgctttgtaccagtgtgcccactcgagtgcctgtaaagtacaagctccagatcaaa

SEQ ID NO: 18713 - DNA, 501 bp, Homo sapiens
ttgttgcccaggctggagtgcagtggcacgatcttggctcactgcaacctccacctcccacgttcaagcgattctcctgcctcagcctcccaagtaactgggattacaagcatgcacaaccgcgcccagctaattttgtatttttagtaaagacagggtttcaccatgttggccaggctggtctcgaactcctgacctcaggtgatccacccacctcagcctcccaaagtgctggggtagcaggcttgagccaccgcacccagccacatctttttaaccttaatatgtacgttgtctcctttgagagcacagactcacttggaaacattaattttcaagagggctgagtatattcatttttatgtatatayacacacacacacacacacacacacacacacacacacacacacagagtaatagaaaatgatgaattctactaaatcatatccagctttcatagaggtaattaatattgtgatggtgatattggcagtgaaa

SEQ ID NO: 18714 - DNA, 524 bp, Homo sapiens
atgagtcccttttcagatattttttattttcttgatgatgtcttttgaagaattgggctttaatgaagttygtttaatctattttttcttttgttgtttgtgcttttggtgttatatctaagaagtcattaatccaagatcatgaaagatgtatgccttttttttctggtatatagaaattgactttatatgtatgcctccttttttcttttcagagttttatagttttagcttttacatctaggtcttttccgatttttaagcctaagttttttaggttttttttttttgccttgaacagagagagatattactaaatgtcagttttgttttagttttgattgctaatgttttggtgtatttccttctaatgttttcatatacatgtgtacatgctcttatgcatagacatatgtgtgcacatgtgtacacacacacacacacacactttttaaaaccagatggaagttttgttgactctgacttcctgattggaaatgcaagcaactctcacttactacagg

SEQ ID NO: 18715 - DNA, 535 bp, Homo sapiens
ggagaggagggagtctctgaagttgatccagtccacttctgagaggtgcctcttccaacacaggcttaaggcagcccaggaagacccagcctctaattgtttaggctgcactcagaaggcctggacaactggagttccctgggaaggggcatgatgctttctaatcctgggggaggacctgggaacagtagagttgatgggactaaaacacaacatggttgctgtgtgggggcacctggttccacgtcccatacgacagtctccagaacaaaaggttttcctttgagtcactgaaggccaaataaaggagaatggagggactgcagcctcctagaaatgggaactcagccgggcgactaaaggccacttaggctgcatttcacttgaaaccagtggtgaggcagcagctctactcagggcactactgaacagaggggaccactcctccagcagggctagaaattgtgatcacccaggaattcagttagccagactcttaatacayagtatggcccaagacagaaactgcagacat

SEQ ID NO: 18716 - DNA, 2080 bp, Homo sapiens
aaattcctagttcactttcttattttattcacaaacacaaatacttaaatcccatctatctatttgcaaaataggaaactatactttctgacagttaccagacatggcgaatcagtttatgcaggcttaaaaataaaacaggctaacttatcttggcaggatgaaagaagcccactgttttgcaaagttaaaaaacaagagcattttattgagatagtttctgatctcaggctctgaaaaatacttcccatctggtgatatgtgaactacatgggattaaactatatgaatattccctaaataccggttttatgcatgctattttcattattttttgccatatccatacactaatatttttctttaaatcaaattgaagtacacttaaacaataaatcatagaaataatgtacactttcctattactcctttcaaaaaatacattgaaattaacatcaaaattaaaactttcctcaaagtgaatccacatatcctagctgtttccatgcccaaacatagaaagacaaaagatacatttacgaatatctagtttcaagttcttagtagactattgtatctattgacatctccaaaaaaatctttgaaaataaatattcccattaagttttaaaaattgttagctgcctacataattttttacataactcctaatacagttttttttgtttttgtttttgtttttgtttttgttttgaggcagagtcttgctccgtggcccaggctggagtgtagtggtgcgatatcagctcactgaaacctctgcttcctgagttcaagcaattctcctgtctcagcctcctgagtggctgggattataggcacccaccaccgcacctggccagttttttttttttttttttgtatttttagtagagactgggtttcgtcatattggccaggctggtctcgaactcctgacctcaggcgatccgcctgacttggcctcccaaagtgctgggattaccggtgtgagccattgtgcccggcccctaatagttttattctgcccaaatctcacatttgcaccacattggcctgaaaatatgcctttgtgtccccaaggctgagagctctccatcctgaaaggtaagttgagactgagcactccaaatagaaaggtaggcaagtttccatccatctgctctctaaaaagcaccagattaagaaggttccttcatgaaactctcctcagaattggctcctccagtttatatatgtaatcctaatttttctcataaaatcaactaaataagcacagcccttttacactttctttgctacttgtcattaactttttctgccttttcatcctttggataacttatcactaattgtatcaagattgtacccccatctgtctcacttggaacagatttcctttattttcctcttgattctgtatttccttaaggtttctggaaaagattcactttttcttctagtctaaatctcttcttctgctgtttattattaaattctatagttatatttttatatttaaatgtcattttgggggacatgatttagatgatttagttgaatagagactttaattggaataaaaaagaatgccccacttgtcactttatctgattttgaaacagacactgtcaagctaatgttttgagtatttgccctctgatgcaataactacaaatactcgagtcatttcaatgggatccaaatgtgacagtaatgaagagggctttcagatacctttttaaaaagtataaagtggtaaaattctcaatttttgttctcagcattagtacaatgctctaaaagctagataaaataactatgatgttaatttatgttaacttaaattttttcctttgcyagtgcattactagttctctgtagtcataatgagatgcatgtaactaaatcgatgataattcttttattctatcactaagtttcaggatgaataaaaagttcaggattaataaaaacattatcataaatcttaaaatgtgataaatgcaagtaactcattttagtacagtcaaaactatgttctatatcataatgatttcatgtgtagactactcaaaaa

SEQ ID NO: 18717 - DNA, 610 bp, Homo sapiens
cgaagaacaaacaagcagacaaaatttaaaggtaaatggaatattcaaaaaaatggaaatgatcaaagcttatgaaattcttgatcattaattaatgccaaaagaacgatgttgcagactccagaaaataagctagtttaggtaaccttcctaacacaaaagatacaaagaataaaatgtagtaaacaagaaaacctgatcatgaaactccaagtttagacaccctacataaaakcttaaataatttcacacccacatacccacatgtataagatcataaaaacgcattcaacttgcaaaaatgttttcggtttgcaatttctcccatgtttttaccacactaacagtgtcacagtgaagacacagctgatggcagtgactattactgaccttaagaacacagctggatttctatttttatttctgtaaaaccttcttttcttcaactaaatgatgccctagaggcccaagctaaagtctgtatagtaagggcaatgtgtatcgtattttgtgcaaatgtatttcacacgacaaagccagagtttaaaacacacatacacacacccacacacatccacatacacactccaaaatatgtcaagacgcttac

SEQ ID NO: 18718 - DNA, 1530 bp, Homo sapiens
gcattaggataatgtatgatgttttaaaaagaaaacttctgtgacatcatagattggcaaaaaattttcatgatatttttgttaatttggccaaagacttggaacagcttccctttattgagaataacaagacaatcatgtttattagccattaaagagttttataattgatattgtaaataggtgacactggatgaacacccattgattgaaaataaaacaacagtttttcaataataaagaagacaagtaagccctgagtagaaagttcaccatacatgacaaacacaagacagatatattttattttcagagaccagcaagcttaaaaataaattatttggcaatgatgtgggataagttttttttttgaagtatataactggagctaaaagaaaaacaaaaacccttccactttatttttatcgttaatatattttgttcaggcccaggcaaattgcaaagtaggcaaaagcattaatttgtttctggcattttctcctctttgtcttgtacctggtgtccatatatatttcttccaactatggagtgccttctgacatctttctccagataacttcaaaattttccctgctttatcacaccatctaaacctacctgagagttcattacctcaggaccctatcataggctcgatgacagtgagtaaaatatctaatacttattgagaagccctttacacaagatacactaagtatcatattatctgatataatattcaaaacaatcttacaagatagatgcagtttttaagatccttgttttataattgagaagagcaaggcttacagagattaagaaaattgcccatcagggcttgaagaccaaggtgaagaaacgtagctgcctagggtacaaaatgtaagatgggagtcacttgcagagctgtgagtaagaacctacttaaattttgtgccctggccctaggtgacttgtttgccttaccttaactcaggccctgtcgtccatatcacagaaacaatgtctgaaacaactgaagcagtctagtctgactgcagagcttgtacttggaccgatgtcarcaacactatcccaccacagaaatgctattggtattgatcaattcacagttcacgatatgtaattttttgagaaaaaaatttccaacctgaaatatgtgttgttcattcatttattcaactaacattagttatctactataataccaattctgtgcttacttagtaatatgtactttgaagggacagaaaatatatggtgctgacttttatagcactaaaagatatggaagtagaagcagacattaatgaagtaatcatacaaatgaacataaattgcaactgtgacaagtaccatgaataaatacatggtactgtgattgtcaatagtactgatatttgacccatttgggtattcttagaaggattctgaggaagttatgattgagctaatattcaaaggataaggaaatcactatgggaaggaactaaaggaattctaggcacggaggcaggtaggcatggcctc

SEQ ID NO: 18719 - DNA, 1530 bp, Homo sapiens
gcattaggataatgtatgatgttttaaaaagaaaacttctgtgacatcatagattggcaaaaaattttcatgatatttttgttaatttggccaaagacttggaacagcttccctttattgagaataacaagacaatcatgtttattagccattaaagagttttataattgatattgtaaataggtgacactggatgaacacccattgattgaaaataaaacaacagtttttcaataataaagaagacaagtaagccctgagtagaaagttcaccatacatgacaaacacaagacagatatattttattttcagagaccagcaagcttaaaaataaattatttggcaatgatgtgggataagttttttttttgaagtatataactggagctaaaagaaaaacaaaaacccttccactttatttttatcgttaatatattttgttcaggcccaggcaaattgcaaagtaggcaaaagcattaatttgtttctggcattttctcctctttgtcttgtacctggtgtccatatatatttcttccaactatggagtgccttctgacatctttctccagataacttcaaaattttccctgctttatcacaccatctaaacctacctgagagttcattacctcaggaccctatcataggctcgatgacagtgagtaaaatatctaatacttattgagaagccctttacacaagatacactaagtatcatattatctgatataatattcaaaacaatcttacaagatagatgcagtttttaagatccttgttttataattgagaagagcaaggcttacagagattaagaaaattgcccatcagggcttgaagaccaaggtgaagaaacgtagctgcctagggtacaaaatgtaagatgggagtcacttgcagagctgtgagtaagaacctacttaaattttgtgccctggccctaggtgacttgtttgccttaccttaactcaggccctgtcgtccatatcacagaaacaatgtctgaaacaactgaagcagtctagtctgactgcagagcttgtacttggaccgatgtcaacaacactatcccaccacagaaatgctattggtattgatcaattcacagttcacratatgtaattttttgagaaaaaaatttccaacctgaaatatgtgttgttcattcatttattcaactaacattagttatctactataataccaattctgtgcttacttagtaatatgtactttgaagggacagaaaatatatggtgctgacttttatagcactaaaagatatggaagtagaagcagacattaatgaagtaatcatacaaatgaacataaattgcaactgtgacaagtaccatgaataaatacatggtactgtgattgtcaatagtactgatatttgacccatttgggtattcttagaaggattctgaggaagttatgattgagctaatattcaaaggataaggaaatcactatgggaaggaactaaaggaattctaggcacggaggcaggtaggcatggcctc

SEQ ID NO: 18720 - DNA, 1660 bp, Homo sapiens
tccagctacttgggaggctgaagtaggagaatcatttgaacctaggaggtggaggctgcagtgagctgagatcgtgccattgcactccagcctaggcaacaagagcgaaactccatctcaaaaaaaaaaaaaaatttaataaccaaggaaatttaattaatttgcttcaaagtgatgctggtatgtatgaactgacatacacaccaaatttaatcaatttcctcagttattcctttcaaaatcaatcttagccaataagcttatgttagctattagactcagatggaaataagcctttattatacaaagtaataattagtcacaacttcaaagtcctttgagtccacttaatagcatcaatctgatccaaccttaataaactctacaggaatttataccactctcgttttcatagtgtctatttttgtttaatcaaatactacactatcagataaaatcaaagtaaagaacaagaatatataggccgggcacagtggttcacacctgtagtctcagcactttgggaggctgaggcaggcagatcatttgaggtcaggagtttgagaccaacctgaccaacatgatgaaaccccgtctctactaaaatacaaaaattagccgggtgtggtggtggggcatctgtaatctcagctacctgggaggctgaggcaggagaatcacttgaacccaggagctggaggttgcagtgagccaagatcgtaccactgcactccagcctgggcaacagagcaagactcccccttaaaaaaaaaaaaaatatatatatatatrtatataataagaattcctaatattccacttactacattactgccaagattgtaacaatccaaacgttaaataaaatacctaaagatatgaatgtattagatgaattatcaacaatactcacgcatcatttgagcaagtcataaattctccctttattttgggatgccatgagccagtatgaagcattgctgtatgacccttaaaaataaagacaaaggggaaaaaaagatgttttaaaaaggtaaaaaataaactgactagaaactgacatgtcatttttaaatgtaaaaatgtttagttcccccaaaagggcaccattttaattataaacctatattattttatcccaattttctctcataacatgtttcatttatttcgctttaactctttgtgtaccaccctgtgcccacctcaggaattaactcagtgcttgtatgtaacaggtgcttagtaaggtgggaaatggagaggaaaatgacatcctttctttagaagaaaaaaagaaaggtaaagccaaaataagaaagacaggtccttcttcaaagatcataactcctttcttcaatggaagagaatcaagaatagaaagcatttacaaataagcaaggtgaaggcaagagattggaagggaaatccatatttcctaaaaatgtgtcaacaaccttgattctacaatgcctctgtaaaaataagtatgtgagaaaaggaagaatatattttaaatgattgaggaaaattagctccattaagtatagagaatataaaaacactataattaaaacaatgtgatgctgatatacgtaaactgacatatacaccaaatcaactagagtacatagcaaacataaacacacacatatataca

SEQ ID NO: 18721 - DNA, 543 bp, Homo sapiens
aagacatcatgagaaatttctctgttttcctagaaatgaattatttatgctattcaataagttcttacaatgatgaaatatactccatctttattaatgacttttaaattagaaatatgcaataaaagtcacagtgaggatcagattttaatttcaatttccctactatgcctaatcttcaaagtcttaaatttttacagtctaactttccacctacccacatarcatggctctataaacttaatgaacagcctgttttaacatgagttttaaattgtttacattttaaacccagaatattagcatctgaagtgagagttgatttcaccggactctgtctttggtaaggccatttcttctcttatttgaagagtatagttctttcagtttcgtctcatcctgaatactttcggaagaaagtaaacagggcataaatatgcagagataagtcatgtttaccttgttcttaccctgcacagatcactggttttactagttacaaaaaactacttgtattatatgaatagggatactactttttca

SEQ ID NO: 18722 - DNA, 573 bp, Homo sapiens
aacactgtttcttgccttcttccctctaccttctatttcatattcaggattagatgataaataaaattcccaaatgcccatttgataggctctgttctagaaatcatggtgatgggagtttgatcctttgttcctctttaatcaccttcataattctttgaaattcattacttgactctttcttccccaagcactaatttcaaaagccttggatttgttcataaagacttaatggattatagactgtttgttagcctaaggaaataggttttatttaaarcatagccatttcaaaaggactggaaccaagatcagcgggtttagttggactacttgtgttgctttatgtggatatacagattaactacatttcttcctttaacttttaaaaataaagaacaatttgaataataaaaagttcagacaaaacaagggcttgatatttatactatgtttttaatatgtacttaatatgatttatttccttaaattttaatacaataaagatgacctactaaatgtaaactaagcagtgagaaaaaacacatgcagacttactaaacttttattatc

SEQ ID NO: 18723 - DNA, 573 bp, Homo sapiens
aacactgtttcttgccttcttccctctaccttctatttcatattcaggattagatgataaataaaattcccaaatgcccatttgataggctctgttctagaaatcatggtgatgggagtttgatcctttgttcctctttaatcaccttcataattctttgaaattcattacttgactctttcttccccaagcactaatttcaaaagccttggatttgttcataaagacttaatggattatagactgtttgttagcctaaggaaataggttttatttaaagcatagccatttcaaaaggactggaaccaagatcagcgggtttagttggactacttgtgttgctttatgtggatatacagattaactacatttcttcctttaacttttaaaaataaagaacaatttgaataataaaaagttcagacaaaacaagggcttgatatttatactatgtttttaatatgtacttaatatgatttatttccttaaattttaatrcaataaagatgacctactaaatgtaaactaagcagtgagaaaaaacacatgcagacttactaaacttttattatc

SEQ ID NO: 18724 - DNA, 579 bp, Homo sapiens
ttccatgaaaacagtggcatggactagggaggtgacattcaggcaatgaggctaagggaggctgaaggaagaaagcactaaggagaagaaattgcaggaaggactctgagttcttccaaggccacggaatgaggattccagtaaaatttgaccagatcctcctaggcaggagccagctgacagctggctcacacagtaaggaccttaactcgactgggtgtggactggtgaagccctacagccaagccacaggaaaggaggggtagctggggcagagtagttgactcgtttcaagccacccttcaggtgtctcaaccttacatstcctgaacatctgcagtgaaagtaacctcctttcacctcttagaaaacatcccagttggctttatatcatataggaattgtgtttagcttcctccagctcccctcccctccgctttacacacatgccttgagaactaggacctagagaaaggtgccttctccccaggactcagccccgtgtcaggcctaccatggaaacttattcaccttcttccctaacctataagatgggcatggtgacagagatcatacagg

SEQ ID NO: 18725 - DNA, 579 bp, Homo sapiens
ttccatgaaaacagtggcatggactagggaggtgacattcaggcaatgaggctaagggaggctgaaggaagaaagcactaaggagaagaaattgcaggaaggactctgagttcttccaaggccacggaatgaggattccagtaaaatttgaccagatcctcctaggcaggagccagctgacagctggctcacacagtaaggaccttaactcgactgggtgtggactggtgaagccctacagccaagccacaggaaaggaggggtagctggggcagagtagttgactcgtttcaagccacccttcaggtgtctcaaccttacatgtcctgaacatctgcagtgaaagtaacctcctttcacctcttagaaaacatcccagttggctttatatcatataggaattgtgtttagcttcctccagctcccctcccctcygctttacacacatgccttgagaactaggacctagagaaaggtgccttctccccaggactcagccccgtgtcaggcctaccatggaaacttattcaccttcttccctaacctataagatgggcatggtgacagagatcatacagg

SEQ ID NO: 18726 - DNA, 493 bp, Homo sapiens
caatccccaggcctgtgtgggaaccaataaggaccgtacatttcagtaatgtgcctgttgatgcagcatctcttatattttcctgttgtttactcagtgtcagtcttatctcttgatcagtcacaggttgaccctggcctctacttctcagagaagcccaccatcagctccccctgggctgcataatgagaccactacctgtgccccttcataccctttgtctacctcgatcacagtagttcgcactctgtccgcgtcatctgctcatgcatcctcactaggctggaattttgagagtaaggactgtgtccatcatcgtatgtgtggttctaacagtataacacagggcttgacatagagaaggcccccggaagggttggtgacagacaggaaggaaggtgggggacaggagaacaatagcatcrgattgtttcaaggggtgggtgagcacagcttccagccagatgctgcttttgcacaccaggtgactaca

SEQ ID NO: 18727 - DNA, 493 bp, Homo sapiens
caatccccaggcctgtgtgggaaccaataaggaccgtacatttcagtaatgtgcctgttgatgcagcatctcttatattttcctgttgtttactcagtgtcagtcttatctcttgatcagtcacaggttgaccctggcctctacttctcagagaagcccaccatcagctccccctgggctgcataatgagaccactacctgtgccccttcataccctttgtctacctcgatcacagtagttcgcactctgtccgcgtcatctgctcatgcatcctcactaggctggaattttgagagtaaggactgtgtccatcatcgtatgtgtggttctaacagtataacacagggcttgacatagagaaggcccccggaagggttggtgacagacaggaaggaaggtgggggacaggagaacaatagcatcggattgyttcaaggggtgggtgagcacagcttccagccagatgctgcttttgcacaccaggtgactaca

SEQ ID NO: 18728 - DNA, 505 bp, Homo sapiens
  misc_feature (1)...(505): n = A,T,C or G
ggttaggtatttggaagggacagtgattgatggcagttttagaacagaagatcgcttagagggacctaggaggctcttaggttggcagaatagtcaaggtgaccgtgttgggctggagggctccaagagaggcagatgaggcacatggacaagtgagggtcctcagcttctagtggcaagacggggctcataacgccacagcacacacagtggggttgacacatctgtagtctctcacaatgaagacagggaaataagcacatatgtttttattaataytattttattattatcattgtcatttggctgtgagactccatggtgtattgcatagctgtggagtctactgccaggtttcaaattctggccccacctcttcctgggacaaattactaaacctttcagtctgttttcttatgggtgcaatggaactgtaaaatccgggctgtaacaaggatgaaatgaactaacattgntaaagcactgagcccatataacctctatt

SEQ ID NO: 18729 - DNA, 505 bp, Homo sapiens
  misc_feature (1)...(505): n = A,T,C or G
ggttaggtatttggaagggacagtgattgatggcagttttagaacagaagatcgcttagagggacctaggaggctcttaggttggcagaatagtcaaggtgaccgtgttgggctggagggctccaagagaggcagatgaggcacatggacaagtgagggtcctcagcttctagtggcaagacggggctcataacgccacagcacacacagtggggttgacacatctgtagtctctcacaatgaagacagggaaataagcacatatgtttttattaatattattttattattatcattgtcatttggctgtgagactccatggtgtattgcatagctgtggagtctactgccaggtttcaaattctggccccacctcttcctgggacaaattactaaacctttcagtctgttttcttatgggtgcaatggaactgtaaaatccgggctgtaacaaggatgaaatgaactaacattgntaaagcactgagcycatataacctctatt

SEQ ID NO: 18730 - DNA, 623 bp, Homo sapiens
tgttttttaaaaaaaatctctaaaaataacacaaacatcctcaaaataatactcaaatgactggagtatggacaaggaacatgaaaaaaatctaaaagataataagcatattttaaaacatttaacttcgctaatgattgtatagattatttctgaaaaacatttgaatatatggatatattcagaatctttaaaataatcagaactyatggcccaatgattccagtaactgttgcttttttcttgttgtttgagacggtgtctttctctgtcactcaggctggagtatagtgattcaatcatagttcaaactcctgggttcaaacgatcctcctgccccagcctcctgagcagctgggattacaggtgcacgccaccacacccagctacattttttgtttttattttgtagagatgggctctcactttgttgctcagcctggtctctaactcctggtttcaagcaatcctcctgccttggtctcccaaagtgctgggatcacatgtgtgagccaccacatccagcccaacaactatttctaacaaatagaaactatgtatcatgatgttaagaaaattctaaatatctaatcaaaaacagaaacattgaaataaattaaggt

SEQ ID NO: 18731 - DNA, 630 bp, Homo sapiens
catttgtctcagtccaaccttgcatgcactaaatatggttcactgaaagaataaataaatattaaagaaagcttatctacaaggaaaataacctgccaagacaaaacatacttctgaacaactttgtactttaaatcaacttgtcctctagccagcaggtcatgccattttgtccaccagaaataactaaaactcccccaaaacagttccatgttgtagataaatattttttcacttcgattctcacctgtttacggtaaagaatctttttggacccagggttcccagccaaggtaatccagagacagctatttatttgttctgacctcttgaaagatcagttgagagttgaggacaacgtttataagactcgaacagaaaaagaaacaaattagacctgattattacatttcctgtaatatgatgcccatgtcatcctggggctgattcaaggaaacccaggcttgttttaaaagactggaggaccgggatgggttaaagcacactytggcaccacttggctgtgtgatcttataccagtaacaaactctgagtttcaacagtccacctgtcaatcctggatagcaattttaacttgcatgtttagtgtgaggtttaactaagataatt

SEQ ID NO: 18732 - DNA, 783 bp, Homo sapiens
agctacacaggaggctgaggtgggaggatcacttgagcccaaaaggtcgaggctgcagtaagccatgattgtgccactgaactcactctgtgcaacagagagagaccctgtctcaaaaaaaaaaaraaaagaaagaaaagaaaagaaaatagaatgactcttgtagtaataaaaatcccacattcctgcatatctttttatctgtcagaagcatagcttaagtgttatcttcttactgaaacccatcttggattctctccctcccgctaagtgtattggtttttttgccttctttgttcctatcactctcttttgctagttgtttacctgtctgtctttcctgctacacttatatatactttttcaggataggtaccaaagttattcacttgttaatttttcttctagctcccaacttagtgccttgcatgtagaaaatacttgataaatgtttgtcaaattgaagtacatttgtgtttatcattttttaaagtaagacacacttggtttcctgttttttttttcttctgatatctatcttaatttaaagctactggaaggagtcccttgtactgtaatatgcatttatatgatggttattattattatttttttctttaagcttagcgtgaaccagtgtaccctataactttctttgttactggcctggattagaagacaaaccttctcccttgtgataactgttcttgagctggtgcaagtaccaacacaattcccaggttgcacctatttttgttcgttttttactttttatttatatca

SEQ ID NO: 18733 - DNA, 783 bp, Homo sapiens
agctacacaggaggctgaggtgggaggatcacttgagcccaaaaggtcgaggctgcagtaagccatgattgtgccactgaactcactctgtgcaacagagagagaccctgtctcaaaaaaaaaaaaaaaagaaagaaaagaaaagaaaatagaatgactcttgtagtaataaaaatcccacattcctgcatatctttktatctgtcagaagcatagcttaagtgttatcttcttactgaaacccatcttggattctctccctcccgctaagtgtattggtttttttgccttctttgttcctatcactctcttttgctagttgtttacctgtctgtctttcctgctacacttatatatactttttcaggataggtaccaaagttattcacttgttaatttttcttctagctcccaacttagtgccttgcatgtagaaaatacttgataaatgtttgtcaaattgaagtacatttgtgtttatcattttttaaagtaagacacacttggtttcctgttttttttttcttctgatatctatcttaatttaaagctactggaaggagtcccttgtactgtaatatgcatttatatgatggttattattattatttttttctttaagcttagcgtgaaccagtgtaccctataactttctttgttactggcctggattagaagacaaaccttctcccttgtgataactgttcttgagctggtgcaagtaccaacacaattcccaggttgcacctatttttgttcgttttttactttttatttatatca

SEQ ID NO: 18734 - DNA, 548 bp, Homo sapiens
tgcagagctgccctgtgcattgcagaacatcttgtttccctgtgtcactgtatatctatcgaaggcctataccatccttcaaccactgggacaatcaaaagcatcccctctattttccagtgctctcccatggaggcagcagagcctccactgagaagcagcgatactgaattgtgagaaacacagtgtggtgatcccaaaggttcactgttcaggagctgctcggcttttctgcccggtggtctcatccatccgcggttcccaccatggctttcagtaactcaacgtgaggggagtcctctggtccagcagtaaccactctccagcacagaccagaaggctagatgctgaagtttctccagaacttcaaatacaacagactcagcccttttccctgtaaacccatgcctttccttgacatcttagtttcactgtcaccagtgttttctccaaccccaccccgacmcttacataaggcagaatcaccaaagcctcttctctctttgctcatggcctcccatttcccctgcttccagcttccctgcctc

SEQ ID NO: 18735 - DNA, 558 bp, Homo sapiens
ggtaatgcaaggacaaaaataagaggactgcttggtgactgggagagctaagagaaggatggaaaggggtgtgagaccctggttaggatgagtgggtcaggactgaggctgtgactagcaggtgactgccacagcacaccttcgtcatgaagccagaacacagcatgctggcttcaaggagccactcycagctggacaccagccagctacccacggccaagcttattacctattgctcctccagcacctcccgagatctgctctgcctcctgtgttttccgttcagctaatggcatcaccctccacgtgggaatcaccctgagaacctccaatgtcatctccccaattttaatcaatcaccaagtctaaaaacttctatcaacaaaatatctcttgactccattataactggcccacaaccaactgccttggttccggccctatcgtctttcctgtgggccattgccacaggccacactacaaaagcctccttgctggtcttcatacctctatcccatgtctcagctgcctttctgaagtacagattaaaaccctgta

SEQ ID NO: 18736 - DNA, 558 bp, Homo sapiens
ggtaatgcaaggacaaaaataagaggactgcttggtgactgggagagctaagagaaggatggaaaggggtgtgagaccctggttaggatgagtgggtcaggactgaggctgtgactagcaggtgactgccacagcacaccttcgtcatgaagccagaacacagcatgctggcttcaaggagccactcccagctggacaccagccagctacccacggccaagcttattacctattgctcctccagcacctcccgagatctgctctgcctcctgtgttttccgttcagctaatggcatcaccctccacrtgggaatcaccctgagaacctccaatgtcatctccccaattttaatcaatcaccaagtctaaaaacttctatcaacaaaatatctcttgactccattataactggcccacaaccaactgccttggttccggccctatcgtctttcctgtgggccattgccacaggccacactacaaaagcctccttgctggtcttcatacctctatcccatgtctcagctgcctttctgaagtacagattaaaaccctgta

SEQ ID NO: 18737 - DNA, 913 bp, Homo sapiens
tagtttatgtgacattttttgaaattatcatcaagaaaaaaacatatgtatatgtttctatacctatactcttcccgaatacaatggaaactaacatggttttattttgctactttcaaaccaaatcccaatttttgttgataaaatctgaaatttaaaacccatattaatagtaaatgtgtactttatattgtgattataatgttaccattataaatatatgaatatttatatattatgttttagttataattctttgcaaaaagtattgtctcatgtgctttaaagtgtataaactttaataattcttcaaacttatagtatatttagttttatttctcattactatatgtttttaataccataatgtctccatagttgatgtctatattttggtaccaattagaagtgggcwctttgaaaaatttattttattttctaaaaaatttcacttaaggacatgattttggctggagtgatcccaatttccatttcatcaattatataaggagttatatgtagaaacttgaggtaattagtatagtattttcaatttattccagtgatattttagtacccttaaaagattgatgcttacaaaattatcttttaaatttcctgtgtgtgtgtgtgtgtgtgtgtgtgtgtgttcatgtacgtggttaggtaccattgtaaaagtacttgaaggctatacttttattcatttctcagctgactgtgatgcaaattgactattcttttttttttttttttttacaaagggtatggaaggaaagtgtactttgtaaatctcctataaagttatgtttcctttgtcctgataccaggcagcaacatagcttgttgtagaaattttgggtcaaatgtttgtttacgcacaacactaaaatctcatttatttgacatattt

SEQ ID NO: 18738 - DNA, 566 bp, Homo sapiens
gacactacatgaattttaaaaattgaaaaaaattgtttaattaaactgtgaagattttttgaaatacaaaaatctaatttatttgtacttagtatctattagattataaactttttgaaggaagaatttattctttagtcttatttcctatttttcaaataaaagtatagattgaagtttggatgaaagcatgaacaagtttgtggaaggcagacatttttaaatgttgaaatttaaattcgatttttaataacgatgttgtccatgtttcataaatagaagttatttaaataattttagtttcattcaaaaaatagttgaaatgacttctaccatctcacaaaagaactaagttaccacttacggtgaaaattcatgaattgaacagatcagattagatttactattgacggttgaattaaarcagtttagttgatattaaataattatttcaaataattagcatatgttgaagaccacttaataccctatcatgttttccaaaattttaggatttagaaagccatttatgctgcacttaaacatcaaaacaaattttgccatta

SEQ ID NO: 18739 - DNA, 523 bp, Homo sapiens
gagagtgaggatggagaaaaatgaggaagagaatgatgggataaatggaaagaaatttattacatggcctcactgcttcacaaaatgtaaacagataccacagatgtgtccagcttgcctcagagctatcttcagacaggctctccagtamgccacatctcagaagaggccacgggaatgagaaaggacatagaatttatccgttaggctctgccgtcttctgtttctccttggccaaagcccattctgtaggaagttaactcccacgcacttggggtttgaacattctaggctctctgatatttcatttcagtgtggaaatggcatgaggaggccaaactagccagggacagctggagtcatctcacctccctctgcaggaaacacatggatcgtggcagaggctggattagatctggcgtctccactggagcagaaaaatagtcttactatgtggccgtgatttggtaaatgttttctttcattagtcaagaggatacatataattttaccttcaaggtaa

SEQ ID NO: 18740 - DNA, 523 bp, Homo sapiens
gagagtgaggatggagaaaaatgaggaagagaatgatgggataaatggaaagaaatttattacatggcctcactgcttcacaaaatgtaaacagataccacagatgtgtccagcttgcctcagagctatcttcagacaggctctccagtaagccacatctcagaagaggccacgggaatgagaaaggacatagaatttatccgttaggctctgccgtcttctrtttctccttggccaaagcccattctgtaggaagttaactcccacgcacttggggtttgaacattctaggctctctgatatttcatttcagtgtggaaatggcatgaggaggccaaactagccagggacagctggagtcatctcacctccctctgcaggaaacacatggatcgtggcagaggctggattagatctggcgtctccactggagcagaaaaatagtcttactatgtggccgtgatttggtaaatgttttctttcattagtcaagaggatacatataattttaccttcaaggtaa

SEQ ID NO: 18741 - DNA, 523 bp, Homo sapiens
gagagtgaggatggagaaaaatgaggaagagaatgatgggataaatggaaagaaatttattacatggcctcactgcttcacaaaatgtaaacagataccacagatgtgtccagcttgcctcagagctatcttcagacaggctctccagtaagccacatctcagaagaggccacgggaatgagaaaggacatagaatttatccgttaggctctgccgtcttctgtttctccttggccaaagcccattctgtaggaagttaactcccacgcacttggggtttgaacattctaggctctctgatatttcatttcagtgtggaaatggcatgaggaggccaaactagccagggacagctggagtcatctcacctccctctgcaggaaacacatggatcgtggcagaggctggattagatctggcgtctccactggagcagaaaaatagtcttactatgtggccgtgatttggtraatgttttctttcattagtcaagaggatacatataattttaccttcaaggtaa

SEQ ID NO: 18742 - DNA, 625 bp, Homo sapiens
actcgaatgtaattgactggaatggaatgtacatgaatggaatgtaatcgaatggaaagtaatccaatggaatagaatctaatgcaataaaatcgactcagatagagtagaatgtaatggaatggagtgcagtgcaatggaatggaatggaatggaatgsaatggaatggaatggaatggaatggaatggaatggaatggaatggaatgggatggaatggtatggaatggatagtaatggactggagtgaaatggactggaaaggaatggactcaaattgaaagggctcgaaaggaatggagtcaaatggaatggtctggaatggaatgaacacgaatgtaatgcaacccaatagaatggaatcgaatggcatggaatataaagaaatggaatcgaagagaatggaaacaaatgggaatggaattgaatggaatggaattgaatggaatgggaacgaatggagtgaaattgtatgcagtagaagagaatagaatggaatgcaagcgaaaggaaaggaatggattggaatggaatggaattcattggaatggaagggaatgtagtgtaatggacaggcctggaataaagtggaatgctacggtctcgaatggaataaaaatgtatg

SEQ ID NO: 18743 - DNA, 625 bp, Homo sapiens
actcgaatgtaattgactggaatggaatgtacatgaatggaatgtaatcgaatggaaagtaatccaatggaatagaatctaatgcaataaaatcgactcagatagagtagaatgtaatggaatggagtgcagtgcaatggaatggaatggaatggaatgcaatggaatggaatggaatggaatgsaatggaatggaatggaatggaatgggatggaatggtatggaatggatagtaatggactggagtgaaatggactggaaaggaatggactcaaattgaaagggctcgaaaggaatggagtcaaatggaatggtctggaatggaatgaacacgaatgtaatgcaacccaatagaatggaatcgaatggcatggaatataaagaaatggaatcgaagagaatggaaacaaatgggaatggaattgaatggaatggaattgaatggaatgggaacgaatggagtgaaattgtatgcagtagaagagaatagaatggaatgcaagcgaaaggaaaggaatggattggaatggaatggaattcattggaatggaagggaatgtagtgtaatggacaggcctggaataaagtggaatgctacggtctcgaatggaataaaaatgtatg

SEQ ID NO: 18744 - DNA, 625 bp, Homo sapiens
actcgaatgtaattgactggaatggaatgtacatgaatggaatgtaatcgaatggaaagtaatccaatggaatagaatctaatgcaataaaatcgactcagatagagtagaatgtaatggaatggagtgcagtgcaatggaatggaatggaatggaatgcaatggaatggaatggaatggaatggaatggaatggaatggaatggaatgggatggaatggtatggaatggatagtaatggactggagtgaaatggactggaaaggaatggactcaaattgaawgggctcgaaaggaatggagtcaaatggaatggtctggaatggaatgaacacgaatgtaatgcaacccaatagaatggaatcgaatggcatggaatataaagaaatggaatcgaagagaatggaaacaaatgggaatggaattgaatggaatggaattgaatggaatgggaacgaatggagtgaaattgtatgcagtagaagagaatagaatggaatgcaagcgaaaggaaaggaatggattggaatggaatggaattcattggaatggaagggaatgtagtgtaatggacaggcctggaataaagtggaatgctacggtctcgaatggaataaaaatgtatg

SEQ ID NO: 18745 - DNA, 625 bp, Homo sapiens
actcgaatgtaattgactggaatggaatgtacatgaatggaatgtaatcgaatggaaagtaatccaatggaatagaatctaatgcaataaaatcgactcagatagagtagaatgtaatggaatggagtgcagtgcaatggaatggaatggaatggaatgcaatggaatggaatggaatggaatggaatggaatggaatggaatggaatgggatggaatggtatggaatggatagtaatggactggagtgaaatggactggaaaggaatggactcaaattgaaagggctcgaaaggaatggagtcaaatggaatggtctggaatggaatgaacacgaatgtaatgcaayccaatagaatggaatcgaatggcatggaatataaagaaatggaatcgaagagaatggaaacaaatgggaatggaattgaatggaatggaattgaatggaatgggaacgaatggagtgaaattgtatgcagtagaagagaatagaatggaatgcaagcgaaaggaaaggaatggattggaatggaatggaattcattggaatggaagggaatgtagtgtaatggacaggcctggaataaagtggaatgctacggtctcgaatggaataaaaatgtatg

SEQ ID NO: 18746 - DNA, 556 bp, Homo sapiens
ctaaaattatgtttgaattaaaaaattatgcttaattaaagtgatacatttttatcaacaggtccttatttaggggcaaatatatttccagtgcttcatgggagcctaatgtatgctgtcataacttgattgtgaataaaattatgtggcatttgattcaggaaaggcaaagtgaattagccaaaataatttgaaaaactagygaggggaaaatgtaacacttgaaccaaggaaggcttattaatgcacttttggtgtgaaagttgaagactctatgagctgagtctatatatttgaacccagcaactaactgttataaagattctatcctatttttgctgctacaatattaaccacaacgtggagaatgtttatagcatgtcctgtgcacacttgtctcttatcactcaatcaaggaccacttttctcaaattaaatttttattcttcataaccgtccttatgcataaaaatagaatatcaatagaaaaacttaaagtatgcataatctctatgcttattcctcatgtaactaaattgttcttcatagatctaca

SEQ ID NO: 18747 - DNA, 556 bp, Homo sapiens
ctaaaattatgtttgaattaaaaaattatgcttaattaaagtgatacatttttatcaacaggtccttatttaggggcaaatatatttccagtgcttcatgggagcctaatgtatgctgtcataacttgattgtgaataaaattatgtggcatttgattcaggaaaggcaaagtgaattagccaaaataatttgaaaaactagtgaggggaawatgtaacacttgaaccaaggaaggcttattaatgcacttttggtgtgaaagttgaagactctatgagctgagtctatatatttgaacccagcaactaactgttataaagattctatcctatttttgctgctacaatattaaccacaacgtggagaatgtttatagcatgtcctgtgcacacttgtctcttatcactcaatcaaggaccacttttctcaaattaaatttttattcttcataaccgtccttatgcataaaaatagaatatcaatagaaaaacttaaagtatgcataatctctatgcttattcctcatgtaactaaattgttcttcatagatctaca

SEQ ID NO: 18748 - DNA, 556 bp, Homo sapiens
ctaaaattatgtttgaattaaaaaattatgcttaattaaagtgatacatttttatcaacaggtccttatttaggggcaaatatatttccagtgcttcatgggagcctaatgtatgctgtcataacttgattgtgaataaaattatgtggcatttgattcaggaaaggcaaagtgaattagccaaaataatttgaaaaactagtgaggggaaaatgtaacacttgaaccaaggaaggcttattaatgcacttttggtgtgaaagttgaagactctatgagctgagtctatatatttgaacccagcaactaactgttataaagattctatcctatttttgctgctacaatattaaccacaacgtggagaatgtttatagcatgtcctgtgcacacttgtctcttatcactcaatcaaggaccacttttctcaaattaaatttttattcttcataaccgtccttatgcataaaaatagaatatcaatwgaaaaacttaaagtatgcataatctctatgcttattcctcatgtaactaaattgttcttcatagatctaca

SEQ ID NO: 18749 - DNA, 556 bp, Homo sapiens
ctaaaattatgtttgaattaaaaaattatgcttaattaaagtgatacatttttatcaacaggtccttatttaggggcaaatatatttccagtgcttcatgggagcctaatgtatgctgtcataacttgattgtgaataaaattatgtggcatttgattcaggaaaggcaaagtgaattagccaaaataatttgaaaaactagtgaggggaaaatgtaacacttgaaccaaggaaggcttattaatgcacttttggtgtgaaagttgaagactctatgagctgagtctatatatttgaacccagcaactaactgttataaagattctatcctatttttgctgctacaatattaaccacaacgtggagaatgtttatagcatgtcctgtgcacacttgtctcttatcactcaatcaaggaccacttttctcaaattaaatttttattcttcataaccgtccttatgcataaaaatagaatatcaatagaaaaacttaaartatgcataatctctatgcttattcctcatgtaactaaattgttcttcatagatctaca

SEQ ID NO: 18750 - DNA, 966 bp, Homo sapiens
aatagcatttagcattctgtactataaccttagtacctcaaattgacagaagaagcaaagtcaagataaacaatagacattatactcctccaagtcgactaacattcaaaaggtactataagtgcccaatataacttttctctattctcaaaaattccctaggtctctttttggtctatgaaaaggccagtgtgttaaggtaaaaaaatgtaatccaggttgcaatgaaatattttttwaaatgcattatcagtaggcataatccccagtcttaaagcatttcacaaagcacatggaacttgctccagctcattacattctccacaagagaacaaactatcagacaatgtggtttgggaagcagtgtttgtctgggtaatgatggagaccacatctccttcccaggcttgtggtcctagggaactctataagagctcattcctcagaagagagaatgaaacatgtggcgcaggggtggcagagtgcttctattacggtccaagctaatttattcatagacagaaaaatggcatgcttacatattgcaaaccagtgtataaaatttctgcttcttttcagcctaaaaaaaagggcattaattgtttactacttcagacttcacttatatggaaaaaaatagatttgttgttgttgtaggaagaaagggagggaatctactataaactaagttctgtactagtcacttaatatatacaaatatatgtactgtattaattttattcctcataataatgaagaaatgatatcagagaaatcagccataccagaagctaattgtaaatgtaagaattcaagtccattttgtctgacttcaaagctgatgatcttcctttaatggacgtatcaaaatctcacattatgtaaccactatatttaacaacacatttgggcctaatttgggaataaaattttggtctttaccctagaaactattaccttacagaa

SEQ ID NO: 18751 - DNA, 642 bp, Homo sapiens
tgcatctcagatagtctctggctctcgtttagcatagtagtggagaatatctttggatgtgtgaatttacccatccatccactcatctacattcacctataattaatacaaaagaggaagaagaaaaattcataacatccatataaaattatgtgagcattaggaaaagccaggaattacttggacttttcttcatggaagaagtagcatttgaaacatgccataaatgatactgagaccaaataggaaattgtatgggaaaactgtgaaggctggggaacttgcagaagtgcatgcacaagaaatgattggcagtttgacttggctagtgtagaaaacgtggaaagtagaattagaagaaaaaataaatatcagaaagagttataggccaaatatcagagaactctgcattccaggaataggggtatgacctaattttaacaatagaaaatgaaagaggattttaaacagaaaaaggacataatcagaactgtgtttttagaagatgactctggctggctgtgaccaggaagatgagcaaagggtaaagactgaagatgtgtgctcattcttttgactgtrttttttagattaagacaaaagtaataaacttttctatcggaagaggcttcgtattgggag

SEQ ID NO: 18752 - DNA, 531 bp, Homo sapiens
ggacacagggcagggaacatcacacactggggctggtcagggtttgggaggctcagggagggatagcatttggagaaataactaatgtaaatgacgagttggtgggtgcagcaaaccaacatggcacatgtatacctttgtaacaaacctgcacattgtgcacatgtaccctagaacttaaagtgaaagaaagaaagagagagagagagggagagagagaggaaggaaaagggaagggaaggaaaagggaarggaagggaaggaaaagggaagggaagggaagggaaggaaaagggaagggaagagaagggacttttttacagtgaagaaaaaataatgtcactgaaggctttttgtcatctaagctgtgtaaaattactgaggaatagtgaggagtggggaaccagggaagcaaccctgctgacaaatttaaccctacccaggacaaaacaaaaacctgcagggtttctcctactgcactgtgatgctagaagatactgaataaagagatgcgctttagggtgaagggac

SEQ ID NO: 18753 - DNA, 531 bp, Homo sapiens
ggacacagggcagggaacatcacacactggggctggtcagggtttgggaggctcagggagggatagcatttggagaaataactaatgtaaatgacgagttggtgggtgcagcaaaccaacatggcacatgtatacctttgtaacaaacctgcacattgtgcacatgtaccctagaacttaaagtgaaagaaagaaagagagagagagagggagagagagaggaaggaaaagggaagggaaggaaaagggaaagraagggaaggaaaagggaagggaagggaagggaaggaaaagggaagggaagagaagggacttttttacagtgaagaaaaaataatgtcactgaaggctttttgtcatctaagctgtgtaaaattactgaggaatagtgaggagtggggaaccagggaagcaaccctgctgacaaatttaaccctacccaggacaaaacaaaaacctgcagggtttctcctactgcactgtgatgctagaagatactgaataaagagatgcgctttagggtgaagggac

SEQ ID NO: 18754 - DNA, 531 bp, Homo sapiens
ggacacagggcagggaacatcacacactggggctggtcagggtttgggaggctcagggagggatagcatttggagaaataactaatgtaaatgacgagttggtgggtgcagcaaaccaacatggcacatgtatacctttgtaacaaacctgcacattgtgcacatgtaccctagaacttaaagtgaaagaaagaaagagagagagagagggagagagagaggaaggaaaagggaagggaaggaaaagggaaaggaagggaaggaaaagggaagggaagggaagggaaggaaaagggaagggaagrgaagggacttttttacagtgaagaaaaaataatgtcactgaaggctttttgtcatctaagctgtgtaaaattactgaggaatagtgaggagtggggaaccagggaagcaaccctgctgacaaatttaaccctacccaggacaaaacaaaaacctgcagggtttctcctactgcactgtgatgctagaagatactgaataaagagatgcgctttagggtgaagggac

SEQ ID NO: 18755 - DNA, 531 bp, Homo sapiens
acagtccagccaatgtgcaccagtgcaggaaaaccaattgtgcacattccttcccaactccacgtttagtcatgtcatgttggtagtttgaagtcagccatggtaggaatattggcaccatagtaattggcaaatgctacaaatcagaacttttttcccctcaaagagttggtttgccactaaccmctggccagccactcttttggatactgagaaaagagcaatgagcaaaacagacaaggttataaccctagaagagcatatgttatagaagggaaagatcaaagaattgattgattgattgattgattgattcacaagctattttcgaatggtgaatagggctaggaagacaagaaaaaggggtgactgataggctgcagaggttgggaagatctctttaaggaggtaacacttgcctggatgcagtggctcatgcctgtaatctcagcacttggggaggccaaggtgggaggatcgcttcagtccaggaatttgagaccagcctgggtaacatagcgagaccccgtc

SEQ ID NO: 18756 - DNA, 362 bp, Homo sapiens
taagtgtaagtatggactttatttttttaaaaaaaagtcttttgagaactacaaattacaaagtaaaagcagatcactacgtagaaatctagtgaatacattttgcctgtgcatgaaaaactttatcaaagttactcattttaacaaattcaccccattcacaacaatcagttataatgttctttttaaggttactatacctttatttcaaattatattacatgttattccckcaaaatgaacttttaaatgacaaacttttggctcataagaatggcaccttcaaaaggggcgatttccactcagtctctggtggcattattccaggctagtttcaccagttaaaaaccttcaaaatgttc

SEQ ID NO: 18757 - DNA, 617 bp, Homo sapiens
caatgaatgttggatggaaaaatgatttggaggagtttttaagaaaaacatatttttaaaaaaatgtaattctgaccctaatgccttcccacactccctgcaatactgaaacaaaaatattccattcatcacaagttatacatttagacacattgttccaaggagatgaacctatagggaaacaaataataatatgggaaaatttttcttcagtttcagaatttgttcttcctggaattcaattagagatacagttttcgtgttcaaagacaaatataattacataagaattctgattcttggcttggcatagtgatgtgtgccaatggtccctgctattcaggagactgagacaggaagattgcctgagtctaggagttggagactacaatgagtgatagtcatgccattgcactccagcctgggtaacagraagacaccctttctcaaaacaaaaacaacaacaacaacaaaagagaaagaaagagaaaaaacagaaaatctgatttttgtgagaatctgacagtgccctctccacagtgtatgtgtttgtgtgtgtttgtgtccaggtgttgtatgagtggttccagagatcactagcagtatgctttggatgc

SEQ ID NO: 18758 - DNA, 701 bp, Homo sapiens
cagatatttggagaacaaggccctttttgcccacatttgctcctgcaggttttatgcaagctgctctaggaatatgtgcacagctgcctgccacagggctgagggttggggtactggtaactgctactgtgctaagagctgaagttgactaaaattaactgtaatttattatttgagtcttyccctggaagtggtaagccttcagtagactacagagttccaaaatcctatcatcagacagattctgccagtatgattgttgccttagtggggaaattcttggtgcttcctattctatcacctttttacaatattacctgttacattttaattttataaaatgtttggaatatattaaatttgggtttttttagtgggaataatcaataagcatgaatgaaaacgaatagtggccaaattattctgagttatgatactttgggagagttcagttttttaaaaaagtaagtaccgttgatgacagaagtcaagccttttgtaaaatggtcaaaggaaaggactcatgttgggattgatcacagtgttgttttagaattagacaaacttggactctagttccagttctatcacttaccagcctcatgaccttgagcaagttatttaaccttgctaaggtctctttccttcagtaaaatggggaagtaatgcttatcagattagggcattaccaagagcattaa

SEQ ID NO: 18759 - DNA, 525 bp, Homo sapiens
tgtagcagattctgttctgcctgctgctcaggagggcttctatggccaggaagtgatgctgggactctcctgttggtgttctgctgcctccgtgttgtctctggcttctcacggactctcagatgtgtgaaggcaaaaaggtttcctggctagtttgcgtggtgtggttgggatcacttttgctacatgcctctcaggcaccctagtgggggaaaagggaattttagatttaaggagaatgtgtctatgttggctgcttattgttagcaaatttctgaacaattctattctaaatggtcgcctcttgttgagtagactccagctccattggagaagagatgagcttacctgggctgtgttttcttgctagcttgagggttgaaaacactaggattttgtctccttttccagttgagttagggaagtgacatgcattgccacaaaacaatttcttcagttctggagtccttagacrgtcatcttactagcaccttccagcattctcctttcagtgagataataagg

SEQ ID NO: 18760 - DNA, 578 bp, Homo sapiens
tcaactttatgccagcctgctcaaagatcatctctctctcaattgcctcatatactggaagktttaggcattccaaacagcaactgcaataaaactcagtaagtcagtcctcaaaataaacatgtcaccttttcaatttcccttataaagtaattttgggcccttttacctacttcttgcttccagtgctgcggcatcatctacattttttcctttcccaccataattggttgctgccattatgcacacaaatttttatcttagagtattgctatattatatatatataaatttatatctctaaattaatataatttaatgttatatataatatataatatttatacatatatttatatataaatttaaatattcaaacagcttttgtagactgtgaggattgaaacttgttttatcactacctctagttactgacatgtaataagtttcaaaaataattattgaataaatcaatgaataattgaatggatgaataatttctgctaatttggagagaagatagctatgatgttgtgggtgttcggggaaagggtatgacttggaaataccagtgtctg

SEQ ID NO: 18761 - DNA, 544 bp, Homo sapiens
tcaactgattgcaatgtctagaacttagtttctgattttaaaacaagaaactaaaaataattgtggcatttgtgagaaaactagkaagtttgaacaatgattggatgttttctgatattaaagatttattgttaagtttgtggaataaaactattatgataacctttataagagaaaagcattaatccttcagaataagacattgaaatacttatagatgaaataacaacacaacattttagatttgcttcaaaatgatatgaaaaggggaaattgataggagtcttaataacactagatgagccagatattgataattgttgaagatgagtaatggtgaagaatttactataatcttctttcaatttctatgtatggttaattttttctacaataagtggttaacaaacatatatatacaagcaaaataacatgatctaaaatatgtaagtaaagtttttgagacaagaaagcccgactgtcttccttcagttgtcaggtcatttactaagtgtttgtaatcattttaaatcagacaaaatgt

SEQ ID NO: 18762 - DNA, 530 bp, Homo sapiens
ctcactttgatttgtggtatttacacttcatgagggtgattatttgatgaagtctgtcttggctgctagactggcatgcgtgtgctcactattttatccccagtccagtgcctgctccatggtgctagttctgcactgaacctttccctattgttgaataaatgaataaatgaattttctgtagacatcttttttttttaatttgaagtttttggattttcttttttgaggtgaaattgacatagtataaaattaaccattttaaagtaaacaatttagtgacgtttagtacattcaccatgttgtgcaaccaacacctctgtttagttccaaaacattttcatcacccyaaaaggaaacagtgtactcattaagcagttgctccccattccctatttctcccagaccctggtaactatcaatctgcattctgtctctatgcctctacctattctggatatcttatataagcggaattatacaatgtatggccgtttgtatttggattttttcacttagcataatgtttt

SEQ ID NO: 18763 - DNA, 557 bp, Homo sapiens
ataacaaatggctaccccacagcctattattttttcatcattatcttcatcatttccttctacatcatccaagtctttttaggaccaaatctaaatgtgctaatggcttcatgatcttcctctgcttacctttcaggactcatctcttgccatttgtctccttgtatctaacactccaaacaaattgaatattttagttcttcagaaattccttgttctctttcaattccatgtctctgcacatgctatttcttctgcattgagcactcttggtccatgttcggctatcacttctcagaaactttcyctgctccctaaaccctgggttgagtgacattcctatgtgttcccatgaaccctctacttctcttgtcataatgtatgtcctgctatactgtgattgctcctttacttgtccatattccctttctaccataaactttgtgaatgcaaggactgtaaaaaaaatctgtgtaggtcagtttcacagctccacagtggcttatagtggatcctcaatgaatgaatgagtaaatgaatgcaagaatgaatttaca

SEQ ID NO: 18764 - DNA, 559 bp, Homo sapiens
gggcagtttgacaggttcttcagaaatccctctgctggaaacctctgcactgctttgaggaggaggatgcctcttctctacatagacttctaccaatacagtctttctgcctgtccaagccgtccttttgaaaggaagccttcattacacacacacacacacacacacacacacacasagagagagagagagagagagagagacagtttggatatttgttcctcataaaacctcatgctgaattgtaatcatcagtgctggaggtaggtcctggtgtttggatcatggcttggtgctgtcttcatgacagtaagttctcgtgacatctggtgatttaaaggcatgtggcaccccccccacacacactctctcctcttgctcctggttttgccaggtgacatcccttctaccccttcaccttcgggcatgattttaagctacctgaggcctccctataagcagagcagatgccagcaccatgcttcctataaagcctgcagaactttgagccaattaaaccttttgtcttcataaattacccagtctcaggtatttattt

SEQ ID NO: 18765 - DNA, 559 bp, Homo sapiens
gggcagtttgacaggttcttcagaaatccctctgctggaaacctctgcactgctttgaggaggaggatgcctcttctctacatagacttctaccaatacagtctttctgcctgtccaagccgtccttttgaaaggaagccttcattacacacacacacacacacacacacacacacacagagagagagagagagagagagagacagtttggatatttgttcctcataaaacctcatgctgaattgtaatcatcagtgctggaggtaggtcctggtgwttggatcatggcttggtgctgtcttcatgacagtaagttctcgtgacatctggtgatttaaaggcatgtggcaccccccccacacacactctctcctcttgctcctggttttgccaggtgacatcccttctaccccttcaccttcgggcatgattttaagctacctgaggcctccctataagcagagcagatgccagcaccatgcttcctataaagcctgcagaactttgagccaattaaaccttttgtcttcataaattacccagtctcaggtatttattt

SEQ ID NO: 18766 - DNA, 554 bp, Homo sapiens
agcttgtactgattgccctctcctctgaattctgtaagcatttcctatgtgtacctgcccctgggcaaggtgggcctgacttgttagagtgttagagttttaccctgttcctctaggagggcctggtaccaccacagcccagcatggtgtggtgcctcagcaggaggcatctggttacaatcaacacaagctgttccagccaatttaaagaaacttcaggaggaatagggttttaggagggcatggggaccctcctgcacccgaagccaggatgtgccaccaatcataaggaggcaggggcctccttccgctgctccctgggactctctaggtgtccgtggcctcagyccccctctgcacacctgcatcttccttctcatcagcttcctctgctttaagcgtaaacatggatgcccaggacctggcctcaatcttccgagtctggtacttatggtgtactgacagtgtgagaccctactcctctgatcaatcccctgggttggtgacttccctgtgcaatcaatggaagccagcgaggcagggtcacatgcccc

SEQ ID NO: 18767 - DNA, 1684 bp, Homo sapiens
tgtccagtacagtggagggctgatatggtttggctgtgtccccacccaaatctcttcatgagttgtagtttccataatccgcatgtgtggtgagagggacctggtgggaggtaattgaatcatgggggtggttccccctgctattcttgtgatagtaagctctcacaagatttgatggttttataaggggcttctctttttgcttggttctcattcttctctctcctcctgctgtgtgaagaagaacttatttgcttctccttctgccatgattaaagtttcctgaggcctccccagccatgtggaactatgagtcaattaaaactctttcttttataaattacccagtctcaggcagttctttatagcagtgtgagaacagactaatataggggcgctaagtaacttggctgctctcatcatcagtttggctgttgcctaaaaaagggggtatgcagtcaagaaccaaaccactgagtcacttgacctgttttgtactttgttctttctcttgagtctcccagtacatatcttcacagttcatttgacaggttctggaaacacccttccaccttgtcacatattggaaatgaatatatggccaccatttccccctgggaacttcttcacagcatttagcctaacaaaacttgagctgggttcctggacagactctgactgtgtagccactcacccttaactttggctgagggtgggaaggaaaatgaaggaacaggggcatctttccctctgactataggaagcttgattttgtgttcctatctacttccttcttctgttattaccctcttcccaatctatcattgcaatcattttaatgccactaaaaaaatagcttctttttttctgcctgcagattgcataaacaatatcttggtctgctctctacctgtaattcattgagtaacccaaggcaggctctaattttttttttctgttagcatgtattacttgagaacattgctatcctttgagctcataaaagaacaaggttgaggttctttaataagagggaataaggaggcatgagaaacatatacttatgggtgcaagtcaattggtagacactggctctttcaagtcacaatgatgtcatttgctgcccgaaattagtggttgccaaatcatcagtgcttattaaaaacaaagattcttgggtaccttctctggagacgtggattcaatgcatctggkgtgcatccagggaacctatattaacaagaacttcaggaagttcttaggttcagcaggtttcgaaaacccagtcttcaggcatacattgctgaatagtacccacaagatctgagagtaaacatcattgtgttttgtataaaatttttcttgtaaaaatttattgaaccagcattaaagaaaaaattaaaaaacataaactacctctatttttgctgttctaatacagtagtttcacttctctgcaattccttgtatactatactctcattttacatatttttaacataaatatttacaaatttatttatttatttattttttaagacaaagtctcactctgtcacccaggctggagtgcagtggcacaatctcggctcactgttacctctgcttcctgagttcaagcaattctcggccttaatctcctgagtagttggggatactggtgcatggtaccatttttgtattt

SEQ ID NO: 18768 - DNA, 528 bp, Homo sapiens
aaaaattaaaactattttagaataatttctcaggagtgatattgtgttaggctgttcttgcattgctataaagaaacaactgaggttgggtaatttataaagaaaagaggagagatttaactggcttacagttctgcaggctgtacaagcatggctctagcatctgtttctagtgaagccttaggaagcttacaatcacagtggaaggtgaagtgggagcagcctcgtcacatggcaagagtgagaggcagcaaggggggcaggatgtgtcacatacttttaaacagccagatcttgtgagaactcactcactgtcacgaggacaggaccaagacattcatgagggatctgcccacatgacmcaaacacctcctaccatgccctacctccaacattggggattacatttcaacatgaattttggaggggacaaatgtccaaactatatcagacattaatgaattaaagagtttgaatattttaaggtcagagtggctaatactggaacataagatatttcaacattgg

SEQ ID NO: 18769 - DNA, 522 bp, Homo sapiens
tacctttctgagtttaatccataagaaataaaaattgtatatgcacttcctgtaatgagatgccaatttagagttgattccttatgttctctcttgccaaagtaagtgaatgaaagccagtttgcttacatcataatagctttcatttaaggcacaggctttcaactttgtgtcactgaaaatatctaaagttaatttaccktgtaattatctaaattatgcttttcaaagtttctgtgcatcttcggttgttggttggtattgtaatttttcttgtcattttgtccaaaaagaagtttttgaaggagtagtgacatcacgagttgtgaataaacacagtcttacacttaaaattttttaaaattgtttaaaaattcaaccttcaacccattgttaattttgtcactagtgctaaataattagttgtaataacttccccttaatacacttattttaatgttgtatagataagacctctgtttgtgattgatctgtgatattagttcaatacctagaccctca

SEQ ID NO: 18770 - DNA, 563 bp, Homo sapiens
gtgattactgattccttccttttcctcacctctcatcttcaataccatcactattacatctcactttcagcccccaaagctgtactgatcctactgctctccatctccactgccactactctaatttaggctttcatcacctgtcactacgttaccaaaattgtctccccatcaatctgcccacctctgctcttgttctcctaaaaatccatcctcccctcagcaattaaggtaatcttttctttctgacatcaaattccaaaatgtttccaacataaaaaaagctgaaatagttttagtcctctggatctagttggtacctagatcctgccattaatatttgcctcttcatatgtttatctctctattcatccatcaatccrtattatttcttcatgtatttcaaaataaattctaagaatcaatacacttccttcttaaataccatgcttatgtttacttttgtttacatttctcctctacagtgaaatttacatacaaagaaaaacacaaatctttcgtctgacaagtgcatgacttggttaacctaaactactctcaag

SEQ ID NO: 18771 - DNA, 536 bp, Homo sapiens
cccagctaattttttgtatttttagtagagatggggtttcaccacgttggccagaatgatctcaatctcttgacctcatgatctgcccgcctcggcctcccaaagtgctgggattacaggcatgagccaccgtgcctggccttctccttaataaactcccctttatatatacatctatcctattagtcctgtccctctagagaaccctgactaatagtatgtgactcgaaaggtctctagtgaaggtgcagtgagacaacttaggtagtatctrttggtgtggcacgttggcatcactccggagcctggtgacctaagtttgggtgactgactttgctgcctactagctgtgtgccctggaacaagtgacttcacctctttgtgcttgtgtaaatatggagagatgataagtcacctactaatagattgtttggaagattgaatggcttaatccacatcaagtgtctgaaacagtgcacatctacatagctgggaaatgttagccattgtaggccaagggccagtcacatactagg

SEQ ID NO: 18772 - DNA, 412 bp, Homo sapiens
cacatgcgwgtttaaaacaaaacaaaaacaaaacaaaaataattctgttgccagaaagaagtaagagatggatgctagggggcagtgtaattagcaatgccactgcttgctctcatggaaaacagaaatacaagctttttccttctcctcctgcccctgaccaaaattgttgtgatctatctatttcaccttctttgaaactcatctacctctttttaggcttctgccacttccttaggtcagaaccctggcagcgcttagatgattgaaatcatggtctcattgcttcttgtctggacatatggccacaaggctgcctgaggtgtctgcctagcatgcaaatctgccaacgctcaccatgtaaaattctctgagagcttctgactgctctcaaaacagagccagactctgg

SEQ ID NO: 18773 - DNA, 649 bp, Homo sapiens
gaatgtaatctaggcaaaataaatttaaaatgcaaatatttgagtttgtgatataaaaatcagcttctgtagttagttaaatgctacttgaatgtgggytgtacttgtttctgcatctgaatgaaagggttattgcatatattatcttcaagaactaagctgaaaatgaaaaaagatgtgctagtgtttcagaaatcagagatagagatatgttatgttttgggcagaagaaattgtaaagaaagatgcagggagggaagcacttgtgtcaaaaatgtcagcatgttgaaactgagtcacttaaaaaattgagtagagggcataaaggaccatttaaagaacaaagcaagtttatgtattagattgaatgaatagtgaataaaaacataggggagttttagctgcaggctccaaaacagaagcatggaagtcactatctcccatttttgtatctggggatatgatgtactcgacagagtaccaaggtggggaagcgcctgctgcttagtgcttgaccactctttaccctctgccacccacactataataagaaacagacagcagtgctcccaagagcaggcctataacctcattgatgcttcttaagtggccataaagaagttgactaagcatgaaatttcatcattaa

SEQ ID NO: 18774 - DNA, 537 bp, Homo sapiens
ctaaatgttgaaagaagtgtcttaatatttagaactctttatccattggtggtagaaacttgtcagaatagcttcgatcattgcagtactgtggctcaaagatagattggataaagtagtagaaatactcatagtatatattccatcggacaaagagcagatggctggagtggtctycagtgcatgtctgctcttctctattaccatgtaatgtttacctgtagaaacaatggtctcttccaagcctaatgatgatgatagaggtgataatcctaatttattaaacaccaattacatgctaggtactatactagctatatcacatatgttttctcatcttatctttaaaatgatcctctgatgaagacacactggctccttacatagagtaagaacataagttgcggaagtttcaaaaacttgcccaatgtcacttggcacaaaaagtggcatatctggaattgaaatacaggcttatcagactctaaagcatgaaatccttattctactccaggtaggctctcagtcctagctgca

SEQ ID NO: 18775 - DNA, 537 bp, Homo sapiens
ctaaatgttgaaagaagtgtcttaatatttagaactctttatccattggtggtagaaacttgtcagaatagcttcgatcattgcagtactgtggctcaaagatagattggataaagtagtagaaatactcatagtatatattccatcggacaaagagcagatggctggagtggtctccagtgcatgtctgctcttctctattaccatgtaatgtttacctgtagaaacaatggtctcttccaagcctaatgatgaygatagaggtgataatcctaatttattaaacaccaattacatgctaggtactatactagctatatcacatatgttttctcatcttatctttaaaatgatcctctgatgaagacacactggctccttacatagagtaagaacataagttgcggaagtttcaaaaacttgcccaatgtcacttggcacaaaaagtggcatatctggaattgaaatacaggcttatcagactctaaagcatgaaatccttattctactccaggtaggctctcagtcctagctgca

SEQ ID NO: 18776 - DNA, 537 bp, Homo sapiens
ctaaatgttgaaagaagtgtcttaatatttagaactctttatccattggtggtagaaacttgtcagaatagcttcgatcattgcagtactgtggctcaaagatagattggataaagtagtagaaatactcatagtatatattccatcggacaaagagcagatggctggagtggtctccagtgcatgtctgctcttctctattaccatgtaatgtttacctgtagaaacaatggtctcttccaagcctaatgatgatgatagrggtgataatcctaatttattaaacaccaattacatgctaggtactatactagctatatcacatatgttttctcatcttatctttaaaatgatcctctgatgaagacacactggctccttacatagagtaagaacataagttgcggaagtttcaaaaacttgcccaatgtcacttggcacaaaaagtggcatatctggaattgaaatacaggcttatcagactctaaagcatgaaatccttattctactccaggtaggctctcagtcctagctgca

SEQ ID NO: 18777 - DNA, 532 bp, Homo sapiens
agtttgtcatttaataaatggcaaataaatgaagcttatttatttatttaataaaacaaataattcttatgtatttattttaaaattaataagtggcaaataaataaattttatttcccttttagtaattttaaaaatacataaattgtatatattctataaatatttatcaagcatttacgatgtactaggaactgtgccagatcctctagatgccaagattaaaataacaaaagtcctgccctcaaagaacttgtagtcaaytggagaagacagacaagtaactagctattatagctatgccttagctgccttttctacctccatccctatcctactgggattcgagtagatccaaggtagatttaggtgctagaggtgagagttcaggctagactaggaaatcacaatgaaggtggactgaagcagaaagatccacttcagagtgaaattgagttaaatgcatcaagtgattcaaaggctaaattgaacactaaggtgaagaaacaagcccaaagtctgcaatactggg

SEQ ID NO: 18778 - DNA, 532 bp, Homo sapiens
agtttgtcatttaataaatggcaaataaatgaagcttatttatttatttaataaaacaaataattcttatgtatttattttaaaattaataagtggcaaataaataaattttatttcccttttagtaattttaaaaatacataaattgtatatattctataaatatttatcaagcatttacgatgtactaggaactgtgccagatcctctagatgccaagattaaaataacaaaagtcctgccctcaaagaacttgtagtcaattggagaagacagacaagtaactagctattatagctatgccttagctgccttttctacctccatccctatcctactgggattcgagtagatccaaggtagatttaggtgctagaggtsagagttcaggctagactaggaaatcacaatgaaggtggactgaagcagaaagatccacttcagagtgaaattgagttaaatgcatcaagtgattcaaaggctaaattgaacactaaggtgaagaaacaagcccaaagtctgcaatactggg

SEQ ID NO: 18779 - DNA, 1169 bp, Homo sapiens
tgacatgtactcttaatgttttttaaaaatctgtggatacaataggaatatttttcagtctaaaaaccagcttaacacctaatgatgaaacattacaatactccctttatatatatgaagaaaataagcccaaaatcttcactttgatttactaatattcattagtcaaagcaattagcaaaagcagtgagcagtatgaaaactggaaggaaaaagaaaaaattatttacagatgacattaatatacctagaaaaccaagcaattagaagagctcatgttgtagcagaacaaaaaggataaaatttataggaacaaaacttaagaaatgtataagatctaaagaaaaaatattaagccaaaaaaaggacattaaaaagtcccaactcattggaaaagcatgacatcttggacataaagactcaataccaaaaaattcttcaactcgtagaaaataaaatgattataagtacccaataaatttagaatgtgataggtgttagcataaaattcctaccaaataatcaaatgaaaatattttcacacgagctaaaaaaaaaaaaaaatctattaataggattaaaaaccaaaacaaaacttccatatgtaagtgtgttcttcacataagaaagagcatctctgcaataggaatacataccaaaataccatcttctgttatccaaaaaaaacaactaagttacggctcacatgcaaattccaacccacctttggtaactaaatgggctttggtcacatgctaaatactctcccgatttatacaaagaaaaaaaaaaaaaaattgggctgcgcactgtggctcacgcctgtaatcccagcactttgggaggccgaggcaggtggataaccaggagtcagttcaagggaagcctcaccaatatggtgagaccccatccctactaaaaatacaaaaattagccgggcgtctgtagtcccagctactcaggaggctgaggcaggagaattgcttgaacctgggaggcggaggttgcagtaagccaagatcgtgccactgcactccagcctagtcaacagggcaagactccgtctccaaaaaaaaaaaaaaaacgaactcaaattcacattattatttaaaataggctatcagccttattatggtatattttaaagtgactcccgcctrttatgatat

SEQ ID NO: 18780 - DNA, 566 bp, Homo sapiens
tttcttttgccttctgttggcttcttttgggctctcttaggaagcacccaggcctgtgtagtcacctctggcactctcattctgctgcccagggcacagctgaggtccaagagtgtcaccagggctgcagctggtgtggatgcaggcccaagagcagaggctggtgaggctttgaacaggcctgcaggaaggcgtgggtaggtaggtgagtagaacaaagagggctgccctcctgaatcagatctgcagaagtaggagtagtgacctggatcaagcagacastagggaagagaagggaagtgataagtgatggaggtggctagagtgcctttgtgtgaccagcctggggcccttccccagctgactagtgaaccctttctgatttgtgtcacaatcagttgctataaaacacttttaaaagttgtatctttggcatttcagtcttcttttaatgagatgagaggagagcagtagaatgatgcctctttgcaagtaatgtctgttagaatagaagaatcctagaatgtctgagcccggtgattatctggtcagaccccttgttgtat

SEQ ID NO: 18781 - DNA, 558 bp, Homo sapiens
gtgtgttttgaagctrttgtgttaggcttgtcaacctgaaaacagagcaggaagagcaaaagctaataggctggtgttgtgggctcctgattgagagcaaggatgagcttcccttgaagcacttaaggaaatccttaagcccaggaagtcttcccaggcagaacagccaaaggcagcctttcttgttcaacccaaagacatggcagcaactatcacataactaagtatatgtagctgaatcccaagttacagaagggcaggaactatgtttttggtattgaatcctccattgctctgctgggggctaggcactgaaggagggcctcaaagttactggaatgaatgaaataaagtgacagggggcccctagttaacaaactaattggtgccttgacttggggtagaatcataccacatcttgtctcatgaaatacagatggcagattttggattgaaggcttcaatggtgtctacatcaccttaggtctgcacattaagtccttgaagaatagattttgtgataagctgtctcttaccctagaaggaaattaggattac

SEQ ID NO: 18782 - DNA, 558 bp, Homo sapiens
gtgtgttttgaagctattgtgttaggcttgtcaacctgaaaacagagcaggaagagcaaaagctaataggctggtgttgtgggctcctgattgagagcaaggatgagcttcccttgaagcacttaaggaaatccttaagcccaggaagtcttcccaggcagaacagccaaaggcagcctttcttgttcaacccaaagacatggcagcaactatcacataactaagtatatgtagctgaatcccaagttacagaagggcaggaactatgtttttggtattgaatcctccattgctctgctgggggctaggcactgaaggagggcctcaaagttactggaatgaatgaaataaagtgacagggggcccctagttaacaaactaattggtgccttgasttggggtagaatcataccacatcttgtctcatgaaatacagatggcagattttggattgaaggcttcaatggtgtctacatcaccttaggtctgcacattaagtccttgaagaatagattttgtgataagctgtctcttaccctagaaggaaattaggattac

SEQ ID NO: 18783 - DNA, 534 bp, Homo sapiens
ggcagtcacctttgagatgccatagacctaagaggtttcaaggagtattttgattacttcaaaggattctttggaccagaaaatccrtgtatgtcagaatctttgttggtagtaggaccacttaaattagagatagggagaaactcaccagaggcagatggcacaaaatgcgattatggttacattaagcttagcataatcattaatgattgaaattgcattttaaataatttttcatattgtggaatctcatgttgttttggggacttagtgtatcagttacctaaatacagttccaagaggtttataaaaatggtactcacggagggagtaggagatagtgtgtaggataggggaagggaaagagggagaaagcatgaatattgcagttgagaaaatatttttcaattactatgtattttgggagttctattttaaaatgtattttattatcttggaggcttgtgcttttacagaattataagtggtgtaaaccatctaccaactgaagtcagtaacttattttgttgatta

SEQ ID NO: 18784 - DNA, 534 bp, Homo sapiens
ggcagtcacctttgagatgccatagacctaagaggtttcaaggagtattttgattacttcaaaggattctttggaccagaaaatccgtgtatgtcagaatctttgttggtagtaggaccacttaaattagagatagggagaaactcaccagaggcagatggcacaaaatgcgattatggttacattaagcttagcataatcattaatgattgaaattgcattttaaataatttttcatattgtggaatctcatgwtgttttggggacttagtgtatcagttacctaaatacagttccaagaggtttataaaaatggtactcacggagggagtaggagatagtgtgtaggataggggaagggaaagagggagaaagcatgaatattgcagttgagaaaatatttttcaattactatgtattttgggagttctattttaaaatgtattttattatcttggaggcttgtgcttttacagaattataagtggtgtaaaccatctaccaactgaagtcagtaacttattttgttgatta

SEQ ID NO: 18785 - DNA, 572 bp, Homo sapiens
ctgcaatacagtggcatgatctcagctgactgcaacctcttgcctcctgggttcaagcaattctcctgtcttagcctcctgagtagctgagattacaggcaccggccaccatgcctgctaaattttttgtatttttagtagagacaaggttttactatgttgccctggctggtctcgagctcctgacctcaagtgatctgcctgccttggcctcccaaactkctgggattacagccgtgagccaccatacccggcctgtagactttcacggaattctcacccgatctctcttccttcctgctgctccctaagcttctcagattgtttctccccagaaaaagtacttgtgggagtggggaaggggtggctgcctgactgatgggagtgagggaaggcttctagggctgcttttcagtcttcagacacccctcactgtcttcagtgtcctgttcctattactgccttccaaagtaccaggcttcagtccttgagttgtcttgctttttgtgggtcttctccaacaaagcttggccttcctctgctctgctaatttagtcaccattcctccatct

SEQ ID NO: 18786 - DNA, 572 bp, Homo sapiens
ctgcaatacagtggcatgatctcagctgactgcaacctcttgcctcctgggttcaagcaattctcctgtcttagcctcctgagtagctgagattacaggcaccggccaccatgcctgctaaattttttgtatttttagtagagacaaggttttactatgttgccctggctggtctcgagctcctgacctcaagtgatctgcctgccttggcctcccaaactgytgggattacagccgtgagccaccatacccggcctgtagactttcacggaattctcacccgatctctcttccttcctgctgctccctaagcttctcagattgtttctccccagaaaaagtacttgtgggagtggggaaggggtggctgcctgactgatgggagtgagggaaggcttctagggctgcttttcagtcttcagacacccctcactgtcttcagtgtcctgttcctattactgccttccaaagtaccaggcttcagtccttgagttgtcttgctttttgtgggtcttctccaacaaagcttggccttcctctgctctgctaatttagtcaccattcctccatct

SEQ ID NO: 18787 - DNA, 549 bp, Homo sapiens
tgtatcattaccttttaaatcaacctctacaataattttatcccacatattcagaaataatcaaacttacagggcacactgatatatagttaattcaagtattagttagatcttcaattgtattacacagcctcataactcagtgactatttaggtgttcctttaccatttccacgaccaaaaaaaacactgttatttttaaggcagactattatagttttaacaagtgattctaaatatttggagttttcctatattaaaatgaaaacatagcattacatttttcacctacctcctaaccactgaatatcttaaaaaaacaagtctggttgatctttaccataagaatccctcaaatatgtgaaaaccactatcaagtttgttagtttgytttctgattggcctcttgtgtagggtgaatatccctaattagtccattagttaattatgtggcatgagctgagatctcagttatccatgcagctctcgttcacacaaactgcaccatataatatccttcttcaaaggtgatgtccagaacactatacc

SEQ ID NO: 18788 - DNA, 549 bp, Homo sapiens
ctattttcaatatatacttttgtagatattgaagaccggcgaaagaataccaaattaagaattatcattcagaatttaaaatgcttcatgaaccacttcattttgaaattggaggtccgctgtaaagaaacaaatttgagtttgaggatactgaaagtgaatctggaatctactaagatcaatattaattcataggtaatagaaaaaygtgcaaaaaaaaaaaaagaactactacttgaatttgtttcagttgatggagggaggtggagtggttactgaaatgaaagggtattaaagatatttcctttgctataaatttggaaaacagttgctatgattacaacatagcccaggctccatgtgcagctctgagagctatggatcttggagttattttaactagttactggatgccacccgagacaatggaatatgatgtagggaaagaaagaaataactaaagttattctgttttggcaaaaaaataataatataatcagtcctaggcatttggtaaatgtttcatgtatatgattttcaagtcttcag

SEQ ID NO: 18789 - DNA, 612 bp, Homo sapiens
tattattatttgaaaggtcattttatacatgcaaaatcccaagttgttctttgccacctgacacattttgattctccatagatttatccctgtcttcatttactaaattaaaaaagacaaacccacggtttatgtaacatttcaaatatgatcagaggaaattgtcggccttgtttgtagcaaccaatgcagtcatatcaacttaactaagaaggattatttctgattagrggcctaaaagagaatatttaatgtcatagctcaaactagctaaaaaaaaaaaaaagaaaggatatactgctttgttaaaagccataacaggcctttgagaactacaaatgaaactcctttcataaatcacccactgcagttggtgccagcacttagctcagtatttgacttccttttcttgtgagtcacaagcctgtattatcaacttctaaacatatacaggggaacactgatgagagttactcccaggattaccatcacatacaaggggattctgataactttaattaaaagatattgaacttctttcaaacttttatatcaatgaatagcatgaagtaattgcagactgatattgaaaactatgtgaaggtattggaa

SEQ ID NO: 18790 - DNA, 612 bp, Homo sapiens
tattattatttgaaaggtcattttatacatgcaaaatcccaagttgttctttgccacctgacacattttgattctccatagatttatccctgtcttcatttactaaattaaaaaagacaaacccacggtttatgtaacatttcaaatatgatcagaggaaattgtcggccttgtttgtagcaaccaatgcagtcatatcaacttaactaagaaggattatttctgattagaggcctaaaagagaatatttaatgtcatagctcaaactagctaaaaaaaaaaaaaagaaaggatatactgctttgttaaaagccataacaggcctttgagaactacaaatgaaactcctttcataaatcacccactgcagttggtgccagcacttagctcagtatttgacttccttttcttgtgagtcacaagcctgtattatcaacttctaaacatatacaggggaacactgatgagagttactcccaggattaccatcacatacaaggggattctgataactttaattaaaagatattgaacttmtttcaaacttttatatcaatgaatagcatgaagtaattgcagactgatattgaaaactatgtgaaggtattggaa

SEQ ID NO: 18791 - DNA, 552 bp, Homo sapiens
aagtagtttttttggtgttttttttatagtcatgattcccacgtgtttgtttagctaccccacaatcttgctggcttttctcagcagtatcttgtgatcttgcttttctttcaggagtacagtcatgtaagtgctcctcttaaattgggccttttatggagaaacatagaaacattaaacgaagtgctttgaagattaaawgtccaaagttaaaagacaaactaggctatgtaatttaggcatctaaagcttaaccctctggggccatactttctattatttggaagagcagtagagaagagcacgcacatcagagtcagtctgcccaaattcaaattggtgttctaccctttatttagttctgaaagtttgggcaaataacttaatctgcatgactcagatttgtcttctgtaaagtgggaatatgagcatctgcctcataggactattgtgaagattaaatgattgatccatgctgtgccctctgtcagcgcctgatgtgtaagtactcaaatgttagctatggttatccaacaggcaatgattatgcca

SEQ ID NO: 18792 - DNA, 582 bp, Homo sapiens
attcaaacacaaacaagtgactgaacaagccatttgtttaaaaagggaggggagagcatattttttaaggaccaagtatcatttttttttttaaggacccagcaccatactctcttctctcataggatcgttggtccatctctggtaggctgggtacatttgactgagtttattgcaactgmttctgccaattcttcgaactaccaatcaatggggtgaggtttctaagcacacgagctactacacagaaacacatgataaagggagcagcactggaaaggcatgtatttgcgtgtgtgtgcgtgcttgtcaatgtctgtgcggttatgcagatccatgagggggtttcttaatgcagtttaatggaatccattcggggtgaaaggtgttattttgtctaaagaaatctccccctcgcagtccagctcccagacagactcagcaacagggtcaccatctggggacgtctgatagatctggaacatgcgatcgaaaggaccctcctcctcgtcgttgtccacctcccggttgccgggggtaacggcgttgggcatcatgtggatgtaggcagctgcgatttcc

SEQ ID NO: 18793 - DNA, 582 bp, Homo sapiens
attcaaacacaaacaagtgactgaacaagccatttgtttaaaaagggaggggagagcatattttttaaggaccaagtatcatttttttttttaaggacccagcaccatactctcttctctcataggatcgttggtccatctctggtaggctgggtacatttgactgagtttattgcaactgcttctgccaattcttcgaactaccaatcaatggggtgaggtttctaagcacacgagctactacacagaaacacatgataaagggagcagcactggaaaggcatgtatttgcgtgtgtgtgcgtgcttgtcartgtctgtgcggttatgcagatccatgagggggtttcttaatgcagtttaatggaatccattcggggtgaaaggtgttattttgtctaaagaaatctccccctcgcagtccagctcccagacagactcagcaacagggtcaccatctggggacgtctgatagatctggaacatgcgatcgaaaggaccctcctcctcgtcgttgtccacctcccggttgccgggggtaacggcgttgggcatcatgtggatgtaggcagctgcgatttcc

SEQ ID NO: 18794 - DNA, 502 bp, Homo sapiens
tgacgttagtcattgcttagacacaaaactaagttgcatagatcccagtacacactgagatgcttttatctagcagcttattctgaatatcaccgtggaccctggaaatctgtaaaagacattctcttattcragaaggaaatcctctccagaggcaagaaataagacaacaactggatattcattttatatggctttaaaaatcatgatattttgctttatttcaagaagctcagtttcctgaatttgtgagtacttttaccttggaacactgtatcttatcattttataaggcatataatagaaacgtattcattttatttttctatgccaaatatgtattctcttgggaaattctaacaatggaaaatacaaacaaatgtatattatatttgagggttcatcagaagactcatttgcttccgtatcaattgaaaacatttacagagactttaggtggttttcctgccatagcacatttgtattagtaatatagttgaaa

SEQ ID NO: 18795 - DNA, 338 bp, Homo sapiens
gttttttctacatttagaatttcgttaagattgatgtccacaagtgttaaaggatatgaagtttgtycccccaaagtaacattttttctcattataaaatagtacatgattattgcgcacactgggggaaggggggtggactttctttttatttccagaagctgccttcaagttctttcgtgcctcagggcctttgcactaacatctttcagacgtagctgccacctcctcagagaggttttccttgacctgaaattcagaggcaccagtcaactctgtctatcaaattattctatttaaaatttcttggaatgatcagcttctgaattttttcttgc

SEQ ID NO: 18796 - DNA, 490 bp, Homo sapiens
cataaaaataaaaacttcagagaaaccactccyttattactaagtttctgggtcacctaacaggcccagctgcttctccttccttctatgacaactatgtgtcctgtccaaagcttcctgactcaccctgttcctcaggttttccttcttctttcaggctgccccagcccatgattaactgttgttcccaaagcaaacacacagatcctttttgctttaggcattttgaaaaggttgtgttactggaaagtatactaggaagataatagaagaagcaaacatgaggaaattaaaaagattccagaaagttcccaaggccttacttgttcctggtccctgacttatgctttctcactttctttcaatatggcacttagacgagccttttgaatttctgttcagccttttcctcccacagtataacacttaaaactctcttcctcatggtgtgcacttagcccctttaaaggttcatcttccactccagagg

SEQ ID NO: 18797 - DNA, 588 bp, Homo sapiens
ctgtcataactgggtgattcctttctccaggcgcacgtataactcccattactgtcactgaggctaaagctcatatttcaagggaatctgaaacttgtcaagggtgaaaggactttctggtttttcctgctttgatttaggccttgtctggtaattttaatacctctgatggtttttcgtttcttccaatttgttaatatgttatagaaaattaactgtctggaaaacaaagcaagcaggagtttctctctctttctctggaaaacaaagcaagcaggagtttttctttctttctctctgtctctctctctctgtgtctctctctctctctctccctctcttcctccctctttctctttctctttcttcctgtctgtcagagcattgaatttttttgagttaatttctttcccattgttctttaggtcagcatcttcactatttcttagttctgttcttcattctagactctcactcctagagaaaacatttctatgatcttcagtttattctgtccaatttatttttaaatgactcaattctgtctkttgatataacacaaaattcttaacttaaacctttagagag

SEQ ID NO: 18798 - DNA, 995 bp, Homo sapiens
tatgcatttaggcaaaatagggttatctaaatacaacttgagctgtgggtgaacataaaattttatatagtgaaactaaatattatgaattatagtttttttattttccaaaaactaattacatccatatctctgtcagttatgatctggtaatttaaatttgggggtccacactgatggtcagtaacagttcattaggcagcctgactaggctagtgcctcaagacactgctgattttctaggttttcaaatgtttcatttgctctgttatttatgttgcagaaaattggcatactctttgcaattcacttgttgtttaattaatcccttatgaagtctgtttctcttgtgaattctctctccttcatactttccatacatttttttcttgctctctacaaactggccattgtttcctctaatatttgctctctgcttctgggccccaggccttcagaagggctttcagttgctggctctctttgtttgtgtccttcccaaggaaccactgacttcatacttttgagrttgttatcattcacattaggtattactcaccgtagttcatgattttccattttatttgtaactgctgattggttcttcctggtaggacaaactatttctgtatttcttgcttcttttaagcactctgagatctgcagagctattatatccttcgaagatatctaccatgccttccagttcctgtttgtatgtgtttgtgtatgtttagtcaattcaacagacactaatgtgttaggtattgtgcaagcttcaaaagatagaaacttatgtgtgtgatatagtttgaatctgtgtccccacccaaatctcatgtagaattgtaatccccagtgttggaggaggggcctggtaggaggtgactgaatcatgggggtggatttgtcccttgctgttctcgtgatagcgagtgagttctcatgagatctggttgtttaaaagtgtgtagcacctctccctttactctctt

SEQ ID NO: 18799 - DNA, 995 bp, Homo sapiens
tatgcatttaggcaaaatagggttatctaaatacaacttgagctgtgggtgaacataaaattttatatagtgaaactaaatattatgaattatagtttttttattttccaaaaactaattacatccatatctctgtcagttatgatctggtaatttaaatttgggggtccacactgatggtcagtaacagttcattaggcagcctgactaggctagtgcctcaagacactgctgattttctaggttttcaaatgtttcatttgctctgttatttatgttgcagaaaattggcatactctttgcaattcacttgttgtttaattaatcccttatgaagtctgtttctcttgtgaattctctctccttcatactttccatacatttttttcttgctctctacaaactggccattgtttcctctaatatttgctctctgcttctgggccccaggccttcagaagggctttcagttgctggctctctttgtttgtgtccttcccaaggaaccactgacttcatacttttgaggttgttatcattcacattaggtattactcaccgtagttcatgattttccattttatttgtaactgctgattggttcttcctggtaggacaaactatttctgtatttcttgcttcttttaagcactctgagatctgcagagctattatatccttcgaagatatctaccatgccttccagttcctgtttgtatgtgtttgtgtatgtttagtcaattcaacagacactaatgtgttaggtattgtgcaagcttcaaaagatagaaacttatrtgtgtgatatagtttgaatctgtgtccccacccaaatctcatgtagaattgtaatccccagtgttggaggaggggcctggtaggaggtgactgaatcatgggggtggatttgtcccttgctgttctcgtgatagcgagtgagttctcatgagatctggttgtttaaaagtgtgtagcacctctccctttactctctt

SEQ ID NO: 18800 - DNA, 581 bp, Homo sapiens
atagtgcagccttcagtctgtggccaaaggcccaagagcccctggcaaatcactggggtaagtccaagggtccaacagctgaagaacttagagtctgacgttcgagagcaggaagcattgagaatgggagaaagatggaggccagaagattcagtcagtctagtccttccatgttcttctgcccgcttttatcctagccatgctgggataatgagaagcattcatccatgttgtcacaagggttaaataaactgtaagatggaatgtaaagcacttcacttaaaatatagtagatgttctataaaatatttgttgaatgaacacatgaacaaatgtcatgaacaacagcctggggagcctataacatatggcagtgttttgggtatcataataatatgggtttgaatcacagctctcccattcactacctttgtgatcacaggtgaacaacttttctgttcttcaaattccttctctatgaagtgggacaataaaacttactccacagrtatgtcagaagaatagatagaatgagataatgtacataaatcagttatcataatacatagaatacaaggagt

SEQ ID NO: 18801 - DNA, 549 bp, Homo sapiens
aaacaggaagcttttccaaaaacagaataaagaatgtggagacttaagagagctaaatgttcattgtgggcctgtggtgcagtgccttcggatgtaaaaatatggcatcaccatagttcagcctttaattgttcttccttcttagtgggtgggagtgttcattgtrcatcttcctatactcttaaggaattctgggcttttgcccgtaatatctctctgatttttctggaagatgaactctttagcaggtgaacacagcttacacagtaactcacagctatgccaagggcatgaggcaggcccagctctgcacagcattgctgcaagacagtggaaaatagatctgggttcgaaaatcaccaatttgtacaataaatgggtatttctatggcaaaattaattaacttattttaggatcagttttctaatcaataaaaaataataaagacaataaaactaccttgctaagttttattcagaattgaacattatcaggatttgttacttacatacaatttaatagctacctctattgagtcctacatacct

SEQ ID NO: 18802 - DNA, 549 bp, Homo sapiens
aaacaggaagcttttccaaaaacagaataaagaatgtggagacttaagagagctaaatgttcattgtgggcctgtggtgcagtgccttcggatgtaaaaatatggcatcaccatagttcagcctttaattgttcttccttcttagtgggtgggagtgttcattgtgcatcttcctatactcttaaggaattctgggcttttgcccgtaatatctctctgatttttctggaagatgaactctttagcaggtgaacacagcttacacrgtaactcacagctatgccaagggcatgaggcaggcccagctctgcacagcattgctgcaagacagtggaaaatagatctgggttcgaaaatcaccaatttgtacaataaatgggtatttctatggcaaaattaattaacttattttaggatcagttttctaatcaataaaaaataataaagacaataaaactaccttgctaagttttattcagaattgaacattatcaggatttgttacttacatacaatttaatagctacctctattgagtcctacatacct

SEQ ID NO: 18803 - DNA, 553 bp, Homo sapiens
atatctaaattataaaatatgctagatgtttacaagaactaaaaaaaagctgcaaattttgccttttaaaatctgaaattgtagacactggtgcttctagagaaactttgttattcagactgagaaggatgaaccacatgaagaatgactagagatgaaagatgatgttagatgagtttctgttctcttcggtaacttttccatctccttcacctccagcaccctggggtgaaggatatccagcaccctggggtgaaggataagcaagaagctgacagcattgccaagtttgggaacatggagtcagattttctttccattgtattcatcatctgatgctatttcttttttactatctgtctccacctccctttttgggagcctctggctttyacctcttctatctttctcctctctttgatgttgtttctctgccagccctttgagtaccatcttcttttttctatttccctttctctgttatcctttagtgtattctttctctatatagacgtcattaaaaacatagtctttatctcaagaaactgtttca

SEQ ID NO: 18804 - DNA, 505 bp, Homo sapiens
caagcttagctctgagtggagaatttattacatagtcatgatcttatttagcatgcagggtaaatcgcctcattaggaatataatgtgaaggagattcacaactttyccgacaggttcagagaggtcaactaaggaaaagaaggaggccagtcatggaaataggactctggcttgctgtgggtgtatacttgtcttgtctagtgcctgtaaacttactcattttaagaatgatatctgtcaagaaaggagaaaagtccccattagaaggtgaagacccagaaaaacctttcagaggtttgtcccagaggtcataggtatgaaatgcagtaatagacatccagttgagggagtctgaaaggcaagggtgagaaagcatagcaagaggtaacaatctgttggattaacagtagctttcattaaccctgagccgtccctcagcacaggtgggagggaaggaaaggttgttttcttttgtccagtttcatttctttatcctgtatgaaa

SEQ ID NO: 18805 - DNA, 505 bp, Homo sapiens
caagcttagctctgagtggagaatttattacatagtcatgatcttatttagcatgcagggtaaatcgcctcattaggaatataatgtgaaggagattcacaacttttccgacaggttcagagaggtcaactaaggaaaagaaggaggccagtcatggaaataggactctggcttgctgtgggtgtatacttgtcttgtctagtgcctgtaaacttactcattttaagaatgatatctgtcaagaaaggagaaaagtccccattagaaggtgaagacccagaaaaacctttcagaggtttgtcccagaggtcataggtatgaaatgcagtaatagacatccagttgagggagtctgaaaggcaagggtgagaaagcatagcaagaggtaacaatctgttggattaacagtagctttcattaaccctgagccgtccctcagcacaggtgggagggaaggaaaggttgttttcttttgtccagtttyatttctttatcctgtatgaaa

SEQ ID NO: 18806 - DNA, 1140 bp, Homo sapiens
caaaaatctggctttgcccctgagccatggtttgtggtgctgaccctcttcccaggaaaatacacgcatggcttatttcagaaggtttaaggtacagaccttgccctagaagatggcctcctgtttagtcaaagagaagagaagaagaaatgtgtttctttcaatactaaatatgactgatttaataaaaagtctcaaytggaattcaactccttttagatatatacgaccccattctatctttgcccagtaacttcttggagaaggtgatatgattcatgcactttagacagaggcaaatttggatcctaatttaggaaaaagaagcaaaatcagtcatatttgtaggtgttttgggtgcctgatttgggcgtatagacaagcctcctgcccaggtagcacacatatgcctcctacttctacactagctacaattcctcttctcattggtactcttactgatgggggcgttgaagactttgcctttggtggcttatctgaggggtctaacacatttaggcacaaatgcctgaaggaaaggcgcatagacaaccacattgtctgatgacagtcgactgcccaggtcagagcctggcagggtaagtccgaacagagaatctttagctttaccctgtcatagggactcagttagcaaacatcatctctcttataattaaggtaggctctaaaattgcatgaggaaagataagatgctttggtagctctttcaaaatgcttcttaaacgcacttctaaaaagttagcttctgtggctctcaatggcacagatcatgtgcctacatatgagtgagatgtagctggggttaaaatctataggcaagttctgaagactagagagaagttttccaaagcacatccagatcattgattcttaaataggggccaggactagggttgggctggtgtaggggaatgttgggggaaggcacacgcatctctgagtagaaaacccacacgcaccctgccatcgtgagaatcactgggtgtaataagaagtacagtttgtggcagtgtggtgaacacacaagtgataaggaaactaggaaaaatggttgcaggctgggacttagattatggtccattcaccccacttgcagacaagcaattagggtccaaggtg

SEQ ID NO: 18807 - DNA, 1140 bp, Homo sapiens
caaaaatctggctttgcccctgagccatggtttgtggtgctgaccctcttcccaggaaaatacacgcatggcttatttcagaaggtttaaggtacagaccttgccctagaagatggcctcctgtttagtcaaagagaagagaagaagaaatgtgtttctttcaatactaaatatgactgatttaataaaaagtctcaattggaattcaactccttttagatatatacgaccccattctatctttgcccagtaacttcttggagaaggtgatatgattcatgcactttagacagaggcaaatttggatcctaatttaggaaaaagaagcaaaatcagtcatatttgtaggtgttttgggtgcctgatttgggcgtatagacaagcctcctgcccaggtagcacacatatgcctcctacttctacactagctacaattcctcttctcattggtactcttactgatgggggcgttgaagactttgcctttggtggcttatctgaggggtctaacacatttaggcacaaatgcctgaaggaaaggcgcatagacaaccacattgtctgatgacagtcgactgcccaggtcagagcctggcagggtaagtccgaacagagaatctttagctttaccctgtcatagggactcagttagcaaacatcatctctcttataattaaggtaggctctaaaattgcatgaggaaagataagatgctttggtagctctttcaaaatgcttcttaaacgcacttctaaaaagttagcttctgtggctctcaatggcacagatcatgtgcctacatatgagtgagatgtagctggggttaaaatctataggcaagttctgaagactagagagaagttttccaaagcacatccagatcattgattcttaaataggggccaggactagggttgggctggtgtaggggaatgttgggggaaggcacaygcatctctgagtagaaaacccacacgcaccctgccatcgtgagaatcactgggtgtaataagaagtacagtttgtggcagtgtggtgaacacacaagtgataaggaaactaggaaaaatggttgcaggctgggacttagattatggtccattcaccccacttgcagacaagcaattagggtccaaggtg

SEQ ID NO: 18808 - DNA, 483 bp, Homo sapiens
gaaggcttgactgggcctggaagatccactcttcaaaagggtcactcacatggctgtgggctggaggcctactcacaactctccccagagcagatcacccaagagaaagagtaagccggcagacaccatcacttttatgtcctactctctgacatcacacacaatcacttctacattctatcactacaaacgagtcactaagaccagcccaaattgaggtggaggggaattaggtaccwtcttttgaaaggaatgttaaataatctgtggacgtattttaaatcatcacagtccaccacctggccacaaattatttctatttctcctacatgtgaaatactctcattcctctcaactcctcccaaaagtctcaaacttgtacaagatgtccaggtttgaagtccaggatgtaattatttaaatcagatcccaatacagagaagtcttctcaggtgtagttctgcagttttttttttttttttt

SEQ ID NO: 18809 - DNA, 527 bp, Homo sapiens
cccagcagctctgagctatctcatataaggcttagtagggaatcctgacccacactccaatctccaagctctagacatctcaccaacaaaacaggaagccaacacattctggatcttctttccaagataaagtcgaccaytcgtaatatttttttcagagacaacggaagctgaaaaataagagctgagaaaggaagaacttttctataagaacttaaatccaaaaggctatgggatagtaatggaaagtggaggagaacaaaaaaggcctggaaagtaaaaccaggaggaaaaacaaacgttttagaacagccaagtgtggggagttggaaagtgaagctttgagtagaaaccagagttacaaaatttcagagctgaaagcggccttataaggaagcagaattgggcccaaggcctaaatatttgccaaaaaccacgcaggcaattagtggcagacaagagaggaccttcatttttgctaaacagggctctttccactgaaacatgtggccctctcaatatctaac

SEQ ID NO: 18810 - DNA, 527 bp, Homo sapiens
cccagcagctctgagctatctcatataaggcttagtagggaatcctgacccacactccaatctccaagctctagacatctcaccaacaaaacaggaagccaacacattctggatcttctttccaagataaagtcgaccattcgtaatatttttttcagagacaacggaagctgaaaaataagagctgagaaaggaagaacttttctataagaacttaaatccaaaaggctatgggatagtaatggaaagtggargagaacaaaaaaggcctggaaagtaaaaccaggaggaaaaacaaacgttttagaacagccaagtgtggggagttggaaagtgaagctttgagtagaaaccagagttacaaaatttcagagctgaaagcggccttataaggaagcagaattgggcccaaggcctaaatatttgccaaaaaccacgcaggcaattagtggcagacaagagaggaccttcatttttgctaaacagggctctttccactgaaacatgtggccctctcaatatctaac

SEQ ID NO: 18811 - DNA, 527 bp, Homo sapiens
cccagcagctctgagctatctcatataaggcttagtagggaatcctgacccacactccaatctccaagctctagacatctcaccaacaaaacaggaagccaacacattctggatcttctttccaagataaagtcgaccattcgtaatatttttttcagagacaacggaagctgaaaaataagagctgagaaaggaagaacttttctataagaacttaaatccaaaaggctatgggatagtaatggaaagtggaggagaacaaaaaaggcctggaaagtaaaaccaggaggaaaaacaaacgttttagaacagccaagtgtggggagttggaaagtgaagctttgagtagaaaccagagttacaaaatttcagagctgaaagcggccttataaggaagcagaattgggcccaaggcctaaatatttgccaaaaaccacgcaggcaattagtggcasacaagagaggaccttcatttttgctaaacagggctctttccactgaaacatgtggccctctcaatatctaac

SEQ ID NO: 18812 - DNA, 561 bp, Homo sapiens
ctacttgggaggctgaggtgggaggatgacttgagcttgggcacttgaggctacagtgagcaatgactgccattgcactcagcctgggcgrcatagcatgacaccacctcaaacaaaacatgatgcttatattttctacaaatggcacatcttttagtaagagttgttttagagtcctaaggaatttgtgggacaccacgtgtttgcgcttctacagctgagatacccggcacacagaacttaaccgagtggatcaacagctgtaactttcgctgcaacagacctccatgtccttttgaaaagaacagtgacacctggagggtgtgtagctctttgggttgctgatagttactggctaggcgtaggtatcatattaagcagtggaggctgaaatatagatacctgtcatgcatgcaccagcacatgaattcttagtttctctaaacacacatctgtacccacctaaacttcactgtctacacagcctctaccaatacagaaacctcaggtgtcatggacaaaaacatacaagaacataggaaactctacaataattataaa

SEQ ID NO: 18813 - DNA, 561 bp, Homo sapiens
ctacttgggaggctgaggtgggaggatgacttgagcttgggcacttgaggctacagtgagcaatgactgccattgcactcagcctgggcgacatagcatgacaccacctcaaacaaaacatgatgcttatattttcyacaaatggcacatcttttagtaagagttgttttagagtcctaaggaatttgtgggacaccacgtgtttgcgcttctacagctgagatacccggcacacagaacttaaccgagtggatcaacagctgtaactttcgctgcaacagacctccatgtccttttgaaaagaacagtgacacctggagggtgtgtagctctttgggttgctgatagttactggctaggcgtaggtatcatattaagcagtggaggctgaaatatagatacctgtcatgcatgcaccagcacatgaattcttagtttctctaaacacacatctgtacccacctaaacttcactgtctacacagcctctaccaatacagaaacctcaggtgtcatggacaaaaacatacaagaacataggaaactctacaataattataaa

SEQ ID NO: 18814 - DNA, 561 bp, Homo sapiens
ctacttgggaggctgaggtgggaggatgacttgagcttgggcacttgaggctacagtgagcaatgactgccattgcactcagcctgggcgacatagcatgacaccacctcaaacaaaacatgatgcttatattttctacaaatggcacatcttttagtaagagttgttttagagtcctaaggaatttgtggracaccacgtgtttgcgcttctacagctgagatacccggcacacagaacttaaccgagtggatcaacagctgtaactttcgctgcaacagacctccatgtccttttgaaaagaacagtgacacctggagggtgtgtagctctttgggttgctgatagttactggctaggcgtaggtatcatattaagcagtggaggctgaaatatagatacctgtcatgcatgcaccagcacatgaattcttagtttctctaaacacacatctgtacccacctaaacttcactgtctacacagcctctaccaatacagaaacctcaggtgtcatggacaaaaacatacaagaacataggaaactctacaataattataaa

SEQ ID NO: 18815 - DNA, 561 bp, Homo sapiens
ctacttgggaggctgaggtgggaggatgacttgagcttgggcacttgaggctacagtgagcaatgactgccattgcactcagcctgggcgacatagcatgacaccacctcaaacaaaacatgatgcttatattttctacaaatggcacatcttttagtaagagttgttttagagtcctaaggaatttgtgggacaccacgtgtttgcgcttctacagctgagatacccggcacacagaacttaaccgagtggatcaacagctgtaactttcgctgcaacagacctccatgtccttttgaaaagaacagtgacacctggagggtgtgtagctctttgggttgctgatagttactggctaggcgtaggtatcatattaagcagtggaggctgaaatatagatacctgtcatgcatgcaccagcacatgaattcttagtttctctaaacacacatctgtacccacctaaacttcactgtctacacagcctctaccaatacagaaacctcaggtgtcatggwcaaaaacatacaagaacataggaaactctacaataattataaa

SEQ ID NO: 18816 - DNA, 968 bp, Homo sapiens
cagccagatgaagagatggatgggaggtggggcttccaggccctccctgggtgagccaccccaacccagtacctccagcaacccacaagctcatcacgttttgctgttcaagagttttcatagagcttgacctccagcccacctgcatgcttcccagaggttggtgagtggggctgaaagttccagtgttctaaccacttggcttttctggtaaccagtcccatcctgaggctatctgggtgctccatcctaagtcacctcaaaaagacactcccatccctcagaaagtcacaatagtttcaagacatgaactggtgacaaagaccaaatatattttacattatatcacaatctacttatgtcttgttcttttgttttggagatcactcatcatacctattctgaatttcaaattaaattatagaaagcaaaaaagaaaaaccacttaccccttctaatctgttgcctcatacatagctgctcttaacagttaatgggtagtcttcctgagtctgttctaaatccattcagatctatttatactcatagaaagacacatttgtatatatcaaaatcattatttatatgtgtgtgtatggtgtgtatgtacatatawaatttttttaaatttatatgtcatcaacatatttccacatcagtataagtagatctctttttttttttttttttttttttttttgagacagaatctccctctgtcacccaggctggagttcagtgtcgtgatttcggctcactgcaagctccgcctcccaggttcatgccagtctcctgcctcaccctcctgagtagctgggactacaggtgcccgccaccatgcccagctaattttttgtatttttagtggacacggggtttccctgtgttagccaggatggtctcaatctcctgacctcataatccacccacctcagcctcccaaagtgctgggattacaggcgtgagcc

SEQ ID NO: 18817 - DNA, 419 bp, Homo sapiens
ctcgctctgtggccaggctgggagtgcaatggcatgatctcggctcactgcaacctctgcctcacaggttcaagggattctcctgcctcagcctcctgagtagctgggattacaggtgtctgccaccaagcctggctaatttttgtatttttagtagagaaggggtttcgccatgttagccaggctggtttccaactcctgacctcaagtaatcttcctgccttggcctcccaaagtgctgggattacaggcrtaagccactgcacctggctctacaatatattttcttatcctttattcttaaagcttatttacatttttatattgaagtaatttcaaacttacagaaaaattataagaatcatactaaataattcatgtatatcttttaaccagattcacccattgttaatattttg

SEQ ID NO: 18818 - DNA, 543 bp, Homo sapiens
tattcagtaagtatttattgagcacatactatatggcagagattgtgctaggccctggagaatcgctgtgtcttcaaggagctcacactcagaggagaatggacaagcagacatgttacaggacatgatgtgtcaagggctgctgtggaaatagatgcagaggttgtaggaacaatcaggaggacaccaggagggcttcygtgaggaggtgatgtttgaacttggccttgaaagatgagtagcagagagtgtagccaaaggtgtgcagacaggaaacaggtagcctgactgtcattttaagatccagtagagcatcaaatgaaagggcaagatgtgtctggagaatcggtggctacatccatgtctggtggcatctgagtgccctgaggtagatttgcatctcactatgcaggtgctgggggatgtcaggaagatgacaacatcctcttgtcaggtgaagagctgtcacactgcaaataagagcaggtggtattcagagcaggaatttggagtctggtggccaggtttggattatgactatat

SEQ ID NO: 18819 - DNA, 551 bp, Homo sapiens
aagatgttgctgctaagaagctctaaaattgatcaaatcacttcagtaacgaaatcatagtcaagattttattaacaatcaatgaaagaaacaggagccttgactgtattagtcaaaaaagatattaataaagttttaataacttattaatcaagtttaccagttttatttgaaggaagtcataatttgtgtcatgaaatatctcatgtcatggttaaagtttatgtcatgaaccaatctggggcaacgtggaaccttacagtaggaagtgatacatggatcagcaaaggcctcataaattccagggtatgcttttcccattttctttcttggctccaaagaacagagaaggcaatgctaaacartgtttccttcctggagttgacactaagagtgtcctgaagatgtgcccaaaaacatggcaaacacagccaatggtggctctgtcccctaatgtctgtgcataacaattctctttatgaagcccatgaccgctcatggacagccacacaggtagcatctgaaagcaagcttacatcttggctaaggtc

SEQ ID NO: 18820 - DNA, 558 bp, Homo sapiens
tcagggtcacaaaagaatggagaagagggtaaacccagggcattgcctcactgaccctgcgcatcggcgtgggttcctttccctggcccttagggctgctctgggctttctgcctggccccagcactcacgtccggtgttgcggctgcgtggagttcaggtcatggatgttaggtcaagcaccagttctgcgaaacttgggatcttgctgctgctccctgacccagctctctggcagctgctccaggccccgtgcacaagtttcatagctgcagtttcacagagttcactctgtcgcccaggctggagtgcagtggcgcaatctcagctcattcccgggttcaatgaattctcctgcctcagtcccctgagtagctgggattagaggtgtgtgccaccacgctcggctaattttttttttttttttttttaagtacaaaaggggtttcaccgtgttggccaggctggtcttgatctcctgacctcaagtgatccgcctcggcctcccaaagtgctaggattacaggcatgaaccaccrcgcccggcctgacctcagca

SEQ ID NO: 18821 - DNA, 704 bp, Homo sapiens
tcaagaaaatttaataggaactcctttggttctcacattacgtacaccagtgataaatttgttaccaaagaaaggaaactctacaagttgagaaactaatgatataagaagctattaaagattgtaaactgctgtgtacgatagatattcacagctggtaatggaagttttaaaatagaagtcctcatgtcattctggttggtaaccctctgcaaagcctcaacaaaytgctttgtgatttatatctaatttgaatatgccataaactccccaagcagttacttttgagagaaatttccattttccttgaatttttctttctatgcttttgaaatttactcactagcgtttaagaataaacttaaacctgaggatgcacttctaatcacagtgtcttctaatacgattttccaggaagattagaatgtgctctctgcacaggcattaacttatcaaggtttattttggcaatcagggaactgctaataagctcaagaagaggtcatgattaagcaagaaatttattgattcctggtgtcctccatttatcatgaaatttacattataaatttcatgattgtacatagaaacatgttttgcaatatttaccttgcctttggcagagtttaaacaagatttgagaattgctcatttattttatcagcccttgactcaattcttaactctctaacttacgttgtttg

SEQ ID NO: 18822 - DNA, 520 bp, Homo sapiens
attgctacaaacttgatgacttaaagcaacggagatttattttctcacagttctcaaggcaagaagtttaaaatcactgttggaagggttatgctctttctttgaaggccctaggaaaaatttcttcccttcttttcctagsttgtcatgattgttgtcaatatatgtctctctctcttttcaaatgacatgattctctctgtgtctgtgtctccgtgtctacatttccctcttcttataaagatacaagtcatgttgaatttagggctcaccataatgcagtatgatctcatcgaaacttgattacatctgcaaaggccttatttccaaatatgactctattcagtgggcatgaattgggagttgggtattgagtaaatccaggatatattgctatcacattgtctagtcaagctttaatgcatgttcaaatactgttattttgcctctatagtaattcaagacaacttttcagccaccaagttccacgttgttttgaatgtgcatgtgtttgtttatt

SEQ ID NO: 18823 - DNA, 520 bp, Homo sapiens
attgctacaaacttgatgacttaaagcaacggagatttattttctcacagttctcaaggcaagaagtttaaaatcactgttggaagggttatgctctttctttgaaggccctaggaaaaatttcttcccttcttttcctaggttgtcrtgattgttgtcaatatatgtctctctctcttttcaaatgacatgattctctctgtgtctgtgtctccgtgtctacatttccctcttcttataaagatacaagtcatgttgaatttagggctcaccataatgcagtatgatctcatcgaaacttgattacatctgcaaaggccttatttccaaatatgactctattcagtgggcatgaattgggagttgggtattgagtaaatccaggatatattgctatcacattgtctagtcaagctttaatgcatgttcaaatactgttattttgcctctatagtaattcaagacaacttttcagccaccaagttccacgttgttttgaatgtgcatgtgtttgtttatt

SEQ ID NO: 18824 - DNA, 520 bp, Homo sapiens
attgctacaaacttgatgacttaaagcaacggagatttattttctcacagttctcaaggcaagaagtttaaaatcactgttggaagggttatgctctttctttgaaggccctaggaaaaatttcttcccttcttttcctaggttgtcatgattgttgtcaatatatgtctctctctcttttcaaatgacatgattctctctgtgtctgtgtctccgtgtctacatttccctcttcttataaagatacaagtcatgttgaatttagggctcaccataatgcagtatgatctcatcgaaacttgattacrtctgcaaaggccttatttccaaatatgactctattcagtgggcatgaattgggagttgggtattgagtaaatccaggatatattgctatcacattgtctagtcaagctttaatgcatgttcaaatactgttattttgcctctatagtaattcaagacaacttttcagccaccaagttccacgttgttttgaatgtgcatgtgtttgtttatt

SEQ ID NO: 18825 - DNA, 2828 bp, Homo sapiens
  misc_feature (1)...(2828): n = A,T,C or G
tnnnnnnnnnnnnnnnnnnnnnnnnnnnnnnnnnnnnnnnnnnnnnnnnnnnnnnnnnnnnnnnnnnnnnnnnnnnnnnnnnnnnnnnnnnnnnnnnnnnnttgtggggttcctagggaaaggtgagaggagcaggatctcatctccattctgagaatatcaaatgcaccacagatttggggcagagtgtggctggcatacatgaggaaatcattaagagaatatgactgcaatagagctgagagatgatggtggcctcacgagggaaggatgaagatggaggaagattagaaggacagagatggacaggtgatagkaaggtgacacaggcatatatggaaacgatgacttttgcttctggcttagggaaacagatggacaaaagtaccatttacccactgagacaggaacctcaaagaaggacagattgtagaagtaagtttggaacttgttgagtttaaggtgctttgaaatgcactcctaaagaaatccagcaggatgcatggaattatagaaatgcaagcacaatttaaaagtgagaaacctatggtaatttaaacctttgaagtagataagaacacctgggatttgcatttaccataaaaacatcaaaggatcaaagtatataccagagaggaacttagcatttaaggagtaagcaaagaattagagataacgtacaccacaatgaaaacaagtattatatgacagataggaggaaattgaggaaagaatgaaatcaaggaaaaaaatagtgaagagaagtgattcacagaaggaagacatggtcaacttggtcaccatgcaaaggggcatccttccaaagatctaaagagtgaaatgtttccagtgaaactggcaattagaagactggtgatttgcaaaagggcatgttcagtgggaaaagaataaatgagaaaatgaggacaataagttgagacaaccttgtcaagactgggtgtgcaggaccgagagagaggacagagacaggaggggacaaagtgtgtgttgagggggaatgtagggatggccatttggtttgataagagagagaaatttctacaatatgtatacgttaatgagctaatgaactggggctacaatagaggaagaggttgaccattctgaagtaagaaggaatatcacagggaacaagttccttgaagaagagaaggaggctgagatccaaaacaggagggagtagggaggatctggccttagaaagaggtccattctttccaggaagagccacatacaaatgaagtggtatgcaggagtacagggagattatgtagggacagtccctgcgctgttctggtttcattttgtttccctagtgcaggaagtgaagtgggtctcctgtcaggtctgagcacacgtggtgggaggtagacaacggaaggagggtataatttggaagattttgaacaattcaaattccagtagagaaagagcagaaggagaaaaagtggaagataaagagtagaggaaggaggtgttaaagggttgtccagcaatgttaagaactgagctaagttttagagactatggatttcaattggcaccattccacaacgtgcatattgtttccactggcagcctgacagcctcagcgaggggagtcccacgtttagaaggactcaagactgagcgctagtagatgcaggtatcatgatttgtccctgctgattggtctgttaatgcagatgcattgattgacaccgcctgatgtctcccctcaagaccaagaatgcatgttttatcacaaatggagcacattttatctggaggtcacatataagtcctgcacatccatgatagggcacgtggatattgggaattctagtcagaagcacagtcattaatatgaattattacattctggaaaaataggaataaactgagatgaattatttcttctcaactcaaaccatttccaccttttgttccacattagactgtgatcatgtgatctgcttttctcgtgacgacttaaggccttgcattaataatgagagaaagcaggatctagtaggagaacctcaaagtgagcactaagaataaaacatgctgacctaatgtctagcctgacccaacagacagccacaccctcgttgccccagaataattcacaaaaatctaaagtcttctcatagcattcccttacttaaaaatccttcaagagtccgtggtgcctacagaatcaagcccagcatccttagaatgctttacacaaccctcctgtataaggggataaagtccctgctgcttctccaatctctcatcctactccttcccacatagatcccatcttcctgtaacacggaaatatatacctcagagaattctaaactcatacagccatttccttcctaacttctaaaagatggtagtttttgtaatggaaacaatatcccaagcagtaaaagccattgctccaaccagattcagcctaatatcctcatcctgaaaagcaatttcctaaaggctctctagatgctaaagacagctattgattgccaatgagaataatgcactggtaattcgctaaacaatcaggagatcagcccagtcaccagcagctttaagatacaatagtgaaaacaaataagaacagaattgttcgtgacttattgatagtcatgttaaattttttatccactcatatgagagacagagagagagagagagagagagacttttcaatcataattttattgttttaattcagtccaagcattgtataagtgtgcataaaactataaacagaagccatccttggggaccttggcactacaagtgagtgccttgggatacatttgtttgtt

SEQ ID NO: 18826 - DNA, 543 bp, Homo sapiens
tcctattcatttcatagtgttctgttcagggttaaatgcaatatgtataaggaaccttgcacaggtgctaaatagctagctctayagaattagagtattggcttaacatttcatttgcataccttgacatggacttgaaaaccaagagaagttaaatgtcaatcctgaggtcatgtttaaatatgtttgtggtaatttattgtgtgtgtactctgccttcatcatgtcactgggcttctcaaatcctctggaaaggaatttttgtaatctcttcactacaaaaagtcataacatcttagaactgaaacagacctttgctgacatctggctttatttccttattttacaaatgagaattggtgagttgtttccttgatgaccaggatgcatccccagcaccctggtccacttcctggctcaggtgtgtgcttaacacccctgcatatctcagctgccttgcagtgtgagccaggactgctgtcagcttaacgtaagagtatccatgactaatagtggcttcaactcctgtttatttaactagcc

SEQ ID NO: 18827 - DNA, 543 bp, Homo sapiens
tcctattcatttcatagtgttctgttcagggttaaatgcaatatgtataaggaaccttgcacaggtgctaaatagctagctctacagaattagagtattggcttaacatttcatttgcataccttgacatggacttgaaaaccaagagaagttaaatgtcaatcctgaggtcatgtttaaatatgtttgtggtaatttattgtgtgtgtactctgccttcatcatgtcactgggcttctcaaatcctctggaaaggaatttttgtaatctcttcactacaaaaagtcataacatcttagaactgaaacagacctttgctgacatctggctttatttccttattttacaaatgagaattggtgagttgtttccttgatgaccaggatgcrtccccagcaccctggtccacttcctggctcaggtgtgtgcttaacacccctgcatatctcagctgccttgcagtgtgagccaggactgctgtcagcttaacgtaagagtatccatgactaatagtggcttcaactcctgtttatttaactagcc

SEQ ID NO: 18828 - DNA, 547 bp, Homo sapiens
ggaggtggagcttgcagtgagccgagatcacgccacagcactccagcctgggtgacagagggagactccatctcaaagaaaaaaaagaaattttgagttacttgaacatttagtggtaagtacagagagttcccaataccttytcaccaacccccaacttgtgaggggtttgtactgaagtctattttgtgtgatattaatatagttgctctagttttcttataattgatgtttgtgtattacttttcttttgctacttaatacagtactacaaaattagtgggttaaaacaacaatcattatttcagtttatgtagatcaaagtccagtcatagggtatctgggttctcttgtcagagtcgtacaaagctaaaatcaagatgttagccaggaatacagtctcatcctcagtttgggtgcccttccaggttcattcaagttgtatacagaattcagtttcttgtgttgtttgactgaggttcctgtttacttgatggctgtcaactgaaggttgttctcagctcttagaggccaccctcagacccca

SEQ ID NO: 18829 - DNA, 547 bp, Homo sapiens
ggaggtggagcttgcagtgagccgagatcacgccacagcactccagcctgggtgacagagggagactccatctcaaagaaaaaaaagaaattttgagttacttgaacatttagtggtaagtacagagagttcccaataccttctcaccaacccccaacttgtgaggggtttgtactgaagtctattttgtgtgatattaatatagttgctctagttttcttataattgatgtttgtgtattacttttcttttgctacttaatacagtactacaaaattagtgggttaaaacaacaatcattatttcagtttatgtagatcaaagtccagtcatagggtatctgggttctcttgtcagagtcgtacaaagctaaaatcaagatgttagccaggaatacagtctcatcctcagtttgggtgcccttccaggttcattcaagttgtatacagaattcagtttcttgtgttgtttgactgaggttcctrtttacttgatggctgtcaactgaaggttgttctcagctcttagaggccaccctcagacccca

SEQ ID NO: 18830 - DNA, 563 bp, Homo sapiens
tttttcctcactgcaagaaaagacgtgaaacaaactcaaataattgattgaattgaattaccttggaaacaaacaccatttaactatcacctacttttccaaataacaaaacatataatgtactatttctgttcagaacttttaaatrtaagtgttttatgtaatttttcactaggaaccttcaagctcttatagctttcaagatcatcagaggtaagcaaaaccaatcaaattttaaatggcttgtgtcattatcaattctgaaagcttgacaaaggtagcttaggaaatttagataaacagaacaaatgatgaattgttggaaatgcatgagaaacaaaaatgactattcatagaaccaaatagaagccttccattagaaacgaaaatcatcaatggttatatatgtatatataagtaaaacccaaagaacaaacagctaataaatacaagttagaagcaaaaacaaaaaaaaaacacgaaaacaaatttttctctactcagtttaccttggaggctacagtgttacccagaatattaaaaaaacacatgatggatatttt

SEQ ID NO: 18831 - DNA, 563 bp, Homo sapiens
tttttcctcactgcaagaaaagacgtgaaacaaactcaaataattgattgaattgaattaccttggaaacaaacaccatttaactatcacctacttttccaaataacaaaacatataatgtactatttctgttcagaacttttaaatataagtgttttatgtaatttttcactaggaaccttcaagctcttatagctttcaagatcatcagaggtaagcaaaaccaatcaaattttaaatggcttgtgtcattatcaattctgaaagcttgacaaaggtagcttaggaaatttagataaacagaacaaatgatgaattgttggaaatgcatgagaaacaaaaatgactattcatagaaccaaatagaagccttccattrgaaacgaaaatcatcaatggttatatatgtatatataagtaaaacccaaagaacaaacagctaataaatacaagttagaagcaaaaacaaaaaaaaaacacgaaaacaaatttttctctactcagtttaccttggaggctacagtgttacccagaatattaaaaaaacacatgatggatatttt

SEQ ID NO: 18832 - DNA, 563 bp, Homo sapiens
tttttcctcactgcaagaaaagacgtgaaacaaactcaaataattgattgaattgaattaccttggaaacaaacaccatttaactatcacctacttttccaaataacaaaacatataatgtactatttctgttcagaacttttaaatataagtgttttatgtaatttttcactaggaaccttcaagctcttatagctttcaagatcatcagaggtaagcaaaaccaatcaaattttaaatggcttgtgtcattatcaattctgaaagcttgacaaaggtagcttaggaaatttagataaacagaacaaatgatgaattgttggaaatgcatgagaaacaaaaatgactattcatagaaccaaatagaagccttccattagaaacgaaaatcatcaatggttatatatgtatatataagtaaaacccaaagaacaaacagctaataaatacaagttagaagcaaaaacaaaaaaaaaamacgaaaacaaatttttctctactcagtttaccttggaggctacagtgttacccagaatattaaaaaaacacatgatggatatttt

SEQ ID NO: 18833 - DNA, 780 bp, Homo sapiens
ccctcagggcccctcccatgacatgtggggattatggaaactacaattcaagatgagatttgggtagggacacagccaaaccatatcactatcccaccttaagcaatggatgattgtatactgtatatatcaaagagtatataaaacatatttacattttcaataataatattaaaatgagtatttgtgtaactaccatctaggttaagaaaacattgacagaagttccctctgaccctccaagatggtttctttttcatcctcttccccacagataactactgttctgactttttgatagtcattcgtttgatttttttttaaagacgcttttactacatawgtattccttcctcatatatgtaatttatcctcgtgcttatacaatttatgcaaatagaatgaccttgaatatgtcttttcattccttttttctttcatttaatattgcttgtgatttattcatgtttatatatataactatagtttggtcttttttaaagaaaaaatcatgaatataccacaaattatttatctattttgctaccgatgtacattttgcggtgtctacagtttttagcaattaccaaaaataatattatgaacattcttgctaggaatataattactggtagctgtgaatgtgcatgtacacattcactaaatgattccaagctgttttccaaaataggtgaagcaatttctacttccgcagtggtagatgagagctcatcttcaccaacacttagtattgtctaaaataatatttacatttttgcc

SEQ ID NO: 18834 - DNA, 332 bp, Homo sapiens
ttctaagtattcactgtttagcatctgaattgtatatagtaagtgctcattaaatatttttagattcattgaacactggaatgagatgagataggaccagtttattgtaaagcatctattatatgctgttcagcattatgctatggatttgcgagatttgattgaaaaaaatagtccccaaagagaaatctaatgagggaaaggaggaaggaactttagggaaattcagtgacaggactggmagaagaaacattttcagaacacactgaagattgagctgaacaatgccatccagctgtaactcacacagtcaggtgcaggactcgccaggt

SEQ ID NO: 18835 - DNA, 560 bp, Homo sapiens
tgaaacagatttcctaaatgcttcattttctggatgcaccaatgttgacctactatacatgttaaatggttttaaaatatcaccttaaaataaaggaaacttccagctactaactcagctctgaatgggctatgaaaggctccaaaggtatgtgaaaaattactgttattttgctttaaaaaatgtgatgtctaagagtgtctgcaatgttctaatgcttcaaaacatgtacgtaagccttgtttatctggaaatcatttctttctgcttatatcatttataaatagaaaatgttctgtaataacttaaaatagttccacatacataatgcttttmgtgtcataatacttactactggtctatatttaccaacatttatcacattttacaaaatgaagtagaagaaaaaaaagacaacgactttatggccctggaattccagtaatggtgaccaacatgttttaaattccagtaaaggttatggttacatttcaacaagtgtctctttcctttctcttacctctcctgctaacccagaggtaaatttaccaaaaaaaaaa

SEQ ID NO: 18836 - DNA, 507 bp, Homo sapiens
gcacatatctttgattgaaacccttagtacgtgtggctcagtcacttcttggctgaggtgagaacatgcctgtggaagacaagtctgtggcttggtgagcctgtgtgaccagctgtctctgatctgtgcagggtattaatgtatcagaactgagtgctctgggaatgctctagaggctggcaagggctcctgaaccagttgtagttcctgtcttgtcagtccaaaccataagactcagctttttttcttacctgtgttttcctgccagaacaccctgggctgttacttgscttgagttggaaacagtttgcatttacacctgtaaatttattcatccttctaatttatgtaaggtttttttttttggtatgcaattcttgattctttaagaggtgacaacaaattttggttttctactgttatgtgagaacattaggcccaagcaacaagtcattgcgtaagaaaacgtagagggctactgctgtttaaaaaaaaaaaaaaaaggtg

SEQ ID NO: 18837 - DNA, 778 bp, Homo sapiens
ctgtgacagacagagctggagcggcggggtggtggcagaatccagcggccgggagagtggaatgaatcttacttgttgaatatcttctggttactagttggattcatttgtaaaagaatcattttccgctgagtggaagacacttagtgtcatatttatattatacgtccacggatcaaaaagctttttgatttcccaaaggagggacataccactatatgagataagcttgacattacagccaagatggtgctgtcccagagacaaygagatgaactaaatcaagctaaagcagattatcttcgttcaaatggctacgaagaggcatattcagtttttaaaaaggaagctgaattagatatgaatgaagaaataaagtaggctggtgttttgggggaaaaaatggacatctgttattagattacaaaagaagtttatggaattagaatcaacactaaatgaagcaaaagaagaatttacgtcaggtggacctcttggtcagaaacaagacccaaaagaatgggtattttctgccagaaaaatacacattgagtggtcacaggagtccaatcattcgagtcattttccatcctgtgttcagtgttatggtctctgcttcagaggatgctacaattaaggtgtgggattatgagactggagattttgaaagaactcttaaaggaaggacacacagactctgtacaggacatttcatttgaccacagtggcaagtttctggcttcctgttctgcagctatgaccattaaaccatgggatt

SEQ ID NO: 18838 - DNA, 594 bp, Homo sapiens
acatgcttatgggctacagtatggtataagcataacttttatagtcactaggaaaccaaaaartttatgtgactcactttattgcaatattcactttattgcagtggtgtggaaccaaactggcaatatctcagaggtatgcctatagttaacaagaatatattgcatatgttcacaaagctggaagagaagattttgaatattctcagcatgaaaaaatgatatatctttaggtgacgtatttcctaattatcctgatttgatcattatatgcatgtactgaaatatcactctgtgcaccataaatatgcgcaattattttgtgtcaactaaaaataaaaggaaaaataaaaggcagagccctctgggaggagaagactaattaggcttagtgattgctaattctgggagctgcatgcaagcaggttttaaagaaggcagaaaacttaaggatgtggatgtaaaaggaagttacaatgacaacacaatttacagaaatcactcagtcacctggaggactccaatttcaaatgtgccatgcttggatatttgcttacattttgcacaatgacttttctgccatctcctgtgaac

SEQ ID NO: 18839 - DNA, 594 bp, Homo sapiens
acatgcttatgggctacagtatggtataagcataacttttatagtcactaggaaaccaaaaaatttatgtgactcactttattgcaatattcactttattgcagtggtgtggaaccaaactggcaatatctcagaggtatgcctatagttaacaagaatatattgcatatgttcacaaagctggaagagaagattttgaatattctcagcatgaaaaaatgatatatctttaggtgaygtatttcctaattatcctgatttgatcattatatgcatgtactgaaatatcactctgtgcaccataaatatgcgcaattattttgtgtcaactaaaaataaaaggaaaaataaaaggcagagccctctgggaggagaagactaattaggcttagtgattgctaattctgggagctgcatgcaagcaggttttaaagaaggcagaaaacttaaggatgtggatgtaaaaggaagttacaatgacaacacaatttacagaaatcactcagtcacctggaggactccaatttcaaatgtgccatgcttggatatttgcttacattttgcacaatgacttttctgccatctcctgtgaac

SEQ ID NO: 18840 - DNA, 594 bp, Homo sapiens
acatgcttatgggctacagtatggtataagcataacttttatagtcactaggaaaccaaaaaatttatgtgactcactttattgcaatattcactttattgcagtggtgtggaaccaaactggcaatatctcagaggtatgcctatagttaacaagaatatattgcatatgttcacaaagctggaagagaagattttgaatattctcagcatgaaaaaatgatatatctttaggtgacgtatttcctaattatcctgatttgatcattatatgcatgtactgaaatatcactctgtgcaccataaatatgcgcaattattttgtgtcaactaaaaataaaaggaaaaataaaaggcagagccctctgggaggagaagactaattaggcttagtgattgctaattctgggagctgcatgcaagcaggttttaaagaaggcagaaaacttaaggatgtggatgtaaaaggaagttacaatgacaacacaatttacagaaatcactcagtcacctggaggactccaatttcaaatgtgccatgcttggatatttgcttacattttgcrcaatgacttttctgccatctcctgtgaac

SEQ ID NO: 18841 - DNA, 2861 bp, Homo sapiens
  misc_feature (1)...(2861): n = A,T,C or G
tcacacatacagaagactgtataaaatgtacctgaacgatttaaagaataatcataagatgaacatttgagtatccacacccaatgctaaacaaaacaaaacaaaacaacaaaacaaaaaagcagcatcttacaaaacggtcctgtgtttctctcacatggtgtcttcctccctccctcaccagggctagcaaacctcctgatttttatgtcggtcatccacttgtttttctttataatttaccatttatgtgtgatctctaaacaatggattcttcagtttaaaaaaaaattagtagcaagcacaaagccagctgtgcaaagaaagggcaatgtagcccaataaacagaggccccaagagcacgtaacatgccgcagaacatcagaggctggctccgctgccccgatgatgacctaattacttggtattccaggaactgggccaagggacagcccggtctgccagaacatcaactccagcagggagaatgggggccatgccgcgngtgggcagagcaaggcagctcatgtcctgagaagcctgccacctcattcccacactggccttgtctccatcctccccatctcctgggaccaggggtattaggagaggggtgatcccgcacagagaccccccaccgcttttgggggtggaagactgagatgcactgaaggcatcgactgctgtgggcagggctggaaggtccctgaccgggggattaatggaggcatcatgagagtggactagggccgctctgtgttgctccctcggggagggagggcaatgatgcaagatcaagcagtcgggggaagatcctcagggaccgggcgggagctgaagacttccaagaacaaagactccggactctaatgctcagtatgaagtcctgtgactaattccccccatacttattcattcaatagcaggcaccccctcacccaccattcattaaagtctgttccatgcaaaaatgtcttctgagactgagttgtgaggtatcagtgaggggctagagttcatctctaggtttgatgtcacccaagatagagaacccagctaatgcagaggaccatgtatccgtggaactaatccagtgagagcagaagcttggaactgggctgtagagagctatggaaccccacagcaatttgatggtgatcttaaccagatgtgtaagagactatttaacccatgcactagcatctgtgctcctctgatgtgctcccatctctctcctacccgtctctctagactagaggccttcccgtgtgattgctggcaactccagtgcaggcactggctggcatttctttgtccctccagcaccacctcctgcctagtgcaatttatggtcatgatggttcagaaagaactttttgaagggatagcccatgccagattttatcatgacgcaactttgcttcaactggatgttagtgtagaatcaatctccttagttatttagaggaagcaggatgttcaagaaggtagacagcaaatagtggacacatttattttagggaaaagaatcattagagtgtgtattcttccagtcgtgcagtcattaatttaactatcataatgcaaatatttaaaaaggaagaaaattaacatttagtgagtgcctactgcatgtttcatatctttgattcttcctgggtttacaaaaagtatctctgaagtcttgtagtgtgtccactgagtttctctagtttcactaarcctccggacagaagagctccaggcagcacagcagtcaccttctgctccctgtcctggccgctcctgtcgggagagaaggctggggcgctgtggggcactgactacaggtctgtgccggagttccccgatgatgctggctgtaagtaatgagcgtggtctgctgggccttccatgcaaagttggctcagaaccagcaccctctccctgccctcaccggtgtggctcctatggggaaacagagtcagagctgaatggaggaaaagctctcagtgagggcagaaaatgaagttcacctggccagcccagacacccaacaaacaaaccaaaaacaaaatataaacaaataaacaataaataaatgccaagcaccatgtgaaacatttgcatctgctgcttcacaaacctacgagtgccaagtgtggtatatgaagatgagcaattctcacatctctctttagacaacagaatttaccaaactgcaagaaaaactgacctccagatgttaccgccacctgatgcatattgaatgagctcaaaacaagcttctgaatttggaatcatccttctcaaattgatggagaaagtgacaaaagtggaggcatttctgtgggtgtggagggtgccgagagccagatgtggcttcttgcagggacacagacctgcctccaagacaaagtattcatttggtggcccgggggccccttctcaggaatagttaataatattaacaactccaacacttcgtgaaattatttaggtaattagcaaataaagattacacctctaatttcttctttaaattctgatttggggccctagactcaaaaaaaaattgaggcattcgtaagtcgaagttttaccactacgagagttagcatttcctagtgtggagaaaaaaaatcagataaagaaattgcactggaaagtgaaattggattttttaaaaaatcaatgaagtaaccaggctattaaaatggaaaataagtctgatgtcattctgaaaaataagggagtgagtcacctgcagagccacttaattaagcacaggaagtaacaggagagcttgagtaattttccccgttaatgtcagtatttcaaaatgagtgaggcgttaggccactctcttttaatctgagag

SEQ ID NO: 18842 - DNA, 2861 bp, Homo sapiens
  misc_feature (1)...(2861): n = A,T,C or G
tcacacatacagaagactgtataaaatgtacctgaacgatttaaagaataatcataagatgaacatttgagtatccacacccaatgctaaacaaaacaaaacaaaacaacaaaacaaaaaagcagcatcttacaaaacggtcctgtgtttctctcacatggtgtcttcctccctccctcaccagggctagcaaacctcctgatttttatgtcggtcatccacttgtttttctttataatttaccatttatgtgtgatctctaaacaatggattcttcagtttaaaaaaaaattagtagcaagcacaaagccagctgtgcaaagaaagggcaatgtagcccaataaacagaggccccaagagcacgtaacatgccgcagaacatcagaggctggctccgctgccccgatgatgacctaattacttggtattccaggaactgggccaagggacagcccggtctgccagaacatcaactccagcagggagaatgggggccatgccgcgngtgggcagagcaaggcagctcatgtcctgagaagcctgccacctcattcccacactggccttgtctccatcctccccatctcctgggaccaggggtattaggagaggggtgatcccgcacagagaccccccaccgcttttgggggtggaagactgagatgcactgaaggcatcgactgctgtgggcagggctggaaggtccctgaccgggggattaatggaggcatcatgagagtggactagggccgctctgtgttgctccctcggggagggagggcaatgatgcaagatcaagcagtcgggggaagatcctcagggaccgggcgggagctgaagacttccaagaacaaagactccggactctaatgctcagtatgaagtcctgtgactaattccccccatacttattcattcaatagcaggcaccccctcacccaccattcattaaagtctgttccatgcaaaaatgtcttctgagactgagttgtgaggtatcagtgaggggctagagttcatctctaggtttgatgtcacccaagatagagaacccagctaatgcagaggaccatgtatccgtggaactaatccagtgagagcagaagcttggaactgggctgtagagagctatggaaccccacagcaatttgatggtgatcttaaccagatgtgtaagagactatttaacccatgcactagcatctgtgctcctctgatgtgctcccatctctctcctacccgtctctctagactagaggccttcccgtgtgattgctggcaactccagtgcaggcactggctggcatttctttgtccctccagcaccacctcctgcctagtgcaatttatggtcatgatggttcagaaagaactttttgaagggatagcccatgccagattttatcatgacgcaactttgcttcaactggatgttagtgtagaatcaatctccttagttatttagaggaagcaggatgttcaagaaggtagacagcaaatagtggacacatttattttagggaaaagaatcattagagtgtgtattcttccagtcgtgcagtcattaatttaactatcataatgcaaatatttaaaaaggaagaaaattaacatttagtgagtgcctactgcatgtttcatatctttgattcttcctgggtttacaaaaagtatctctgaagtcttgtagtgtgtccactgagtttctctagtttcactaaacctccggacagaagagctccaggcagcacagcagtcaccttctgctccctgtcctggccgctcctgtcgggagagaaggctrgggcgctgtggggcactgactacaggtctgtgccggagttccccgatgatgctggctgtaagtaatgagcgtggtctgctgggccttccatgcaaagttggctcagaaccagcaccctctccctgccctcaccggtgtggctcctatggggaaacagagtcagagctgaatggaggaaaagctctcagtgagggcagaaaatgaagttcacctggccagcccagacacccaacaaacaaaccaaaaacaaaatataaacaaataaacaataaataaatgccaagcaccatgtgaaacatttgcatctgctgcttcacaaacctacgagtgccaagtgtggtatatgaagatgagcaattctcacatctctctttagacaacagaatttaccaaactgcaagaaaaactgacctccagatgttaccgccacctgatgcatattgaatgagctcaaaacaagcttctgaatttggaatcatccttctcaaattgatggagaaagtgacaaaagtggaggcatttctgtgggtgtggagggtgccgagagccagatgtggcttcttgcagggacacagacctgcctccaagacaaagtattcatttggtggcccgggggccccttctcaggaatagttaataatattaacaactccaacacttcgtgaaattatttaggtaattagcaaataaagattacacctctaatttcttctttaaattctgatttggggccctagactcaaaaaaaaattgaggcattcgtaagtcgaagttttaccactacgagagttagcatttcctagtgtggagaaaaaaaatcagataaagaaattgcactggaaagtgaaattggattttttaaaaaatcaatgaagtaaccaggctattaaaatggaaaataagtctgatgtcattctgaaaaataagggagtgagtcacctgcagagccacttaattaagcacaggaagtaacaggagagcttgagtaattttccccgttaatgtcagtatttcaaaatgagtgaggcgttaggccactctcttttaatctgagag

SEQ ID NO: 18843 - DNA, 662 bp, Homo sapiens
cattaaatatgtgaacatttttacatatttgatgtatgtatcttcagcaaatattttctaagtagcctctatgttctacaaaccgtgatgggcactgtgtgagcaagtgaaaatgtgaataaggcattaaccctgaccttgaaaaactcactgtgaaagtgaagggataaatagaaattgatgccttacaaaataattcatatgcactaaagcacatataagtcaatgatggtggcagcccagggaaagaacagttagctytgacccttcagtagacgggcaggaagatggcatttgagctggactttgagaaagaacaggagtgtatcagtctaaaaagaatgggatggccaaaaaaaaaaagaaaaagaaaaaaaaagaaaggagtattttatacaacaaggcaagtgcaaaagcaataatggcaaatgaaagtttctctgctcggaaataagaaatctagaatggctagaaatggacctgaggatggaattgtagctggagcacccctgaagataccgattaaattccttaaagagttcagactcagaccactagctcagggtcactaatgttttctgcaggaaggggagtttgactgaattgtcactaatcttgacgctaaccttgtgatcccattgatacagggcaggtgaacccca

SEQ ID NO: 18844 - DNA, 662 bp, Homo sapiens
cattaaatatgtgaacatttttacatatttgatgtatgtatcttcagcaaatattttctaagtagcctctatgttctacaaaccgtgatgggcactgtgtgagcaagtgaaaatgtgaataaggcattaaccctgaccttgaaaaactcactgtgaaagtgaagggataaatagaaattgatgccttacaaaataattcatatgcactaaagcacatataagtcaatgatggtggcagcccagggaaagaacagttagctctgacccttcagtagacrggcaggaagatggcatttgagctggactttgagaaagaacaggagtgtatcagtctaaaaagaatgggatggccaaaaaaaaaaagaaaaagaaaaaaaaagaaaggagtattttatacaacaaggcaagtgcaaaagcaataatggcaaatgaaagtttctctgctcggaaataagaaatctagaatggctagaaatggacctgaggatggaattgtagctggagcacccctgaagataccgattaaattccttaaagagttcagactcagaccactagctcagggtcactaatgttttctgcaggaaggggagtttgactgaattgtcactaatcttgacgctaaccttgtgatcccattgatacagggcaggtgaacccca

SEQ ID NO: 18845 - DNA, 505 bp, Homo sapiens
ttttatgttaggcaagtgatcacttccgacgataggagtctatagcctgctgagcacacagcatggtgcggtgccatcttgtgtggtggttaaaaacagagggtcagattggcaactcagttttctcatctataaaatggggaatgcattgacacttatctaaagtgtcattgtaaggaaacaatgaaatcatctgtatggagtccccgggccctgttataatcactcaaagttaacttttattctattactataattcatggtatcattttcataggtgatttctggaatgctaacccattgcttttttaatgcctccttaatggcatttctttcaagaaaacctgataatatttaggcattaaattgaactatggctgccaggcctcaattataatgggatttcactatgttttagtgccaatcctcattctagatgaggttggggaagggcttagatggccaaggaagggaatattcaagctgtttccttttcaaagrtaat

SEQ ID NO: 18846 - DNA, 568 bp, Homo sapiens
tcaaacacacaggttttacaaacaatttgtgcagttaacgcaatcatcacaaggtcctggggcaacatacatcctcagcttatgaagatgatgggattaagagattaaagtaaagacaggtktaggaaattataagagtattgattggggaagtgataaatgtccatgaaatcttcataatttatgttcagagattgcagtaaagacaggcattaagaaattataaaagtattaatttggggaactaataaatgtccgtgaaatcttcacaatttatgttcttctgccacggcttcagccagtccctctgttcggggtccctgacttcccgcaacaacgagtcatgtaagtgtgccattttacaactaatccacctagcccacttacacccctgccaacatctgactgcaaccaaatgagaattgcccttcccaaacttctggaccacaaatggtaaacaaaatgaaatagttattattttataccactaaactggagtacaattttataggcagcaatagtaactagaacaaaaatttggtaccagagtatggcagtcaaactcaca

SEQ ID NO: 18847 - DNA, 544 bp, Homo sapiens
gaagaagagcattaggtgaaccaacaattcaagagataagtactttccctgctcygaagtactcacagcccattctcctcaacctttctgggctgtgtctggcaaaggcatttggttcagacaaggattaagtctgcaggaggcccagatttcactaacagcatgcttccctcaaggtgaccccctcctgtccttctctcacacccattccaccagcaaagtcagtgcagcagtgcgaagagatctatgtttcctttacgctcttctcattcacaacacccagtgtggcatttcaaaagtgcccattcacatcctttgcaattgtctctttttattattatatcctctgagggaaggaagtaggagtacttaaggatataagggcaaagttacttccagcgtagctctgacactaaaacttaacaaagccttgaggaccccattcagcatgttcctaaaaacatgcttctggcacacctgtcctagcctttcaccagctttccaccaggaattcccactcttccattcataattctgcagaact

SEQ ID NO: 18848 - DNA, 544 bp, Homo sapiens
gaagaagagcattaggtgaaccaacaattcaagagataagtactttccctgctccgaagtactcacagcccattctcctcaacctttctgggctgtgtctggcaaaggcatttggttcagacaaggattaagtctgcaggaggcccagatttcactaacagcatgcttccctcaaggtgaycccctcctgtccttctctcacacccattccaccagcaaagtcagtgcagcagtgcgaagagatctatgtttcctttacgctcttctcattcacaacacccagtgtggcatttcaaaagtgcccattcacatcctttgcaattgtctctttttattattatatcctctgagggaaggaagtaggagtacttaaggatataagggcaaagttacttccagcgtagctctgacactaaaacttaacaaagccttgaggaccccattcagcatgttcctaaaaacatgcttctggcacacctgtcctagcctttcaccagctttccaccaggaattcccactcttccattcataattctgcagaact

SEQ ID NO: 18849 - DNA, 599 bp, Homo sapiens
ttgcttctctcccgaagaattactttcttatcagcttaggcataaaccgaaaggatgctcaattatatgtgcataaaataatgattcaytgaagcattctatgaattttatgttcccccccaactccaaacacagacccagaatttgagataaagagacatatgcaatttaatattatttaatgcgtgacgagtctgatggaatagatattcaactcagtgaccttgaagtatagagtggctagtatgaacagtttgcatgctacactgtatagcctaaataacagagggcataataaagtaaaaactgtaaggttgtgatcagcttctactggtgagggagagagatgattaatggtgtaacgaagaaattatcatggtgtttctattttctacaaagctgttttcagcttcaaattagaagttactctttttgccaaaaagagtggggtataaaccacattccaattgctgcaataattctgacaaactcaaaggcagatagcaaagcatctggaaatgggcagatcaaaatgttgtcttgaaaaatagaaaaacaacctttccaatggaaaaatacctggtttgtagcattttgca

SEQ ID NO: 18850 - DNA, 543 bp, Homo sapiens
aaaatgttgaagttcacatgtcaactattcaattagaaataaaatatgggtcaagcatggtggcttatgtctgtaatcctggcactgtgagaggctgaggtgggtggattgcttttgtccaggagtttgagaccagcctgggcaacatagagaaacctcatctctgctaaaactgcaataaataaataaatatggaaataagggaaaaaatgttaagctaaagataaaatttgagaatcatcaccaaatgattggtcatagaccttcatgagctttcttattagtatatacagtggataataaagtggtttcgatttaggattctctcattatgaattagaagaatctggaaaggtttaatgggggaggtgagctgaatcatgaaaaactatagaatatggataatrcgagagatgagtaaaatgaatgaaattggtaggcacacgataaaaatagaaataaatagaaaagatatttttaattgaaagtaatgaaaatactaagccaaagtggcttaatcaaaaaaggaatccctagattcac

SEQ ID NO: 18851 - DNA, 548 bp, Homo sapiens
tttattcaactgaagtatcaacttttcaaaaagctttcccttcaaggaatataaaatgcctagacaaaggagatctggattgctttccaaaagactaaatccttttgttataattttccttataactgaatctacccagttttcaaattcccaaactagtatagatttagttttcaggtgctggtgaatgaaggaagtcttaaaccagccgtcaaaaacaaaactaacaaacaaaactatatcaactttaagattcccaagatttggtcaactaagcaactcagtctataacaaatttcagttgtaaagtgcaattcatggatttttctgtgctgtttgaaacagaaatgtaaacagcttttgcataacgcagagtgccagaaagcccaccttaatttcccaaggagcagaagttcaaacagctcgcagatagtaatccttgactggagaattctggggagcagccaactctgtttattacacagagaactgtgactttcttgcaaggaaagatcatgtttagkctcccaggaacattcagagatcat

SEQ ID NO: 18852 - DNA, 1382 bp, Homo sapiens
tgttttacctaataatttaaaatattccgtttcttcctctgtctctctgcctatcctttccttcttcattttaaacattcaaaagtaatatcctgatgaggctgactatgatgaagactatagttcttactattttgattccatattactcctaaaaaggaaaaaaattaatctcttgattgaatatcttgattataactgatgcctctgaaaatataatctttttagaagattctgctttcattctagcaatttttcattacctttgtaatcttgagcaaatttattaacatctctaagactcatacctcatctataggaagaaaataataattcaagaatattgtgataattaaaatgaaacaatgcatctggcaatgtgttaaaactattaattttataaactatgcaaaacaagatattttacatatacatttcacacattatcatgtccccattggaattttctggcatcaggtattagagctctaggcaattgagtttttatttttcattcatttatttggcatcgtgtggaaacatccaaacagccataaaccaactaagcatgaatatagttaagcatttaagtaaaatcctcaaaaagctggtttactctctttgtatgacggttaaagaaacatgggcacagagaagtaagggagaaacccaagggcaaaccagcagcttttctataagagcaagatttaagactcaggtgttcccaatccctcctactggtaggtttttactatttcacactggctttcttttcataagatggaggggaagtcagtgcttaytgacatagtgacttagtgatttagtagtgattatgtgacttagtgacatagtgacttagtgattatgtgggtttttccaaacaacaaacatgtgttgcatactttctgtgatagccaatgagaatttaaagatacatagagcataactgttgcccccaagcaacaatgtaataaagaaacaaatatatatgaagagaactgcaaaagactgcaaatatgtactttcatagaagtgtgtgcaaaaggtttggtgatgatactttaaaagggaccagagaagtcatagccagggttgatttccaaaaaggaagatatttgactgattttgatgagaaagagtaaggtgtgtgtgtgcatgtgtgtgtgcatgtgtgtgtgtctgcacatgcgtgtatgtggggaggttagaaaaatctgatataaatgaatgaaagagatcaactcaaataaaaacagatacatatatagaactagcgaggaataaaaaaaaaatggtgtaggccaggtgtggtggctcatgcctgtaatcccagttctttgagaggctgaggctggaggatcacttgagcccagaagttt

SEQ ID NO: 18853 - DNA, 623 bp, Homo sapiens
acaaagcagagccttgagtccaggtcttctgactcctggcccagaatcactgtcattgcaccaccctcaccaatgttctgacagcctgaggtgcctttcacccagaaatcagcaagtcaggagttaaatctatctttcatcagcaacaacattctgtccacatttctcaccacagaaccaaatgaacgaatgcatgttacccagaaatgcaagtgtttcacaactaattccaaaggatgtcaaagaagagtttttttaaattctctaggagaattccattgagcttaaatgattttatgcawaaatattaatgaaattgtgaatttatactaaaaaagtaaaggttaatggctacattagctgttttttcatttctcaaacactaggcaatccaaaatctaacatgcacatatacaagcaagagcaatttgcccaaagtattatattctattgctatgatacttcttggcttcaattaaggtcaaaagtcatctgaacagcttcatttcttctgacgaagatttaaattttacttaattagtgtgttgcagaaaacatcctcattttctggacatcagatccttccactcattttcatttctgcctgaaaattgctacttccc

SEQ ID NO: 18854 - DNA, 530 bp, Homo sapiens
ggctttctcccctcaacagaatggtccaaagtgcagcacacacaacctgtctgggtcacctacatgacatagcaaagagctatgtttccttgtgcaatgaagaacagctcagaaatgcaactaccttctatttatttgctttccttccttttctgcctcatgtcttttttttttccctgattcttgtgccctagaattccacttccaataaagccttaggacataaactttgccttgggctctgttttctagagcatctgggatgagatagatgcttataagctgtttgaccttggatacatgacttaacctctctgtgcttcagttttcttatttgtaaaatggagtcatgattcctagttcatgaggttgcagygagttaagtctactgaaggcacttagagtggtatgtaaacatccagttagaattcattgccaggtgcaggggcctacacttgtaatcctggcactttgagaggctgaggggggattgcttgagtccaggagcttgagaccagcctagagacctt

SEQ ID NO: 18855 - DNA, 518 bp, Homo sapiens
tttagtttaccagtttttttttkttgttgttgttgttttgagatggagtctcactctgtcgtccaggcgggagtgcagtggcactttctcggctcactgcaacctccatctcctgggttcaagcaattctgcctgcctcagcctcctgagtagctgggattacaggcgtctgctaccatgcctggctaatttatgtattttttattagtaaggggttttgccatgttggccagcctggtcttaaactgctgatctcaggtgatccacctgcctcagcctccctaagtgctgggattacaggcgtgagccaccgcgcccagccccttccctccatttttaagttgggttgtttgttttcttattgtttagtttttaattccttatgtattcaggataagcccttattagatgtaggttttgcagatacgtttttttcgttcatggctttttgtttctttccacaaaagtttattcttaaatgtacaacaggctccattacaacacttcagtccagctat

SEQ ID NO: 18856 - DNA, 518 bp, Homo sapiens
tttagtttaccagttttttttttttgttgttgttgttttgagatggagtctcactctgtcgtccaggcgggagtgcagtggcactttctcggctcactgcaacctccatctcctgggttcaagcrattctgcctgcctcagcctcctgagtagctgggattacaggcgtctgctaccatgcctggctaatttatgtattttttattagtaaggggttttgccatgttggccagcctggtcttaaactgctgatctcaggtgatccacctgcctcagcctccctaagtgctgggattacaggcgtgagccaccgcgcccagccccttccctccatttttaagttgggttgtttgttttcttattgtttagtttttaattccttatgtattcaggataagcccttattagatgtaggttttgcagatacgtttttttcgttcatggctttttgtttctttccacaaaagtttattcttaaatgtacaacaggctccattacaacacttcagtccagctat

SEQ ID NO: 18857 - DNA, 553 bp, Homo sapiens
cattttgggattgttaggcaaatctaaaaatcaaataactaataaagttacagtaataaattaatgtttcctcttgaaaattggagagatggaggacactgtatgatgtcctcatagaatactcatgaaaaataaggaatatatcatatgtacagtgtttggcacagagcttgaataaaataagcactgaaatcttggctattattattactgctattgttattctcatgttgttctatagatacttttctttttggtcttagcaattctatactgtgcttatctatggcattatagcaaatcctgccaaagtactcctagtattgatattttctttttttttttttcctattttggtaatagaaccctttgagttttatttggacatatatttgcccagctagagacaacatttaccattttcttagcaattaagttcaattgccattttyttcctgccttgtgactaagttctcaaataagaaatatgagaaaaaaacatatatttttttctaagccattccactaaaataactgggcagatttctctttc

SEQ ID NO: 18858 - DNA, 590 bp, Homo sapiens
caattgatatgttaacattattctcctgtaagaatctcactattcccagtctcagagcatcatactctgcatactgagagcattaaaaaactatatttcatcaaatcttcatggactatgattcaccgttattatrttcgttactaagaaagaaaaactctgccagttaagctatggcacaatgatgcggatgtcatcaattataaaatttaccctgacttcataaaggttaaaatatgaaaaaacaaataaattgtataaaacttgtgagttagcagccaactagctgagtacataattagcatggagataacatgaccttaggaaaaggatgtagcagactaatttaattagttattatcattaaaaaaataaactctctaaataaggaagcaagaatagacacaatttgtgggatttcatcaagcatttgtttacgtctcaaatgatattttcagcagtaatctgtgcagatgtagtccagaccatgctattctgacatgatttgttgaatggtctgatgttccttttatacagacattcattgaaaaggtgtcatatacaggcactgtgcatggattttaggtgca

SEQ ID NO: 18859 - DNA, 536 bp, Homo sapiens
agtggaatttggacaagcccctcacccctcaccctggggttggccgggagccctttgttaaacattgaccagggtacgggcacctccaatctgagattccctttaaagtcacgctgcagtcgtatatttgtacagcaccaaggcaggggaggatgatcttgtgtgtgccaggctggtgccctccaactggcatgttttaaggcttaaccaccccctccacctgctcgcctgaagtcttttcaccaataaatggttagtcctaatagaaaggaagggtccacccaccattgcactaaaggaggggctttgctggtttcagtggcatctagatgtcaccggctgataccttatcctaggaacagggtgtgactgagacagagggaaccgccagggcagttctaccttaaggagtggggagagggggcygtgggaacacagtgtaagaggagggagaggaagcaaagcctcacccacctggcttttctgccagcaccaccctggaatgtggctctgtatgtcttaattcacttattcca

SEQ ID NO: 18860 - DNA, 526 bp, Homo sapiens
ataatcatgtttcttatctcataagatgtcacacagtgtgaaaatccaaaatagacttggtttcatgcacgagtcaaaatttgagattaattttgcaggcctctagtacatctaaaatacaaatttagtacacaagtaaccttggaaactggattaaagatcatgtgttagtaaaacaagattaacctattttcactttatcagagattttctacactatccaatagttatttttaattgaatgtagctattaggcaattgaatgtgtcacagaaatcctacaaacgtgcaagtttttcccaaatcttaccaagcagagcttgataaatagaaaaagactgggaagttggctaataaaaatccccatactttaaaatgartagctgacaagaaatccaagcagcaatggcaataactatgtgaaataattttttctggctctgctgtaaatgctgtagttcactattaaaataaaagtatttttctggagactagttcaaggaaaaaagaaacttgtgctaagggg

SEQ ID NO: 18861 - DNA, 531 bp, Homo sapiens
gagataaaggaacaatcataaaatgcatgtcatcagcaaaagccaaagttactatggagagactgataaaaatataccatgattatgcatgaaattaaaaaagaatatccacaaattctaaatatcatgaataatgaggaaatcattatagattctatagtcaygagagagaaaaagagaatgtaataagtaactttaagtcaaaaattgtgaaataatttgatgaaatagaagacatttctaaaaaatcgtaaatagtgacacaagaatagcaaatctgagtagctctatatctgttaaaagtaaaattgtaattgaagctttccaaatgtagtgagtctaaatcaagtaaaatattaaaaatctgaaatgtttccaggaagaaacattgaattcctaatataaaatataacatattatattcaatccctttactgaaaattgtgaaagattaagagaaattaaagacattcaacagaaataaagatgtaccatgtttctttgttattcctagtattagaagaaagagtc

SEQ ID NO: 18862 - DNA, 331 bp, Homo sapiens
gtctcaaaaaaaaaaaaaaaatcaagaagataatatataagaaataaattccttcatcaaaaaggaaaaaaacacaatcaaaccgttttatgcagttgttttaaaactaaccagtgagtgaatgagggtgagaaagtgaaaacagagctttctgcaacagaccaccacttctcagagtacgatatatatatacatatatayatacacacacgtattttatatatatatatataaaactaaactaaaagaaaaagttcttagttttattctggcccttatctatcagtttcgagcagcagataattgtatttccaagacataagggagtgtc

SEQ ID NO: 18863 - DNA, 587 bp, Homo sapiens
cctgtagtctcagctacttggggaggtcgaggccgcagtgggccaagatttgcactatttcactcaagcctgggtgayagagtgagaccctgtctcaataaaaaaaaaggaaaagaaaaagaaatgtcttggtctaaggaaagagtagtgggcaaagatgcaagatatttaagatagtagctttgagaattcatcatggaggataaaagagagggaagggtaaagaacagtgggccgggaacagtggctcatgcctgtaatcccagcactttgggaggccgaggcgggcggatcacttgaggttaggagttcaagaccaggctgaccaacatggtaaaatcctgtctctactaaaattacaaaaattagccggatgtgttggtgcacgcctgtaatccttgctacttgggaggctgaggcaggaaaatcgcttgaacctgaaaggcggaggttgcagtgagctgagatggcgccactgcactccagcctgggcaagagatggagctccgtctcaagaaaaaacaaaaacaaaaaaaacagtgcccagatcagataaagaaattaacatttatatatattaatatgca

SEQ ID NO: 18864 - DNA, 587 bp, Homo sapiens
cctgtagtctcagctacttggggaggtcgaggccgcagtgggccaagatttgcactatttcactcaagcctgggtgatagagtgagaccctgtctcaataaaaaaaaaggaaaagaaaaagaaatgtcttggtctaaggaaagagtagtgggcaaagatgcaagatatttaagatagtagctttgagaattcatcatggaggataaaagagagggaagggtaaagaacagtgggcygggaacagtggctcatgcctgtaatcccagcactttgggaggccgaggcgggcggatcacttgaggttaggagttcaagaccaggctgaccaacatggtaaaatcctgtctctactaaaattacaaaaattagccggatgtgttggtgcacgcctgtaatccttgctacttgggaggctgaggcaggaaaatcgcttgaacctgaaaggcggaggttgcagtgagctgagatggcgccactgcactccagcctgggcaagagatggagctccgtctcaagaaaaaacaaaaacaaaaaaaacagtgcccagatcagataaagaaattaacatttatatatattaatatgca

SEQ ID NO: 18865 - DNA, 560 bp, Homo sapiens
cagcagagacttagttcccctctaagcccagatgcctctggaaaccaaacacggaaagaagctgaaaggtagcaaaacctttattgggttgcccttgtcaaattttattaagatccttgcctggtgttgtgattgaaaatgtccagaatctggaaatagaactgtgttgaaattctagctgtactacttactaacttggaaccttgaataaacgaacttctttgagtttccatttcttcaactatggaatgaggctaaagataccaatatgtcagtgttttaaagtgtcaatatatttaactccatgtatcaccatgcacacattagatcctccacaactgttaatcccctttccttggatcagtgctggtttccttaagatccctcrtgtatgcttagtaagcagggagttatgtgaagacatttctcaccatcttgggtgtttgttacagtgtttgacacatgcaaggtaattcataaatactcgatgattgatggattgactggtgtgatgagtaagactgaggcagagttagagaatccagtcctttggacctcac

SEQ ID NO: 18866 - DNA, 594 bp, Homo sapiens
tcctagttgtttytaaatccccagatgtaataacagacagcagaaatgaacccaagttaccccaaacagtcaacgtctaatatattttgttccccaaatgagccaaaaaccacacaagctaaaaaacagtgggtttaaaatttaacctaaatttaacagtagcagttttaccatatgtaaaaattggcaaagtcataacttaaatatccatagtctgttattctggaaaaaatacaattattatggcattttttagaaaagaaaaatacattaaatatgacaaaatacacccactcacttatcatatctttgaaataaaaatgattttattcttactcttaaatatttaatatttagatgagactttcaagtgttatagctaccattcatgaattaaagtagccttaggggaaatagtgttttatattaataattaagattgaagctcctgggatgtaaaataatttctcttggatacacagctagtgacccaacaagctcatatatgtttgatttaaaaattttaattttcccactgttgacaatgttgacataacagctaaatctgagtcttagagttgataatttggaata

SEQ ID NO: 18867 - DNA, 602 bp, Homo sapiens
gggtaaatctacaaaaaccagaccagggtatctactctggagtcctctgtgatgttgacatggcaggaaaatagaagtgactaggaaagattgaaagaactgaaaatgctttctctggagaagaaaatggctggtgggagctgtcttasagccagggagccccccactcgggggacaggtggaggtcgggtggcaggcatggtgggcaaggctgaaagaaatgggcttctgctgcaaccggatcttcagttagactccggaagactcaggaagccctctgactctggagccattccgcatctccgtcaacggaggagccattcttcctggagccaaggggaggaacagttgtcttttgagccaagactttcaaggagtctcttttccagctgccttgaaaatactcccatgacctcctctccccatgacccccaagccccagactgtgccctccaggctgtcccagggttactgtgcctgtgagatgtgacctgcctgtttctcccaccagggccccccaggttttcctggtgctgttggctcccccggattgcctgtaagaacctagcgctgctcgacctcccctcccccccgtcagccag

SEQ ID NO: 18868 - DNA, 602 bp, Homo sapiens
gggtaaatctacaaaaaccagaccagggtatctactctggagtcctctgtgatgttgacatggcaggaaaatagaagtgactaggaaagattgaaagaactgaaaatgctttctctggagaagaaaatggctggtgggagctgtcttagagccagggagccccccactcgggggacaggtggaggtcgggtggcaggcatggtgggcaaggctgaaagaaatgggcttctgctgcaaccggatcttcagttagactccggaagactcaggaagccctctgactctggagccattccgcatctccgtcaacggaggagccattcttcctggagccaaggggaggaacagttgtcttttgagycaagactttcaaggagtctcttttccagctgccttgaaaatactcccatgacctcctctccccatgacccccaagccccagactgtgccctccaggctgtcccagggttactgtgcctgtgagatgtgacctgcctgtttctcccaccagggccccccaggttttcctggtgctgttggctcccccggattgcctgtaagaacctagcgctgctcgacctcccctcccccccgtcagccag

SEQ ID NO: 18869 - DNA, 602 bp, Homo sapiens
gggtaaatctacaaaaaccagaccagggtatctactctggagtcctctgtgatgttgacatggcaggaaaatagaagtgactaggaaagattgaaagaactgaaaatgctttctctggagaagaaaatggctggtgggagctgtcttagagccagggagccccccactcgggggacaggtggaggtcgggtggcaggcatggtgggcaaggctgaaagaaatgggcttctgctgcaaccggatcttcagttagactccggaagactcaggaagccctctgactctggagccattccgcatctccgtcaacggaggagccattcttcctggagccaaggggaggaacagttgtcttttgagccaagactttcaaggagtctcttttccagctgccttgaaaatactcccatgacctcctctccccatgacccccaagccccagactgtgccctccaggctgtcccagggttactgtgcctgtgagatgtgacctgcctgtttctcccaccagggccccccaggttttcctggtgctgttggctcccccggattgcctgtaagaacctagcgctgctcgacctcccctccccsccgtcagccag

SEQ ID NO: 18870 - DNA, 544 bp, Homo sapiens
gaaagaatatgctcagtctcaatttgttagattcaatcatttcttgtctcattgcaatctgccctctaagcaaggtttcaaattgcttcctaattatgaaatgcaagagaaatttccactctaatgtttctctctcacttccttttcaaaacaactcctagttctttcagtttccatgactctgcactcatttgatcttgtgaaatatttctgcttatattttctgttttctgtgcgggttcctcttctgcttactctataaaatgtcagttaccgaaggaagtataatcgtggtttcaagtaccaatatataccgatggccaaaaaatctgtttttgcagctcaaatagctctggcattcagatacatatgtttatrttccttttcatgggttccatctccatagctgataagtgccataaattcaatatcaaaactcaattccacatctttgacctgattctccaactacacatagaaccaccaaaatactatatgttggattgaaagaattctatcagctaaaattcgaggtcatattgtt

SEQ ID NO: 18871 - DNA, 544 bp, Homo sapiens
gaaagaatatgctcagtctcaatttgttagattcaatcatttcttgtctcattgcaatctgccctctaagcaaggtttcaaattgcttcctaattatgaaatgcaagagaaatttccactctaatgtttctctctcacttccttttcaaaacaactcctagttctttcagtttccatgactctgcactcatttgatcttgtgaaatatttctgcttatattttctgttttctgtgcgggttcctcttctgcttactctataaaatgtcagttaccgaaggaagtataatcgtggtttcaagtaccaatatataccgatggccaaaaaatctgtttttgcagctcaaatagctctggcattcagatacatatgtttatgttccttttcatgggttccatctccatagctgataagtgccataaattcaatatcaaaactcaattccacatctttgacctgattctccaactacacrtagaaccaccaaaatactatatgttggattgaaagaattctatcagctaaaattcgaggtcatattgtt

SEQ ID NO: 18872 - DNA, 547 bp, Homo sapiens
gaagtgaatgattatagttttttcaccctttctcagaaacctcacagtgtgggagcaaagtattcctttccccaggataaaagagagaaagtaaattgagccataacaaatattagcccacgtatgctactaagtgttcmcaaaaattggaggttaaataaatccaccatgtggctttcagagttgtggtatagtcaggggcaacacccataaggactttatttctgaatgctttttgagaatatgcccatgattaaactctgtgctgtcatttaaaatgagggaattaaacaaccagcaattaatatcacactggagtattacagtcatatatgcaaggatttagataccttttattaaatgtattattttaaagcatataaatatttttaattgtttccatttctaccaaaagtcttatttacaaagggatggatgctgctggggtaagatgacagactcaggcaatcttcctgggcagggattgagaacattttttgtaaaagttcagataacaaatattgcaggctttgcctaagaataggct

SEQ ID NO: 18873 - DNA, 547 bp, Homo sapiens
gaagtgaatgattatagttttttcaccctttctcagaaacctcacagtgtgggagcaaagtattcctttccccaggataaaagagagaaagtaaattgagccataacaaatattagcccacgtatgctactaagtgttcacaaaaattggaggttaaataaatccaccatgtggctttcagagttgtggtatagtcaggggcaacacccataaggactttatttctgaatgctttttgagaatatgcccatgattaaactctgtgctgtcatttaaaatgagggaattaaacaaccagcaattaatatcacactggagtattacagtcatatatgcaaggatttagataccttttattaaatgtattattttaaagcwtataaatatttttaattgtttccatttctaccaaaagtcttatttacaaagggatggatgctgctggggtaagatgacagactcaggcaatcttcctgggcagggattgagaacattttttgtaaaagttcagataacaaatattgcaggctttgcctaagaataggct

SEQ ID NO: 18874 - DNA, 585 bp, Homo sapiens
gaatcatggggatggtttcccccatgctgttcttgtgatattgaatgggttctcacaagatctgatggtttcataagggaccctaccccctttgctcactctatctcctgccaccttgtgaagaagttgcctgtttccccttctgccatgattgtaagtgtgaggcctccccagccatgtggaactgggagtcaattaaacctctttcctttataaattacccagtctcragtatttctttatagcactgtgaaaatggactactacaggagtattggctgctgtttgttcctatatgataattccccttgaccaaagaaatctgtctgtatgagtccattttctgctgcttataacagaatactgaaactgggtaatttataaagaaaaggaatttatttcttatggaagttgagaagtccaaggtcgaggggccacatctaatgagggccttgttgctggaggggactctctgtagagtcccaaagtggtgcagggcatcacatagtgagagggctgagcatgctactcgtgtttctcttcctctttgtataaagtcaccaggctcactcccatgataaccca

SEQ ID NO: 18875 - DNA, 585 bp, Homo sapiens
gaatcatggggatggtttcccccatgctgttcttgtgatattgaatgggttctcacaagatctgatggtttcataagggaccctaccccctttgctcactctatctcctgccaccttgtgaagaagttgcctgtttccccttctgccatgattgtaagtgtgaggcctccccagccatgtggaactgggagtcaattaaacctctttcctttataaattacccagtctcgagtatttctttatagcactgtgaaaatggactactacaggagtattggctgctgtttgttcctatatgataattccccttgaccaaagaaatctgtctgtatgagtccattttctgctgcttataacagaatactgaaactgggtaatttataaagaaaaggaatttatttcttatggaagttgagaagtccaaggtcgaggggccacatctaatgagggccttsttgctggaggggactctctgtagagtcccaaagtggtgcagggcatcacatagtgagagggctgagcatgctactcgtgtttctcttcctctttgtataaagtcaccaggctcactcccatgataaccca

SEQ ID NO: 18876 - DNA, 505 bp, Homo sapiens
ccatctccatgattgttctccataaccctgctgtaggatttgataaaaagagctcctgctctggctggtgaaagcataccaactgattatcaacctcaggaacatgagtcacaattattttcaaaaaccagcttattttgtacaagatactgaaaatgcacaacatagattccaattaaattctttgtttttgtattttcgatatcataggctacccaggtggacatgagagccgctcaagtagctcaagatgaagtaagttaatgagtttagstgatattctttggaaatatcctagtatatttctatctgcacctctgcagttaatgatattgactgtattttgtttaggaaatcgctcgacttctaatggctgaagaaaagaaagcttacaaaaaagccaaggagcgggagaaatcatctttggacaaaagaaagcaagaccccgagtggaaggtagagtgtgttttgtttgttttctaattagaaataaaattagaaatga

SEQ ID NO: 18877 - DNA, 653 bp, Homo sapiens
aaataacataccactttccctacagcttactggcacttggattttctttgaagatggcaaatttagaaacttattttctcatagttctggagtttgagcacttcaatatcaaggtgccagccaattcagaatctgctaaagggctgctatttggttcataggtgattcattgctgtgccctcacttagtggatagagcaaacaaactcctttgggcctctattataaagatactaagctcattcatacaggtggagcctaatcacctccccaaaggccgtaccttctaataccattaacttgggggctagatttttaacataygaattttagggggacatatagcaaagtcccactagactttccttagaatcaccaagactgctcattcagacagctactaccaaacctaaggaggctgcaaaacaagtgcttttacagcaagtctaaattctctgtgtatttctgatcaaaccccacagagcatttaatgccagttcttaacgagagggatagggaagaaaagtaatgaaatgagaaaaaacaaaatgtcatcccacgctgggctttgttctctggaattctcagacaatttattgtagttttgttctcgggaattagtttgtttaattgggaaagccttgcatgccaaca

SEQ ID NO: 18878 - DNA, 511 bp, Homo sapiens
cagccaaagtttagtttgggttttttttggtttttgtattttttttttttttaaaaagagggktttttttctcacccaagtttatggaccctctaactccagaataaaaaccctgcctcgggacattacaaagatgtacttcaggatatgagattttctatactttttttctttacaatgttttgtaaagaatgcctgtttttagacttaggaccacagggaacttggaccgtgccatcacgccttgtaactattttgcatgattacttgtagcaatttttaaaaatcaactagtttattttttaatgatgcatagattcttatttgaatcagaaaaaaaaaatgaaaaaattattctgctgttacctaccccacattcacacccaacactctcagtattttttctcctgaagtaaacattgttaccagattgtgtatgctttccaaaatagtctatttatttgtaagcatacatatccacatgcgtatatgtatgtttgagtgtttttgc

SEQ ID NO: 18879 - DNA, 511 bp, Homo sapiens
cagccaaagtttagtttgggttttttttggtttttgtattttttttttttttaaaaagagggttttttttctcacccaagtttatggaccctctaactccagaataaaaaccctgcctcgggacattacaaagatgtacttcaggatatgagattttctatactttttttctttacaatgttttgtaaagaatgcctgtttttagacttaggaccacagggaacttggaccgtgccatcacgccttgtaactattttgcatgattacttgtagcaatttttaaaaatcaactagtttattttttaatgatgcatagattcttatttgaatcagaaaaaaaaaatgaaaaaattattctgctsttacctaccccacattcacacccaacactctcagtattttttctcctgaagtaaacattgttaccagattgtgtatgctttccaaaatagtctatttatttgtaagcatacatatccacatgcgtatatgtatgtttgagtgtttttgc

SEQ ID NO: 18880 - DNA, 510 bp, Homo sapiens
taaaattaaaaaacaaacagacaaaaaagactagaactcaatatttcattagaatcttttccacttcactatactgcttttcacagatagcagtacagcaccataaataaattcagtcttttccccataggtcttcatctctcctctttttgtctttattctctgtattcacccttcagagattccatttttccacattgttcttatcttcagcyaatatatggtaaattaatcacatcaaagtgctagacacaaaggaaattcatcccttcgtcccttgtgattgcttttgaagaaagagcgatataaacggaaggtccgtgatccaagccacaatcatggaatttcagacagcatggcacctgaagagatcagaggaagtcatgtggaagttcttcccttcagatcacaattctgaatgcaccttccttctctgtaaatgttctaaggctgctactgacacgacaattataaagctatcttttttgtaataagggatccccaatctta

SEQ ID NO: 18881 - DNA, 1885 bp, Homo sapiens
aagcacacaccaggatcaagtgatatggcatttatttacagcaagagggtagacagtgtgtgcacaagatccagcccctggcaatgcattggtctcccatggccaggggatccactctgaagcagatgaggtgatatggctgcatgcaccttgtttcatgctgcagmagaagagcttctccccctctgccaccaggatctaaaatatggaaactggcatttgtgttactgccaacaagaaggtgttatttctttttttcactagctgacaactcagggcatgcttaagggccatcgacacatgcacttaagcaggataaaggattatgtaccaagcgtggagcagggaaagatattccctcatgagagaccagcctagcactgatgatgaggacactttatcttccagtaaagttacacacccaagaccacttttattgggacagtgcaggtggcaagcactgcacagaactgcctttcccaacagtcaatcctctaactcatgcctggcccctgaaatagcagacaaagcacatccaatctgggaggataactgtttacactgaatctggaggcagagctgggtcagatgggaaccatgaacaaaccttatggatgctgtggatgagattttctttttttgcagagtacctctgtcattttgagatagtgccttaccagggtcaccaggagaaccagtcccaggaggatgttcagttctcactggagaatagtcttcaaccggaagcctcaaactcaatgaaagagtctaaaacaagagtctaagagaaactgcagacatatagctgacaatcattctgcctgagcttagatcgcctccagttgggtttctgccttcctccaattgttaatgcacacacgtctatgtcaccaataatataaatgccctcttctttcaccagcaaacaactgagggctatctggttgcccatcaccacctcggctagtgagtttggtgagttctgttggccttggagcttgaggaaagttaaagtcattgtgtgtaggccaggtcattataatgggagtgtgggaccagagggacttcatgctgggatgacaaatctagctttgtttgagttctctgctgcacatgactgtgctgattcttatcagggtatggtcctgcttggcaaggcaaaagcttctgtaggaatgaaaagaggaaagattaatgtttccactctcctaccactccatgaacctcccaaggccagggatgctttcatctatcacttttcccattgttcttgttacttgatccaaacttttcagtcctcatcgtccaaccagggtaaagaatttccatcctgaagaaactccccatacctataacatcacccacttgtaacatcatccctttctacaggattgggaatctttagtgggaccaggggaaccctagtgccccaatgtctgtcatcccttcgccatcaaattggggtcccactgttgggacactcccaaaggtagcattgcctcttagtttgaattgggaggtcctactgctggtaccattgaggcctggaccacaaaccacacccccgggagtaaatttcagcaaaaaataaaaataaaggaaagaacagttggctacactgagactagggattctgcaggaacagcctaattaggtgaatgcctggtcctccacctcttccaagcatagtagtgcccaacttatgtgggggtgctgtttctcttccactgggtataatgattgatacccaaatggcttttggtaggtaggcctaacaccagctaagttgttcttctcttggctgttgcaaagttgttgcttgagttgtccattcctgcattctgtcaccccatttgcctgggggttatggggagcaagaaggatc

SEQ ID NO: 18882 - DNA, 578 bp, Homo sapiens
gctgttgagtcactcttgggcagcaaatttactgattcctcttcctgagctgcacctctctgattatagggccaaggccctctcccctggatacaatgcttgtcaatgaactaacaaaacctttacatcagggccatttttagtaataygttacaatggaaaaagaaaagagagccagtgatcgagcacctgctatgtgctgcagatgcattttaatgcaccatcttctccagtcctcgcagcacgtccatgctatgatggtcctctacgcctccccactcccttgcagagctcccccattgtcagtccagtcttctgatgtgtatcaattcatctctatcttgacttatcttcattcttccatgtatttgaatctaatggttttcacattagctcgctctctcttattctggctttgataagcatgcttggatagaagagtactgtaattgccatctcactgcctgttttcctgtctctagttgtgcttgggtggttcatgccatttcaaggctctgatggttaccaccaatgcataagctcacatgtagctgggaactctggaatttcacttatca

SEQ ID NO: 18883 - DNA, 578 bp, Homo sapiens
gctgttgagtcactcttgggcagcaaatttactgattcctcttcctgagctgcacctctctgattatagggccaaggccctctcccctggatacaatgcttgtcaatgaactaacaaaacctttacatcagggccatttttagtaatacgttacaatggaaaaagaaaagagagccagtgatcgagcacctgctatgtgctgcagatgcattttaatgcaccatcttctycagtcctcgcagcacgtccatgctatgatggtcctctacgcctccccactcccttgcagagctcccccattgtcagtccagtcttctgatgtgtatcaattcatctctatcttgacttatcttcattcttccatgtatttgaatctaatggttttcacattagctcgctctctcttattctggctttgataagcatgcttggatagaagagtactgtaattgccatctcactgcctgttttcctgtctctagttgtgcttgggtggttcatgccatttcaaggctctgatggttaccaccaatgcataagctcacatgtagctgggaactctggaatttcacttatca

SEQ ID NO: 18884 - DNA, 578 bp, Homo sapiens
gctgttgagtcactcttgggcagcaaatttactgattcctcttcctgagctgcacctctctgattatagggccaaggccctctcccctggatacaatgcttgtcaatgaactaacaaaacctttacatcagggccatttttagtaatacgttacaatggaaaaagaaaagagagccagtgatcgagcacctgctatgtgctgcagatgcattttaatgcaccatcttctccagtcctcgcagcacgtscatgctatgatggtcctctacgcctccccactcccttgcagagctcccccattgtcagtccagtcttctgatgtgtatcaattcatctctatcttgacttatcttcattcttccatgtatttgaatctaatggttttcacattagctcgctctctcttattctggctttgataagcatgcttggatagaagagtactgtaattgccatctcactgcctgttttcctgtctctagttgtgcttgggtggttcatgccatttcaaggctctgatggttaccaccaatgcataagctcacatgtagctgggaactctggaatttcacttatca

SEQ ID NO: 18885 - DNA, 601 bp, Homo sapiens
catatgttcctttgwtatttccctttggttactttctgaaccatcttgtactttccattaatttgaaaattagactttgttccaaggagcatactttctggaatgtatttctggttcctttttccagggacaagaaagaccaggtgccttgctggaaaaaactagatcctgctgaccatagcattattttggtgagtgagttggccataaggtctttgttattttgttatacatgtatcccaagccccctcttcatcagggaaaagctagaagaaagaaaaaggaaaaatgaaaatcctgtcatgccactctatccttttattgaaattccttagcttttacaaagaaaaaaaattctcattttctgttagggagggaaagaactatgctaccttaaacaccacgaaccacacacgggcttacagagttcaaaccagtctataaatgcactggaatttgctcctcagtttaatctcaaatggggtgaacttgttcctgtatatctttgtcaaataccctaaaacagaggccaaagagaaaatcatgctccctcagaaacacagaaatggaaagaaaaccaagaacatttttttctatttta

SEQ ID NO: 18886 - DNA, 553 bp, Homo sapiens
gcagtgcccagttctcagcacccatttaggtgaaaacacaagatggcctgcgtggttcctggaggggaaggcggggtctccccttgtgtgcatccctgttctggcccagtgagtctgccgagcagtggagtrcagtgactcccgtgggcaaacgagggtcaccttgctgtggaagcagtgcaggctcactgccctcacacacacactgcagaaagccatcatgggctgcagggagggaccgcccttttgagctctgtcccctcaaaaggaacagctcagccagctgtctgacgaggccatggcttatgtgtggtaagggagtatgagaccttgtgtgctgtccagacagcagggcccatgactccatggccactggactgatggcatgccttaattcacaggtggtaaacttactgctgccttcccaaagcctctcctgagccctagaggggaacccagcctcccacttatagagacctgctcagccttattcccgactaccatcccacctgctgaagtacagaagtagggcatagaaagctgacttgggtgg

SEQ ID NO: 18887 - DNA, 553 bp, Homo sapiens
gcagtgcccagttctcagcacccatttaggtgaaaacacaagatggcctgcgtggttcctggaggggaaggcggggtctccccttgtgtgcatccctgttctggcccagtgagtctgccgagcagtggagtacagtgactcccgtgggcaaacgagggtcaccttgctgtggaagcagtgcaggctcactgccctcacacacacactgcagaaagccatcatgggctgcagggagggaccgcccttttgagctctgtcccctcaaarggaacagctcagccagctgtctgacgaggccatggcttatgtgtggtaagggagtatgagaccttgtgtgctgtccagacagcagggcccatgactccatggccactggactgatggcatgccttaattcacaggtggtaaacttactgctgccttcccaaagcctctcctgagccctagaggggaacccagcctcccacttatagagacctgctcagccttattcccgactaccatcccacctgctgaagtacagaagtagggcatagaaagctgacttgggtgg

SEQ ID NO: 18888 - DNA, 553 bp, Homo sapiens
gcagtgcccagttctcagcacccatttaggtgaaaacacaagatggcctgcgtggttcctggaggggaaggcggggtctccccttgtgtgcatccctgttctggcccagtgagtctgccgagcagtggagtacagtgactcccgtgggcaaacgagggtcaccttgctgtggaagcagtgcaggctcactgccctcacacacacactgcagaaagccatcatgggctgcagggagggaccgcccttttgagctctgtcccctcaaaaggaacagytcagccagctgtctgacgaggccatggcttatgtgtggtaagggagtatgagaccttgtgtgctgtccagacagcagggcccatgactccatggccactggactgatggcatgccttaattcacaggtggtaaacttactgctgccttcccaaagcctctcctgagccctagaggggaacccagcctcccacttatagagacctgctcagccttattcccgactaccatcccacctgctgaagtacagaagtagggcatagaaagctgacttgggtgg

SEQ ID NO: 18889 - DNA, 518 bp, Homo sapiens
aagggaacgtttttgctttgtgttgcttttgcaccctccccaccccaagctgattgtgtcattgtgtctctttcatgcagttggtagaaaccactgagatctgaacaccccacagaaatccaggatccacatgtcaccaatcaagtaaatgtgtccttatgcttttatttactgttttatttttatgtgactactcrtttatgatgcatgttcatttccctgaaattcaagggaacccaatagaatcactatgtttggcttaaatataaagggcatggggaagaaaaatgaatagaggagcttcgtatctgaaaaccaaaagaacctgacttcgattccataggttcttactcagggactggaagcaatcattcagtaggtttgttattctcctataagtgtgtgcaaacttagtggctagtcatttgtggagctttctgagtcatgagttcctcaattcaatacattttcaaaggcagctatgccctacaaataaacatgatccatataaatacaga

SEQ ID NO: 18890 - DNA, 272 bp, Homo sapiens
atcttcagggttactcaagtggcttaaacttcaagtgtttcatctacagttgttaagagatcacggtccttaatgaatgaatacatggtgtcacggaaagattttgttccaaatctcttttgaagaaaacactaaggaatggcaggaggggcaagaaaatgccatggggatataagtaagacctgagttttgtrttagcatgtaggttaaagcatgtgggtgtacattaccttatagttctgtaatgcttagactcaggaaagcagatggtg

SEQ ID NO: 18891 - DNA, 517 bp, Homo sapiens
gttctcaacattaaaattcccaaacattccaaacatttccctcatccccaaggagactagagatatgttttcaactctgacccaacagcttagatgcctgtttgggaacatcattctgaaaaaggaacttacttaagtagattagttttgtttaaaccacaatttgaccttccttaaacaactgctagacatctacagagccttcagagcccagtaattgtttttctaattcttctttttaaagtggtaacaaaacctggaggcgctaccatttttcacagccactatggattagtaataattagagcatctctaggcaccaaaaatctttgattatacaatgttttcttctaatattattctacagactcaaaggtttacagcaaaccagcacaatggctcatgcctataaccctagccctttgggaggmcaaggcaggcagatcactggagcccagaagttcaagaccagcgtaggcaacatggtaaaaccccatctctacaaaaaaacacaaaa

SEQ ID NO: 18892 - DNA, 400 bp, Homo sapiens
gtaatgagaattgttataggtgactgctttcagtcagttctcatggttattattatgctttatagctctacccaaatacagtgtccattccgaagatccgcagtttgaggcacttgattcatccaggkatgattagattatattggttgatgctaatcaaattcacaagatactgttttcatgaaccagaacatcaacttcttcatttataactttctcatttctaccctgagcggagaatacctaccccttaaatgttgatgttctatcattctaaatgcttctttcaaataaaaaaaagattttagtaatccttcttatttaacataggtgaaaaacttctaaacaaaatgtgagaaaaagaaagcaacaatatgtatttttaatccaccagaacaga

SEQ ID NO: 18893 - DNA, 540 bp, Homo sapiens
tgaattttggagaggacacaaaccatagcagacccttactgttctgtgtgtcaaaactcttccctttttaagtagascaccacctccactgtcaggcaatggaagctgtcatcattttggccacagtgattggtctaggggtggacacttaacccatgctgggtctgccacaggatcccctctggcctcagtgggtggtggagctgtaagacctagagctgcgggggactgtgttccctgccacagtgaggtattgggatcagcaaccagagacaagcaaagacgagaaatggagagtgagtgggttcctgctcctggttccacacgcatttctagcctttcagagactggcttaagtgaacatctcccttctttccacacccccactcttttttctgaactagttagaatcagggttttttgtttttctttttttttcacatgcaaactcacatgcaacatttcatgagttttggtagactttgtttttttggagggggagattaccttcagcattccgcttaaaatacctccctccag

SEQ ID NO: 18894 - DNA, 605 bp, Homo sapiens
aacagctcagtcatgtcctatattctgtcagcatagttttcttctattacctgaaaattatatatttaagtaaatattaatggaagaaacaatgcactttatcatttacttttacccatctccacctaagtttatctcatcccttctaaasagcagtagcctatgttaaggaaagaatactgtatagaaaattcttaagtgccttatgaaggaaggggtggaggtggaaaggaaagatcatttatgaagaaaaaatttggttcgataagaggcatgaggctgtatacaatcttttaatactagttatctttacttaaggcaggtcctggagataagaaacagaaataaaatattttatagcaggtatcctaattagaaaatccttagcatttattaaacagaaatatagtatgtacttatgatgcactcacaataagatccggactacaataataaaaaagacagggttcatgtcaataattagctcagattttattcactgacacagccattcaaacaaataataataatcatattatgtatggtgaatgtaatgaagcacagaataagaagtgattaatgctgcctgggagcactaaggattt

SEQ ID NO: 18895 - DNA, 910 bp, Homo sapiens
atttgtgatagatccttaataagtatgtaggacttaatcaaatgtgcactcacttattttctgatcattttgtagttctgtcccactctctcctgccttggtgctytttgcattatttttctaatattatattattgttgaaagctacatttggttttaatcatacaaaaatttaaatatagtaataatttaaaaatggtcatgcataccataacaataaataccaggcaataatagaggagaatctatgttttgaagataacacaataggaattgagaactctgacagtaaaaaaatatttctgtatatacatttatgtgtgtatatatagagagatgcaaatcaaagacatatattaagtttttcaagggcttttaaaataaccaatgttctcagtttgaaaaattattcattaataaactctagtcattggggaatgatacactagggaaacatttataaatgagacactgtagaaataatataataataaagcatatacaaactatacttgctatctataacttcataaaattatcccaaccaacaaaatgaatggcataaatttgtctatattttgttagtcagaatcaaatcattaagtctagccctcatgaaagagggagggaattgagggtatgaacgcgaggaggtggagatcaatgggaccaccttagaaccaaccacaaaatctgatgctgagctagaatttcactatatgtaaagtctccataatattactaatattatgataaacaataggcaaatcaaaatagttattaaatatgaaagcatattttataaaatagtcatttagcaataggcatgatataaatttcataattatttctgtggggacttgagataatgggttctaaatgttttattttctatggaggaatgacagca

SEQ ID NO: 18896 - DNA, 910 bp, Homo sapiens
atttgtgatagatccttaataagtatgtaggacttaatcaaatgtgcactcacttattttctgatcattttgtagttctgtcccactctctcctgccttggtgctctttrcattatttttctaatattatattattgttgaaagctacatttggttttaatcatacaaaaatttaaatatagtaataatttaaaaatggtcatgcataccataacaataaataccaggcaataatagaggagaatctatgttttgaagataacacaataggaattgagaactctgacagtaaaaaaatatttctgtatatacatttatgtgtgtatatatagagagatgcaaatcaaagacatatattaagtttttcaagggcttttaaaataaccaatgttctcagtttgaaaaattattcattaataaactctagtcattggggaatgatacactagggaaacatttataaatgagacactgtagaaataatataataataaagcatatacaaactatacttgctatctataacttcataaaattatcccaaccaacaaaatgaatggcataaatttgtctatattttgttagtcagaatcaaatcattaagtctagccctcatgaaagagggagggaattgagggtatgaacgcgaggaggtggagatcaatgggaccaccttagaaccaaccacaaaatctgatgctgagctagaatttcactatatgtaaagtctccataatattactaatattatgataaacaataggcaaatcaaaatagttattaaatatgaaagcatattttataaaatagtcatttagcaataggcatgatataaatttcataattatttctgtggggacttgagataatgggttctaaatgttttattttctatggaggaatgacagca

SEQ ID NO: 18897 - DNA, 910 bp, Homo sapiens
atttgtgatagatccttaataagtatgtaggacttaatcaaatgtgcactcacttattttctgatcattttgtagttctgtcccactctctcctgccttggtgctctttgcattatttttctaatattatattattgttgaaagctacatttggttttaatcatacaaaaatttaaatatagtaataatttaaaaatggtcatgcataccrtaacaataaataccaggcaataatagaggagaatctatgttttgaagataacacaataggaattgagaactctgacagtaaaaaaatatttctgtatatacatttatgtgtgtatatatagagagatgcaaatcaaagacatatattaagtttttcaagggcttttaaaataaccaatgttctcagtttgaaaaattattcattaataaactctagtcattggggaatgatacactagggaaacatttataaatgagacactgtagaaataatataataataaagcatatacaaactatacttgctatctataacttcataaaattatcccaaccaacaaaatgaatggcataaatttgtctatattttgttagtcagaatcaaatcattaagtctagccctcatgaaagagggagggaattgagggtatgaacgcgaggaggtggagatcaatgggaccaccttagaaccaaccacaaaatctgatgctgagctagaatttcactatatgtaaagtctccataatattactaatattatgataaacaataggcaaatcaaaatagttattaaatatgaaagcatattttataaaatagtcatttagcaataggcatgatataaatttcataattatttctgtggggacttgagataatgggttctaaatgttttattttctatggaggaatgacagca

SEQ ID NO: 18898 - DNA, 509 bp, Homo sapiens
tttgttttgttttgttttgtcttatttattccaggatcagttatatttccacaccagataattaaggaaatttggcaaagatacaattgaatagtaagtaagtgaatgcaacaccgcagtaaaacatttagttttggcaaagtgttcattgttttatacttattataaaagttgaataaaaactattgatgcaatctatttttcaatattatttttaatggtaacacttcaatctacttttgtaccctgtattaatcaacatgcaaggtacaatattcaagcaactagtgatttctattttgttttgttttgcggcattgcagaataataattaggactcactaaatacttaaaatctaattataaaaaaaaggttaactaagcttgtgttaggcaaacatactttgttcatgtatctttggagaatttatattgtttctattgytcatttaatatacacctaattttttcaaaagttatgagacttttctgcacctaaagttagtgct

SEQ ID NO: 18899 - DNA, 684 bp, Homo sapiens
ctctgggatgatctactttcagacaagataagtcagaaactttctttatggtcaattctcacacaaaaaccaggagagagtcaaagtgatcttcccgattctttgaccctctcaatctccttcagttcaaggtactttcggctaacattttctaagcctcagcacctaaatgggtagactgacttgctcacttaagaacaaacatgcagtaaagttgaaaactcatgaaaatatatgaactttaacccatactctgctaataaattcgagtttaattttagagtttacatattctcttatcatctcaccccagttaaaatggcttttattaaaaagatagagaataaagaatgctggcaamcttgtggagaaaggggaacccccgtacattgttggtgagaaagtaaactagtacagaatggaaaacagtatagaggttcctcaaaaaactaaaaatagaactgccaagtgctacagcagttccactactgggtatacatccaaaagaaaggaaatcaatatattgaagagatatctgcacatctatgtttattgcagcactattcacaatagctaagatatggaatcaacctaagtgtccatcaacaaatgaatggattaaaaaaatgtgttatatatacacaatggaatattattcagccataaaatattaaattttataat

SEQ ID NO: 18900 - DNA, 660 bp, Homo sapiens
gcatatatcaacaaattttaaaaatcaaagacaaactaaaattgtcagtaggggtcctacaggcaaaaaagacatcatctaaaaaagaagtcttaaggagggagtgaaaaagtaaagatggacgagaacagtgtaagtaaatgctgtatatcttcctttaggttttgagcaccttttggattaatgccagaagaaatccttcaaaagtaagtgggtgtgtatggtcaggcctggcttatgggcttccctgcctttatagaaatcatgtcaattagtttcagcttcatgaaacattagtcataaaggtgtgaaagcagtggtctaattgaaccacaggtagcttaatgactcattttaaacactttactctcactttctcaagaaaataggaggcacaatgaaataaattgctaggctaaagccaagtatcaagaatcctgatattcaacatagttaacccatagggtggatgtagaatctgcagcaaaggcccagatcaggagctaagactcagataggactggatagattagagaaatcaaccatctgggccagagacttcaatattgtgaaataaataattggcctttacagctaatrtagagaccagtgcctacttggaattctgacaaagagaataaagtaattaaaaccagattg

SEQ ID NO: 18901 - DNA, 869 bp, Homo sapiens
tttttaaagccacacatctacaatggcaagaaaaacaatataagagataacaacatagtagctagatgaaagttaaacgtcaacagactgaatgaagttgaaatctaaactgggtaaggagtgaagcccagtggcaaagcagcttagaccacatggagacatgaagcatctttgaaactgggaatgcaagtaggactgaaaagcaggaatattattattagaaaagctattgaagaaacagattcccagatttcctccttyggccctgaatctaaggtacctactcctcccttcccctcagtgaaggcaggtagattttctggagagatgagatcaatgaaattctgggtttaagcacctgccctgtaaatttccgggtggagggaggaaggtgggatgggtgtgtgagtgggggtggggaccagagactggtaaatgttttaaaaatattttttaaaccttgtagaattgtttgattactttaacacataaagaagtgtagaaaagtttaaaagagaaatttcctctcttcttactgcttgacaattaggaaattttctcaggccctgacacagaatcattttattttgggtacatatggatagatattacaatgtaatttttatctgtgtattacttcagtattctggagtaaatgaaaagattagtataacaaaaataatatacataaagcaatttttttcttcttgctatttcatttttttaccattttcttcaaaagatatcaaaataagccaaattcaatttattgcaaacacttttctggttttaggtgtcaaagtcttataataaaattagggcttttaactttcatcctatctctggttcaacttcctgctaaccttaat

SEQ ID NO: 18902 - DNA, 517 bp, Homo sapiens
  misc_feature (1)...(517): n = A,T,C or G
agagctcacccatgttgtggcatgtatcggggcttccttccttttcgtggataaatcctcttccattgtgggatgcacattttatgtattcactcgctggctgatggacacttactgtcgtcaaccttgcagtggtgtctgccctgctccccagcactcagcggctcatctgaccctccctgcttatggatttcctgctggattacatcgttactcccctccgctttccccgcctctccagcctaccagcggcctgtgaataaattcagtctccttgccgagsctccctgtccaccagcatgtgatggtcgcatggaagcttgcagccttaaaggtgcattagcctccatcagccaacaccactgccaactccttggagatataaggccctatgtgttttggtaataacttcggcttttattaaaaataatgccgattataaaaatttcangctgtgtagaagcatgaaaacaaaaaaaaaatcatctcaaatcataagacttaaactttttaattt

SEQ ID NO: 18903 - DNA, 522 bp, Homo sapiens
ctatgatgaagctgtacagggcattttccttctttgcaaagcacagtcattttattttgttgctgctactcctactgcattaagcacagatatactaagagagccaaaaagtcaaaaaaaaacagcaagaactccaacgtactgacattcaatctttcttgactgaagaaacctagcaaaggatgattctatttcttttcccagtacatcagacaaatgtcactaaatgtacatatctgtggcatacgtcactgatttatcgatatctgtgttttcagatttaaaataatagtttgtggaagaaaaaaacatttggtaggggacatttcaaactatgagctcagacaatacttggttgaaaacataggccctatcattaggaragtaatacttttaggtctggaacagaggaaacctctcagttattctggaacagctggggacacaaaggaacttgaaactggacattcatttcaagctattaaatgatatcttgtactacagtagggcatttagaatctg

SEQ ID NO: 18904 - DNA, 646 bp, Homo sapiens
aaaatggtgcctatatgctgtgtattttttaatccagaagcatagatattcattcatttatttattcaatcatcccaccagtaggtagttattccctattatgttttaaaaattatataggtggggagaggcaaaactcataatgtcaaatatgtattgagatttaatatgcccagccccattttaaatgcttttcacattttaactcattttatcctcataaaaaacctacccaatgttacccacagatagcaagtggtgaaaatggaacacagagaatctaagtaacttgcttaaggatacatacctcaaaaacagtagagatgggcttcaagcaatgcaatctaattccaaagtccattctcataagctgtaactactagctagtactcctgaaggaaagatctacctacatgatccaccagactgagaacagaaattattccttcttttttttttttttttttttttggcggtggggagacacggtctggctctgttaccaagggaggrgtgctgtgttgccatcatagctcactgcagcctctaactccagctcaagcgatacttccacctcagcctccctagtaactggaactgggactatagatgcgtgccaacacgtctggctatttttttttttttt

SEQ ID NO: 18905 - DNA, 698 bp, Homo sapiens
tatgatcaaatcaaaatttgactcttatattcctttagctttcaaatataaaataaaagccttccagttaaaaaggaaatgaggaataatactaatatttatyaatgcaagttaaaaaatatctcaatgaaaagtattatccagttcctaattttcatgtttttggtaataggctttaaatgatgatcaatacagaagacccactctttttcaatctgtggctttctacatgtgagctttttattcatcatggtttcatagtacctcctccaggcctggtgctgtggctcacacctgtaatcccaacactttgggaggccaaggcaggaggattgcttgaggccaggagttcgaatccagcctggacaacaagcaagaccctatctgtaaaaaataataataataataaaaattagtcaggtgtggtcgtgcacacctgtagtaccaactacttgggaggctgaggtgggaagactgcttgagaccagatgtttgaggttacagctagctatgaccatgcctctatacccctgcctgggcaacagagtgacaccctgtctctctctcctctcactctctctctctctctacacacacacacacacacacacacacatatacacacacacatacacacacatatatatatatattgcatgcatattttgaactatcatatatcatatatcattacttct

SEQ ID NO: 18906 - DNA, 698 bp, Homo sapiens
tatgatcaaatcaaaatttgactcttatattcctttagctttcaaatataaaataaaagccttccagttaaaaaggaaatgaggaataatactaatatttatcaatgcaagttaaaaaatatctcaatgaaaagtattatccagttcctaattttcatgtttttggtaataggctttaaatgatgatcaatacagaagacccactctttttcaatctgtggctttctacatgtgagctttttattcatcatggtttcatagtacctcctccaggcctggtgctgtggctcacacctgtaatcccaacactttgggaggccaaggcaggaggattgcttgaggccaggagttcgaatccagcctggacaacaagcaagaccctatctgtaaaaaataataataataataaaaattagtcaggtgtggtcgtgcacacctgtagtaccaactacttgggaggctgaggtgggaagactgcttgagaccagatgtttgaggttacagctagctatgaccatgcctctatacccctgcctgggcaacagagtgacaccctgtctctctctcctctcactctctctctctctctacacacacacacacacacacacacacatatacacacacacatacacacayatatatatatatattgcatgcatattttgaactatcatatatcatatatcattacttct

SEQ ID NO: 18907 - DNA, 572 bp, Homo sapiens
tctccccgctccttcttcttctcctgcagtacttcactgggaagtagcgatttgatattcccttttcctctatgaaactgtaaacactggaggatagcratcatgttgtattgtattttttttctattttctattttctatttctacagtacttgcatccatgatgataagtgtacttctttacaacagatataaaatgagcctcagttagacactaggcactacaagacatacattcattcaacaactatgtttgggcccgggtgcagtggctcacgcctgtaatcccagcactttgggaggctgaggcaggcagatcacgaggtcaggagatcgagaccatcctggctaacatggtgaaaccccatctctcctaaaaatacaaaaaattagccgggcatggtgatgggcgcctgtagtcccagctactcgggagtctgaggcaggagaatggcatgaacccaggcgatggagcttgcagtgaaccgagatcgcgccactgcactccagcctcggctacagagcgagactccatctcaaaaaacaaaacaaaataaaacaaactatgtttt

SEQ ID NO: 18908 - DNA, 572 bp, Homo sapiens
tctccccgctccttcttcttctcctgcagtacttcactgggaagtagcgatttgatattcccttttcctctatgaaactgtaaacactggaggatagcaatcatgttgtattgtattttttttctattttctattttctatttctacagtacttgcatccatgatgataagtgtacttctttacaacagatataaaatgagcctcagttagacactaggcactacaagacatacattcattcaacaactatgtttgggcccgggtgcagtggctcacgcctgtaatcccagcactttgggaggctgaggcaggcagatcacgaggtcaggagaycgagaccatcctggctaacatggtgaaaccccatctctcctaaaaatacaaaaaattagccgggcatggtgatgggcgcctgtagtcccagctactcgggagtctgaggcaggagaatggcatgaacccaggcgatggagcttgcagtgaaccgagatcgcgccactgcactccagcctcggctacagagcgagactccatctcaaaaaacaaaacaaaataaaacaaactatgtttt

SEQ ID NO: 18909 - DNA, 572 bp, Homo sapiens
tctccccgctccttcttcttctcctgcagtacttcactgggaagtagcgatttgatattcccttttcctctatgaaactgtaaacactggaggatagcaatcatgttgtattgtattttttttctattttctattttctatttctacagtacttgcatccatgatgataagtgtacttctttacaacagatataaaatgagcctcagttagacactaggcactacaagacatacattcattcaacaactatgtttgggcccgggtgcagtggctcacgcctgtaatcccagcactttgggaggctgaggcaggcagatcacgaggtcaggagatcgagaccatcctggctaacayggtgaaaccccatctctcctaaaaatacaaaaaattagccgggcatggtgatgggcgcctgtagtcccagctactcgggagtctgaggcaggagaatggcatgaacccaggcgatggagcttgcagtgaaccgagatcgcgccactgcactccagcctcggctacagagcgagactccatctcaaaaaacaaaacaaaataaaacaaactatgtttt

SEQ ID NO: 18910 - DNA, 556 bp, Homo sapiens
tgcctttcggttatagttttttccttggctatatattttttgcattaatttactttcttttcattgaaataagatgatgaaggctttttattctaatatccataaactctgactcatgctataattttacaataaatgtgttttgtgtgtcttaaaattgtttttccagattattatattcttttcctgaaattagtcaatttcaattagtcaatatttattaagttagacagtgtggaaagaaggattgatgggggttaaaaatggaagacttcgagggcttgttaacctaagaatacaaactggcaaatgataattgctgaataaggaaggcaataataagtgctataggtttccagataggttgcaatgaactggacaggtgtttttgttttttgttttttgttttattattatactttaagttttagggtacttgtgcacaacgtgcaggtttgttacatatgtatacatgagccatgttggtgkgctgcacccattaactcatcatttacattaggtatatctcctaatgctatccctcccccctccccct

SEQ ID NO: 18911 - DNA, 541 bp, Homo sapiens
tatacaggcagtgggtctccacacacagcaaccacatggggctcattgtcagggtggctgctttaaattttttattatttttttttttattttatttttatttttattttttatttttttttttgagatggagtcttgctctgttacccaggctggaatgcagtggcgcgatctcggctcactgcaagctccaccttctgggttcacgccagtctcctgcctcagcctcccgagtagctgggactacaggcgcctgccactaggcctggctaatttttttttgtwtttttagtacagatgaggtttcaccgtgttagccaggatggtctggatctcctgacctcgtgatccccctgcctccgcctcccaaagtgctgggattacaggtgtgagccactgcgcccggcctaaattttttttttttttaatgaaaaaggagaaaagagacactctagaatctagactgcaggcctggaagttttaaactttacaaatgaatgtaaagattactttggctgataagaaaaagggagtaaattaa

SEQ ID NO: 18912 - DNA, 589 bp, Homo sapiens
aaacacagagccacctgccacaaatgtttccaagtaactgtggtctgctggaaactggactcctggtgtgcccgggtgtttgggtagttcgcctctgacttcccgctgaaattatggtcctccagctgtgggggctggagatcttgggggtggcttatgtgggaggtcagatctcatctcagagacctaaagactggtttttagaaggttttacaccataaaaatagacggacagcagaaccacccccaggggcaggcagggaatgctcctgcaggctgcctgggtcctgtcctccaggggccctgtccatctstgttcctgtcctcggcagatgcttgtcaagatcctaggacacagaaggctccattctgtaaaaccctgtatggatgaatcccagcccactgacagcatccctctatttaatcagatgtacctctgaaaggtattgtaagtggtatgtgtgaggtgccacttgagtgaccaggaatatgaatctagaggagtcgaaacgagggttcatatccgcttagtgttctcagacccagttctggggacagcaggtctgtactcagcatgggaactggcaat

SEQ ID NO: 18913 - DNA, 559 bp, Homo sapiens
gcgccactgcactccagcctgggctacagagcgagactccgtctcaaaaaaaaaaaaaagaatttaatggccaggcatggtggcttatgcctataatcccagcactttgggaggccgaggcaggcggatyacttgagaccaggagttggagaccagcctggccaacatggtgaaaccccatctcaagtaaaaatatgaaaattagctgggcgtggtggtgcacacctgtggtcccagctactccagaggctgaagcacaagaatcacttgaacctgggaggcggaggttgcagtgagccgagatcacaccactgccctccagtctgggctgcagagtaggaccttgtctcaaaaaaaaaagaaaaccagaaaaaagagtttagtttttaatgcccagacctgtttatttccatttcattgagagtcagtcacattctcagttcatccttccccttgcaactgtcttcgaagattttctgcccctttgtcaaagccccgtttgtcgagtgggctgccctaccagttctttctagtcttaaatgtggctgcacttaactta

SEQ ID NO: 18914 - DNA, 524 bp, Homo sapiens
cgtttcttctcaatagaatcaagcactatactcyggatcccaaggcactagggtcccagttcgtgctgagggcgtcgcctcaagtgctaagcgagctcacagcatctggtttctcaggaagtgagagagctacacatctgctcctgggaagcattatttgtcaaataagccttgtttctcagcaaccattgtagcccccagggccacaagtaaaggggggcttgccttcccttaccctcccccaaaagaaatttggaagagacgagctgagctgctccccgcccagctacagcaacctccagcttggacaatacaccctctgtcctcagccaggagatccgcctctggagttggctctgccccttcccccactcttcctggttcccagcacccaaaccctctactggagttctcctgacccagtggtctccagccaggacagtcccacaccttcaaatcctccccctacagtccccgcaccccaaggatctgagcacattcagttacaggcatggggtcacccc

SEQ ID NO: 18915 - DNA, 582 bp, Homo sapiens
ttgatgatcaggtgggctcaggatctcaaaatgstcagaaatgctataggtaataggaactgctgtattcttaaaagattttaagtgaggaaactgagctatcaaaaatagttcttgtttaaactttaaagcgagctaatcatctatgtgtgaagccattccagatagagttttacctttattttctatttttgttattaaaaagtgtgagaaataacatcttatttattctattaaggtgaaaggtcaatagccacctgtaggatgtgtatcttctaccatcatgataacaagcttggttagagcttaaaataaaagaggtgttaccttttctcatttttacaattttactgtatttcttaattttaagggtggagaaggaggaggattattgtctttcaacaggcttcatttgtcctatttctcataaaatattgttcagttttggaatgtgtgtcaggtgatattcaggcttatagtagagtaagacattgtaacctgcaatttcttctaatataagaagtgagaaacagaggctacactcatgttttcataatttgtttttcttctcagtagaagacc

SEQ ID NO: 18916 - DNA, 554 bp, Homo sapiens
aaaatagagcagggtaagtgagacaaggagttgggaggcaagatgggatgcaggaagtaagactgggattgtaagtaagatgatcagggtgggacttattggggaggtgatggctgatgtaagacttgaaggaagtgagggtgtgaaccatgtcaatatctggagaaagagcattctaggcagagggaacacagataacccaatgggaaaccagccctgctatgttttagaatgagcatgaagccagtttggttattttattaaagaagaattaggtgcatgtttacaaaaacaagcagaataattgttgagatgaatctgaagatcctgaagatacgtttttcattgtattatgatcaacttttctatcttaaaaaaatccaaaagctcaatatataataaatctattcaaaaagatgagtattcatttcaaaaatgtagctttgctagtaccttttcagaattatggtaaatgcayatatcaaattatgttaaatatatatgttgaaaataattatttggcttacatgatcatataactaagaacttattta

SEQ ID NO: 18917 - DNA, 534 bp, Homo sapiens
atttattgtcttattgctagaatcaagtcttaatcctgttaggaaagatatttgtagtgtcttgatttcaaagaaatatatccttagtactgaatatttattatattatgcgtctcaccggaaaattttaaattttttaaaaatttaaagcattttgaattttaaaaaaaggaaaaaatgtataggtacatgaattacccaggatgctctctttaatttcgttattttattttgactcctttaacttttaattagatcaaaatatataccatgttaaagtaataggagcaaattcaagagacagacttctcttcatgtttctatcatcaagattaacaatttgctggtttatgttaaaacctcatttctcattctcaagcaccagacatcacagtatttgcaaagcttatgggaaatcaagactaggaatccaagcacacagccactaatayttttgagtaaggcagatcatcatctcactcaaaacaaacagttatccttagcaacagaaacataatgagaattaaatgttct

SEQ ID NO: 18918 - DNA, 539 bp, Homo sapiens
cccctttaacctataagcttcatgaaactaaagactgagtctgtcttattcatgttgtttttagtgcctaccacactgcctggtacatggtagttgcaaaataaatgttaattaaatgaatgaatggacaaataaatgagcaaatgaaagaaacactaaattggaagtagttttgtatccctggtttgttacatacaagggggaaagaaaagtaaagtgctgggagatgagaaaagtaaggaaggctcagatatgataaattctgctgttgatacaaagttttttttttatagattcaatggaaagtcattaaaatatcttctctacaaattgatttatcagcaatatttgtatgattagtattttatgcacactttatccattggcatagctaatacagatgtacctttattttctagaacaytggctttcaaacttttttttaagcagcagaatacttcttttcaaagaggatcttatcataaactgcaatataaaaaagaaaagtgagacctgctctggctgaagtagaggcaggt

SEQ ID NO: 18919 - DNA, 529 bp, Homo sapiens
tgctctgttgcccaggctggagtgcaggggcgccatctcggctcactgcaagctccgcctcccgggttcacgccattctcctgcctcagcctccctagtagctgggactacagttgcccgccaccacgcccagctaattttttgtatttttagtagagacggagtttcaccgtgttagccaggatggtgtcgatctcctgacttygtgatccaccgaccttcgcctcccaaagtgctgggattacaggcgtgagccaccgcgcccggccggtaatttttttaatctactaagcattcttcaacatcactgtaaaaaaaggaccagcatcctgtcatttgcgacaacacggaggaacctggaagatattatgctaggtgaaatcagccaggcacagaaagacaaatacccagtgatctcacttatacatgggatctaaaacagttggactcatagaaggagagattaaaatggtggttacctggggctggggtgtcgaagcgggtggggtaggtgtaggaaatggtaaga

SEQ ID NO: 18920 - DNA, 522 bp, Homo sapiens
tggattgtggttggggagggtggaccttgagcttttggatgcagaattgatgggaaatttaaaagcctcatggaaaatgtaaaagaaaggaagagatttaagaacttcaactgaaatttacactttctcttctgacagatcctaaatggctggggtgaaagcaatcttcaaactatcaattttaattgtctatgggaaataatttttgaactgcagttatasccattttggttgtttttgttttttgggcaattgtttcttaattatatttggtgatttgatttttctattagatgacacggtaattgcacattttagcaaagtaattatgcaaatttctatttctgacataatatgaagaaaaaaactatatatgtgaatgaaactggtttcacaaatgggcttaggcaaacttaatatctcaattattttaattaagagaactgtataaaaagtttcaaatattttgtttcgtgagatttcaggataatgaacaaaaagacataattgaaaataggttcc

SEQ ID NO: 18921 - DNA, 522 bp, Homo sapiens
tggattgtggttggggagggtggaccttgagcttttggatgcagaattgatgggaaatttaaaagcctcatggaaaatgtaaaagaaaggaagagatttaagaacttcaactgaaatttacactttctcttctgacagatcctaaatggctggggtgaaagcaatcttcaaactatcaattttaattgtctatgggaaataatttttgaactgcagttatacccattttggttgtttttgttttttgggcaattgtttcttaattatatttggtgatttgatttttctattagatgacayggtaattgcacattttagcaaagtaattatgcaaatttctatttctgacataatatgaagaaaaaaactatatatgtgaatgaaactggtttcacaaatgggcttaggcaaacttaatatctcaattattttaattaagagaactgtataaaaagtttcaaatattttgtttcgtgagatttcaggataatgaacaaaaagacataattgaaaataggttcc

SEQ ID NO: 18922 - DNA, 525 bp, Homo sapiens
gagtcgggatctcaccatgttgcccaggctggtcttgaactcttggcttcagacaatcctgcctccacctccgaaagcgttgggattacagacatgaggcactgtgctaggccaggattggttctttttaatgaatgggttttagaacgaagagggatgtaaaaaggacttagggaaaccgtcattaaaagaaagatactaaccagtgcctttttgtttttaattaattaattattattattttttttgatatggagtctcttgtcacccaggctggagtgcagtggcgcaatcggctcactgcaacctgtgcctcctgggttcaagccattctcttgcttcagcctcyggaatagctgggattacaggcgcccgccaccatgcctggctaattttttttttttttgagatggaatcttgttctgttcctcaggctggagtgcagtggcgcgatcttggctcactgcagcctccgcctcccgggtccaagcaattctctgcctcagcctcccgagtaggtgggac

SEQ ID NO: 18923 - DNA, 1457 bp, Homo sapiens
acacccctggtaaagataacacaaattgttctagaaagcccacgttgaaaatgccccaatgctcatcaaacttagcataataaagttactctgccagacatatgaactcacaaaaagaagtagctccattatgaaaaatagctaaataatctatatgaaatgctgtctatctagaaaataaataagaattcaagaaccttcatggtctaaaccacagtaacgttcccaatgagataagaaaaaagagtcatgaattaatacagaaaaaaacatttataaataagaaaaagaagcaggaaaattaaaatagagaaaaagtagtggaatgtgagtatgttggggagctggaagtcaagacaaaacagagggacttagaaatgaatttgttttttaaagtagatactcattatcccctagcaataaagtattatattccaaaagacaagaagcaaaaaaactcacactggtttagaagtacattgtgaactacaacttcgcaagctcccagaatgtctccccatcgtctcccctgcagtcttaacaacctgtgagagggtagggcttctgtgtgatctgcctgcccagcccagcctggtaagcagtgccctctgactgcttgtgccttcgaaatacatcagagactagaatatttagagtgattcacattagtgcatacggagaaacaaaaggactgagagctaaggtctgaggtcaagaggctggcaacccctccatggcatgtggaagaagcagtagtgagaggcagcagagctgactcattcaaaacagaggggagaaaacttagaactccagtgaagtggaagtgaaggcagaggaaagggctgcagacagagggggagctgcaaatgcagacatgcagcacaaatgacacagaagcagacaagagaaacaggaaagattatacagtaaataatattctgaatgaaaatctcatgcagatttcagatctcagtaaagtctacaactcagttgttagagtgtctttctgcacctttggattgtcgataatgggggtgacaacaagatctgagtccgtgtagataagctctctcatctgggattccaggtcctgctgactcaggtgtccacttgtaatctgaaatgagaacaaaaattagactttgtttctgcgactaatgtagatctttaaaacactgaaccagtaagatgctgaggaagacaccactgtaaaatatcacctatatcaatgtacttcaactgctattcaagatggttgcagtctcatttgattttcacaaaaatcctaaactgtaggcaccatcattcccattttacagataaaaatataaaactctgagaaagtaactgaattgctcatgttaccactaagtctggctaggactagaaaaaatatctttacaattcaatgttytaaactgtgatgaggcaaattggtttttccataacagcatggc

SEQ ID NO: 18924 - DNA, 1065 bp, Homo sapiens
attcaaattgttacaaagttcagctaaagaattccttctccatgtggagttttaccccctgctcctctggccaccctccccatagatccttgtggtgccaggcaggaatgggctgcttggggacccagcgagctcccagggcctttctgctgcttcctctayccctgtatttcgcttggctctctaacttgactcagccccaggtaaagttagaaacttcttccacaaacagaccttcagcttctccagtgggggtgtgtgtttgggagaggagggtctccctttcccactttcacagttggggcacccacagtattcggggtgtctcctgatcctgcaggagcagtccgcttccttcagagggtctcatcacttatgtccttaaagtgactgtgagtaatgtgatcacatttctgaattatcaataaatagatgatatttaaagccacaaggaaggatgagatcacccaaggactcgaaacaggcagaaaatctggactgttcagagcagtccagtgtttgtgggatgtgtagataagaagaaacaaagaaaggagatttaaaaaagagaagctcatgaggttggaagaagatgtaacatgcacattgtcccagaacccttggtattccgcagaaggtattgtcctttcctgttccaaatgtcagttaataagctgagtgaggaaattgatggcatgcgaatctcagttatacatgatacagaactgagagttataataaaaatgctctatcacagatccaagatcctaaaatatttcaacaggctacaatgatgatggactgtgtccagtgagatgatattttagagagaaatgccaaatttaactctcaggctcaaaatcctcactgtacaagaacaatcaccatgaatatgtagctgaggaccaggctgtgaaaaggacagagagaaacttaggaattgggagtcaataatgcagtgcacctttccaaaaagagtcacagagagttggctggggttaatcaaaatagggtgctgaaaatgatctgctaaagtctagttcaactctcttctttgtcaatcca

SEQ ID NO: 18925 - DNA, 542 bp, Homo sapiens
tgcaactactaaaaattagttatgcaactactatgaaacgtaaaaaccaggccatatcctcttatagctaatgttacaggttgacattgctagcttatgatttaattgtaaaatcagtaggttggagctaatgctacttaaaattccttggagctgtaaaattatttcattctattcaaggctgcaagtctttggtcacaagaaaatttamgcataattacagcagcaagatgaaccgggtaacattcaggctttaattaaaaaattgagctttaccacttgagaaaattgcttaagcctgtggtctcaggtttctcatctgtaaaaggagggtaacaacagtacctatctcatggttatcatgaagcttaaacgaaggaactgagtggttaggcaagcgccagaaatttagcatgcacacaataaaccttagcaataaaccactatcatttagaatgattgaatgttaaacattgtacagggccataaaactggactaattaaactctttggcaatgtagaaactggagcccacagatcag

SEQ ID NO: 18926 - DNA, 553 bp, Homo sapiens
tggttacttcaccaccaaaaaattgctggaacaaacagtcactatttacacgttagtgatgcatttaaaaattaacttgaaccggctgggcgcagtggctcacgcctgtaatctcagcactttgggaggccgargcgggtggatcatggggtcaggagatcgagaacatcctggctaacacggtgaaacctcgtctctactaagaatacaaaaaaaaaaattagccgggagtggtggtgggcgcccatagtcccagctactcgggaggctgaggcaggggaatagcgtgaacccaggaagcagagcttgcagtgagccgagatcgtgccactgcactccagcctgggcgacagagcgagactccgtctcaaaaaaaaaaaaaaaaaaattaacttgaaccaaaacttaatctgaaaatgttagtgtattatcatgtgaggactgaagcatttccaatatgttaataagcacatgattgtagaaaatgtaaatatgatgataattggcaatgataccaggattgtacctagtgatttattgagcttccctctct

SEQ ID NO: 18927 - DNA, 553 bp, Homo sapiens
tggttacttcaccaccaaaaaattgctggaacaaacagtcactatttacacgttagtgatgcatttaaaaattaacttgaaccggctgggcgcagtggctcacgcctgtaatctcagcactttgggaggccgaagcgggtggatcatggggtcaggagatcgagaacatcctggctaacacggtgaaacctcgtctctactaagaatacaaaaaaaaaaattagccgggagtggtggtgggcgcccatagtcccagctactcgggaggctgaggcaggggaatrgcgtgaacccaggaagcagagcttgcagtgagccgagatcgtgccactgcactccagcctgggcgacagagcgagactccgtctcaaaaaaaaaaaaaaaaaaattaacttgaaccaaaacttaatctgaaaatgttagtgtattatcatgtgaggactgaagcatttccaatatgttaataagcacatgattgtagaaaatgtaaatatgatgataattggcaatgataccaggattgtacctagtgatttattgagcttccctctct

SEQ ID NO: 18928 - DNA, 543 bp, Homo sapiens
acttataagtttatgcctgaaaagagttgcttgtgctagggtattttcaaactaggagtcaaartaaacttacaaaacaacttgagatgaagacctaagagtagcaaagagctttatcttaattttgtaatgggttttggagaatacttgtgtatagtctggaaaatccttgcaagatagtacttcctatcttgcttcctttcagcattatttattttgccatcatttatttattaatatatttattcaataaatacttattgagcatatattacaggctaagccttttttcaagtgttgggaattcaggaacaggcactaaccacaaagaaattttatttccactagaaatacaaacaaatgaatctctttatgtgtgagaatagagccaggataaggtcaagttcagaagcacagtgtgttatggaaacacagataaaaagctcacagcctagatatggggacaggactagatacagggacaggaaaaaaaacttccaacagcagaaatagaaaatgtaaaaaaaaaaaaacccgaagttt

SEQ ID NO: 18929 - DNA, 543 bp, Homo sapiens
acttataagtttatgcctgaaaagagttgcttgtgctagggtattttcaaactaggagtcaaagtaaacttacaaaacaacttgagatgaagacctaagagtagcaaasagctttatcttaattttgtaatgggttttggagaatacttgtgtatagtctggaaaatccttgcaagatagtacttcctatcttgcttcctttcagcattatttattttgccatcatttatttattaatatatttattcaataaatacttattgagcatatattacaggctaagccttttttcaagtgttgggaattcaggaacaggcactaaccacaaagaaattttatttccactagaaatacaaacaaatgaatctctttatgtgtgagaatagagccaggataaggtcaagttcagaagcacagtgtgttatggaaacacagataaaaagctcacagcctagatatggggacaggactagatacagggacaggaaaaaaaacttccaacagcagaaatagaaaatgtaaaaaaaaaaaaacccgaagttt

SEQ ID NO: 18930 - DNA, 528 bp, Homo sapiens
aaaagggacatacctaaaattaagtgattttgaaggttaaaaataaaagaataggcaattgcaaattttaaaaaaatcaggggtcttcttatagaggagtataaattaagrccaaaaatattaaaatagataaagaaggatattttataatactacaggcagaaattcacaaagaagattcaaaagttatcttttcttccagtaacacagaaacgactttcaaaaagcagaaactgctaggtatgacaaatagagacacactaatagtaggagattttaacacacttctctcagttctaggaaagccaaaggataaaatgctagtaaggatggagaagactcaacataatcaataagttaaagctaatatctataaaactggaacagtaataatagagactatgccttccttttatgtaagagtctttgaaactgaaattagtgaaagctgatggaggggaaaaaatcatagagtttgaaccctggtttaacatttcatagcactttcaaagttataaaatgtattca

SEQ ID NO: 18931 - DNA, 528 bp, Homo sapiens
aaaagggacatacctaaaattaagtgattttgaaggttaaaaataaaagaataggcaattgcaaattttaaaaaaatcaggggtcttcttatagaggagtataaattaaggccaaaaatattaaaatagataaagaaggatattttataatactacaggcagaaattcacaaagaagattcaaaagttatcttttcttccagtaacacagaaacgactttcaaaaagcagaaactgctaggtatgacaaatagagacacactaatagtaggagattttaacacacttctctcagttctaggaaagccaaaggataaaatgctagtaaggatggagaagactcaacataatcaataagttaaagctaatatctataaaactggaacagtaataatagagactatgccttccttttatgtaagagtctttgaaactgaaattagtgaaagctgrtggaggggaaaaaatcatagagtttgaaccctggtttaacatttcatagcactttcaaagttataaaatgtattca

SEQ ID NO: 18932 - DNA, 528 bp, Homo sapiens
aaaagggacatacctaaaattaagtgattttgaaggttaaaaataaaagaataggcaattgcaaattttaaaaaaatcaggggtcttcttatagaggagtataaattaaggccaaaaatattaaaatagataaagaaggatattttataatactacaggcagaaattcacaaagaagattcaaaagttatcttttcttccagtaacacagaaacgactttcaaaaagcagaaactgctaggtatgacaaatagagacacactaatagtaggagattttaacacacttctctcagttctaggaaagccaaaggataaaatgctagtaaggatggagaagactcaacataatcaataagttaaagctaatatctataaaactggaacagtaataatagagactatgccttccttttatgtaagagtctttgaaactgaaattagtgaaagctgatggaggggaaaaaatcatagagtttgaaccctggtttaacrtttcatagcactttcaaagttataaaatgtattca

SEQ ID NO: 18933 - DNA, 528 bp, Homo sapiens
aaaagggacatacctaaaattaagtgattttgaaggttaaaaataaaagaataggcaattgcaaattttaaaaaaatcaggggtcttcttatagaggagtataaattaaggccaaaaatattaaaatagataaagaaggatattttataatactacaggcagaaattcacaaagaagattcaaaagttatcttttcttccagtaacacagaaacgactttcaaaaagcagaaactgctaggtatgacaaatagagacacactaatagtaggagattttaacacacttctctcagttctaggaaagccaaaggataaaatgctagtaaggatggagaagactcaacataatcaataagttaaagctaatatctataaaactggaacagtaataatagagactatgccttccttttatgtaagagtctttgaaactgaaattagtgaaagctgatggaggggaaaaaatcatagagtttgaaccctggtttaacatttcatagcactttcaaagttataaaatrtattca

SEQ ID NO: 18934 - DNA, 647 bp, Homo sapiens
ggcactgcttctgtcttccagaaccttagagtcggtagaatccttcttgcctctctcctacttcaggggtaaccagcaatcctcaacactcgttggcttgcagctgtacaactccagtctctgcttccctcctcacatggccttctccccgccatttcctcacatcatcctcctaggaggttaccactcataccggtaaaaaggcccaccctgctccagtgtgacctcatcttgactaattatgtttgcagcaaccttattgccaaacaaggccacgttctsaggcactggggatgaggactcctgcatattcttttggagaacacagttccagccgtaacagggagatgaggcagttatctacagcgccttcagtcccctaagcatggactgcacgggccaatgggaaagttcccctggggccttggaaggttcactgaagaatcagcgtgtaaaagacagattaactggagaaaatgcacacaaatttatttaacgtgtatatatggagcctccagactgaagacccagaggtacaagggagattgtccatttttattctcaggttcaacaaagtatggacagccgtgtctgtctagattctcccggcccctctgcacagcgatccttccttctgggtatgaggc

SEQ ID NO: 18935 - DNA, 647 bp, Homo sapiens
ggcactgcttctgtcttccagaaccttagagtcggtagaatccttcttgcctctctcctacttcaggggtaaccagcaatcctcaacactcgttggcttgcagctgtacaactccagtctctgcttccctcctcacatggccttctccccgccatttcctcacatcatcctcctaggaggttaccactcataccggtaaaaaggcccaccctgctccagtgtgacctcatcttgactaattatgtttgcagcaaccttattgccaaacaaggccacgttctgaggcactggggatgaggactcctgcatattcttttggagaacacagttccagccgtaacagggagatgaggcagttatctacagcgccttcagtcccctaagcatggactgcacgggccaatgggaaagttcccctggggccttggaaggttcactgaagaatcagcgtgtaaaasacagattaactggagaaaatgcacacaaatttatttaacgtgtatatatggagcctccagactgaagacccagaggtacaagggagattgtccatttttattctcaggttcaacaaagtatggacagccgtgtctgtctagattctcccggcccctctgcacagcgatccttccttctgggtatgaggc

SEQ ID NO: 18936 - DNA, 634 bp, Homo sapiens
tgcagaggattctgctgccttttgtttgccaatgccctgcycccagaggtggagtctacagaggcaggcaggcctccttgagctgaggtgggctccacccagttggagcttcccagctgctttgtttacctactgaagcctaggcaatggcgggcgccctcccccagccttgctgccaccttgcagtttgatctcatactgctgtgctagcaatgagtgaggctccatgggtttaggaccctctgagccaggcatgggatataatctcctggtgtgccgtttgctaagaccattggaaaagtgcagtattagggtgtgagtgacccgattttccaggtgccatctgtcacccgtttctttgactagggaagggaattctctgaccccttgcacttcccaggtgaggcaatgcttgtcctgcttggctcatgctcggtgcactgcaccaagtgtcctgcacccactttctgacactctccagtgagatgaaccaagtacctcagttggaaatgcagaaatcacctgtcttctgggtcgctcacgccaggaattgtagactggagctgttcctattcggccatcttggctccactcctgctattatgattcttacacagagtcctttgctttccag

SEQ ID NO: 18937 - DNA, 634 bp, Homo sapiens
tgcagaggattctgctgccttttgtttgccaatgccctgcccccagaggtggagtctacagaggyaggcaggcctccttgagctgaggtgggctccacccagttggagcttcccagctgctttgtttacctactgaagcctaggcaatggcgggcgccctcccccagccttgctgccaccttgcagtttgatctcatactgctgtgctagcaatgagtgaggctccatgggtttaggaccctctgagccaggcatgggatataatctcctggtgtgccgtttgctaagaccattggaaaagtgcagtattagggtgtgagtgacccgattttccaggtgccatctgtcacccgtttctttgactagggaagggaattctctgaccccttgcacttcccaggtgaggcaatgcttgtcctgcttggctcatgctcggtgcactgcaccaagtgtcctgcacccactttctgacactctccagtgagatgaaccaagtacctcagttggaaatgcagaaatcacctgtcttctgggtcgctcacgccaggaattgtagactggagctgttcctattcggccatcttggctccactcctgctattatgattcttacacagagtcctttgctttccag

SEQ ID NO: 18938 - DNA, 634 bp, Homo sapiens
tgcagaggattctgctgccttttgtttgccaatgccctgcccccagaggtggagtctacagaggcaggcaggcctccttgagctgaggtgggctccacccagttggagcttcccagctgctttgtttacctactgaagcctaggcaatggcgggcgccctcccccagccttgctgccaccwtgcagtttgatctcatactgctgtgctagcaatgagtgaggctccatgggtttaggaccctctgagccaggcatgggatataatctcctggtgtgccgtttgctaagaccattggaaaagtgcagtattagggtgtgagtgacccgattttccaggtgccatctgtcacccgtttctttgactagggaagggaattctctgaccccttgcacttcccaggtgaggcaatgcttgtcctgcttggctcatgctcggtgcactgcaccaagtgtcctgcacccactttctgacactctccagtgagatgaaccaagtacctcagttggaaatgcagaaatcacctgtcttctgggtcgctcacgccaggaattgtagactggagctgttcctattcggccatcttggctccactcctgctattatgattcttacacagagtcctttgctttccag

SEQ ID NO: 18939 - DNA, 634 bp, Homo sapiens
tgcagaggattctgctgccttttgtttgccaatgccctgcccccagaggtggagtctacagaggcaggcaggcctccttgagctgaggtgggctccacccagttggagcttcccagctgctttgtttacctactgaagcctaggcaatggcgggcgccctcccccagccttgctgccaccttgcagtttgatctcatactgctgtgctagcaatgagtgaggctccatgggtttaggaccctctgagccaggcatgggatataatctcctggtgtgccgtttgctaagaccattggaaaagtgcagtattagggtgtgagtgacccgattttccaggtgccatctgtcacccgtttctttgactagggaagggaattctctgaccccttgcacttcccaggtgaggcaatgcttgtcctgcttggctcatgctsggtgcactgcaccaagtgtcctgcacccactttctgacactctccagtgagatgaaccaagtacctcagttggaaatgcagaaatcacctgtcttctgggtcgctcacgccaggaattgtagactggagctgttcctattcggccatcttggctccactcctgctattatgattcttacacagagtcctttgctttccag

SEQ ID NO: 18940 - DNA, 596 bp, Homo sapiens
ctagagaagggccccacgctgggctccagatgaaggggtggtctgcccctccacacctgtgggtatttctagtcaggtgggatgagagacggagaaaagaaataagacacagagacaaagtatagagaaacatcagtgggtccaggggaccggcactcagcacaccaaggacatgcacaggcaccggcctctgagttccctcagtttttattgattatgattttcattatttcagcaaaaaggaatatactaggaaagcagggtgataataaggaggtcaacaaaaaacatgtgagcaaaagaatctatatcataattaagttcaagggaaggtactatgmctggacgtgtacgtaagccagatttatgtttctctccacccaaaaatctcagtggagtaaagaataacaaggcagcattgctgcaaacatgtcttgcctcccatcacagggcagcttttctccgatctcagacttaaacaaatgtacaatcgggttttacatcgagactttgagttcccaggggcaggcaggagacagtggccttcctccatctcaactgcaagaggctttcctcttttactaattcacctcacc

SEQ ID NO: 18941 - DNA, 496 bp, Homo sapiens
ttcacacccagttgttgtgggtgtttggccgacacgacacttcctcttgtgtgattcatggacccgcagcattgcgtcacctgggagcttttggtattgaagactctcagggctcacccggaagacctgctgggccagaatctacattttaacaagatgcccaggtgatttgcatacacgttcagatctgagaagcgctagtaggtgaggctttaaggtggtaattagatcttttctccacctgcaagaatcttagtttcttcatgttaaatctattaactgtggcaatggcatggggggttataaaacaaaacaaaatccttacatcaagaatgcaccstggtgtgttatggatgtgggtgaaatgaaatgtctggaatttgctttaaaatatcctaaaatagcaagaaggaaaagaaaagtgggaactggaatgagattggcgaaatgttgacaatttcttgcagtgggatgatggtgcatgggggttcatggt

SEQ ID NO: 18942 - DNA, 532 bp, Homo sapiens
aatgactgattgaggcaaaggtgtgaagaaaaggccatgtggttttaacacaggaaaaatatgaagttgagccacattaactccgagatggccaaggctgctggtctgaatcataggtgggttcctcccttgatcgaccccacatttcacctctccttccacaggtattgatccaagtgacactccctagtaaacatctcaaaaccraagttcgctttctagaaaacccaaaatgcaacaagatgaaaaaacaagaagtatctcttctttacaatttactgtcctatttcataacactatgtcttcatccaaaaataaattccttcatttggcagatatctgtggagaaactattatgtttccggcactgttctgggcactgatgtgatggaaattaaaacaccaacaagtctcatgagctctgtgaactttatatcctagtagggtaaaaataataaggaagcaaataaaagaaaatttgtgaaagtgttaagagatgtgaggaaaataggtagtgagctgagaagggtgg

SEQ ID NO: 18943 - DNA, 535 bp, Homo sapiens
ctgaggcaggagaattgcttgaactcaggaggcagaggttgcagtgaactgagattgtgccactgcaacccagcctgggcgacagagtgagactctgtctcaaaaaaaaaaaaaaagcaagtgattttctctgaattgcaatgttgtacatcaaagcaaccaatctactgaaagttcttcaaaactgcaggtactctagaaaaaaaaatcaatccatctaagaaaaatatcaagttatttctatgttcttaatacaatgctaaagttcattctgagtctctaaattttattacaaattaattctattacataattaaagtcaccaaatacaagctctcttacttagtttttgtaaaagttaatgaygcaggatttttctcagccagtttcaggattttctcagccagtttgacaaccagggacctccacagccagtgatgccccctcggccctggggcctggcatcagaggtaccctgcctactttgcctgctgggctgagactggcttatgcactggctcagccatggctgggc

SEQ ID NO: 18944 - DNA, 546 bp, Homo sapiens
tttttggagwtcataaaatgtactggaagaaaacatggctttggtgtctcagacacttggtttaaaatcctcacactactgcataaaactgtccaaacattgacaaagtgcataatgtctccaggcctctgtctttgaatccataaaaatggttgtaagatcacttacctatagggtcattgtataattttaatgtgatatgatatgcctaactatagcataaaccccaaactagagtatttcactcattctactcctagtatccattggactcattgtcctaattaaagcatcaaaacaatgctttaactgatcagattatatagaagacttttcctctaatcttgtacagttatttctgaagaaaggaagacaatgttctggcaagagccaaaatatctggctttcaataaagatttgctgctgctatgactgctgccaccaccatgaggtataagaatatagcatgtgtgtaggtgataccccagatgggtcaccataggaaagtgagatgttctatgaatatcctagagaaattcatagaaa

SEQ ID NO: 18945 - DNA, 546 bp, Homo sapiens
tttttggagttcataaaatgtactggaagaaaacatggctttggtgtctcagacacttggtttaaaatcctcacactactgcataaaactktccaaacattgacaaagtgcataatgtctccaggcctctgtctttgaatccataaaaatggttgtaagatcacttacctatagggtcattgtataattttaatgtgatatgatatgcctaactatagcataaaccccaaactagagtatttcactcattctactcctagtatccattggactcattgtcctaattaaagcatcaaaacaatgctttaactgatcagattatatagaagacttttcctctaatcttgtacagttatttctgaagaaaggaagacaatgttctggcaagagccaaaatatctggctttcaataaagatttgctgctgctatgactgctgccaccaccatgaggtataagaatatagcatgtgtgtaggtgataccccagatgggtcaccataggaaagtgagatgttctatgaatatcctagagaaattcatagaaa

SEQ ID NO: 18946 - DNA, 509 bp, Homo sapiens
tgagatcacatcactgcactccagcctgggccacagagccagactccgtctcaaaaaaawttttaatgtaaaaataaggaaaagagaaaaattaaacaggtgccacaagtagaaaaacaattaggaaggaagacttaaaactcaatatatcagcatttacattaaaagcacaaatattcccaacaagaggcaagaaatacaccttaaggtcgggcacggtggctcacacctataatcccagcactttgggaagctgaggcaggcggatcacttgaggtcaggagttagagaccagcctggctaacatggtgaaaccccgtctgtactaaaaatacaaaaattagccgggcgtggtggcatgcgcctgtaatcccagctactaggaaggctgagacagaattgcttgaaccctggagacggaggttgcagtgagctgagattgcgccactgcactccagcctggcgacagatagactccgtctcaaaaagagaaatgcaccataaatgat

SEQ ID NO: 18947 - DNA, 507 bp, Homo sapiens
ctaaagtcatgctcagaaagcaatgagtatccttaaatgtacatctattagaagctgaaaatcaatactctaagctccatctcaagacatcagataaagaaaaaagctggctgggcatggtggctaacgtctgtaatccaagcagtttgagaagccaaggtagaaggatcgcttgagctcaggaatttgagaccagcctggccaacgtggggaaactcagcctctactaagaataaagaaattcacygggcatggtggcaggctcctgtagtcccagttacacgggagcttgaggcagaagaactgcttgaacccggaggaggcagaggttgcagtgagccaagatcatgtcactgcactccagcctgggaaacagagcgagacactgtctcaaaaaaaaggtagaaaaagagtgcagtgtggggctgtgttccaatacgtatgactttcaactttgtatgtcacattctatgaaagtttatttttttatcaataattttaaaaagt

SEQ ID NO: 18948 - DNA, 507 bp, Homo sapiens
ctaaagtcatgctcagaaagcaatgagtatccttaaatgtacatctattagaagctgaaaatcaatactctaagctccatctcaagacatcagataaagaaaaaagctggctgggcatggtggctaacgtctgtaatccaagcagtttgagaagccaaggtagaaggatcgcttgagctcaggaatttgagaccagcctggccaacgtggggaaactcagcctctactaagaataaagaaattcactgggcatggtggcaggctcctgtagtcccagttacacgggagcttgaggcagaagaactgcttgaacccggaggaggcagaggttgcagtgagccaagatcatgtcactgcactccagcctgggaaacagagcgagacactgtctcaaaaaaaaggtagaaaaagagtgcagtgtggggctgtgttccaatacgtatgactttcaactttgtatgtcacattctatgaaagtttrtttttttatcaataattttaaaaagt

SEQ ID NO: 18949 - DNA, 667 bp, Homo sapiens
ttccagaagtcaacaggcagccaaatggcagtttctcatttctttgagatcactgctgattgctccctctccggcttccttggagcctgttgtggacactgttggcgtcttgcccagttccttcaccaggcagtgcctccaccccactgctgtggtgagtggcggctgctggtggctcacagctgcctccttctcggaagaaccgtgctcagctcctgggaggttgctgcctccaggaggtgatgtgcctccgcaaggccctggcggagctgcagagcacaacccccctgctggatgggggccacgtatggggcgccccgcacgttgcagagccacccttgggcttccgcaaaagccgcgtctttgcttcttctcttgctgtttcctcacttcggtagaggcttctctctcaataaatcacttacatgagataagtaaatcactctcttcaggcctaaaacagctgggcytttggttaccctaatgaggagcattttcatataaagttatagttgattaaaacttaaattctttaaaacttaaaaattaatatggaaaaaaaatagctcactatccatcccaccttagcctccagttcacgtgtgaggaaatctaaaatgttcttcagattcacagcaacatccaagctccaaaggcagagaaataa

SEQ ID NO: 18950 - DNA, 554 bp, Homo sapiens
tgcctctctgaatgcacctggagggcaagattaacatttgtataaaataataatgacagacgggtgtggtggctcatgcctgtaatcccagcactttgggaggccgaagcgagcggatcacctgaggtcaggagttcaagaccagcctggccaacatggcaaaaccccatctctactaaaattacaaaattttagaatacaaaaaattacaaaattttaaaatacaaaaattagccgggcgtggtggtacatgtctgtattctcagctactcaggaagctgaggcaggagaatcacttgaacccaagaggcagaggttgcagtgagctgagatcatgccactgcactccagcttgggggacagagtgagactttgtctcgagaaaaaaaaaaaagaaagaaagaaakaataatgacaatactacacaaaaatatattgacattttaattgaccttttgggagtctagttgatagatcaatagattaataaagtaaaatgagaaataaagggaaaatattggcatgttgttcgattattcaaatagaatctattt

SEQ ID NO: 18951 - DNA, 569 bp, Homo sapiens
tgaccaataaatgttccaatgctgttagtaatataaactaagcaatgtgcctatctccctcttcatgtacacatgtactaatatcatcaacgcaagaaaaccataatctctgggcaatcaaccacataatttgtgttcctggggtttttgttgttgttgttggtagtggtggtggtgggttttcccctaagctctggaattctaaaaatttgatgagctcacaccaaactggtaattttgttgacatttccagagacaatttgggaaattttaaacagctcctctacgcagcattctggcatgtagaaagaggtaaactgtaaagactcttgctttgaaaagttatttttaaaaggtgaagtcaatgtcttccttttgtctctatagatgccaatactatgascatgtttctgtaagataatattattaaatgaagttgatataccatggtagatttaacttggaatataatcagggaaggagacaggtacattgataacagaagattaaccagaacaaaacagccctgtttatgtgacaaggcaaaatagagaagagagcaactccag

SEQ ID NO: 18952 - DNA, 592 bp, Homo sapiens
ttgatgattatttagtcagataaaattgtaatttgataggctgtatttaagattcacaaaaatgtcattacatttttctttccatttttcttttacttaatgttggtcaaaattaagtgggagccgggtgcggtggctcacacctgtaatcccagcactttgggaggccaaggcaggtggatcacctgaggtcaggygttcaagagtagcctggcaaacacggtgaaaccctgtctctactaaaaatacaaaaattagctgagtgtggtagcacacacctgtaatcccagctatcacttgataatcacttgaacctgggagggggaggttgcagtgagcagagatcataccactgcactccagcctgggagacaaagcaagactccattcccgctccccccaaaaaaaaattaagtggggatactggaaatgactaaaatgtatagactcctagattcaatgcaggcaatcagggaaactcctagcaagggcatgagatgacatcaagggatcatggcaagaggcaacaagtgggaaatccagcaagtgggtaaggttcagtattcacaaacaggaaatagaataagcaatg

SEQ ID NO: 18953 - DNA, 592 bp, Homo sapiens
ttgatgattatttagtcagataaaattgtaatttgataggctgtatttaagattcacaaaaatgtcattacatttttctttccatttttcttttacttaatgttggtcaaaattaagtgggagccgggtgcggtggctcacacctgtaatcccagcactttgggaggccaaggcaggtggatcacctgaggtcaggtgttcaagagtagcctggcaaacacggtgaaaccctgtctctactaaaaatacaaaaattagctgagtgtggtagcacacacctgtaatcccagctatcacttgataatcacttgaacctgggagggggaggttgcagtgagcagagatcataccactgcactccagcctgggagacaaagcaagactccrttcccgctccccccaaaaaaaaattaagtggggatactggaaatgactaaaatgtatagactcctagattcaatgcaggcaatcagggaaactcctagcaagggcatgagatgacatcaagggatcatggcaagaggcaacaagtgggaaatccagcaagtgggtaaggttcagtattcacaaacaggaaatagaataagcaatg

SEQ ID NO: 18954 - DNA, 592 bp, Homo sapiens
ttgatgattatttagtcagataaaattgtaatttgataggctgtatttaagattcacaaaaatgtcattacatttttctttccatttttcttttacttaatgttggtcaaaattaagtgggagccgggtgcggtggctcacacctgtaatcccagcactttgggaggccaaggcaggtggatcacctgaggtcaggtgttcaagagtagcctggcaaacacggtgaaaccctgtctctactaaaaatacaaaaattagctgagtgtggtagcacacacctgtaatcccagctatcacttgataatcacttgaacctgggagggggaggttgcagtgagcagagatcataccactgcactccagcctgggagacaaagcaagactccattcccgctccccccaaaaaaaaattaagtggggatactggaaatgactaaaatgtatagaytcctagattcaatgcaggcaatcagggaaactcctagcaagggcatgagatgacatcaagggatcatggcaagaggcaacaagtgggaaatccagcaagtgggtaaggttcagtattcacaaacaggaaatagaataagcaatg

SEQ ID NO: 18955 - DNA, 592 bp, Homo sapiens
ttgatgattatttagtcagataaaattgtaatttgataggctgtatttaagattcacaaaaatgtcattacatttttctttccatttttcttttacttaatgttggtcaaaattaagtgggagccgggtgcggtggctcacacctgtaatcccagcactttgggaggccaaggcaggtggatcacctgaggtcaggtgttcaagagtagcctggcaaacacggtgaaaccctgtctctactaaaaatacaaaaattagctgagtgtggtagcacacacctgtaatcccagctatcacttgataatcacttgaacctgggagggggaggttgcagtgagcagagatcataccactgcactccagcctgggagacaaagcaagactccattcccgctccccccaaaaaaaaattaagtggggatactggaaatgactaaaatgtatagactcctagattcaatgcaggcaatcagggaaactcctagcaagggcatgagatgacatcaagggakcatggcaagaggcaacaagtgggaaatccagcaagtgggtaaggttcagtattcacaaacaggaaatagaataagcaatg

SEQ ID NO: 18956 - DNA, 611 bp, Homo sapiens
aaagatgtgctagtgtttcagaaatcagagatagagatatgttatgttttgggcagaagaaattgtaaagaaagatgcagggagggaagcacttgtgtcaaaaatgtcagcatgttgaaactgagtcacttaaaaaattgagtagagggcataaaggaccatttaaagaacaaagcaagtttatgtattagattgaatgaatagtgaataaaaacataggggagttttagctgcaggctccaaaacagaagcatggaagtcactatctcccatttttgtatctggggatatgatgtactcgacagagtaccaaggtggggaagcgcctgctgcttagtgcttgaccactctttaccctctgccacccacactataataagaaacagacagcagtgctcccaagagcaggcctataacctcattgatgcttcttaagtggccataaagaagttgactragcatgaaatttcatcattaaagtttatgcctttagttggggggaggggaggagaaacaaaaatcatgactaaattaaaaagaggaggaggaacaaatgataacagctcgtatgaaaagatgatgtggttcctaggagatagttaagtcttagc

SEQ ID NO: 18957 - DNA, 611 bp, Homo sapiens
aaagatgtgctagtgtttcagaaatcagagatagagatatgttatgttttgggcagaagaaattgtaaagaaagatgcagggagggaagcacttgtgtcaaaaatgtcagcatgttgaaactgagtcacttaaaaaattgagtagagggcataaaggaccatttaaagaacaaagcaagtttatgtattagattgaatgaatagtgaataaaaacataggggagttttagctgcaggctccaaaacagaagcatggaagtcactatctcccatttttgtatctggggatatgatgtactcgacagagtaccaaggtggggaagcgcctgctgcttagtgcttgaccactctttaccctctgccacccacactataataagaaacagacagcagtgctcccaagagcaggcctataacctcattgatgcttcttaagtggccataaagaagttgactaagcatgaaatttcatcattaaagtttatgcctttagttggggggaggggaggagaaacaaaaatcatgactaaatwaaaaagaggaggaggaacaaatgataacagctcgtatgaaaagatgatgtggttcctaggagatagttaagtcttagc

SEQ ID NO: 18958 - DNA, 513 bp, Homo sapiens
aatcatacattactaggtcgagggctttgaggatgaaggggaactgcttttgagaagcagatatgtctggcgcctgatggttttcatgatggaagcaaaataatgtatcatttttctatataatggcagatgaccatcccagataaatgactataagggatagcttgatttaccctttccacaatgtatgtatatttcaaaacaacatgtggtacatgataaatatatacaatttttattatcaattaaaaataaatttwaaaatgtttagaaaactaatgataaggaaaaaaatcttagaacagtatcattggcctgtcaatagtcaatggaagtattgcctaagtttctttccaaaatattcaggacaacaccaatgtgtaggaatctaatggcagtccacaaaaacaatttttagaaaagtaaaagaaatacttaaaatactttttattggtggcatcccatatcctccagccagtgctgttggattttgcatttctatttgtttcagaa

SEQ ID NO: 18959 - DNA, 608 bp, Homo sapiens
catttggctgatgggtgctgaaacctctcactgcaaccaggttcatttggctccaagtcctgtgtgctctttatgaagtcatagcaaggcctggactagggtgagaaaggacaggtgcctgtgaggcaggacttaaaggaggcgctagcctcaggggcatgcgagggcagggtgagcacctgagagtgagggcctccttaaagtctgtggtccagggtcctttggtcccctaatcccagagcagaaaagaaagccttcaaatccagctgctgcctgaagagcctcagactcactcccctggggcagcaaagtgcatttctttacccacaaggccctgtagtgctgactggwagatggggctgtcagggactcatgggaaagaatggcacattggatacaaactcattcggcttagttttaccctgtggctgcccctgtagtgtcatttgtgacaccaggaatatgttccataccaaccgaatagcttctcttcctattcgtgccagtgcatggaactatataatcattcatctattcattaattcatttatttgtagccttcctctttatataggcttagagagccactactcgaagccaagccttac

SEQ ID NO: 18960 - DNA, 1289 bp, Homo sapiens
tgtagtttaagaataaattaatggtaataattatatttttgaaacttgactccccaaggctttgtgaaatttctaagcaagacatgagcaaaagaacaaaatttggtactgggattctacctcacctgtggagcgcctaccttaccttatctgccttacctgtgaagtgcctaccttgccttgccttacctacacacctgtggagtgccactaaagagatcttggagagaagacacgtttagggtgaccagcttcttcctgtttgcccagggctttccaacttttagctttgaaagtcttatgtccctggaaacctctctggtgatcctagatttatcttcctaacctgctcckggttcctaccgaaggcaaaatgtggcttattaggaggcagatgcatcaccctcacagcactatgcatgctgtatgtaattgtcctcttattataggtgaggaaagtgaggctcagacagatgccctaggtgactcagctgtgaaacagggatgatctgaatccgtgtctctcattctcagagtcatggtcttccctttacattgtgctccgggaaagacctcctggcctgagtgacctctgtgctcaagtagcatctgtcacacaagaccctagatcggtttcctctgaagggattcccagcagcaactatgatacaattgggaggtggttaatttggtgcagacgggacatggttaatgtggcaaagggtttccaactgcagggtgaagccatcatggtctgttgttttgggggaggagggtgggaagcttgcctggaaatggatgggaggggaagatgctttggagcctgcctgccccgctttattattaggttaattgaaaccataaaagcaaactccgatttgcattaaagccctgcatagcagatggcgacaagttctgaggatcataaaaggaggattgaaagttataaagcatcttgggctcatctgcgccagagtgctagacgaaaggcattgtgggagactggctgcacccttctccaacccgcgagtcagcgcccgggactatgtgaccccagtcctgcaccctgcaccccctcctcgtgtggcacacaacttccccacctgggataggttgttttccccggggctcacaagtcccagaaatgtcaaatatctttccttttgctctctcttaaagcatgttttcacatccactttctttgggaaaaacaaggtttgcctttagtgcctcttcatctctactcatgggcatgagtcagttggcattgctataaaaaataccaggga

SEQ ID NO: 18961 - DNA, 558 bp, Homo sapiens
gttctcctgtgcctcttataagggcactaatctcaatcaggagggctctatcctcatgacttcatctaagacttcttacttcccaaagccccacctgcaaatatcatcacactggggtaatccctggttttgacacatgaattttgagagggcacaaacgttcagtgcataacgtctttcttttccttgtccactgaatctgccacttctctctgccacttctctttgcccattcyctcccagaagaatggaacctaacgaagtgattgacattctctgtctatggtgaatacttctctgtgatggtcccacccttccccaaacccctcctcactttcagtaatcgagaaaacagaattctttagacaagaagctctaaagatctcaatgctgccagtgatcctcccacccatctcagagaagaggactcctgctctgccacacctcacacctcatcccaatttgtctcatcccctctggacttggctctgtcagttaacttctttctcctgccactttgaatttttctgtctcctctggtctttctctgtctacaca

SEQ ID NO: 18962 - DNA, 558 bp, Homo sapiens
gttctcctgtgcctcttataagggcactaatctcaatcaggagggctctatcctcatgacttcatctaagacttcttacttcccaaagccccacctgcaaatatcatcacactggggtaatccctggttttgacacatgaattttgagagggcacaaacgttcagtgcataacgtctttcttttccttgtccactgaatctgccacttctctctgccacttctctttgcccattccctcccagaagaatggaacctaacgaagtgattgacattctctgtctatggtgaatacttctctgtgatggtcccacccttccccaaacccctcctcactttcagtaatcgagaaaacagaattctttagacaagaagctctaaagatctcaatgctgccagtgatcctcccacccatctcagagaagaggactcctgctctgccacacctcacacctcatcccaatttgtcwcatcccctctggacttggctctgtcagttaacttctttctcctgccactttgaatttttctgtctcctctggtctttctctgtctacaca

SEQ ID NO: 18963 - DNA, 558 bp, Homo sapiens
gttctcctgtgcctcttataagggcactaatctcaatcaggagggctctatcctcatgacttcatctaagacttcttacttcccaaagccccacctgcaaatatcatcacactggggtaatccctggttttgacacatgaattttgagagggcacaaacgttcagtgcataacgtctttcttttccttgtccactgaatctgccacttctctctgccacttctctttgcccattccctcccagaagaatggaacctaacgaagtgattgacattctctgtctatggtgaatacttctctgtgatggtcccacccttccccaaacccctcctcactttcagtaatcgagaaaacagaattctttagacaagaagctctaaagatctcaatgctgccagtgatcctcccacccatctcagagaagaggactcctgctctgccacacctcacacctcatcccaatttgtctcatcccctctggacttggctctgtcagttaacttctttctcckgccactttgaatttttctgtctcctctggtctttctctgtctacaca

SEQ ID NO: 18964 - DNA, 562 bp, Homo sapiens
tactcctgaaacatgagtctggggatgggggtggaggaggctcagcaacccccaacagcagggcggggcccccaaacctttaggcctgaggcacccggtagacagaatcctcactgcagcctacagcccatgcgcccgctaagctcagccactcagcttcctctgccacctcggcaagcaactgcctatctctgggcctttttcccagatgtcatggcctggattcggggttaaagaactttcccgctccccctttcccttgcacagagtggaggccgagagtctaaagccaggccacctgcactggaagccggccctctgccatgtattagagggttggatatgagcaaatcccttaatcatttcgtgcctccctaasagataggtattgctattattattattttcattttaggaaacgagtgataatagcaatacctatctcggggggttgttggaaggactgaaggttctggaatagcaaccagcccctctatcaatcagtgcaccttattatggccactgctctaggatgctctaagcgtagaggcgctacaccttg

SEQ ID NO: 18965 - DNA, 490 bp, Homo sapiens
gggtaaggctggaggaggggagatcagttgggaagtagtttcagagttcctgggggacggtgatggagaaaagaaatcagcagcagttctggtgcttccatgatggagaggaagggatcaatttgaaatgatgaagaagtatgagtcaaatgatctttgttattgactggatgtgagggcctgaagccagcaggaatgatggaggttcctagccaaagaatatttaggaacagaaagtttaaatacaagstaaatgtaatcaagtaatgtatttcttttaatgggatatctgcctctcatcataaagagaaaacgttgtgtccttggcttagtgatttattgaacataggcatttttcttacaaagcaagcttaacagcagaaaggcatttatttcagcaaattaatttcaatcaggactgtctcctaggcaatgaaaggttataatgggaagcatgttgattcactgttctctgtgtcttccagagacc

SEQ ID NO: 18966 - DNA, 542 bp, Homo sapiens
gcggaggttgcagtgagttgagatagcgccactgtactcaagctggggtgacagaatgagactctgcctcaaaaaaaaaaaacagatatggcaaacaactgggtacccacaaacctcctcacagcccccsaggacatgccgcagagcctcccacagaccaaggcgacaaccagctccggcatcttcctcagcaatattgcagcactggccacagaatgacagggaggagactctgggattcccggagctgatacagagcaaactgtgacgcacaagccacgaaaaccaagcagaaggcggtgactgaggggcccaatgtagtgctcctggagagctaaggagactgaagaacccagtgggctgtgccagccacaggggaacaagacgcctcagcatggagccagatgtgtgacatccacgcaggagggggatgcccccgacaccacttttgacggtcctcagaagagatgctggcattcaaggcaggaaggaggctgggcaggggctgctccaggaggccatatgaccaacaagttgggagc

SEQ ID NO: 18967 - DNA, 1196 bp, Homo sapiens
atttattttagattctagatttgtctgactattttcatttacttttttaaacttgtttatctgactccttgatttatctaagctgaatattaactctgacatcttgattagattcaggttaaactaagttggcaagaacgattcagcacatgctgtcttcctcataacatgccacatcaaagaaaataaggtgagatcttctcactattggtgatactacatttgatgacttgggtgaggtgaagaaaaccttttctttgctattaacattaattgtgggagaatacactggcattatgaaaacattatttctaattttaatattgagacagaatagcacctattctattattcttggtgtacatactcatgatataactatctgaggcataacattctgataattttatcaataatattcaatcaattacaatatatctatatgtaaacaccaggataacaacatttgccatatatgtagaagaaagtctgaaaactttggataattttaacacatttgttcaagaatacatgcagagaacgaccattgcagcatttttgctaataactagaattgaaaataagttttataaccatttgtagggaaatacacagatgaaatgtggaatactcatcactgaaaccccatggcagtgaaatgggatgaattaaaattatgcatcaacatggatagattaataacacgtactgctgagttcaaaacaagatgtagaccaaggtcatcttgtaatcccagcactttgggaggctagagtgggaggatcacttgagcccaggaggttgaggctgcagtgagccrtctatgttcatgctactgcactacagcctgggcaacagaaagacagcctgtgtcaaagaaaaaaaaaaaaaaagatatttgggtaaagaaaatttaaacataaagaggaacaataccacatactgtaaatgaatgtatttgtgaatatgtgaaataaatgacttggaagaacatcaaaatcatgacagtggtcaactcttggtgtatgggagagggggatggtttgatgttaggtatatttaaatatttatttatttaaaatagactaggagctaaaatgacaaaataattaacctttgttatttctggattttgtttttgttactctctatacactcatttaaagattaaaattcttaaccttcactttagagat

SEQ ID NO: 18968 - DNA, 533 bp, Homo sapiens
ttgttcaactttcacatgccatgaaacattaccattattttgaaaatcttttcaaccayttaaacttgcaaaaatcactcttagcacatgggccatacaaaacatcaggcaggctagggttttggctcatgggtcagaatgtacgtcaagtggttaaaactgtggttaggtctaagaagaggaagtagaacaaaagacaaggttttttctcttcacttttaaattaagacatgtctgtattttattatagacatatattacttttatgttctgaaaaacagtaacatgggcaggcgcagtggctcacgcctgtaatcccagcactttgggaggccggaacaggcagatcacctgaagtcaggaattcgagaccagcctggccaacatggtgaaaccccatttctactaaaaatacaaaaactagccgggcatgggacgcatgcctgtaatcccagctacccgggaggctgaggcaggagaatcactggaacccaggaggaagaggctgcagtgagccaagattgcaccactgc

SEQ ID NO: 18969 - DNA, 533 bp, Homo sapiens
ttgttcaactttcacatgccatgaaacattaccattattttgaaaatcttttcaaccatttaaacttgcaaaaatcactcttagcacatgggccatacaaaacatcaggcaggctagggttttggctcatgggtcagaatgtacgtcaagtggttaaaactgtggttaggtctaagaagaggaagtagaacaaaagacaaggttttttctcttcacttttaaattaagacatgtctgtattttattatagacatatattacttttatgttctgaaaaacagtaacatgggcaggcgcagtggctsacgcctgtaatcccagcactttgggaggccggaacaggcagatcacctgaagtcaggaattcgagaccagcctggccaacatggtgaaaccccatttctactaaaaatacaaaaactagccgggcatgggacgcatgcctgtaatcccagctacccgggaggctgaggcaggagaatcactggaacccaggaggaagaggctgcagtgagccaagattgcaccactgc

SEQ ID NO: 18970 - DNA, 506 bp, Homo sapiens
aaattagctgggtgtggtggcacatgtctgtaatcccagctactcaggagactgaggcaggagaattgcttgaacccgggaggtgatggttgcagtgagccgagatcgcgccactgcactccagcctaggcaatggagcaagactctgtctcaggaaaaaagaaagaaakaaagtagggtgaagctggtttcttgcttgaggtgtgtgtttggtgaggtcgaagaaaagagttaagcttaggacaggcctgtgggacacacaagaagagacagctaatcaacagttggttttatctagaactcaggaaagagagatttggaatcattgggatatagttgaaaaataaaatgatacaatcctcttagagtaatttgcaagtttctatcaaaattgattcagcagctgtactaagaatttattcaatgataacattcacacacgtgcacaaaaatcattaagagtatcctgtgctctactgtttacagtaaaaaaacaaactggcagc

SEQ ID NO: 18971 - DNA, 489 bp, Homo sapiens
tttggtactatttatcctccagcactctttgtgggatcgggctgaagctagacttctctgaaatcacatttttgcctagccttttcttatgctctagccaacatccttcattttcctatgagtttctcctgagggtatttcatcaatacgtcatttacgcaggaatctccatttcaggctctgcttctaaggaacctgacctaagacctttckaggcacttgagattgtattcctccataagcttagttaccaccactccattagttatccaaaaatttgctgaaatttctcatactctgatgttgtctttctcataatttttttgttttttagaactgatatctttttattcctctactgacattgtagcacattttttggagagaatagttacatgcatatggtcaatctcataaggaagtttaagttgtctgtatataagaatttaggtttattctgtattttctactaaatataccatttccact

SEQ ID NO: 18972 - DNA, 1099 bp, Homo sapiens
ctaattgtaagcaaatttaattaaaaatcttttgctttgggttttaacttttatttggaattggacttagcagtgcattaataatgacaatataggttcctggacctcacctgaggatgtgaaaaggcatattaacatttatcaagtctatgttctcatgtttgaattcttctttatccggttaatattgcagtttagattgactaagaaacttctatcatatggtttgtttttgatgacatgttggtatgatggaaaatgtactatctggactctccatttactagccctgtgactttgggcaaatccagtaaactcttggagtctttacttcctcatctgtataacaaactgaggagttttcagtaaataatatcttcagtcttatttgtgtctataattctgtgaaccaaatattttatattttcatggttatagtaaaatatgtaaattatttttattattttagaattattataaaacattaggaaagaatgctgtaattttcaaggagtttgaacaattagcctaggggaaattggttatgggaaaacttggctagaaaaataacttctagcactgtttgccaagtaggaaaacaagattactctggaaagcggtggttattattgatgttacatctgagctgccaatggtcacctcattgtgatttatcgtggtattttaataataagcttcttgtcaagtttctgttataatatttataaaagtcaaaattccctagactcaagtctatgctatttttttcagtgagtgcacatattttggtgtttatataatttagcacaccattatgtgcttctcstgatattttaactccgaaaatacccatttgattgttctgaagatcttaatgtcttttattttaggagttgggtattttctgatttaaaaatcatccatctgccctggtcacaccatgattaattttttcttccaatataagaagttatttcatacttgtaattaatttattttccatatatgccataattttaaatgatcttataaatcagtacaagcatttctcagagaatttggggagcaacttattttcccatgaaggcaggtgcttttt

SEQ ID NO: 18973 - DNA, 1099 bp, Homo sapiens
ctaattgtaagcaaatttaattaaaaatcttttgctttgggttttaacttttatttggaattggacttagcagtgcattaataatgacaatataggttcctggacctcacctgaggatgtgaaaaggcatattaacatttatcaagtctatgttctcatgtttgaattcttctttatccggttaatattgcagtttagattgactaagaaacttctatcatatggtttgtttttgatgacatgttggtatgatggaaaatgtactatctggactctccatttactagccctgtgactttgggcaaatccagtaaactcttggagtctttacttcctcatctgtataacaaactgaggagttttcagtaaataatatcttcagtcttatttgtgtctataattctgtgaaccaaatattttatattttcatggttatagtaaaatatgtaaattatttttattattttagaattattataaaacattaggaaagaatgctgtaattttcaaggagtttgaacaattagcctaggggaaattggttatgggaaaacttggctagaaaaataacttctagcactgtttgccaagtaggaaaacaagattactctggaaagcggtggttattattgatgttacatctgagctgccaatggtcacctcattgtgatttatcgtggtattttaataataagcttcttgtcaagtttctgttataatatttataaaagtcaaaattccctagactcaagtctatgctatttttttcagtgagtgcacatattttggtgtttatataatttagcacaccattatgtgcttctcgtgatattttaactcygaaaatacccatttgattgttctgaagatcttaatgtcttttattttaggagttgggtattttctgatttaaaaatcatccatctgccctggtcacaccatgattaattttttcttccaatataagaagttatttcatacttgtaattaatttattttccatatatgccataattttaaatgatcttataaatcagtacaagcatttctcagagaatttggggagcaacttattttcccatgaaggcaggtgcttttt

SEQ ID NO: 18974 - DNA, 553 bp, Homo sapiens
catgttttactagtttcataaacagtttaaatttccctgtgactgagaatttaaactttccgtgccctattctcctaaagtggttatccaaagatttcatagtagaaagtgagtcaaacaaraagtggtttttcttcatagatttcagccagggagagaaagacaatatatctttcaaatgcttgctcccactgctttcctttctgtaactttagaaggtctctaatttgaattaaaaaaaatgaatccaactatatacgctgatgaatatattttttaaaatctttgggaacgtagatttaaatacaagataggtggttaattactcctcctttcagtgtcctaaggagtattagacggggacttctgggttgtatatttgaaagggataaaagtaggtctagtattaagacgttgcttcagtaggcaagtggtgttactattaatagaaccttagctgtatgatggtgagaacttgttacttttgatcatcattgaaccccaatgcccagcacatagaaggcacaaagttggtatctaattaccaattagt

SEQ ID NO: 18975 - DNA, 713 bp, Homo sapiens
caagtgagatcatatctaatttaaaggtggtaatttttatctttgaaaattcagtgactggactatatctaagtcacagcaatataaatacattggccttccaatcccatcatatatcctaccatgactacagaattacattttttaaaaatctggctaagacaggtgatttgccagaaaaatccaacagcaaacagggctctgtttcagttttgagactcagtgctgctcggccctctttggtagcaaggccaagattggtcagcttttatgctactccagtgaatgctgagtaatttcactgcttacctcttagtaaccaggtgtcgatccttcatttctgagcgttcaaaccagacatgaggacaagccttgaccatagctctctgaataattcccatcaagccgccatgaacctggccaacctagaagtagcataagaaaaggaaaaaacgtaaaaggcaccgttgtgcaaagaaagttttttaagtaccaacaaatttctattctccactcaaaaatatgattggccttctactgactgaagttcttagtctgatcaaatagtctgaaaggccaaatgtaagcaaaaaggtattctttagtagcacctttgaattttaagttacgttgctgtgctagcaatcytctaacttcaaaaagtagaggtttttcaacttggtcaacattagagaaatgtaaattaaaactac

SEQ ID NO: 18976 - DNA, 564 bp, Homo sapiens
catataacattttttctttttttttagatggagttttgctggagtacaatggcacgaccttggctcactgcaacctccgcctcccaggttcaagcaattctcctgtctcagcctcccaagtagctggaattacaggtgcccaccgccatgcccagctaattttttatttatttatttttttagtggagacggggtttcaccatgttgcccaggctggtatcaaactcctgacctcmggtgatccacccacctcggcccacggcgcctggcctggcatataacacttagagtgttattgttttcatggtaaatgtaacataattatattttgaaaagctaagaaaaattgtatgcataatccaagcatgctaacatactcactgacaaacatttcggttttggcaacaagactcttaccactgtcggaaacctatttaagatgttaatccagaatatttaattgtaaaaagtacccagatttgcacactggcaatgatattgatagttttctgaatgtgatagactgaagagggaagtaaagaaagaaggaagggagtaagagag

SEQ ID NO: 18977 - DNA, 514 bp, Homo sapiens
tttcccccttttcctttatgctaatatcttaatatcatggtgttgcttctagcttcctctgatttaaagcatgrgggttttgcaactcctactgggaaagccagtgttgttactttaaaaaaaacctactagatgtaatttcattttaagtttcttctgtatttcaatataatttagcaagggaagagattgagtgatgggctccgtataactctagaacaagtagtacctgctagttcatctctcggatcaggtttatctatttctgccaccactctgagaagagtgtggtgaagtcttcggctccttttctgtttgtgagggtttaggttgtcgtcattggtttcttccttttgccttctttaggctgagaggttaatgagttatctattttttatagtaaatcatctgtcctaggtcactcaggaggattccagggcctgggagagggaatgctggatcatatttctaatctcatgagaatcctccatactgttttccataatggctgtac

SEQ ID NO: 18978 - DNA, 531 bp, Homo sapiens
aacttaaaatatcactgacttgcctttgacaggataaaattccctgttttgaggcatttttcctctatgactaaattctcctcccaggcctacataggagtaggtttaagaaaccttccaactcacaggaacattttccagcccagcccaaccccacaagctgcccttcccacccaggcccatggggcgatgatgatggaactgctcatactgctcatcagtagcctgaagaagagcaggactcccaagtctgtggtccggatgctcacatttatgaaaattcctctcctgcctgatttcccacagttcttggtcttcaagactcatgcacatctgcacagcagcatctgcttccttggcatgkggctgcaatgtttagattcctgtagtgtacggatgaggcatacgaatcaaggctggttaatgctgcaggcaagaggcaaagcacagatactagtcagggagtcaggcagcctgggtcctgggtgtcattctatactcattaaccttgggcagatgactgcacctaaa

SEQ ID NO: 18979 - DNA, 551 bp, Homo sapiens
caaacacttgtgaacaaagtaaatattggttctaggttttctttttagagttatttgagtatctagtaatgctagaaaataatgaaggttttcacatcagcaaatgttcaggacaaaatcctagctatcaaattagaattcacacatatactcacgcacacatatatcaagaaacttggtaaatgatgctattagttatttagaatttatttcttgttattcttaaatcagaattatagaatctctgagccaggaacgtcatcaaataaattatctattttatttaacttacaatcaattttctcttacctctaaaaatatatacttccaaaacatctcctttttttaatctttttcgatttttactgrttaattccagattatatttccatcaaaaattatttttcttaaattgatttcaaaaagaatcatggggagaatgtatagtactctcttcacacaataagaaagatgactttgacagatggtccttctgtgtttattagtaggtgaagctgagtttgaacacccaagagttaagagctgaaact

SEQ ID NO: 18980 - DNA, 558 bp, Homo sapiens
aataagtgccatagttctgaacagggaaaagtggatgcacagaaggggcaaagggcaattttatctggagaaggaaaggaataaaaagattttctagaggagatgatatttgatctgttgagggcagatgggacagatggctcatcataaggaatgggatatgaccctgaaatactaatgcacagcaaaaataaatctcttggagaattcgttaaaatgaagattcctcggccaaatacccaggcagttgatttcagcggaaccctgagtcaccatttctaagaagtccctctgctgactccaatgcagatggtcttcaggccatgttttgaagaaacaggaaggcatgaaaacacatggygtgtttgaggccaggcaagaagttctctgtggctggaggtttgtgatgcaggggaaggatgttggatgggatgatttggaagcccgttgaggccagattatgaagagtcttgtgggtcataccaaggaatttaaattttgttctgtaacaccgtgggactattactgatttataatgagggaagtgatatgatcaga

SEQ ID NO: 18981 - DNA, 613 bp, Homo sapiens
atcgcctgagatcaggaatttgagaccagcttggccaacatggtgaaaccctgtctctactaaaaatataaaaattagccaggcgtggtggtgagctcctgtaatcccagctactctggaggctgaggcaggagaatctcttgaacccaggaggcggaggttgcagtgaaccgagatcggccattgyactccagcctgggcaacagagtgagactccgtctggaaaaaaaaaaaatttgaaacttcaaatagcaatttgaaataaagtcactggcaaattcacagcatttatatagtacacaccataaactacaaatcagagagcacagtgaacacagtaattaattaaacctgataagtagggaagtagaaattatagccgtttaaaaaatagtagtaattaccttgcaccttcaaagcatcctttcttctccatgtcctatgatgtcaatttatatcaagtaaattacataaaagtattctttccatattaaagatggatagaaaagttttccttatttctgataggccaaatgtggtctcgctcctgtgtaaacatagaaatgaaaatactaatatactaatgtagctacaatgttatgtttaaaagtaa

SEQ ID NO: 18982 - DNA, 590 bp, Homo sapiens
taggaagaatagttaaaagggagggggcatatgtcattttgtcctcttctatttttggcttggaatgtggacatgatagctagttccctggtagtcatctcagaccatgaggcaaccttgagggtgctgagaaagacaggagctggattcctgatgcccatggagctgctgtaccagagcttctgcttctttttttgggagagaggaacacacttttatcatgtttaaggccttattaattcggagttttctattatatggagccaaatattctcctgataaggtgggttcagagtagatgtggaattggagataatttcattttttcctaatcagtcatcttctagaagaaacatttcctggagattcttttttaaatgccaactttttaaaataccaattggttgtcttcaaaggatagtagttatccctttattgaggtttaatttttaggattaaaaaactgatttaaaataaaatataaaataatttggactttgargcaaagcagagatttggcagcaggcagccttagatttcagctcagggatggcaatatctcattatacacactttagttgcatgtatac

SEQ ID NO: 18983 - DNA, 798 bp, Homo sapiens
tcatcattttttttgtttgtttaaattgggctaatctgtactgggcacctatgcccagggattaatgtgtctattcaaactccccatggaggtgaatgtttttcttgtttattcttctcatttcacagatgagatggtacagcctctgacctgggttctttacacgaatcctcttagttcatgcacgtttcagttctggaagggggggcattcttttgttattgtacactctgcatgagatttgtactgtggctctgtggacctgtctccttgcgaaggccaggctgaacgcaggcttcatgaagacttaagcacctgcaatatctgtagctcccttggggaaagatgctctgcaacgcagacccctgcgctggccayccccatccctgttccagagaaaacacgaggactggtctggtgggaggcaatgcttcctgtttcaggggatgatctcatcttgaacctgagggaggtctagccggtgttgattcgttttagcagggggcctcctgcgattttcagccttcccttgggtcagcataagggcatttgtcttttaagactaaggtgagcaaattttaaaaggagaaattgaaagcctgttctctggttgtctacatgtctaggagggggccagagaggagcagacagccatagactgtcagaggtgggtaaaagtgtgtggacatgctgactcgctctggtagggtttcggcaaagggtctgaatccaggctctgccactaattagttgtgtgaccttgagtaagttacctagcctatctgaacctcagtttcc

SEQ ID NO: 18984 - DNA, 798 bp, Homo sapiens
tcatcattttttttgtttgtttaaattgggctaatctgtactgggcacctatgcccagggattaatgtgtctattcaaactccccatggaggtgaatgtttttcttgtttattcttctcatttcacagatgagatggtacagcctctgacctgggttctttacacgaatcctcttagttcatgcacgtttcagttctggaagggggggcattcttttgttattgtacactctgcatgagatttgtactgtggctctgtggacctgtctccttgcgaaggccaggctgaacgcaggcttcatgaagacttaagcacctgcaatatctgtagctcccttggggaaagatgctctgcaacgcagacccctgcgctggccacccccatccctgttccagagaaaacrcgaggactggtctggtgggaggcaatgcttcctgtttcaggggatgatctcatcttgaacctgagggaggtctagccggtgttgattcgttttagcagggggcctcctgcgattttcagccttcccttgggtcagcataagggcatttgtcttttaagactaaggtgagcaaattttaaaaggagaaattgaaagcctgttctctggttgtctacatgtctaggagggggccagagaggagcagacagccatagactgtcagaggtgggtaaaagtgtgtggacatgctgactcgctctggtagggtttcggcaaagggtctgaatccaggctctgccactaattagttgtgtgaccttgagtaagttacctagcctatctgaacctcagtttcc

SEQ ID NO: 18985 - DNA, 564 bp, Homo sapiens
aaccaaacagaaaggtttttttttaatgtgaaatacatgagaactcttagaacactataattgcagttctaaagaaagtaatcatattactcatatatgaatcttgatttctagacaaatatatttctgaaactgtatgatgaaattcatatttaaaatggaatttaataattgtcatcaataatggatatcttactttaatctatcaataaaatcacctacctagggatgtatgtagatgagtaattcttcaattagaatactaaaaaatatgtcattacaattacagcttcaagggrccagtaatgtttgtggtagactttcaagactgttgagtgtgtagtttatctaaatactaaggttattttttccttgtaattctagagccacaccattgttttgactatggcacaaatgtaatgcacatttcaataaaacagtacagctgggaattaacaggctaataaaaaggactttaaaggtgcattaaattaggatttaagatgtctcttgcatttgcagcataaatgctaataaaaatataaatctgttattaacttttta

SEQ ID NO: 18986 - DNA, 545 bp, Homo sapiens
ggcagaatcaaaaagctatgtttgatcatctcagttatttactggaaaacagcagtgttggtcttggtaagtaaatgacttttatttcatctttaaggttgaaataatataatattacatttaaaaagcaaacgtttkgttaaaaaatgtgcaatggacctgaatagacatttcacaaaagaagacagatagttggccaataggtatatgaaaaaatactcgacatcactcatcatcagcaaagtgcaaattgaaaccacagtgagctatcacctcacacctgttagaatgcctattattgaaaagacaaaacataataagtgttggcgagggtgtggggaaaagggaacccttatacatgttggtgggaatgtaaacacagccattttagaaaacattaaggagattcctcaaaaaattaaaaatagaactaccatatgatctaacagttttacttctgggtatatatatccaagggaaatgaataatcagtatgtcgaagagatacgtgtacttccatggtcattgcagcattattcacaata

SEQ ID NO: 18987 - DNA, 545 bp, Homo sapiens
ggcagaatcaaaaagctatgtttgatcatctcagttatttactggaaaacagcagtgttggtcttggtaagtaaatgacttttatttcatctttaaggttgaaataatataatattacatttaaaaagcaaacgttttgttaaaaaatgtgcaatggamctgaatagacatttcacaaaagaagacagatagttggccaataggtatatgaaaaaatactcgacatcactcatcatcagcaaagtgcaaattgaaaccacagtgagctatcacctcacacctgttagaatgcctattattgaaaagacaaaacataataagtgttggcgagggtgtggggaaaagggaacccttatacatgttggtgggaatgtaaacacagccattttagaaaacattaaggagattcctcaaaaaattaaaaatagaactaccatatgatctaacagttttacttctgggtatatatatccaagggaaatgaataatcagtatgtcgaagagatacgtgtacttccatggtcattgcagcattattcacaata

SEQ ID NO: 18988 - DNA, 495 bp, Homo sapiens
atatagtatgtaatatataaaacattgatattaggtatattaaatataatactatttaaaatatagtcttcctgactgggaaaaacaaatttctraagtaaaattcaatagcatttttttcccctgaggatgacaaaaaatgtcctcaacaattcagttaacaccattttttgacaatttatacaatagagtccagttgtgcagatgctacctgaagatggattagcataaaatggctaccaagtatctggaagaattgaagaaatacatatgtaccacctttccagatggtctccagaaaaatcctcttcccagctagacagataattcttggcagggaatttgggactgtatcaaatacttggagtacagctgtttctcaagagttgatctggggtagggttaataaccattcatgaagatctagaattacaaagactagagcttctatagttgtgagttttcaaaattcaagtaatgagctgctgtgatcca

SEQ ID NO: 18989 - DNA, 522 bp, Homo sapiens
catgtaggtaaggactcacttccttcttgggggttctactcagtggttgtattttttcgaagcatttgtttcttactctgacgataattgcacatagaagaatagttaatgattaacaacactttaaagtgggataatcggcagtgtcttgttttctatcttgttttaaggggttggtaatatcataattaataacttacagaatggtaataatgtcttaaaatagctttcccatagtactataatcccagagctttgggaggaagagataggaggatcccttgaggccagcaattcaagaccagcctgggtaacagggcaagactccatctctacaaaaagattaaaaaaaaaaaaaaagctaggcatggtggcaacacacctgtaccatagtcctagctactcaggaggctgaggtgggaagatttcttgagcccagaagttcaaggctgtagtgagctatgatagtgccactactgcagcctgagagacagagtgagaccctgtckctaatttaaaaaa

SEQ ID NO: 18990 - DNA, 557 bp, Homo sapiens
tccatggcacaagcatgttcttcagactccaccatcctccatgacacagacattggttggtttcacttaatttccaatccagattgagatttgatgataatactcttggatgtatttgttgtagaattctaaagtgaattctttttttttttttttttttttttgagacggagtctcrgtctcttgcccaggctggagtgcagtggcgtgatctcagctcactgcaacctccgcctcccaggttcactacattctccttcctcagcctgccgagtggctgggactacaggcgcccaccaccattccctgctaatttttttggtatttttagtagaaatggggtttcgccatgttagccaggatggtcttgatctcctgacctcatgatcttcctgccttggcctcccaaagtgctgggattacaggcgtgagccaccacactgggcctaaagtgaacttttaagtgaccacaacttaatggtatcaaaaaccaaattagtagaatagtataataaaaaaaaactttatataatcagtataattttataacctctgat

SEQ ID NO: 18991 - DNA, 557 bp, Homo sapiens
tccatggcacaagcatgttcttcagactccaccatcctccatgacacagacattggttggtttcacttaatttccaatccagattgagatttgatgataatactcttggatgtatttgttgtagaattctaaagtgaattctttttttttttttttttttttttgagacggagtctcagtctcttgcccaggctggagtgcagtggcgtgatctcagctcactgcaacctccrcctcccaggttcactacattctccttcctcagcctgccgagtggctgggactacaggcgcccaccaccattccctgctaatttttttggtatttttagtagaaatggggtttcgccatgttagccaggatggtcttgatctcctgacctcatgatcttcctgccttggcctcccaaagtgctgggattacaggcgtgagccaccacactgggcctaaagtgaacttttaagtgaccacaacttaatggtatcaaaaaccaaattagtagaatagtataataaaaaaaaactttatataatcagtataattttataacctctgat

SEQ ID NO: 18992 - DNA, 708 bp, Homo sapiens
gacagggaaaagtgttcaggatatgttatatatctaaaaaaaatcaaacagtatgcctaacaagacattgcttttataaatataaatagtatatagaggtactggtgcataaagaaaaacagactggcaggtggaggcactgagttgcactttggcatttcagtgataaygtcaaatacatctaaatattaaaaggttatctctggctgatgagatttttttcttatttttatttattcatatttcataaatgtgttatgttttaattaatacagaaatataagtaattatttttaaaagtggaaaacatggttattttcaaactcatatggactacagaaaatacgtaagatcttgtgtctatgttactgtttaagtaatagatcctggggtagaaggtaaattgaaagaaatcaaagaaaacattaacctgaatctttaagcttttataaaaagatactattataatttaatactaacaaaaaacataaataaaaaacttttagaaaccctggagggtaaagagaaagttcttcaatatctctagaagagttattatcttcctgaagtataactcacaacagacctcatatataaaaatatacttcatatacacttcaaatgtaattcatatataaaagcaaactacagtcaggcacggtggctcacgcctgtaatcccagcactttgggaggctgaggcaagcgg

SEQ ID NO: 18993 - DNA, 708 bp, Homo sapiens
gacagggaaaagtgttcaggatatgttatatatctaaaaaaaatcaaacagtatgcctaacaagacattgcttttataaatataaatagtatatagaggtactggtgcataaagaaaaacagactggcaggtggaggcactgagttgcactttggcatttcagtgataacgtcaaatacatctaaatattaaaaggttatctctggctgatgagatttttttcttatttttatttattcatatttcataaatgtgttatgttttaattaatacagaaatataagtaattatttttaaaagtggaaaacatggttattttcaaactcatatggactacagaaaatacgtaagatcttgtgtctatgttactgtttaagtaatagatcctggggtagaaggtaaattgaaagaaatcaaagaaaacattaacctgaatctttaagcttttataaaaagatactattataatttaatactaacaaaaaacataaataaaaaacttttagaaaccctggagggtaaagagaaagttcttcaatatctctagaagagttattatcttcctgaagtataacycacaacagacctcatatataaaaatatacttcatatacacttcaaatgtaattcatatataaaagcaaactacagtcaggcacggtggctcacgcctgtaatcccagcactttgggaggctgaggcaagcgg

SEQ ID NO: 18994 - DNA, 535 bp, Homo sapiens
gcttcctcctcaacaccgagaaaccagcactcttttctgcccagtaattacctgaccttgagtaattaccatagccaaacacacactgcgagttgcttcctcatgaatgcctagacagatacctaaaactttaggcactagattctaaagatgttatgaaaaatagctttttcaaaaagataatttcctaaataaaacttcaatgcagatgtaattataaatatatgtactctaatttaaaattgttatrtcaactaaagtttagaacgttccatagaaggtccacaattatatggaaaattccattgagactgaattccttgattttcctttctagttctccttttaagattgaaggggagttcccaagtatggttctcttgagtttgttgagcattgcattattttctttttcaggggatagtgccctttgaaacaagacatgtaaatatgtcagtaggcttcagctatagcaagagtttctattattttttttaaaaaaacatatttatttaatcatagacttaggaaagaa

SEQ ID NO: 18995 - DNA, 646 bp, Homo sapiens
tgtacctatcatcatttagaaatataatttacaaaatgctgattacaaaatatacatactctgttttattcaaaattaaaactgtgaaaggatttagagaaaatattcccttggccttatgtagaatagtcagacaattttgtggcttttttattggtaacatccacagctaagtgataactaaatgttcctattcttctagttgacgggcagtaaatattcaagacaatgatgagggcatcatccagwgtgatattccggatggaagtccacaccacgtaagttagtgtccctcttgtctctcacatgagctgaattttcaggaaagcagagaagtcaggcaatcagccaacggtctgtgttgctttcattacagacctgcaaagcatttaaatcttcagaagagaaagtttctgccttcttaaaaccagctgtacaccagccactctcaatggtccatgaggcacccagctcagagaattccacttccccctaaagatcggtcagaactgctgggaaaagcaagcacttcaaagtaacacagaggtctggtgaatgttcggctcacttcagaaagcatttccctgctcagagataaggggggaagctgcaatattctgaaagtttgcagaatcatggcattgct

SEQ ID NO: 18996 - DNA, 550 bp, Homo sapiens
tggagtctcgctctgtagcccaggctggagtacagtggcgccgtctcggctcactgcaagctccgcctcctggcttcacgcattctcctgcctcagcctcccaagtagctgggactacaggcgcccgccaccaagcccggctaattttttatatttttagtagagacggggtttcaccgtgttagccaggatggtctcgatctcctgacctcgtgatccacctgcctcggcctcccaaagtgctgggattacaggcgtgagccaccgcgcccagccggatgtgagttttttgtgggcaacatatatataggtctttacagtctggctttgtctggtaacattcttcaacagtaagccagtccagagattgtggacacgtcatttggtgtagtgcctaacccatgaggctgcagccattgcagtgctagggggcgccctaagcccaggagtgccacaagctggagtcccatggcctctgactctggtgcagcactgagcaggaatcccatggccattaaggstagtgcagtattgaggtgcacctaatgcc

SEQ ID NO: 18997 - DNA, 422 bp, Homo sapiens
tgaggaaatagtagggctcacataagtgtttcatgtctctctggtatcaatgtccttccttgcttgatgcacaggatattttaaaccayggtttaatatacttgtccatttttaatctttatatgtagtgaggcaaatctaatccctcagtatttccaaaggattttcattcattctatctacaattattcaataattgctatacttcttgctgtacacttagaactggcaatattaaggtgcataaggaacaatgagaacaaacacagagaaagacagacaagtgaactgtcatttgtaacacttaagaggaggtcaagcctggtgcggtcgtcacgcctgtaatcccagcactttgaaaggctgaggcaggtggatcacctgaggtcaggaggtcgggaccagcctggccaacatggtga

SEQ ID NO: 18998 - DNA, 558 bp, Homo sapiens
ggataagttttccctggcttgatatctaaataatctaaaacttttttatttctcatgttcttgtcaaaataaaattaagtaaaagacctagtcagaatgggggggcattcaaaggaatgaacgtaagtgcaaaattgatttgatttrgcaaacagaattatataataaaggatttaaggcatcacatataatacaagaaaaaaatgtgttacgaaatgtcctgcattaacgaatttgaagaagaaagaagagctccatgaaattaaaattgactgcaaaaacataaaaggaactataactataaaagagacacaaattaaaatctataattaaatgtgcttatcaacgctggtttctcacttaaataaaggaacattctatttgatcttcatggttaaaaagataaaatgtccttaaaactgacccttctataaaaatgtagcaaacttggtagccaatttaatgatccgtaaatgaagccaaaaagtcataatctctcattagatgtaacctattgatttctggctattatgacgacaataacatagctgagagagg

SEQ ID NO: 18999 - DNA, 507 bp, Homo sapiens
gatacaggttttgatcatgttggccaggctggtctcgagctcctgacctcatgatctgcccacctcagcctcccaaagtgctgggattacaggcgtgacgaccacacctggccacatrtgtattcttatatctaaaaaaagatagttcttttgacactcttctaagcaacatacaattgaattgacagagtttcaaattaagactatttctttttctaacaaagattcacctgaaaatatttttccaaatccctgagtttctctatctccctctcccactctgtgaaatgagaagatattccttgcccctgaaggctcatggctgtgtgttgttgagactgaagtttgatccttcttggcattaaaattcttccaaaagaagaagcttgactctccctttcaatacagtttcttgttagattaaaaggctttataaccagggatatctagtcttctaacttagcctgttactcctttccatttattcagggaatttttttttttttt

SEQ ID NO: 19000 - DNA, 818 bp, Homo sapiens
tcggctaattttttctatttttcgtatagacggagtctcactatgttgcctaggctggtctcgaacttctgggctcaagcgatccgcccgcctcagcttccaaaagtgctgggatcacaggcatgaagcamcatgcctggccaaaaaaacaaatgttatcttatgaggatatgaggaagggttacacaggccacacagttagtgctctttgctgggtgctctgcagactgtgttgggctactcttttagaatgaagagtctccagaccaagacttcatattggactagtctacatcttgttttagttactttaaataattttttgattatggaagatacattttattgcagaaaaattggaaaacacaaaaaaaatcataaagaagaaacaaaacccccacagtcaactcataactactagaatgactaaaattaaagactgactgtactgagatttgacaaggatgtggaggaactggaactctcatctactgctgtttggaatgtaaaatggtacaaccactaaggaaaataatttggcagtttttaaaaaagttaaatatatacctgccgtaccatccaactatcctacccctaggtattttacccaagataaatgaaagaaatgaaagcataaatccatacaaagacttgtacacagatgttcacagcagttttatttgtaatggtcaaaactgaaacagctcaaatgtccatcaacagataaacagataaactggtgtatatatacaatacaatacaactcagcagtaaaagggaatgaactattgatatacctggcaatatggatgaatctc

SEQ ID NO: 19001 - DNA, 453 bp, Homo sapiens
tttcaatgttattttgtggtttccccgcccaggagcttctttgcaactttggttttcttctacttctactcaggttcagggaggtgtccactgtctctcaaatcaaccaccagactttagaggggcacaagattgttaacgcgcaaaggtggttgaggaattggaaaggttgactggggctgcaccttggaatttattttgtcttggataatatgtaacattaacagagagcagaagctgattaaagtatcttggtgccaaagggtagttctgtgagtatttctttccttaacatgactggcgcgaaaaaactctcactgaagacyttcactgctcttctcaactattttgaactctgggacagggcatgatagaaccagcagagggcgtatttgtattgaccaaaagctgaggttgtacattggtgaaacttccattgtgattagaattgaa

SEQ ID NO: 19002 - DNA, 568 bp, Homo sapiens
tttttagatggagtcttgctgtgttgcccaggctggagtgcagtggcatgatcttggctcactgcaaactctgcttcctgggttcaagtgattctcctgccttggcctcccgagtagctgggataacaggtgcccaccactatgctcagctaatttttttgtactttttttttttagtagagatggggtttcgccatgttggtcaggctgttattgaactcctgacctcaagtgatctccccayttcggcctcccaaagggttgggattacaagcatgagccaccatgcccagccagtatgaggtttctttctgagctgatgaaaatattctggaattagggtattggctgcacgacttggtgaatacactaatagtcatttaactgttaaaagaaaagcaaaaacaaagttgatagtgaaaagtaggtctttctcccgtccacatccacctgtcatccagctgcctagcctggaggtaaagatggccttgggcatcctcccagagatattaatgcatttacaagcatctatagacatgcactgctttcatttttttttttttttttt

SEQ ID NO: 19003 - DNA, 1079 bp, Homo sapiens
ccagcctcgctgccaccttgcagtttgatctcagactgctgtgctagcaatcagcgagactccgtgggtgtaggaccctccgagccaggtgtgggatataatctcgtgatgcgccgttttttaagcccatcggaaaagcgcagtatttgggtgggagtgacccgattttccaggtgctgtccatcacccctttccttgactaggaaagggaactccctgactccttgcgcttcccgagtgaggcaatgcctcgccctgcttcggctcacgcacggtgagtgcacccactgacctgcgcccactgtctggcactccctagtgaaatgaacccggtacctcagatggaaatgcagaaatcacccgtcttctgcgtcgctcacgctgggagctgtagacctgagctgttcctattcggccatcttggttcctcccccaaaatgaaacttttttattgctctgtaagggcttacactatctctctctctctctctctgtctctctctctctctctctctctcacacacacacacacacacacacacactctgttatatacattgcaaatatttttgccagtctgtctaaattcatatgtccatctgtccatccatgcatytatccacccacccatccatctccataaagctctgaatttccctttgtgatttctacttttggcatcatgcttaaaaaaaaattttttttctacccccttattttataaatatccactaaaattgttcctagtgtcttcatgggttttttttgagtcaatttaaatgttttaaacttctagaccaagtgtgatggctcacgccagtaatctcagcactttggcaggccgaggtgggtggatcacttgaggtcaggagttcaagatcagcctggccaacatggtgaaaccctgtctctactaaaaattcaaaaattggctgggtttggtggcatgtgcctgtaatgccagctacttgggaggctgaggcaggagaatcacttgaacccaagaggtggaggttgcagtaaaccgagatcacaccactgcactcaggtctgggcaacagagtgaggccctttctcaa

SEQ ID NO: 19004 - DNA, 1079 bp, Homo sapiens
ccagcctcgctgccaccttgcagtttgatctcagactgctgtgctagcaatcagcgagactccgtgggtgtaggaccctccgagccaggtgtgggatataatctcgtgatgcgccgttttttaagcccatcggaaaagcgcagtatttgggtgggagtgacccgattttccaggtgctgtccatcacccctttccttgactaggaaagggaactccctgactccttgcgcttcccgagtgaggcaatgcctcgccctgcttcggctcacgcacggtgagtgcacccactgacctgcgcccactgtctggcactccctagtgaaatgaacccggtacctcagatggaaatgcagaaatcacccgtcttctgcgtcgctcacgctgggagctgtagacctgagctgttcctattcggccatcttggttcctcccccaaaatgaaacttttttattgctctgtaagggcttacactatctctctctctctctctctgtctctctctctctctctctctctcacacacacacacacacacacacacactctgttatatacattgcaaatatttttgccagtctgtctaaattcatatgtccatctgtccatccatgcatttatccacccacccatccatytccataaagctctgaatttccctttgtgatttctacttttggcatcatgcttaaaaaaaaattttttttctacccccttattttataaatatccactaaaattgttcctagtgtcttcatgggttttttttgagtcaatttaaatgttttaaacttctagaccaagtgtgatggctcacgccagtaatctcagcactttggcaggccgaggtgggtggatcacttgaggtcaggagttcaagatcagcctggccaacatggtgaaaccctgtctctactaaaaattcaaaaattggctgggtttggtggcatgtgcctgtaatgccagctacttgggaggctgaggcaggagaatcacttgaacccaagaggtggaggttgcagtaaaccgagatcacaccactgcactcaggtctgggcaacagagtgaggccctttctcaa

SEQ ID NO: 19005 - DNA, 1079 bp, Homo sapiens
ccagcctcgctgccaccttgcagtttgatctcagactgctgtgctagcaatcagcgagactccgtgggtgtaggaccctccgagccaggtgtgggatataatctcgtgatgcgccgttttttaagcccatcggaaaagcgcagtatttgggtgggagtgacccgattttccaggtgctgtccatcacccctttccttgactaggaaagggaactccctgactccttgcgcttcccgagtgaggcaatgcctcgccctgcttcggctcacgcacggtgagtgcacccactgacctgcgcccactgtctggcactccctagtgaaatgaacccggtacctcagatggaaatgcagaaatcacccgtcttctgcgtcgctcacgctgggagctgtagacctgagctgttcctattcggccatcttggttcctcccccaaaatgaaacttttttattgctctgtaagggcttacactatctctctctctctctctctgtctctctctctctctctctctctcacacacacacacacacacacacacactctgttatatacattgcaaatatttttgccagtctgtctaaattcatatgtccatctgtccatccatgcatttatccacccacccatccatctccataaagctctgaatttccctttgtgatttctacttttggcatcatgcttaaaaaaaaattttttttctacccccttattttataaatatccactaaaattgttcctagtgtcttcatgggttttttttgrgtcaatttaaatgttttaaacttctagaccaagtgtgatggctcacgccagtaatctcagcactttggcaggccgaggtgggtggatcacttgaggtcaggagttcaagatcagcctggccaacatggtgaaaccctgtctctactaaaaattcaaaaattggctgggtttggtggcatgtgcctgtaatgccagctacttgggaggctgaggcaggagaatcacttgaacccaagaggtggaggttgcagtaaaccgagatcacaccactgcactcaggtctgggcaacagagtgaggccctttctcaa

SEQ ID NO: 19006 - DNA, 561 bp, Homo sapiens
caagcagtgaacaatcctctgttgtgctgattaaattaactgaaaaccttgtgcagagatgcttaggaaagcctaaggacattgttggaattctgctttctgacttaccatgcaacttgccatgaactcagggaaactcactgggaagccgtttcctgaggagatgttgaaacaggatgggggtgagtgactatgaacattctccatatcgaagtcatgacagatgagaaaagggaacgcaagcacaatggaatgaaggagagaagccactttctccttcaaggaacctccaataccttctacctgtaaattttaagattgtgcgaggcatcatgggaaaaatgtttagagagccaaactatattattgcactgcaagcaatgaaatatgaatgtggagttctaattcaataaattgataaccagcacagtccaatgayatgaaatatgatatgcttgaaattaaaacaaagtgtgacattaaaatacctctgcaaataaattactctttttcattttaatgttacctttgtccactgattagtatattggttattaggat

SEQ ID NO: 19007 - DNA, 465 bp, Homo sapiens
taagttagatagatagagaaattacttattgtgctcttctgaaaaggaaataagtatttttaaatcaccattcataaacttctccatttcttatcaaccagataataacaaacaagatattattttccccatttttcagagaaamgacagaaagattatcctgccaaaggatatcacactacatatgatgaaatggctcattgaagctccattcattctatttatcattgacgaagttggtaagataaaagttacatattctaggctatcgtatagcatggagtttgcatgtaaatttgattccaccagttagatatattcccatgagattaagaaggtggtgatgaggctgtttctcctaatcagcaagttcctggcaacatgaagatattcttcagcaatatttcaggatccgataaaacactaaaaataaaaacaacttttgaagacattggaaagctactg

SEQ ID NO: 19008 - DNA, 524 bp, Homo sapiens
gaaatatcactacactgtttagaaaatatttaaaagcacgactacttacctggatcaattgtgcacacttgtccagtagttctgacaagcgttgggtagtctctatagtaatgatctacataaggccccaattttaagtccctaaaacagtaagggcatgtaaaaaagaaggtattacagcactttctcccaacagaattggaaggattgattagttgaatcttttaatttaaaaacttacwtatgagaaagataaccaaatctagagtctctctattgtatttttggactttaaagtgcccagtgtgacaaatggaacccaatctctttttgctaaattttgtggaagtaaaactacagtaaaagcaccgtgatctagttcctcctctgctattagctgtgtgatcttccaaaagtcatgtctataaacctcagtattttcttctagaaaatggggcaataccagctcacttactctgaagttttaaagattaaataagataaaatatgtaaaaaaaaaaaaa

SEQ ID NO: 19009 - DNA, 524 bp, Homo sapiens
gaaatatcactacactgtttagaaaatatttaaaagcacgactacttacctggatcaattgtgcacacttgtccagtagttctgacaagcgttgggtagtctctatagtaatgatctacataaggccccaattttaagtccctaaaacagtaagggcatgtaaaaaagaaggtattacagcactttctcccaacagaattggaaggattgattagttgaatcttttaatttaaaaacttacatatgagaaagawaaccaaatctagagtctctctattgtatttttggactttaaagtgcccagtgtgacaaatggaacccaatctctttttgctaaattttgtggaagtaaaactacagtaaaagcaccgtgatctagttcctcctctgctattagctgtgtgatcttccaaaagtcatgtctataaacctcagtattttcttctagaaaatggggcaataccagctcacttactctgaagttttaaagattaaataagataaaatatgtaaaaaaaaaaaaa

SEQ ID NO: 19010 - DNA, 524 bp, Homo sapiens
gaaatatcactacactgtttagaaaatatttaaaagcacgactacttacctggatcaattgtgcacacttgtccagtagttctgacaagcgttgggtagtctctatagtaatgatctacataaggccccaattttaagtccctaaaacagtaagggcatgtaaaaaagaaggtattacagcactttctcccaacagaattggaaggattgattagttgaatcttttaatttaaaaacttacatatgagaaagataaccaaatctagagtctctctattgtatttttggactttaaagtgcccagtgtgacaaatggaacccaatctctttttgctaaattttgtggaagtaaaactacagtaaaagcmccgtgatctagttcctcctctgctattagctgtgtgatcttccaaaagtcatgtctataaacctcagtattttcttctagaaaatggggcaataccagctcacttactctgaagttttaaagattaaataagataaaatatgtaaaaaaaaaaaaa

SEQ ID NO: 19011 - DNA, 524 bp, Homo sapiens
gaaatatcactacactgtttagaaaatatttaaaagcacgactacttacctggatcaattgtgcacacttgtccagtagttctgacaagcgttgggtagtctctatagtaatgatctacataaggccccaattttaagtccctaaaacagtaagggcatgtaaaaaagaaggtattacagcactttctcccaacagaattggaaggattgattagttgaatcttttaatttaaaaacttacatatgagaaagataaccaaatctagagtctctctattgtatttttggactttaaagtgcccagtgtgacaaatggaacccaatctctttttgctaaattttgtggaagtaaaactacagtaaaagcaccgtgatctagttcctcctctgctattagctgtgtgatcttccaaaagtcatgtctataaacctcagtattttcttctagaaaatggggcaawaccagctcacttactctgaagttttaaagattaaataagataaaatatgtaaaaaaaaaaaaa

SEQ ID NO: 19012 - DNA, 587 bp, Homo sapiens
acaaatcatcatggggtgttgagcccaggttcctgcctctgggatatctcaagcccggcctggcatgcactagatgctcggaatgtggccccttgttcagggccagcagagacagactctccccctgaggcaggctgggcggagttgggaagaggaacgacatggtgattaactttgaatgtcgtgcatacctgtggctcaggtgtccaaggcgctgggcatggaaaagggtggcagtgcycttggaaggggcatcaggttgccccctggctgaacgcctgggctgacatatcccctgggagtcttgggaggagggagtcagatgctgtgcctggtggattagtgggcagaagcccagggaggtaggactatgggaaactgggccaggctgctggcatcttctcccagccagcccagtgccctgactgaggaaatggggaggggagggagcaggccgggtgtgtaatggggcaagcctgaagcatctatgacagctgtctcagtgggcagccatgattccactctcaccataacccttcattttgttcatcatttcacagagaccttcacacccatcaccaacccca

SEQ ID NO: 19013 - DNA, 656 bp, Homo sapiens
gcttatgaggccttccctctttctgaaagtatgagagagtttcattttttaaaggaatctgagctacagattttatggtatagaaagcaatctatatcttgagccaaatcacacacgttctttcactttatgtcctaaagacccatattttaaattayaaaatttgagcatagttatgactatatgaaaaacaaatactctgaggccagacagacaatgccttctgcacacaggttcgctcagctggttagagcggcacagttaagtggccaggagcgtggtgggccctgaggtagactgaatggttcaaacttgggctgccctacttaccacatgtgtgacttggtcaagctgtttacttctctgggcctcagtttctttctttagaaaataggaataacagtgcctaccacattgggttcttaataaagattaaatattaatattatttaaaagcatcataaatatgaaggcaaagttgcagccttaggtccgataagcagcagtgtggtataaagacagacaaacaaaacaaaatgaaaaaaggcacaggatttgcagacagaagccctgcatttgagttttgctctgccatttacataagtaagctgtgtgactctgggcaagactcaaatagatgagcctctgttcctttc

SEQ ID NO: 19014 - DNA, 562 bp, Homo sapiens
ggcaccgtcttccaataccacattttcataattataacagaaaggcgtaaattttctaaagcayggcagttcaaaaagtaatcaagggaatgagccggagggctattttaatgtatgcaaagctagtgacccacagtaaatgggaggtaagctacaatgaatgcaaagtaatgcacacatactacagtcctggtctgataagggacggctaaaattaacacccaattaatttccgaattgacaaacaaatgaaacccataaatctactttctcattaattttcttgtggtataatttaaagcagtaatatgagggccaaaactgaacattatccatcataaatatcagaaggatagcactgtaacaccataaattatgcatattacctgttgttaaaaatgatttatgtattatcaactttatcatgcaccatagatgtctatctacatgtatctttaaaaatctggaatttcatttagcccctctggaaaaaaagttcaggagcaatgaaattgtcaaaagcatgttttaaaaaaaaacaaaaccaaaacaaatgtggcca

SEQ ID NO: 19015 - DNA, 522 bp, Homo sapiens
aaaaaacgcaaattttaaatctaaatttaatatagatttgagcctttcccttggcctctggaggaatcaatttgagataatgacagccttgaagataatgaaatgggttacataatattaaagactagaaggtatttctgagggacacagacatataagtagactctctgtattacagcacctgcctaacatctttaaagagaggggcaaaatgttggcctctgataaattacrttgtaccctagccacagacactatggtatactttcctttagttgagctattcatgtttagctttaaacatcagaatatagccttcgacaaaacggtaagagtcactggtttgtccaatggtattattatttaaaacacacacacatacaccacacagtcgaactactgaggcagacattcctaagtgaactgtctagaaaaagctaaattaatgaaccaagtaatcctgggaaatcctgtcccataaaaccattagttgcaataggctaattctcaataaaaagcctg

SEQ ID NO: 19016 - DNA, 519 bp, Homo sapiens
aatgttttgtatatagtagactcaaaaaagtgaaccattattagttakttaagccttctgtaagtcaactattgccacaaaaaaaaaagttgtataataaagaaacttacatacagtttctttaaaataatccatggaagaaaccagtcatgggtaccttgcttgtacattgtcgcctactactactactactaccaacaataataataatgatgatgataatgtttgtggtatttcccatttgaaaacagtatcaaaatgcctccccaaactgaaggaatagattaagaaaaacctatgtctatgttaatatactgtgattctctttaaaggcagtaggtaagtggctggatctagcagcaggagatgaatgaagacctcctttgagaagggaaggcattttgatacagttgatcctcatttgccatggtcatgacacagtcactctgaacactgaattaatgaatacaaaccattgttcctatggaaaatacaaggttatgttcctataagcctctg

SEQ ID NO: 19017 - DNA, 550 bp, Homo sapiens
tgggactaaaccctcaggagttctgaacacagtgcaattctttcaaaagccactggaacccggcccagttccccagcatcactgccattcctccctccttgaaagtcagctccgctggcagggcctgacctgtgttggtgacactgtactcttcactcttcttcctggtctggtagatgatgcacacccagaccagtgacgtcaggacgatgctgctcacgacagcaatggtgaagatgcctaccgtggtcccatccttcctgcagcctgctgcgggcaggacgctcagctggctgtgagctcgctccgtgcccagggtgttggacatctcacaggtatatcggcccgcatcctctgccaccacgttctgaaccaccaggagctggttgtcaggggtcargtggtgccgctcagtgaggctcagcgggcggtcccccttgaaccaggtgatgcggggcggagggttccccgtggctttgcattggagggccactgtttctcccacagataccacacggtcttccaaggggaccaccaaggatggggtctc

SEQ ID NO: 19018 - DNA, 535 bp, Homo sapiens
tggcctatcacaggtgttgagtcgatgtttgttgaatgaagggagggacagaggaagaacccagtgcctctttggtcccctccccacccgcctactcagaacattccaggaaagttctgcgctgtggccctggctgagagaagtgaccacagacagcactgtgttgctctgtgggagtggcccagtgccggcctgttaggatccactgagaagtggggtgcgtgttagcacagagaagagccgcccctctagagcagctgatccgtcctgtggggagtgcagccagtgcctgagtcccttcatttggtgtgggtttgtttttggagagctcaaggagcttgtgttcagggtctgccctaggatgggaaggtagaracccctgccttcgctgagttactcaaggaagaggtcagacctaaattaaaatgttttccaagaaagggagatgtgagtagcagagccataaacggcctctctgtgaatttggggtggatgctgacctgcccttaatttttccagcttacgcacacagctg

SEQ ID NO: 19019 - DNA, 637 bp, Homo sapiens
tttaatttaaatcaacaacagttaattgtcaattaaatattgacatttaaataaagagtttcctagtcttgatctttcttctaatctccagctttaactataaggcgattcatttgaaaagctctcaaaagtgaaaagctcaaacaactctcacgctacccccaaccgatataaaagtgaagcttccttcactatttcatmtttcaatgaatgacacaatccagtcccccgaatcggaaagtgggtacctactcctgtgtaccagtgtaaagcactggcttcgggtactttgctttccccaaccttctttcatgtgtggtaactcctttgagaaccttctagagtaaagagatgttggccacagaagagctggacagtccattttagtaacatgaaaacacacaattaccaataattccacctaatccaataattccaataaggtaaatgctcagtaatggttgctgaagaaagaaaggaaaagcaggaagaaaggagagcagaagaggaaagaagagaaggggtaagaaggagaaaagagaaaagatgaaaatcaatagcagaagtaaaggtcaaaaaggagcattttaaattaaatttagaaattatgtgttaaagcctcataatctgactttgg

SEQ ID NO: 19020 - DNA, 637 bp, Homo sapiens
tttaatttaaatcaacaacagttaattgtcaattaaatattgacatttaaataaagagtttcctagtcttgatctttcttctaatctccagctttaactataaggcgattcatttgaaaagctctcaaaagtgaaaagctcaaacaactctcacgctacccccaaccgatataaaagtgaagcttccttcactatttcatatttcaatgaatgacacaatccagtcccccgaatcggaaagtgggtacctactcctgtgtaccagtgtaaagcactggcttcgggtactttgctttccccaaccttctttcatgtgtggtaactcctttgagaaccttctagagtaaagagatgttggccacagaagagytggacagtccattttagtaacatgaaaacacacaattaccaataattccacctaatccaataattccaataaggtaaatgctcagtaatggttgctgaagaaagaaaggaaaagcaggaagaaaggagagcagaagaggaaagaagagaaggggtaagaaggagaaaagagaaaagatgaaaatcaatagcagaagtaaaggtcaaaaaggagcattttaaattaaatttagaaattatgtgttaaagcctcataatctgactttgg

SEQ ID NO: 19021 - DNA, 498 bp, Homo sapiens
tgtgctggcctcagcaagtagtcagtgacccctgagactatgcccaagctctccgacagtcattaaccatgtgtgggaataaagaagttgttgaacaaaaacatgtatacacagaagtcttgattctgttgctgcgcatgcaaataatctggagcatcaggccacagtgaagtggctccttgtttcaaaaacaccagacacacctygtacagaaggtcttgtgtaagtttctagatgctgtctgattggaagcacctgagttgtaagagttagactgggctgctgcctttggcctagggggaagaaagctgctaaaacttccccagggaatagttttcttgtgaacaaatggatttaaatgaacaaattacttgcaattaatttcagccctaagcaccggaaattgaaatggggctacccgtgaattccaaaacagcggtttacgaccttcatattctacccccataattttactccacttttcaaaactgaattaaa

SEQ ID NO: 19022 - DNA, 585 bp, Homo sapiens
atgtttctgaactctaatgtgtaaaagaatcacctggagaaactcctgggtctgccccagatgttctaactcagtacgcagagttagggcccaataatttgcattcagatgctgccagtttttggaccatcctttgagtagccctggactggacaacttgattgagtaatgataataatagagrtaagaaaagaattcgtccttaaaacccaggagattggtttgaccaggtgtgtcattcacgtagcctgcaaaaaacctggccctcccaccttagccctgtaaaatgcaaaggtgggtcactatgatgtttgaacacatggtgttatctggaggcggccatcacacttggcacaagtggtgacaaggagaagatggcgggaatcactatattgagtgaagccagtttctaatggctggcatttgcatatcaaagcttgctggcctggccctttaagccaccttttctgttataaaagagatgattcaggggttgtttcttattataggaaaatttccaccgagaacctttacccttactatctggctaaaataatgtgttaataacccctgtattatctgtac

SEQ ID NO: 19023 - DNA, 585 bp, Homo sapiens
atgtttctgaactctaatgtgtaaaagaatcacctggagaaactcctgggtctgccccagatgttctaactcagtacgcagagttagggcccaataatttgcattcagatgctgccagtttttggaccatcctttgagtagccctggactggacaacttgattgagtaatgataataatagaggtaagaaaagaattcgtycttaaaacccaggagattggtttgaccaggtgtgtcattcacgtagcctgcaaaaaacctggccctcccaccttagccctgtaaaatgcaaaggtgggtcactatgatgtttgaacacatggtgttatctggaggcggccatcacacttggcacaagtggtgacaaggagaagatggcgggaatcactatattgagtgaagccagtttctaatggctggcatttgcatatcaaagcttgctggcctggccctttaagccaccttttctgttataaaagagatgattcaggggttgtttcttattataggaaaatttccaccgagaacctttacccttactatctggctaaaataatgtgttaataacccctgtattatctgtac

SEQ ID NO: 19024 - DNA, 1099 bp, Homo sapiens
  misc_feature (1)...(1099): n = A,T,C or G
tgtcatatactttgttgcaaagaaaatagttaaaaatgtgtgtaagcttctggtttaaatggcaaacccaatactgcatctctcatatcaacagctacaagaacatacatagtaacatactctcagagtaaagtccaagctctccattgccctgcagagctctgccgggtgcaacacccattcccactccatctgtagctcatacgtctttcttccttactttctatgctccggttccctggtctcctttctttttgcccagatgtatcatgtccttctctaaatncaggcaaatgcacttgctcctccttctgcctggaatgctctttccccagttttccagtggctgactcattcatgtccttcgggtctacagatgtgcttcaccaattcaagagaagttttccctgcatggtgattctggcagtagctcttcatcacatctctgtgcatttccttagtagcacccagttgctgtctataatgatttcgtttgtttatttacttatttgcctgcctcccccattagacttaagttccttgagggcagggaccttgtctgtctagttaattaatggatccccagtacccagcacagtgcatgacrcatacaagacacttgatattttgttgagtgagtaaatgaatgaaggaagtaaagaaggaaggaacactatgcaccataccaagtgctttatatcacccattttgcctttataacattccctattgattcatggggaaactgagccccagagagtttcagtgacttgcccaaggtcagaattagtaagtcacaaagagccaatatttgctctcaggtttgtctgcctataaaggtttgtgccagagtcaggtctgaggttatggttcaatattaagtttttgcctctttctgtatcttcataggtataatagcatgaagtattctgtttttttttcccctgtggctcaaaattttttgtccatggcctttgaaataggtccttttctgctattttctgcaaaagaacttggtggtaacaagaaagggttctggtagaagcatattttggagggagctgtggagatctgccttgagtgtgaagattacgaatga

SEQ ID NO: 19025 - DNA, 1099 bp, Homo sapiens
  misc_feature (1)...(1099): n = A,T,C or G
tgtcatatactttgttgcaaagaaaatagttaaaaatgtgtgtaagcttctggtttaaatggcaaacccaatactgcatctctcatatcaacagctacaagaacatacatagtaacatactctcagagtaaagtccaagctctccattgccctgcagagctctgccgggtgcaacacccattcccactccatctgtagctcatacgtctttcttccttactttctatgctccggttccctggtctcctttctttttgcccagatgtatcatgtccttctctaaatncaggcaaatgcacttgctcctccttctgcctggaatgctctttccccagttttccagtggctgactcattcatgtccttcgggtctacagatgtgcttcaccaattcaagagaagttttccctgcatggtgattctggcagtagctcttcatcacatctctgtgcatttccttagtagcacccagttgctgtctataatgatttcgtttgtttatttacttatttgcctgcctcccccattagacttaagttccttgagggcagggaccttgtctgtctagttaattaatggatccccagtacccagcacagtgcatgacgcatacaagacacttgatattttgttgagtgagtaaatgaatgaaggaagtaaagaaggaaggaacactatgcaccataccaagtgctttatatcacccattttgcctttataacattccctattgattcatggggaaactgagccccagagagtttcagtgacttgcccaaggtcagaattagtaagtcacaaagagccaatatttgctctcaggtttgtctgcctataaaggtttgtgccagagtcaggtctgaggttatggttcaatattaagtttttgcctctttctgtatcttcataggtataatagcatgaagtattctgtttttttttcccctgtggctcaaaatkttttgtccatggcctttgaaataggtccttttctgctattttctgcaaaagaacttggtggtaacaagaaagggttctggtagaagcatattttggagggagctgtggagatctgccttgagtgtgaagattacgaatga

SEQ ID NO: 19026 - DNA, 519 bp, Homo sapiens
  misc_feature (1)...(519): n = A,T,C or G
gtaatcccagctactggggaggctgaggcaggagaatcgcttgaatctgggaggcagaggttgcagtgagccaagattgcaccattgcacgctagcctgggtgacaagagcaaaactccatctcaaaacaaacaaacaaaaaactagggrggtgaagggggggaatgttataggtctagaaagatttatggcacttactctgcaagtgtctaagctcttatttatgaataaatcaaatctggaaattatagaagaagtgatatgggtgtaattcatgcaagtaaagtgatgcagaatgccaatatatgaatctattaataactaaaacaagagtcatgaaatggtacctgtccttcctccatgtgatgcactctgaaattctctaaactattcaattccacttttaaaaatgttgatnnnnnnnnnnnnnnnnnnnnnnnnnnnnnnnnnnnnnnnnnnnnnnnnnnnnnnnnnnnnnnnnnnnnnnnnnnnnnnnnnnnnnnnnnnnnnnnnnnnnaa

SEQ ID NO: 19027 - DNA, 591 bp, Homo sapiens
gcccctgacagtccccagcagaagagtacattccaatccagtttgccacaaaccaaatttcagtaaagtgaatgttattcttccatttactttcattatgaaactggcagtatatgccctgtagggaaacagagtggtccctggatgtcatcaaatctcatttaaaaacagagtaaacagagtaaatccatattttttagctctgttggtgatgaagagttggtagccaggaaactgaaaagagattatatcgctgggtgaagggttttgwtaagacagaggaaaaggtgggggtggaggagggtagattatttcctcctatttgctccacaacaaccatcaaatttcaggtgacggaggatttttaaatatttttccaaaatcataggcaattacatagttagcaattgagagtccaggtatttgataatttagtaggaaatgatctgtgttacagttcattttcagagaggtgcatatttacagcagatgagtccaaagctgacagagtctacttggattgaggcaaaaagagctgagtaaaagacagctaattcctatgtctacatttttaccctgttcacattaggg

SEQ ID NO: 19028 - DNA, 584 bp, Homo sapiens
tggccaggctggtcttgaactcctgacctcaggtgatccgcccgccttggcctcccaaagtgctgggattacaggcgtgagccactgcgcctggcccatcacttttcttaaaagggctgtttttccaattycatcagaaccctccaggaccacagtgaatagtctagcctcagcagtatatgcatcattcaatactttgactcatttttcatggtttctttgtagaaatgctcagggacatgaagacaggtttccttttcccatacaagttgaaatttttctttcatatgctttctatatgggtttagcttatttcttatctcttcctgaggcttcatccagagatctttcctattgatctgaagaaataggttcagtgtcacctcccatgcctgttttcatggataatgtttgtccaacagctttgctacatcttctttggaagctcagtccaggtgattcacttgagttccaatttcaaaggttcttatttgaggagctccttaaatctccaaaaactcttcgtttctgagctgcttcagctaccaaaacaagccaaaatctgacaaaaaaaaaaaaaaaaa

SEQ ID NO: 19029 - DNA, 501 bp, Homo sapiens
cgctgcgcccggctaatcttttgtatttttaatagagacagggtttcaccatggtctcgatctcctgacctcgtgatcacccgctttggcctcctaaagtgctgggattacaggcgtgagccactgcgcccggcctcctttttttttttttttttttttttttttttttgagacctagtcttgctctgtcatccaggctggagtgcaatggcacaatctcagctcactgcaatctccgcctcccgggttcgagcaattctcctgcctcagcctcccaagtagctgggattacaggtgcgcaccaccacgyctggctaatatttgtatttttagtagagacggggtttcgccatgttcgccaggctggtctccaacttctgatctcaggtgatctgcccgcctcagcctcccaaaatgctgggattacaggtgtgagccactgcacccggcctatttctattatttctattcttattgtctcattagtattttaaagaatta

SEQ ID NO: 19030 - DNA, 501 bp, Homo sapiens
cgctgcgcccggctaatcttttgtatttttaatagagacagggtttcaccatggtctcgatctcctgacctcgtgatcacccgctttggcctcctaaagtgctgggattacaggcgtgagccactgcgcccggcctcctttttttttttttttttttttttttttttttgagacctagtcttgctctgtcatccaggctggagtgcaatggcacaatctcagctcactgcaatctccgcctcccgggttcgagcaattctcctgcctcagcctcccaagtagctgggattacaggtgcgcaccaccacgcctggctaatatttgtatttttagtagagacggggtttygccatgttcgccaggctggtctccaacttctgatctcaggtgatctgcccgcctcagcctcccaaaatgctgggattacaggtgtgagccactgcacccggcctatttctattatttctattcttattgtctcattagtattttaaagaatta

SEQ ID NO: 19031 - DNA, 447 bp, Homo sapiens
attgttttcattctgatgatcacatctcaggtacagtgcttgataccagctttccaattatgaaaattgcctttcaaaataaattgacttcacaaaaagtataagcagtggtgcagatggcatgcagatatgaaaaacggtgcaagtgcatgcgactagccaaagtttgggaaagagttctgtacagcattagcgtgtgggatggaagaaatacttaaaaaraacccctgctggagatgatcatccacaaacactgaactgacgatcatctggtcgcaatgtgtggctttttctggatcaggaagctggtacggggggcaaacgcaggggcacacagacagcactaggtatgctgacagagccctcttccagagaagtaaagactctgggcgcgtgtaagctgattgcagaggcgggagaagagagagcgctgaacaaggacgctgc

SEQ ID NO: 19032 - DNA, 1255 bp, Homo sapiens
cagaatatacttttttatcccattcacttaggggcttaactatgcaatctgcttcaaacaagggaatgtggatatgtgacatgcatgtgacatggaccccatatctgagcatgaactttaaatgcacctgtgtagtttagccctgcctctcttgtccatgccagagctgggataaggatgaggtgggtgagacaaggtcttgcaagtgcagggtgagattctgtgtttatttaaaattttggtatttcattaatcatggatttttgcatgaatttttatttttaaaaatattatattagtatattatttatcttgataacagagtgtttcagagtctgttgtcaagacttgcaggcaaggctttgcaggcaaggccagtgtcccattgtagccctggttccagccctataccatgagaatggcatgtactcagagcgtgacatcttcctcagcctcaggtatgaaatgagaagacctgtggagctggactgagctgaatcaagctgaatcagtctagattttggacttgcatggggcctgtagctcctttgttgtggccaatgtctcccattcggaatggctgtatttatccaatgcgtgtacccccattgtatctaggaagtaactaacttgcttttgattttacaggcttataggcggaagggactagccttgtttcagatgagactttggactgtggactattgagttgatgctgaaatgagttaagaccttggggaactgttgggaaggcatgattgattttgaaatgtgaggacatgagagttggcagggaccaggggaggaatgatataatttggctctgtatggttttatcaagggtctccacttttgcgtcttcctcattctctcgttgcctgctgccacccatgtaagacgggacttgctcctccttgccttccaccatgattgtgaggcttccccagtcacatggaactgtaagtccaattaaacctcttyctttataaattgcccagttttgggtatgtctttatctgcagcgtgaaaatggactaatacgttaagttgataccagtagagtggggtgcttctgaaaagatacctgaaaatgtttttctcaaaagatcaatatcattttatattttaattgattttaaaaagctttcctctaggttgtctctggacagttttaaaaatgactaaggctaatgggtgttccctcacttacatgagagaaataaaccaggaattttggtttatgaattacgtttgt

SEQ ID NO: 19033 - DNA, 574 bp, Homo sapiens
gtacagcctatacattttgttttggcaatacgaaggttttcattttattttaagatataataattacttaattatagctttaagacaactgaaataaaagaattatcatttttatatatctaaagaatattacaaatagagtttatttttcttaacaaatcaatattccaacagcttttaaaatgacttgacaaaagagaagaaaggctttccactaatctcaccattttaacacatagattatttccagttttgtgctttcccttctaattcttatgcataagyaaacaaactcatatcattctgatcaaagaacacagtttttaaaaggctaaggacattatgcttttcccactatgggtctgaaaccctttagcctgaacataatacatctgaaagtaaagaattcctctcaaacatgaactcaatacttagccaacaaggaaacaaaagatgtctcgtttccagtagatttattggtttcaggcagtgaacaaagatgaagaagaaagacatatcttacagatggtggtaataaatatttcaaatgaaatcctcttcagactgtttcctt

SEQ ID NO: 19034 - DNA, 531 bp, Homo sapiens
aatttagaactgctataacttgaacagtataagtaaagcggagataccctgcttcatttatagttgaagtgtgcttgctcagactccagacatacgtcttacttttctgattcacttgggagtcagcaaagacaagcacttcatcttcatggacactgctggagttcatgaacgcagacacggcctcatggccaatctccacataataaggcccaagctccacttcggttccatgaaactcgttataaataacagccttgagcatatagactccttctggaaaaataagaaygaacggacacttgatgaatttttaataacaagcataacagttaacatttgtagaatggtcaaaatggggtgattaatatgggaactgatacaggagaggtgatctttcttgtctcttgtagcagcagggccatttcatgggcatgtgacccatacagttgcacagagcccctcacgcaatggagctatgtgagtgatttaatgctctgctatcttgaaattcttcataattatttttag

SEQ ID NO: 19035 - DNA, 532 bp, Homo sapiens
ctgatattgaactcctgacctcaagtgattctcctgccttggcctcccaaagtgctgggattccaggttgagtcaccatgccagcccttattcttataagaataccggttatattgaatgagggcccaccctaaagacctcactttaacataattaactttaaagtccctatctccatataccatcatattctgaggtattggggttaggacttcaacatataaattttgggaggacacaattcagctataatagcacctttgttacaaataagcaggygatcaaccaaaaacactcaactaggtcttgggaaaccttggttctaatctcatcatatatgcattctgggtctgagttttttcacccagaaaacaggactgattagtttgcatatggaagttgaagagaggtagtaagtgaagggaaggtttaaattatttagagtatacatgaggtccatctgagctgtctttaagttctaatagtcttaaatacatccttcagcattcacaccaccaatttaaaagacaat

SEQ ID NO: 19036 - DNA, 685 bp, Homo sapiens
ggatcttggaataaaaatgcagggaacagaactggatccaacctaactaggcagaacccgactaagatgcattaaaccgcagccaaacttcaacccacaagcttgaagtaaatatttgttgctgtaagccacggcaatttggttgttggttatgcaacattatcgcattaaaaaaaaaacctggctaatacagctagtgaatgggaaaaaaaagagattacttattccattttgccaattactgagcattttgatgatgcactagaatatgtcactatgattttacctgtttaccttgcaaatgcacttttactattttttttttttttttttggtgatttgttttgcagttttcagtatgattctgtgatggtatacgtaagtattttaattgtacctgtattagtccgttttcatgctgctgataaagacatacccgagactgggcaatttacaaaggaaagaggtttattggatttacagttccacgtggctggggmggcctccaaatcatggtggaaggcaaggaggagcaagtcacatcttatatggatggcagcaggcaaagagagagcttgcgcagggcgactccagtttttaaaaccatcagatctcatgagacctatttattatcataagaacagcaccggaaagacctgcccccattattcaatcatctttcacc

SEQ ID NO: 19037 - DNA, 730 bp, Homo sapiens
aagaaaagagtggttaaaattgcaataaaaaaacagcggggtgggtgaaacgagatcggcagaaagttgatggccgctaaggtaatgtgtttcacggtgttattgtgtctacttttgtgtgtttgagcttttttacgacttacatatacttctaaagtctgcgatcgtattcaacaggtaaactcagcaaggcgtgtgccttgtgtttttttgttcgttggtttgttttgaaaaccggaatttgaatcttaaagagtggtaactctagaaatccaatttttccttttctccaggatttgctatttttgttgttgttgtccagagtgtcttggtgtccttctttcttcagagacagaatgattctttcctcctggtataaaaagggcacccgtcccacgagaatcttatgacctgcttcagaggaaggtcaaaaacctcttcctgcacctgcaatttctcaaattccttccaactaaaatatttaacattgccaaagtggcacatttttgggtagtgtgtgtcctaaaccccgttgacacacgtattctataaaaaataaagatatctgcctggacagattcgttcgatgggaactacargtttcccagatcttatgagaaagaagagaaagtacagtgttcctccccaagaaagagtagatggaataggcattttgtaatttaccaagcactagaaataaatacgttgtttttctaaccaaaaaaccctg

SEQ ID NO: 19038 - DNA, 517 bp, Homo sapiens
atcattgaaacaccaggagggtgtaacagttttgcagcctagctgtagcatgctgatgcccccaagatgcccatatcctaatcccgggaactggtgaacatgaccttatatggcaaaaggagctttgcagatataatgaagttaagggtctttggcttttggggttgatgtactcactcggatccttgtaagagcagagcaggtgatggagagggtgggaggtgtagtgacagaagcaggaaactccagtcattcgagacggrcagcacaagctgaggagtgcaggccacctctacggccaggaaacggattctcccgcagagcctcggaagctaccgaccctgctcccaccttgactcagtaggacttactgtagaattctggccttcagacctgtaagggaatacattttggttgttttaagtcactaagtgtgtggtaatttgttgcagcagccacaggaaactagtattgtagtgaagcctcaaaacccccctgaaggggctgggctcagtgg

SEQ ID NO: 19039 - DNA, 517 bp, Homo sapiens
atcattgaaacaccaggagggtgtaacagttttgcagcctagctgtagcatgctgatgcccccaagatgcccatatcctaatcccgggaactggtgaacatgaccttatatggcaaaaggagctttgcagatataatgaagttaagggtctttggcttttggggttgatgtactcactcggatccttgtaagagcagagcaggtgatggagagggtgggaggtgtagtgacagaagcaggaaactccagtcattcgagacggacagcacargctgaggagtgcaggccacctctacggccaggaaacggattctcccgcagagcctcggaagctaccgaccctgctcccaccttgactcagtaggacttactgtagaattctggccttcagacctgtaagggaatacattttggttgttttaagtcactaagtgtgtggtaatttgttgcagcagccacaggaaactagtattgtagtgaagcctcaaaacccccctgaaggggctgggctcagtgg

SEQ ID NO: 19040 - DNA, 517 bp, Homo sapiens
atcattgaaacaccaggagggtgtaacagttttgcagcctagctgtagcatgctgatgcccccaagatgcccatatcctaatcccgggaactggtgaacatgaccttatatggcaaaaggagctttgcagatataatgaagttaagggtctttggcttttggggttgatgtactcactcggatccttgtaagagcagagcaggtgatggagagggtgggaggtgtagtgacagaagcaggaaactccagtcattcgagacggacagcacaagctgaggagtgcaggccacctctacggccaggaaacrgattctcccgcagagcctcggaagctaccgaccctgctcccaccttgactcagtaggacttactgtagaattctggccttcagacctgtaagggaatacattttggttgttttaagtcactaagtgtgtggtaatttgttgcagcagccacaggaaactagtattgtagtgaagcctcaaaacccccctgaaggggctgggctcagtgg

SEQ ID NO: 19041 - DNA, 576 bp, Homo sapiens
cttctctggtaagttttaccctgcctctcccatttggaaaaaaaaaattcattctcttttsaattcccctagcgatgtatctgtgcctctagtctttttactaatgttgttgtgcctaatagaacagattttgaagagcaggaccatcttcacctcccaaagcccaacatttgtatgtagtaagtaatcaataaatcctatttgattgcattaatgcctattagttttactttgcagtgaaacatagattcaagcagcatctctccataggctggagaactcacctgatttccgcaggaaattgtgcgtttgtgaccaggaagctggaaattttacactggtggagtagcttcaaaaacctgttgatctctgggtacattattggttctcccacgagggacaatgcacagtgctttaccgtcattccttcttcaaagcgttctgctttgacgcccggtactcctggagaatacagtgagaaggacccagctacataaggcacagatagaggatgtcacttacgtttttcttaatgatgctttgattttatagagcaaattcatttttgataccaaa

SEQ ID NO: 19042 - DNA, 576 bp, Homo sapiens
cttctctggtaagttttaccctgcctctcccatttggaaaaaaaaaattcattctcttttgaattcccctagcgaygtatctgtgcctctagtctttttactaatgttgttgtgcctaatagaacagattttgaagagcaggaccatcttcacctcccaaagcccaacatttgtatgtagtaagtaatcaataaatcctatttgattgcattaatgcctattagttttactttgcagtgaaacatagattcaagcagcatctctccataggctggagaactcacctgatttccgcaggaaattgtgcgtttgtgaccaggaagctggaaattttacactggtggagtagcttcaaaaacctgttgatctctgggtacattattggttctcccacgagggacaatgcacagtgctttaccgtcattccttcttcaaagcgttctgctttgacgcccggtactcctggagaatacagtgagaaggacccagctacataaggcacagatagaggatgtcacttacgtttttcttaatgatgctttgattttatagagcaaattcatttttgataccaaa

SEQ ID NO: 19043 - DNA, 576 bp, Homo sapiens
cttctctggtaagttttaccctgcctctcccatttggaaaaaaaaaattcattctcttttgaattcccctagcgatrtatctgtgcctctagtctttttactaatgttgttgtgcctaatagaacagattttgaagagcaggaccatcttcacctcccaaagcccaacatttgtatgtagtaagtaatcaataaatcctatttgattgcattaatgcctattagttttactttgcagtgaaacatagattcaagcagcatctctccataggctggagaactcacctgatttccgcaggaaattgtgcgtttgtgaccaggaagctggaaattttacactggtggagtagcttcaaaaacctgttgatctctgggtacattattggttctcccacgagggacaatgcacagtgctttaccgtcattccttcttcaaagcgttctgctttgacgcccggtactcctggagaatacagtgagaaggacccagctacataaggcacagatagaggatgtcacttacgtttttcttaatgatgctttgattttatagagcaaattcatttttgataccaaa

SEQ ID NO: 19044 - DNA, 576 bp, Homo sapiens
cttctctggtaagttttaccctgcctctcccatttggaaaaaaaaaattcattctcttttgaattcccctagcgatgtatctgtgcctctagtctttttactaatgttgttgtgcctaatagaacagattttgaagagcaggaccatcttcacctcccaaagcccaacatttgtatgtagtaagtaatcaataaatcctatttgattgcattaatgcctattagttttactttgcagtgaaacatagattcaagcagcatctctccataggctggagaactcacctgatttccgcaggaaattgtgcrtttgtgaccaggaagctggaaattttacactggtggagtagcttcaaaaacctgttgatctctgggtacattattggttctcccacgagggacaatgcacagtgctttaccgtcattccttcttcaaagcgttctgctttgacgcccggtactcctggagaatacagtgagaaggacccagctacataaggcacagatagaggatgtcacttacgtttttcttaatgatgctttgattttatagagcaaattcatttttgataccaaa

SEQ ID NO: 19045 - DNA, 576 bp, Homo sapiens
cttctctggtaagttttaccctgcctctcccatttggaaaaaaaaaattcattctcttttgaattcccctagcgatgtatctgtgcctctagtctttttactaatgttgttgtgcctaatagaacagattttgaagagcaggaccatcttcacctcccaaagcccaacatttgtatgtagtaagtaatcaataaatcctatttgattgcattaatgcctattagttttactttgcagtgaaacatagattcaagcagcatctctccataggctggagaactcacctgatttccgcaggaaattgtgcgtttgtgaccaggaagctggarattttacactggtggagtagcttcaaaaacctgttgatctctgggtacattattggttctcccacgagggacaatgcacagtgctttaccgtcattccttcttcaaagcgttctgctttgacgcccggtactcctggagaatacagtgagaaggacccagctacataaggcacagatagaggatgtcacttacgtttttcttaatgatgctttgattttatagagcaaattcatttttgataccaaa

SEQ ID NO: 19046 - DNA, 595 bp, Homo sapiens
aggggccccagtcatgctgatctccacacccacagaccaggctgccatccttaagccccaacaccacttagtctatacagcagagaagcaaatttacactggagtttcacttggaatctcaaccataataaatcctatcatgctgttcatcttcaaatagccctgaataaaatctctctaaccatctacaacaagcttgtccaacccacagcccactggcccaacacaaatttgtaagctttcttaaaacaktatgagatttattttgcgattttttttttttagctcatcagctatcattagtgtattttatgtgtagcccaagacattttttctaccaatgtggcccaggaaagccaaaagattggacacccccaatctacaatgtcctcagtccttgttctcaaatctcctgcttatcctctgatgagctgactttcacaggcctgagaagggagatgctcaccacgctcatgaaaaatggcaaaaaaattataaaactctcaagacagaagctagagaaatgaaactcctctgtgagctcagatggactacacagtaataaagaaatactaaatgttaaccaactgcggga

SEQ ID NO: 19047 - DNA, 595 bp, Homo sapiens
aggggccccagtcatgctgatctccacacccacagaccaggctgccatccttaagccccaacaccacttagtctatacagcagagaagcaaatttacactggagtttcacttggaatctcaaccataataaatcctatcatgctgttcatcttcaaatagccctgaataaaatctctctaaccatctacaacaagcttgtccaacccacagcccactggcccaacacaaatttgtaagctttcttaaaacattatgagatttattttgcgattttttttttttagctcatcagctatcattagtgtattttatgtgtagcccaagacattttttctaccaatgtggcccaggaaagccaaaagattggacacccccaatctacaatgtcctcagtccttgttctcaaatctcctgcttatcctctgatgagctgactttcacaggcctgagargggagatgctcaccacgctcatgaaaaatggcaaaaaaattataaaactctcaagacagaagctagagaaatgaaactcctctgtgagctcagatggactacacagtaataaagaaatactaaatgttaaccaactgcggga

SEQ ID NO: 19048 - DNA, 598 bp, Homo sapiens
accttgtctctacwaaaatacaaaatgctcttctaggagcattcgactggtaagggaagaatgcctcaagagagcatgagtacaactccagtaaacacactgcacatgtggcccctcccaagtagcggcaggctactgtgcatgcagacagcccatcccaagggaagaatcaagggagaagggacgcaagaccccggagtatcccaacatataaaaccctaagtcaaaggtcaaactgggcacttgatctctcaagtcaccacttggccctcttccaaatgtactttacttcttttcattcctgctctaaagctttttaataacctttcactcttgtggtaaaacttgccttggtctctccttctgccttaagccctcggtcaatttttttcttctgaggaggcaagaattgaggttgctgcagacctctatggattcaccgccactaacagaagggcctatgtctgttccatattttctaatgtttatggtgttgggcacattgtaggtactaaatatatttctaaatgaggggaatggagccatgttttcattatcaacatctattaatattttaaattttaattaattccaactc

SEQ ID NO: 19049 - DNA, 445 bp, Homo sapiens
acatgaagccgagcgtggtggcactttgggaggctgakgtgggcggatcacctgaggtcgggagttcgagaccagcctggccaatatggtgaaaccccgtctctactaaaatatacaaaaattagctagacgtggtggtgcacgcctgtagtcccagctactcaggaggctgagacaagagaattgtttgaacccaggaggcagaggttgcagtgaactaagattgtgccacttcactccagcctgggcaacacagtgaaactctggctcaaaaataataataataaactaagataatttcaacatgggaaatttcagccaataaagtattataaagtatgatatacaccaacaatatgttatttaccaaacaaaattctacgtaagtagtttaacaatatccagagggaaagacagaaagtccccgttttatatcatcagaagg

SEQ ID NO: 19050 - DNA, 537 bp, Homo sapiens
aatgattgttagttgaccactacgaaaacagttgagaattgcttcagccacttggaaagtaaaaaaaaaaaaaaaaaaaaaaaaatcaagaatgccaagtaactcacgctgtcagcgatgtggtgggacgcacaaagagtttataaaatcagcctgccagcatttgcccctcacccacatataagatacatgagggaaggttagggaaattgttccagaggcttcaaagttaatctgtacttttggcatttacccaaatagtagctgggggaaattggccctaaccaactgacagaaattaccctatgtgktctgggtaattactgatcatgttctctgatgtacctgtggttattgcctactgggagaatcaaatgggtagtgattgctttcctcaaggaaaaagtttaaggaaaaaaaaaaggagcttgcagtgtcatgaagaaaaaagtgcaaggtagaatcactcctaaaaatgtaaaggaaatgtacaggtattagacttgataagataacgggtccatctggaaatctgtg

SEQ ID NO: 19051 - DNA, 401 bp, Homo sapiens
ataagtaggataaatagaaagtgacaaaatgacacaaacacatatgcatgtacatacacaccactcacaatctatacagaatccaagtatgtcagaatacaaatacatgcaaatggactaactaatccagttaaagatggataaattgttaaaatcccattccatgctatttataagtcatatttaaaatacaaagatatagaatgattttaaaaggtattaaaatacgtatcagaggagccggacttggcggcacatgcctataatcccagttactcaggaagcagaagcgagaggatcacttgagaccaagagctcaagaccagtctgggcaatatagccaaactctawctctaaataaataaaaacaattatttggcagtggtggcacacaacactct

SEQ ID NO: 19052 - DNA, 534 bp, Homo sapiens
gcttttttcactagagtrgggagtttgtgggctttgggaggagtaaaatgaaaccaccacaccacaattcactgcagattttatttgcatgacaatggataagaattattttggattgctatcaattacctacaaattacagtcataaaataactcaaagtcaacaattagataaacagtgtgttctagacatacagtttttcactggagatacctagtaatctctttgcttattctaaatttatttacagagtgaatcctctaaataaaaaatagaaacaaataaataagaccatttgctcagtgctttcttagtgctgggcaatgtgctaagtaaggcctttacatacattatcattagatggatggcattgttactattttacagataagaaaacagattgacttgcctaatattccaatatttaaatacaagtctgactgattccaaagcttttaatgtcttaaaaataagataatgacaaaattttctaaaaatttaacatacagtaaacttgacatttttattccgtg

SEQ ID NO: 19053 - DNA, 530 bp, Homo sapiens
attaaaataaaatgtaagtgtgtagttcagtgatttaagactgttttccaacatggttgcaccttttgtatttccatcagcagtttgtgagagttccagttgcttcacattcttttcaaaacttgcaatggcccagtattataagttttaattttggccatcataattggtacaaagtggtattccatgaggaggagttttgaaagcacttaaattttgcatttcttatgaaacttttaatttagtcatttattttatatgagcagggactcgtattctgttttactcaatagattttaattcattatttaaaaaatcaagacaaaaamtttggctttcccttcagtgtctcttgcagatggctacaatgcaggggcaactggttttctggtgggcctagaatgtatgtaaatatttcaattctcctaacaaaatatcaactatgccctctcctctataagaatctaatgcttatgagctttgtcttaacattttcattattaaaaagtaccttcttttaaacccagaaa

SEQ ID NO: 19054 - DNA, 591 bp, Homo sapiens
aggctgctagaagtggggtggggtggacttgggagtccaagtgaatggaatcagtgctgcattgcccaataggcaaccggcaggtgcttaggaaatcaacaaataatgcttttgaaagaatacaatatttgcaacttcatgcatgtacacagtgatcaaagtggctattatttaaaaaaatcaaaagtcccttatacagtcttatcattacttttcagttagtattgggtatttgaaattacatgctgaaacacagaataacctttttagagcctaggaccactcaggtcttgctctgaccctggttggagctcatccttcgggaaggagacaaaagcccccaaatttaccagagaatggaagaaagatgggatgatccctcctcagcttttgcattcctccatttttgatccttctaccccttgactcataatttagacacaagtaaatgtctcgcctgcttgggtttgaggtaaacgttagttcagggttaattggatgagctgaaacactctgagcatggagagaaaggatctagtcatggccaaccrctaatcccacagcccccgccactgcatggtagctgtcctg

SEQ ID NO: 19055 - DNA, 676 bp, Homo sapiens
taataaagttttatttgtgaagagactgaaagagtaatgtcttgtaaatttaaatttaaacagtaaactatgtggtttcagtcctcagaaaccactttattttcctcgtcttattttccttcccttctgttgaattttttttttctactatagcattttccacttacaggagtctcttttcttctcaatkctcctttttaaagcctcctttctttggggaaaggggagatatgatatcttttcctagcaacaggaacagacagtaggtattttttaaacacattttcctgccaactccattgctttgatttcctctgagttccattttgttcattctgtccttcatgctggagaaattcctttattgtctgaaggtgatcctttataggacagtgactaatcataggcataaagtatcagttaaacaagatgaataagctctagagatctgcagcatgacaatgtgcctatagacaacaaaaacatattgcacacctaacaatgtgttaatagggtagatttcatgttcagtgttcttaccacgataaattaaactaaaagaaagaacagtgagaccaataccagaggtgaggcagagtaggaggttgggctgatcagtgtagaatgatcttattaagcttggaaggttttccctgctcttggggtggaacatttt

SEQ ID NO: 19056 - DNA, 631 bp, Homo sapiens
ttacgatttcacgcaaatgagatggaaaaagagaggtaattagctttagcttttcaataatcagtctaggggaaacttcatggaagaggtattttaataactgaacctgaaccctttctctctttctcccttaagagcagcatggatgaaccaaagacaagttgaggtagcctgcagcaattttgatcttgatccagactgcaaaaacaaattaccatcaagatttaggaaggaagaagagacaatatttaaaaaaacctgaaaattccacagggagaaactgcatgtgcctgactaaggcaatgctaataggaatagaaagaaagcatggatagatatttacatgacatgattttgcattttttaaagtaatgaatcaagggctgggcgtggtagctcacacctgtaatcccagaactttgggaggccgaggcagaggatcacttgargcccagagttcaagaccagcctgggtgacatacagagactccatctctacaaaaaacttaaaaattcgctggacatggtggtgcatgcctgtagtcctagctacttgggaggctgagggggaaggcttgcttgagcccaggagtttgagtctgctatgagctatgactgtgctgctgccctc

SEQ ID NO: 19057 - DNA, 631 bp, Homo sapiens
ttacgatttcacgcaaatgagatggaaaaagagaggtaattagctttagcttttcaataatcagtctaggggaaacttcatggaagaggtattttaataactgaacctgaaccctttctctctttctcccttaagagcagcatggatgaaccaaagacaagttgaggtagcctgcagcaattttgatcttgatccagactgcaaaaacaaattaccatcaagatttaggaaggaagaagagacaatatttaaaaaaacctgaaaattccacagggagaaactgcatgtgcctgactaaggcaatgctaataggaatagaaagaaagcatggatagatatttacatgacatgattttgcattttttaaagtaatgaatcaagggctgggcgtggtagctcacacctgtaatcccagaactttgggaggccgaggcagaggatcacttgaagcccagagttcaagaccagcctgggtgacatacagagactccatctctacaaaaaacttaaaaattcgctggacatggtggtgcaygcctgtagtcctagctacttgggaggctgagggggaaggcttgcttgagcccaggagtttgagtctgctatgagctatgactgtgctgctgccctc

SEQ ID NO: 19058 - DNA, 631 bp, Homo sapiens
ttacgatttcacgcaaatgagatggaaaaagagaggtaattagctttagcttttcaataatcagtctaggggaaacttcatggaagaggtattttaataactgaacctgaaccctttctctctttctcccttaagagcagcatggatgaaccaaagacaagttgaggtagcctgcagcaattttgatcttgatccagactgcaaaaacaaattaccatcaagatttaggaaggaagaagagacaatatttaaaaaaacctgaaaattccacagggagaaactgcatgtgcctgactaaggcaatgctaataggaatagaaagaaagcatggatagatatttacatgacatgattttgcattttttaaagtaatgaatcaagggctgggcgtggtagctcacacctgtaatcccagaactttgggaggccgaggcagaggatcacttgaagcccagagttcaagaccagcctgggtgacatacagagactccatctctacaaaaaacttaaaaattcgctggacatggtggtgcatgcctgtagtcctagctacttgggaggytgagggggaaggcttgcttgagcccaggagtttgagtctgctatgagctatgactgtgctgctgccctc

SEQ ID NO: 19059 - DNA, 551 bp, Homo sapiens
tggaggatattagagctagacccctctctgcctgaccctgaagtttggcctggagagaagtctcctccaaggtagctcagactgcagagattggcaccctgaaggaatggttccctgtacgtgtgagagaggttggaccaaaagacaccaccagcatcaggaggagtcctggggggatagcggaggccagaaagtcatggcatctgtcccctctttccaggcaagaattagacatagcacgctcacttggctgctggtgcccactgtggtgggcactgcagggaggtaamcctgcctcccagaaccactgtccagtggaagcaggatggacctgcatggctgtggccatggttgacccaggcaggacctgagatcctatgggtatctagaatgggcctatctgccttttacacaatgtgagatcatgggcaagtgacttcatctctctgggcctcagtttatccatatgagaaatgacagattaagtgaccttttaagtcctttcctcagatggctgctgcttctggacagtaaagaagcctagagtagaa

SEQ ID NO: 19060 - DNA, 551 bp, Homo sapiens
tcttcattctttaacaatggggaagataaaatggttttatgtaaaaataactttctcataattttacaacaaaaccttattttccatgataaatgagatagtctgctgtggtcttttacagtaagtatcaacaaaaccacctcatataatagctagcatttacataacatttactatatgcttaactttttaaggataatcccatttgatcctctcaacagcccccttgtacaaatgcagaaayggagacttagaagttatttctgtaaggtcccaccaggatgctgataacaggtagagaggaatggacctgggcaatccatcccagagtccacacacttgcccgacaccttaccatcttccagtgaagggtctgagcacacacacaggtatacacacatgcacacacacaatgcttccagatcttggcctgttggcctctttgaaccaattgtatgcaacaagcttctgggtcagccctttctgcccagattggtgaagcaaggaaacactgtcatttttgagaacgcagctgcccctccttttctccc

SEQ ID NO: 19061 - DNA, 514 bp, Homo sapiens
agtctgatttgtgccccaaacaagaagtcaggccgggcatggctcacgcctgtaatcccagcactttgcgaggccaaggtgggtggatcacttgaggtcaggagttcaaggccagcctggccaacatggtaaaamcccatctctactaaaatacaaaaattagccaggcttggtggctggtgcctgtagtcccagctactcgggaggctgaggcaggagaatcgccaggaggcggaggttgcagtgagccaagatcacgccattgcactctagcctaggtgacagagcaagactttgtctcaaaaaagaaaaaaaaggggggggggggggcgggtgtgccactgcagtgtctccttttgttatccaggctggagtgcagtggtgcaaacatggctcactgtagccttgacctcttgggcttaagcagtcctcctacctcaacttcccaagtagctgggattacaggatagctggcggccaggggaaatatagtggaaaatgcaaaacaatgaaa

SEQ ID NO: 19062 - DNA, 576 bp, Homo sapiens
tatatatgtcattctcatgttaataatattcatgaaagaaaaacgagaaaaaaaagacatataagcaagagaaaatacaagactttcccaatcctacccacagaccaacacataaaatacctttgcgtatattcttcaaactttctgcatagtcatttatacatttatattatttccataaatcatgttcagttgttaaaaaactgccttttaaaaatcttactgtattgtgattatctttccatatcaataaaatagttttatatgatcattctgatatataattgtaaataatttaaccaatctgttgttggcttttaggctgtttctaacagcagtgtaactaatatccttatggctaaatcctgaaagscatacttcactattttcttaggatgaattccaggtagtttaaggactagcatgtgctttttttaagttatactttacgttctggcgtacatgtgcaagacgtgcaggtttgttacataggccatggtggtttgctgcatgcatcaacctgtcatctaccttaggtatttctcctaatgctatccctcccctagccccccaccc

SEQ ID NO: 19063 - DNA, 616 bp, Homo sapiens
tcacacacacacattttgtcaatattttggattttttctttactttgtttctattaataaatacrtatacatagatgcacaacaagctgggtccaaagtgagggtggcttattcaagtgatgacatccatcagtcagtagatgatgcaagctaatgcttaggaaagaggtgaggtctggggatgttgacttgggaggtcatgcttagagcaataaaagttaagactcagtcttggatgaagagattgtaggaagaaaataagagtgaggacacaatattagaataaggagcagaataatatgttgggaaaaataacttgaaaaaagagaaagtacaattagataggtaggaggagaatcaggatattgtggaagaatgtcaagaagaagataacattcaactgccaatcctgaaaagaagttaaggagaatgaatcctaagaaaaggccaacatatttaacaattgagagagacggctgtggagtaaacgtctgattacaggaatgcaaagaaaacagattgaagggatagggatatgtgcatatttacaccacacagtcaacaaatctggccagaaagaaaggtggcaaatcaagctttttttcaagatattaga

SEQ ID NO: 19064 - DNA, 545 bp, Homo sapiens
ttgatacatttttttcatctatctctatatgtttgcatctgtgaatgacatttgttttgtaatagtcttttcttgtaatattcttgtatcagggtaaatactggacttatgaagaagttcataagtattctctcctcacacacaggcagtcattagtacttatctgtttactctaagtctcttctccacaaatctccagcgttctgtatcagtgtaactctctatactctggtactgttmactgcaatgtcctcaagactcccaagttctacctgggttctcctctgcactatgatctggaatctctctgcaaacactaagctagagcaatcatagagttcatctcatgttccttatctcagagatcattgttcattgctttatgttcaatagcttaaaaacaatcatttcatatattttgtgtgactttccagctgtttcaagggagagggtaaatattacttctctcactttatcttggctccaagcagaatcggggtccagaattttgagtctcaaaagtcttttttctgacttaaccatcc

SEQ ID NO: 19065 - DNA, 554 bp, Homo sapiens
tcagaagttgaaaaggccatggtcattcagctgggtactggagaactcatgattttttcttttagattaggtcagtgcttctcaaaccattttcctgtctagcatacctgcagggtaggctaaatttgatartgtctctggaggtagaggctggttggggaatggatgtggtagacagttgggggaatgtggtttaagaagacctctagataattctgttaagggagagatgggagcattttcccctttcccctgccagtctcattataatagatgattattaaaagcagttaatttctttcttttctagcccacaccagttatcctattgaaagaggggactgatagctcccaaggcatcccccagcttgtgagtaacatcagtgcctgccaggtgattgctgaggctgtaagaactaccctgggtccccgtggcatggacaagcttattgtagatggcagaggtaagtctacagagttcctcaggcctgtgtgcaggaaaggaggctcctgagggggtgtttgggactagcataggttggtatcagaaatcc

SEQ ID NO: 19066 - DNA, 709 bp, Homo sapiens
cttatagcccatagccaaatgcagattagagaggattaaatcattctgaatcccgtaagactcacttcctaagattctattttggtacatattaaggaatagacattatttttctctcaagggatttacattaacataagagaataacaaagagtaatgcaaatcattagtgacttgaggattctggcacaaaattatctctgaaattaaccatactgctctttcaaatttctcctaccagacagtgagctgctggagcataagcgctatcctactaaactgtattcaccatgacgccacagattataacgaatgcattttgactttttcattacagtcacacttggtttgcagcaaacagggagttcatcaagtctggagaaagggacatttcccagatcagcacagtgtacccacactttggaggtactcagccacaagacctcatgaagtacatcycaactatgcttatagttgctgtgaagaatttataccccatcctccaaaaatctggcaatattactatgattctaccttgatgtccattcaccagaggacctgttcttggtcttctgttaccctgcatttatgtgttacaattttgttatttccagcctcataaacttttcaccaccactaccattcagaagtctgaatgtaattgctctttgcttcctgtcctacagcaaaagtcttctctgtgttgaca

SEQ ID NO: 19067 - DNA, 545 bp, Homo sapiens
tgctatattcaagggtataattgagctaccatctttttctcagtcaccagagagactatgattttgaggtttaaccatggatgaaagaaatgccaacatgtaaagaacttgtgaagatatgaatatgccaaatwagtgaatttttggatatgtgaaaatgccaagttgcaaataaacaaatatgtaaaaatgaaatatttgttgatttatcgtgagtggctttttcataattctaaagcttttgttaacacttgcatatcagtatcacctgggaagctttagaaacataccaatgcctgggatctaccccagaccaattacatcagaatttctgaagcatcaacttttttactttttttacaacactcctcaggagattctgatatgcatccagggttgaaaacacttgcctctatgttcatatcactttatgtagctgtaattattataataaatacaatattggtttgattcttttcatatggtatttcctttttgcataatcattacaatttgagacttgataaattgaataatattgacat

SEQ ID NO: 19068 - DNA, 542 bp, Homo sapiens
cccaggttggagtgcagtggggcgatctcgtctcactgcaccctccgcctcccgtgttcaagcgattctcggcctcagcctcacgagtagctgggattaccggggagcaccactgtgcctggctaatttttgtatttttggtagagacagatttcaccatactggcgaggcttgtctggaactccygagctcaagtgatctgcccgccttggcctcccaaagtgctggattacaggcatgacccactgtgactggcctattttaaaaattatatttatttaaataaagaatcctataaaatatttataaaagaaaaataagtgattttcagaataacaactttgcttgttaagaattctacatatataaactttttcttgacatctgtaggtcaagatttggctcaaatgcttatgaaattagcattcataagcataggacatagtgaagaaaaacaaacataaaaaagaaattagcattgaaattatgaaattagacatgtagaatgtccagttgcacatatggtattctatgtgatagtt

SEQ ID NO: 19069 - DNA, 578 bp, Homo sapiens
tccgttttctctctgtaaaacaatccaggtagtacggtatttcagtgttgcaaagatccttagagatttagtccaggagttggcaaaatacagtccactggccaatcttgttcaccacttgtctttgtaaataaagttttattggaatacaaccacgcccctccatttacaacccatctgtggctgctttcatgctacagtggtggctttggatagytgagagagatactgaccatgtggtctacaagcctaaaatattatatttgtctctttacataaaaagtttgccagcccctgctctaggccaacatcatcatgttaacaacacagaaagagaggcatgggcagattaaggaatttgccaaactcatagagcaagtcagggcagaggctgggacagcctggcgctcctgatttacattggcccagagttcttacctggtctaaagctctccgtctgattctaggtagaagctgtgctggggagaagccttgtggggatagaggagccggttccatgaaagaagtctatgcagttggggcagaaccctgagacttctgcagcagggacagttctg

SEQ ID NO: 19070 - DNA, 577 bp, Homo sapiens
aaggaccgccactgagaagaaagtaacgtgagccgtcagaatgcatacctggagcgctccaggaaggaaatctcagccccggcatcctccatggtcacacggagagggcgggtgtccttgtagctttggccctgagatgggagctagagctggacacagkgttctagtcctggctttgctgtaaacagctcccagacctggagcaagtgccttacctgtctgtgtaatgtgggagctgatgtggatcatctttaagccctctgcaagatggacacgctgggatcataataaggacacatgccagtcaggccaggttcttcatttgaaaacctttatacatttttttctcttcagccttaataaaattaactcacctagcattgtatatatgtcaagcagttttgatcatccaaattttttattgttggctgacctctagccaacaattcatttattttctgaccttttaagatgtttcgtagctgccatttcatgtatctgaaaaatgagatgtgaaaagaatacacatatttaagaacaaaattttgtttcttttaaataattttaatattttttt

SEQ ID NO: 19071 - DNA, 514 bp, Homo sapiens
taaggcccactctaaattcaggatgatctcatctcaagatctttaacttaatgacatctgccaagacccaatttccaaataaagtcacatccacaggtgctaggggttggtatttggagtatctttgggaggcaccactcacacctgtcccgtggtcttcctctgaggatgggtgaggagaagatcagttacttactcactcatctgctcactcctccaacagctatgccaaaggtcataggaggatccagggatatgataataaattggagaggatccytgccctggagaatatcactatttggaagggctttgggatatgaataacagaaacacaaggaaagggatggtgagagccataagattcggaagctgaaggactaatggaagcagcccagagagggaagggctttcaaagcagaggctgacattgtcagcaaaggcagaggctagagagcaaaaataggtcaggaatccttgcaactgagtttggcagtaatggcgggtgtgggcg

SEQ ID NO: 19072 - DNA, 685 bp, Homo sapiens
aaacgcagacttagctctgaccacatagcacgctccaacatttcctggcctgccatggaccacattccttcacagcgggacttatgatctaataagagaccactgcagatttctgcagtttcctcgtggtcaaagccagagtttcacaggaacctaaagaatcacattgactttgtccttgatctatttctgtctgaaaggacygtattcatttcctagggctgtcataacaaagcaccacaaactggatggcaataaatgtattgtctcctagttctggaagtgagaattccaagatcaaggtgttggtggagttgtttcttctgaggcttgtggcctgtgagggagaaatcagtctgttctattcacctttctaagctttgggggattgctagaatctctggcatctggctcctgttccatcatcttggtctgtatctccagttcacatggcatcctccctgtgcatgtgtctgtgtccaaatttttgcttgttataaggacaccagttttattggattaggggcccactctattcacttattacctctgcaacaactctattttcaaataaggtcacattctcaattatggatggttaggatttcaacagttaaactttaggaacataattcaatccataacagggataaagttcttaaaataccttggtttaaattgagtg

SEQ ID NO: 19073 - DNA, 559 bp, Homo sapiens
gtggcacatgcctatagtcccagctacttgggagactgagtcaggagaatcgcttgaacccgggaggtggaagttgcagtgagccgagatcctgccacctacactccagcctgggcaacagagcaaaactccgtctcaaaagaagaaaaagaaaaagaaaaagaaaaagaaaaagaaaaagaaaaaaaagtgactcttagaatcaaggaaatagggtggtgtgtactcacagagggactgtggggattccaagaaattcgggacataaggcacctaggacagtgccctggcatacagcaggagctcaacagctggccagtcaaatggtttccaagccagatgaaataattacaagcagaagatggggcattcaatagctctctcccacagctagtggagtagggtgacccaactcctcccagcttgcccaggactcttccagttttgaaactgaaaatcccaactcccaggaatcccttcagtccaaraaagtaaactgggacagttggtcaccctatttcgtgttaaacagacagattaattttaagagcaatatatc

SEQ ID NO: 19074 - DNA, 554 bp, Homo sapiens
caacccatagcgataagttaatgaaattaaaggcatactatattaacttattaaatgtataatagcattaaattgtgaatacaaaggacttaaaaaatcagtggcaaaattaaaaatcaaaatagagatayaagcaagcacttctaaaagttcaattatatgacaataaagtacaaaacttcaatcaaatgtatgattttctggtattggcataaggcaataattaaaagaactatttaaaaactcttttcaccaagaaaaaccagtcctttttgattagcaaatttattcaaacttttaaccatattttataatctgctcatgtcatagacaaaaaggtataatctgcctaatttgttccttgataaaaagggattattttttaaaactactaaatgtatctccaaataagtaaatagttgtaattgcaacaacttagcatgtcatttgagtcaagcactggagttggtgccttatattacttgacttcatccacagaacatacctacattatggactaaaatttctactttataaatgaaaagactaggctc

SEQ ID NO: 19075 - DNA, 555 bp, Homo sapiens
atcgagatcatcctggctaacacggtgaaaccccgtctcttctaaaaatacaaagaaaaaaattagcagggcgtggtggtgggtgcctgtagtcccagttactcgggaggctgaggcaggagaatggtgtgaacctgggaggcggagcttgcagtgagccgagatcgtgccactgaactccagcctgggtgacagagcaagactctgtctcaaaaaaaaaaaaaaaaaaaaaaaagaatattctctaaagccagtaaagacatggaaagctacacaacagtatcagtaatcaaagwtatgcaaattaaactcaaaatggagatgtgaccagccacaatcagaatgcaagaacagtcagcctggtaatactaagttttggcaagtatttggaccaatagggagtcatacatcactggtaggggcttaagttgacaaaaccaatctcaaaaaaaaaatcatagttatataataagaaatgggaaaaatttaaatcagtggggaaaatatcttttcaaatgacaaggtaaaattatgcatgaagtagaggaaagtatt

SEQ ID NO: 19076 - DNA, 593 bp, Homo sapiens
ttttccttgtttccctctttgctgcttgtatatgtaatggtggcctatgctacctcctgtatatcccacagacacttccctccattttcacaatttgtgagccatgcggtccaagactgtcataataatcccagagtctggtcccaacacccttgcacatagcctgcctytgggtatggttctcttctattctggtccacagtggttttcttcctttcttaactcaagttaagtattgagttgtatgtttttattctataatgtctatgtgttttgagcaaggcgaaggtttcagcatatgcccaagattccactttgaaatggaagtcttcaacagagaagactgattatattgttcctggctaacagggggtctccttggttttcagggaaataacttagtcaccattttattttattctgtaacaatgccttagttgactgccaccaaaccacagtctgatatatttacagcctgcttttggcaaagctgatatgattgaaagtttcttttttttagccccacaacctctgtttctgtggtaagataccaaatggggctaaagtaatgttctaggagctcttctgggcag

SEQ ID NO: 19077 - DNA, 513 bp, Homo sapiens
gaggtgaagggatagtccacgagtgatcacaccacacatgttttaactgtcaaagtctatagctcgccaaactgaaatactcatgaaattcttctgtaaagtatcaagtaccatactaacattgcagctctttttcagtcctaactaaaatgcaatagattaaagacagactacatacacttaagtgacatttttaatgcagaaagtttgcctgttttgactatttttaccaaccaaggttgatactttgagccactttagatcttggctttgcattgatgatatgtaagtgatacaaatcctttcactgtaagaaaattttaattatttckaattaaatatattaaatgtatttatatttattatattggacttacttctataatgagatcactaacttttcttgttttctgagaaaatattgagacttcagctttaaatttttgcttgataatcttaaacaagttccttatcttctcttcttttcaggctccaatctggaaaatagaatcc

SEQ ID NO: 19078 - DNA, 544 bp, Homo sapiens
cagaacaacctagagactcctatagagaactaggaagccaggcacagtgggtcrtgcttgtaatcccagcactttgggaggccgaggtgggaggattgcttgagcccaggagtttgagagcagcctggacaacatagtgagactctgtctgtacaaataatttaaaaaaatattagccaatgtggtgcatgcctgtagtccaagctttttgggagcctgaggtgggaggatcacttgagcctgggaggtagaggctgcagagagctatgattgcaccactgcactccagcctgggcaacagagcaagaccgtgtctctaaaaaataaaaaaagaactaagggctgtaatccagacagctaagtatgggagaggggatgaatcatgtggagtcttggaaagctctgattctggaggaatatccaagtgagggtttcagcaagaaggaaaactgccattttgttttgtttaatgcaaagcctttgttctgtctcgtaaatatgccttccttttaccaacctcactcttggtcgaatatttaaccaa

SEQ ID NO: 19079 - DNA, 559 bp, Homo sapiens
aatagatgaacgctttgggtttattcactcatgttttcttttttaaaccaatgttttataacacctactaagttccaggctctttattctatagttttatgcctactctccttttctccattagaagaatgcagatctaagctttaaagaggcagcagcatccaaataagagtcagtgcgcttaaccaaagaacagcttttaactgtttcctagtgaaacattttgaaataaaggtctttcyaccggggcaataggtgttgtgccagtgtcacaccagagagtagaagcctttgaagagcccttttgtgacttggccactctgcaaaactctgtgtctgaatcctcaagctaagtggaatcttgattatgttttctatttgtaaatgctctacagcttatccagcatgattctatcattttcttacttaatcctcccaaatacctgtaaagcaggtattattgtcctattttatagatgagcaaactgaggcttagagagattaagtgactttagtttccgatggccaagtggaaactaaagcttagtctttcttccac

SEQ ID NO: 19080 - DNA, 581 bp, Homo sapiens
tgcgctaattgtttcttatcaatgttagaatttgtttgtttttgtttttattttttttgttcaggagcatgctttcatctatgtgtcatgaaggtgatggagaagtgaagtattcaagcaaagggaaggatgtcttatcagttatggaagctcagactggcagggaagtatctggggacagcgtggtattgctagcccatgttamcgaggtggagatatttatcttcgcctcaacttaaagcattgggggaaactaaatgtggaggtttagaatcttgctctctccttctgaggcacccttggcagattggttaggtataaaaatgcttcctggcctctgcttcagtggccactcagctggtagctacaggatctgttctgcagcagagcattctgggataagcagttcatttcaatgatttaatacagatggatctttggagagtctctctagtgctttaacaaaaaccctccctttgctaaaggctgataatcataagtactatattgttaggggacataaactctgtcttgtaacaaaggacagatttcagaagtaaaaagctagctatggaagtgtc

SEQ ID NO: 19081 - DNA, 546 bp, Homo sapiens
aagcaaaaaacaagaaaaccataggcaacttgtattactcagtgatgggatgtyggggcatataagattatatctgtcagtaaaatattagtttatacctaccaagtggggccagtgaggcacctctaatttcctttgtgaaataaagtgaatccaagttaatagattaaattccaatcaagggatctttgtgtcaaaaaccaaagaggtggctatactctgtgactgtttaatccctaactgctcctccttatctctttaaaaccagcttattctaaagtggaaaattaatataattatctcaaatgctaagcacaatgcctcctttgcctcagctataaactttatgctatttgagtatgtagattgccttattgagatagaatcaatgaaacattttaattctcatttatttatatgtgtatgttttctctaggatgggtgtgtaatgtgggttgagccttgaggtctggcagttaccttctgtgtgctctggctattcacttagctccctccctgtgggtgtggggacactggtataggtgt

SEQ ID NO: 19082 - DNA, 209 bp, Homo sapiens
gaatgtgggacacctgaaaatcttaaaatatyctgttcaataatgtttttctaaaatgtgaccaaattatactaagaagctaacttggaaattggccaaaggagaccaacttctttcaataaagaaaacattaattaatatatctatatatctgtccattttttttccctgactctcctttaacatgttctctacaacaaggcctggga

SEQ ID NO: 19083 - DNA, 209 bp, Homo sapiens
gaatgtgggacacctgaaaatcttaaaatatcctgttcaataatgtttttctaaaatgtgaccaaattatactaagaagctaacttggaaattggccaaaggagaccaacttctttcaataaagaaaacattarttaatatatctatatatctgtccattttttttccctgactctcctttaacatgttctctacaacaaggcctggga

SEQ ID NO: 19084 - DNA, 551 bp, Homo sapiens
agcactatcttgtaaaatgatacattaccttgtttttctggtaagtactgtgaaaggaaaatatcttgggcctccaaaatcactaagctaaaaggaaaactcaggctggaaactgcttagggcaaacctgcctcccattctattcaaagttacctctctgctcactaagataaatgcagatctgactgtctcctttggaaargctaatcagaaactcaaaagagtgcaactgtttgtctctcacctatctgtgacctggaagccccctccccgctaccagtcttcctccctttgcttcaaattgtcccgcctttccagagtgaaccaatgtacttcttaaatatattgattgatgtctcatgtctccccctaaaatgtataaaaccaagctgtgccccaaccaccttggacacatgtcatcaggacttcctgaggctgtgtcatggatgtgtgtcctcaacctcggcaaaataaactttctaaattaattgagacttgtctcaaattttgggggttcatagtactaatgagaacattatatttgcatcttg

SEQ ID NO: 19085 - DNA, 551 bp, Homo sapiens
agcactatcttgtaaaatgatacattaccttgtttttctggtaagtactgtgaaaggaaaatatcttgggcctccaaaatcactaagctaaaaggaaaactcaggctggaaactgcttagggcaaacctgcctcccattctattcaaagttacctctctgctcactaagataaatgcagatctgactgtctcctttggaaaagctaatcagaaactcaaaagagtgcaactgtttgtctctcacctatctgtgacctggaagccccctccccgctaccagtcttcctccctttgcttcaaattgtcccgcctttccagagtgaaccaatgtacttcttaaatatattgattgatgtctcatgtctccccctaaaatgtataaaaccaagctgtgccccaaccaccttggacacatgtcatcaggacttcctgaggctgtgtcayggatgtgtgtcctcaacctcggcaaaataaactttctaaattaattgagacttgtctcaaattttgggggttcatagtactaatgagaacattatatttgcatcttg

SEQ ID NO: 19086 - DNA, 551 bp, Homo sapiens
agcactatcttgtaaaatgatacattaccttgtttttctggtaagtactgtgaaaggaaaatatcttgggcctccaaaatcactaagctaaaaggaaaactcaggctggaaactgcttagggcaaacctgcctcccattctattcaaagttacctctctgctcactaagataaatgcagatctgactgtctcctttggaaaagctaatcagaaactcaaaagagtgcaactgtttgtctctcacctatctgtgacctggaagccccctccccgctaccagtcttcctccctttgcttcaaattgtcccgcctttccagagtgaaccaatgtacttcttaaatatattgattgatgtctcatgtctccccctaaaatgtataaaaccaagctgtgccccaaccaccttggacacatgtcatcaggacttcctgaggctgtgtcatggatgtgtgtcctcaacctcggcaaaataaactttctaaattaattgagacttgtctcaaatttkgggggttcatagtactaatgagaacattatatttgcatcttg

SEQ ID NO: 19087 - DNA, 571 bp, Homo sapiens
tgaaacttgggaatttaytcctgttttttttttttaacttgggaatttagaaaagatgcaacatccaagagggttcagaatttctttttctttaaaccaagctctatttctatgtctatgcatccatgcaatggcacattgcctttctactccatattagaaatttatagcatatgttttcaaattatttactagtatacataaatattaattaaatggatgatttcttttaagattatgtttaattgcaatgtaacataaatcttggccaagtaaatatcttgagacatttatggcagattctgccccctaggcaaaggtttcttgagctctgttttgtgggagtgtagcatctgcttactatcaagaggcaagcaaatgcattttatggtgactgtttcctgaagaaataaacagggggaaaaaaccttaatttttcaacatccattgttttaaaccttaaaaaaccttaaatttagcagcacttttacaactaacgatctggttttatagcaagaacctagagctgggggaactctatttcctttagagccacttgaaagtagacaat

SEQ ID NO: 19088 - DNA, 332 bp, Homo sapiens
ttctcgtagttccaaaatgatatttcttctctcctccccatggggtgactttatttccctctgtggcttaggagtaaggaaaaaggaaatcacagttccacttaacaggcagatgctggctattaatctgcaataaataccatatcggttakgcaaagcaaaggagtagctgtctattagaagaatgatcccccttatactaattccaggacttcagatcctttcattgtccaagttcagagaactcccactcttcaaaaaatgaacatatgaacatatgtaaaacaggcttacattaaaatgaaagagtttggaacctgcaagtaacctcg

SEQ ID NO: 19089 - DNA, 489 bp, Homo sapiens
ctgggattataggcgtaagccacygcacccggctgatcccatactttaggagcttcctgggctctgattctcccagggcccgacatacagtaggtctcagcgatgacactgagggggtgaagattgcacagtaatatagatggctagttgagtgtgcgtgagctgttttctgagctttttgctgaactgctttgaaattttaatgaacaaaagtcaagcatgattttattattgtttttatagttagtgacaaacctgaaaacaacctagaagtacaataatggtgaatggttaggcacatttctgtgtctccacatattggaaaatgaggcagtaattaacatctctgcttagagagaggcttaacatgacataacattaagggagaaagcaggactgaaacctacttagagggtgttttcagtcaacaaaattcagacatagaaaaaagactggaaaatcaaagaactaaataaatagagagatatc

SEQ ID NO: 19090 - DNA, 489 bp, Homo sapiens
ctgggattataggcgtaagccaccgcacccggctgatcccatactttaggagcttccygggctctgattctcccagggcccgacatacagtaggtctcagcgatgacactgagggggtgaagattgcacagtaatatagatggctagttgagtgtgcgtgagctgttttctgagctttttgctgaactgctttgaaattttaatgaacaaaagtcaagcatgattttattattgtttttatagttagtgacaaacctgaaaacaacctagaagtacaataatggtgaatggttaggcacatttctgtgtctccacatattggaaaatgaggcagtaattaacatctctgcttagagagaggcttaacatgacataacattaagggagaaagcaggactgaaacctacttagagggtgttttcagtcaacaaaattcagacatagaaaaaagactggaaaatcaaagaactaaataaatagagagatatc

SEQ ID NO: 19091 - DNA, 489 bp, Homo sapiens
ctgggattataggcgtaagccaccgcacccggctgatcccatactttaggagcttcctgggctctgattctcccagggcccgacatacagtaggtctcagcgatgacactgagggggtgaagattgcacagtaatatagatggctagttgagtgtgcgtgagctgttttctgagctttttgmtgaactgctttgaaattttaatgaacaaaagtcaagcatgattttattattgtttttatagttagtgacaaacctgaaaacaacctagaagtacaataatggtgaatggttaggcacatttctgtgtctccacatattggaaaatgaggcagtaattaacatctctgcttagagagaggcttaacatgacataacattaagggagaaagcaggactgaaacctacttagagggtgttttcagtcaacaaaattcagacatagaaaaaagactggaaaatcaaagaactaaataaatagagagatatc

SEQ ID NO: 19092 - DNA, 541 bp, Homo sapiens
catttataatgaaaatcmcccctcgccctcttctttggaaattattggctgggtgaggtggctcgttcctgtaatccctgcactctgggaggctgaggaaggcagatcactggagctcaggagcttgagaccagcctgggcaacacggcgaaaccccatctttacaaaaaaaaaaaaaaaaaaaaaaaaaaaagcaaaaaattaactgggcatggaggagttcacctgtagttctagctacttgggaggctgaggtgggaggatcacttgagcccaggaggttgaggctgcagtgggccgagattatgccactgcaccccagcctgggtgacagagtgagatcctatctcaaaaaaaaaaaaaaagaactgatcgtggcagtggacacgctgtttcttagtaactgcagccaccgcaggatgctgcaaggctgcatcgactgctgctctgaaatctgctctcacaccccaggccgctacaggccgcacaggtggcacgtggccaccagcagcaggatgccctcgccgagtggcccttactg

SEQ ID NO: 19093 - DNA, 569 bp, Homo sapiens
taaataataaaaaacaatgtgccataatcatatttctcaatgtactttgttttccaggtataggtagtatgagtattgcctggacaatactmataggcagcatgagtattgcctggacagagggctataatctccctgatcctacaagaatccaacctgggcaccagctcagtgtggtcactgagcacggctcttcttccttcatgggttcacatggacacacactcagcaacccacacaatgcttttctctttaagaatctttttagttaagtacatcttccggattcaaaatacttaataaagcaacatactgcaaatgccattttttttcagattttcagaaggtttgaacaataaccaagagaacaggtgtatttcagatggaatattcgctaaggaagatgtctttctctacatagaacacagtctgaggctctactgtcctaaatcccgaaagctgatagtgttagtcattaagcttgctcttactacagggtctgtgtattatctaatgtgtaaatagcatttaagcagcctcaacaaccaaaatgctgaagatgggtgggg

SEQ ID NO: 19094 - DNA, 569 bp, Homo sapiens
taaataataaaaaacaatgtgccataatcatatttctcaatgtactttgttttccaggtataggtagtatgagtattgcctggacaatactcataggcagcatgagtattgcctkgacagagggctataatctccctgatcctacaagaatccaacctgggcaccagctcagtgtggtcactgagcacggctcttcttccttcatgggttcacatggacacacactcagcaacccacacaatgcttttctctttaagaatctttttagttaagtacatcttccggattcaaaatacttaataaagcaacatactgcaaatgccattttttttcagattttcagaaggtttgaacaataaccaagagaacaggtgtatttcagatggaatattcgctaaggaagatgtctttctctacatagaacacagtctgaggctctactgtcctaaatcccgaaagctgatagtgttagtcattaagcttgctcttactacagggtctgtgtattatctaatgtgtaaatagcatttaagcagcctcaacaaccaaaatgctgaagatgggtgggg

SEQ ID NO: 19095 - DNA, 490 bp, Homo sapiens
aaaagaaacataacattattatattgcagttcatgtccacaaacatccaaactgttctaagggcattttgtgtaaaaaaggtataaaataaaatagcaacaaccccaagctctcatactgataaataacgaagcaagtaatggcataaaccaagtaatcaattatgtaacaataacatcgtaacaggatgctgaatgaaaatcatactgtaagatgaggcatgcctctcgtttgcattccatggaaacatgcatagtggttttcaagttattaaaactagtttttaacgttaagaaataaacttcagtgtacagatgtatattagcaaataagatttaaaatactttaaaatttatattccattttcactgcaaagaactcaagcattccacatagggaaaatcctggattcttaacaggtgttagttttkatttgttcgaagtaatcaagataattttattgtagtagataaaaatatatgttattttt

SEQ ID NO: 19096 - DNA, 548 bp, Homo sapiens
ggtttttgagatggagtcttgctctcatcacccaggctggagtgcaatggcacratctcagctcactgcaacctccacctcccaggttcaagggattctcctgcctcagcctcccaagtagctaagattacaggcgtccaccaccacacccggctaatttttgtatttttagtagagacggggtttcgtcatgttggccaggctggtctcaaactcctgacctcttgatctgcccacctcagcctccctaagtgctgggattataggcgtgagccactgcacctggcctatattattaactaaactctagatttccggtttttccacggatgtcttttagcttgttccaggaccatacgatgccatgcagcaccatgtctcttagtccatgacagtttcacaatctttccttgacatatctttcttgtttttaaatctctttccaaatgtacccttgttacacatgcaagctataaccattgactaaaataccctatttttatttaaacataatttctactgttttttaatattgaaaataatctttt

SEQ ID NO: 19097 - DNA, 548 bp, Homo sapiens
ggtttttgagatggagtcttgctctcatcacccaggctggagtgcaatggcacgatctcagctcactgcaacctccacctcccaggttcaagggattctcctgcctcagcctcccaagtagctaagattacaggcgtccaccaccacacccggctaatttttgtatttttagtagagacggggtttcgtcatgttggccaggctggtctcaaactcctgacctcttgatctgcccacctcagcctccctaagtgctgggattataggcgtgagccactgcacctggcctatattattaactaaactctagatttccggtttttccacggatgtcttttagcttgttccaggaccatacgatgccatgcagcaccatrtctcttagtccatgacagtttcacaatctttccttgacatatctttcttgtttttaaatctctttccaaatgtacccttgttacacatgcaagctataaccattgactaaaataccctatttttatttaaacataatttctactgttttttaatattgaaaataatctttt

SEQ ID NO: 19098 - DNA, 534 bp, Homo sapiens
tggctcataatttctaagatcctctttttagaactgcagattttgaaatgcttggtcttatgttaagcgccaactttacctcagacacgggtcatgggtaactaagggttgggcagacaatcaaactcttcaatttctctcttattggtctcttttcctcctcaggtcctctttcaaattgctgcaaaattttctattcccaaacacacccttagaacacactctgcttaaaggagtataaagtctccatgttgcccttggatttcaccagctcagcggtgaggccaatagcacacagtcctcccagccttccatccccacactgtgcactctgttcttcagccagagggaactttatgtgggctctttgatgccaacaggtttgggcawattcttttcctttattttaaaatatactctcttacctattttattttaaataacagctgtattaaaatataattcacataccatataattgacctctttaaagtgtacaatgcagtgtttttagtaaattcacagggatatgta

SEQ ID NO: 19099 - DNA, 468 bp, Homo sapiens
tgtttacctcccctcattggcaatcttagatatttcttttcctttttttgagacagggtctcgctctgttgctcaggctggagtgcagtggtgcaatctcggcttactgcagcctccctttcctgggttcaaggattgtcgtgcctcagtcacctgagtagctcggactacaggcgcctgccaccacactcagctaatttttgtacttttagtagagacggggttttgccatgttggccgggctggtcttgaacttctggcctcatgtgatccacccgccttggcctcccaaagtgctgagattacaggcgtgagccrccgcacctggtcttgttttacttttgtttgctcatttatttgaaatgttgcctttaatgaggacaaccattgacaaatatttttggttttccctattcttttagtaagcgttttcttgagttttgtgattatgtggaaggtaaagaacaa

SEQ ID NO: 19100 - DNA, 535 bp, Homo sapiens
gacctagcaactggttttaaaacctgccatcctgttgtgattcatgttctttccactggtattccactggtcatagcaatatgtttggcctcacgaggtgtgcaccactatacctggctaatttattttttgtagagacaaggtcccactatgttactcaggctgatcttgaactcctgggctcagtgatcctgccgccttaacctcccaaagtgccatttttatcttaaaaaaaagttttatcgtatcaaaaaaaaactctcacttttttcttaattagtttcattcatccatttaataaatatttattacgtgcttacaatatgtcagatacacatccttaagaatcctccaaaactctataactcaggaaaatatctaagggttacctaagaagttctgtttatctttaaatgaaggacaaagagttttaagaaggaaacgtaattrcttggaaaacatgtttctattcaaccatttcccatacaagcaattttctaaataatgatctaatcatacagtttacaaagtatta

SEQ ID NO: 19101 - DNA, 756 bp, Homo sapiens
tgagcagatactactatattactaagacctgtgataattttcaacaatagagtaaactttatgcatgaacctaacagcacatgggcaaagctgtggcaattatctagttaattgataaatgggacaagaatctttatgaatgaaaacatcattattccaatccagagacttagtagccaacttaatttttttcccatgaaggaatgatcttagagcagttgccaaagctggtagcacctaaggcaaaaatgaaagataagcaaatcttcccctcctcccactacttgctttatttgatagctaaaccaaccaattctgtctatgaaaataaaatacatacatacatrtatatagcaattttttgtgtgtgtgtgagacaaagtctcactctgtcacccaggctggagtacagttgtgtaatctcggctcactgcaacctccgcctcttaagttcaaatgattctcctgcctcagcctcccaagtagctgggattagaggcacacgccaccatgcccagctaatttttgtatttttagcagaggtggggtttcaccgtgttggccaggctggtctcgaactcctgacctcaggtgatctgcccaccttggccccacaaagtgctgggattacaggagttagccactgtgcccagcctagcaatttttatagcggacttattcagctttttaaaaaggtaaacagcacacacattgcacacttttcctggcttttctcctgaatcattttctaggcag

SEQ ID NO: 19102 - DNA, 991 bp, Homo sapiens
gagtatcatgatccatttagaagtccaaactaagtccaaatcagtgaaggtaaaagaattggccactgggtcattaaaagcagcaagacacataataaactttgtcatcctggatgacatacaacatgagatgctctgattaaaccaatgctctattagagggggtatgtatataagttatgcatatttttcaaagaaatggactctaaagataaatactactgaaagtataatgaacacatttgaattgtcattaaacgttaagaaggtacttctaggtatttgatggtcatcactttgaggactaaacaaaagttaatttaatatacaaacagtttggtgatatttagtaccagcaaacggacatgaaacatgcactctcatacactgtaggaaaagattatgaacttttgacacctatttggaagacaatttctcaatgtctatcacaatgtaaaatgcaaataacacattgacctaaaattacagaggtaggaatttatcccacaaatagctttgcatatgtaagcgaaaatacatgaagaagcatgttcatggcagcatttataatcataagatactaaaaacataataaagatctgaaaaataaatgctattatatccacacaaaaaatactacgtagccactaagaaaattaggctaattttcttatcacatcaatgcattctgatgtgataggagcattaagatatattaagtaaaatagtaggacatgaattaattcccatatttttagatgaactcatttgtaaaaaaaaaaaagtaaacgatacaatatatgcaacagatatactcactgaaaacaaaatacattcacacacatgtatatacgtatacttayacaaagataagacatttgtggagaaaatttttagtcattaaaatgggtgctagaaaatgggctgggagttagcctagagctaagaagagagaatttccatcacataattattagttctgtttgttatc

SEQ ID NO: 19103 - DNA, 1039 bp, Homo sapiens
tgtatttcacattaggcaattattttatatccaaacagggcttactttctttgtatcaatttgaatcttatcatcctgaattcagagaagtgtgacattataaggcattttttaaagagatttttgaaaaactttatgctaactcgaaagatctaccacagtcttcaggctatatacaggaaaacttgacataatttaagtttaaaattagcagatatatgaatatacacaaatgtatttagttatacaaagtaaaagttaattttaaaggccagaaaaaacggtgcagtcattaaacaattattaattttatattaaaattacataatctatcatattagtgcataaaattattttttacaactgactgacaagatgtgtgctatacaatctacaacaatgtgtagtgtcattaaactgttacactcaggaaggcctgaaaatttaataggaatttattacaaaataagttttctcagagtgctaaaatatcttaaccatgtttaaaaatacacttcaatgaagaaaatataatgggtttatatacatctcccaatcaaataaaaaacagaactataaacatttaggccaatttcaactgaaaatgatgagtgcagctttttgcacaatgaatgaatttttaaaattccatcaattgaactttttcctcagcaagcatatcagaaaatgactcagttcagacttgtctgttaatgtattaattttaaaagtctcttatcttgcttttgcaacctcccttctaagccactatctttctgaatggcactgaactttaacagagaaaaggtgctttctatgcagaagatgaaaaatgcctacagcagcaaaaagtaygccaaatagacgtgaagccaacaaagttcctcaatgggatggggtagagcaggaacacagctcttcgtgaatccataatatcaaatcctatcttaaagcagtgcacttgttctatatacgctgttctaatggtataaataccctgagagtagaatgatacagttcatgcatattaaagaaacac

SEQ ID NO: 19104 - DNA, 1429 bp, Homo sapiens
  misc_feature (1)...(1429): n = A,T,C or G
tcgtgctttgatgagctttacagcagccaggctagttgggcacagtagtatttgagtatcttgagtatttcccagcatcacttgggatgcccttcttttggagagggagagactctatcatccatacttgtttcctagggctgccctagcaaagaaccacaatctgggtggctcagaacaacagacatttactgtctcttagttctggaggttagaagtccaagatcaaggtgttggcagggccatgctctttctgaaacttgtagtcaaaggatctttccttgcctcttccagtttctggtagcccagacattccttgccctgtggcagcacaactccagtcttcacataatttactcttgtacctgtctgtgtctgtgtccaaattttccctttttatcttttttaatttttaattttttttgagatgaggtctgtcacccaggctggagtgcagtggtgaaatctccacttactacatcctccacctcctgggctcaattgagcctcccacttcagcctcctgagtagctgggactataggtacatgccaccatccctggctaatttttgtatttttttgtggggttggggtcttgctatgttgtccaggctggtcaggaattcctgggctcaagcaatccacctgccttggtgtcccaaagtgctgggattacaggcatgaaccactgcacccagcccaaatttcccctttttgtaaggacaccagttataccgggtcagggtccatcctaatgatttcatctgaactacatctgcaaaggttttatttctaaataagaccacattctgaggtattggggcataagacatcaacctatatccaccacgttttggaacttctgactaatggcctcaacatggcccctgaccaagcatgcttctaaatgttnnnnnnnnnnnnnnnnnnnnnnnnnnnnnnnnnnnnnnnnnnnnnnnnnnnnnnnnnnnnnnnnnnnnnnnnnnnnnnnnnnnnnnnnnnnnnnnnnnnnacatatatgtgtgtgtgtgcaagcgcgtgagtgcatgcgcgtgccaatgatgcctctataagtacaaatagcctaagaacatttgcaggtgatttatatgctgaggtctgtctgtataaaggcaagcgtcatcctcattcaccagctcatagggttgacaagcaaaaagaccaagagaaagccagaastacctggagcttgctagaaaatttatcacagcaggagcagcaatcactcagccagttttctctcttgtttttgctttccacgtgcatataaaatcaagctgcttgctcctcacaaagacaaactactgctacctgaactttccatttttcctccctgaagcaaaacaagattgtggaagtgaaaggcccggaaacattctaatcaagaatgagaactaaaacccagca

SEQ ID NO: 19105 - DNA, 648 bp, Homo sapiens
gagaaacccccaattgtaattattttggcttgacgttggtctcatggaaggcctggagatatatctttcttccagaactcactcttctctttgacgtgccttccatgaaacctggactgtctatactgatattattacctggttctgtctttcccgctaaagcctggtccattgggtgagaaagttctaacttcaagagccctaatccgagtattaggtttctttgccggaatgtcactgaatcatctttcatccattgagaagcttctttgctctgacctctgaaactctttcactttctcttgatctgaacctcaaggtaaggtttgatttagtgatgcttattcatcaaccagatgacaatagctggttacgtcgactggttaagcttggctttctcattagtgtctttgactataatctggctcgatgttcatattcaccrtgtgactcaaaatggtgaactccatttgtttctcgccacagaggatttacgtccatttttttcttaattttttattttttattattatgggtacataatagttgtatacatttatggggtacatgtgatgtgttgatacaggcatacaatgttgtaatgatcgaatcagggtaattagggtatccatcaactcaagcacttat

SEQ ID NO: 19106 - DNA, 549 bp, Homo sapiens
gctggtactgtttggaagagtgatgaagagaaagcttgattaaaataggtttaaaggaaattgggaagaggaaaagcagccccagtgaatatagaaagttcttctggttttgatgccaagtggaacaaagagataagacggtagcttttagaaaagtgaagttaaacaaacccttttctgtttgtttctttctctctgcgtgtgtgtgtttaaagaaaatagaaataatggtaagctaatgggaatgatctagttgtaagataataaatgttaatataaacagagacggatgtgtttgttaaaggctgtccttgagtaggtgagagygaatggaataaagtgctcaattggaaagagtggcgtatggttttacttttatttttttatatgcatagattctgccttactcaccattttttttataatgcaaggcagaataagttttattaagcagaattttttgaaacatattttgaccacagaacaattttaagattatattgatttgataggcgcacatacaaattaatgcgtgcttgaattttagtg

SEQ ID NO: 19107 - DNA, 552 bp, Homo sapiens
tttattttctaattatttcataattagacttgtatggaatatatttgtggtaatacacagatttatctggtacaacgcctccttacaatgggtgacagttacctactttcaaaatgcagttactgttgaacctgtcaatcagcatacttcygtttcctctctcccacttttcatgctcttttggcattcatattacttttaaatatgttacattccccagaattcattgcaattttattactcaagatcatttcacttgcaaatattataagcccaattcaaacttagttgagaataatctaaaaggaggagcaatatataaacctccgtagtgaaattgttgcctggccgtaggtggaatgagctggaagcagaaactcaaataccgtcaaaacgctctctctacgattttcctctcttttgcctaaatttttccatgtggctggacttacgaccaaaaaaaatggggatttagatccttacagcctccagaactgagagagagttttctggttctgtttctgatagcaaaatattataaggtaatacaga

SEQ ID NO: 19108 - DNA, 552 bp, Homo sapiens
tttattttctaattatttcataattagacttgtatggaatatatttgtggtaatacacagatttatctggtacaacgcctccttacaatgggtgacagttacctactttcaaaatgcagttactgttgaacctgtcaatcagcatacttctgtttcctctctcccacttttcatgctcttttggcattcatattacttttaaatatgttacattccccagaattcattgcaattttattactcaagatcatttcacttgcaaatattataagcccaattcaaacttagttgagaataatctaaaaggaggagcaatatataaacctccgtagtgaaattgttgcctggccgtaggtggaatgagctggaagcagaaactcaaataccgtcaaaacgctctctctacgattttcctctcttttgcctaaatttttccatgtggctggacttacgaccaaaaaaaatggggatttrgatccttacagcctccagaactgagagagagttttctggttctgtttctgatagcaaaatattataaggtaatacaga

SEQ ID NO: 19109 - DNA, 1084 bp, Homo sapiens
aaatgtggcacatatacactgtggaatactatgcagccataaaaaaggatgagttcatgtcctttgcagggacatggatgaagctggaagccatcattctcagcaaactaacacaggaacagaaaaccaagcaccacatgttctcacttataagtgggagctgaacaatgagaacacatggacacagagaggggaacatcacacactggggcctgtttggggttggggggctaggggagggacagcattaggagaaatacctaatgtaagtgactgcttactgcttagaaatacctaatgtaagcattaggagaaatacctaatgtaaggttgatgggtgtggcaaaccaacacggcacgtgtatacctatgtaacaaaactgcacgttctgcacatgtatcccagaacttaaagtataataaaaaaaaaatagcttccattctgagactatcactgagtgtagtttgggaaaacttgcttccttcttttttgcctttatggtctgcagcaagctggatttcaagaacatccagtactgttcccttttgtgtaagcgaaaagcttgtagaaaatccttctttggagcatttttaaggaacttttctgtatctgacaragagttttaactacaaatgcagagcagtactttaaaatgaaatctaatgcatagaaacatttgatattccaaagatcctataaattgagttagtatctatcactggagctttctgttgcgcagtttgtctcaagatttttatgccttttatctgctccgcagactgtaggacagctacatcttcaacatggcttgagggtgccacattagaagttactatctatatcctcgatggtttttgatattaaacttttgaattcttatacattttattagtgtagaatggaatcattaatttttatttctctggatattagaaaatttgagcatcttttcacataatgttagtcacttagattcttttaatgttaattgactgttttattgagctgttttattttccttattgtcaataaggttgcatttattaatttacttatgtttgttcacttaaattcttgattata

SEQ ID NO: 19110 - DNA, 516 bp, Homo sapiens
acatgaaacttaaattccaatgaaaatmaaaactttttattgccttttttggtcctgcacatttgcttggcatgcagtaggtgctctatatctatatatctatctatatatctagctatatatatatatctcacattgcatttaattggtacgtgaagaacattctggcatcagctgacccagctgagaggtgaagagtggctatggttctccctcaaataataagaacattttttccacctcagttcacttcctgctcagggtctattaaaaacaaattcatcatcaagatcagttctcaactcggtaggttttgaggggcagggggagatagccacaagaagaatcagacacagaatctcatctcatcccttaaatctgacctctgaatgtcttttagatttgctgattggattcttgctagaacacaatatcagacttcatcctcaaaggaaataaattaagctgctccacacaaggacaaatggttgacattgtgctcttgctaacatcttg

SEQ ID NO: 19111 - DNA, 612 bp, Homo sapiens
ctcttttattccttccaccttccataacaaataattttgggagaacgttttaaaaagagagaaatctttatttttagagccagaagatttttttctttggcaaagatttgttgcagctgaaagactagtgaataaatgggcaaaggctctttcttattcaggcaaaatgtccatggaaagtactgaaaaggccaaacctcacggtgaccttagagattatatttttggaagaaaaagattggagtttgttttctacccctgccctgaccaggccgacttccagcactctgacccagcccctccatgttgggaagtccattcctttaatcaaaggaaatggagtggaattcaagagayggacagatcatctcctagctgtatgtcatgtgccaatctgacaaatatcagttctacattctcttccaaggcattaatcaacatattccatgggatgaagatctgtggtcttcaattagagccctcagttcaatccctatttatttattagaaaggcaaaaagggtagtgtagttaaatgcatgaatcctaactcttttatttacatgctttgggtcttcaagaatatgactcagtctcttcaagcctccattta

SEQ ID NO: 19112 - DNA, 551 bp, Homo sapiens
ttcaggtggcccacctccgtgcccatgtgcttatccacactggtgagaagccctatccctgtgaaatctgtggcacccgtttccggcaccttcagactctgaagagccacctgcgaatccacacaggagagaaaccttaccatgtacgtaagcctcttgaggccgctctctgacctgcggggatgtggagggcagggaaggaggtggagcgcagggaaggaggtggagcagggaggcagtggaactgtttgctcccatctcaagcacacagtggggcaaccactacgctaatggttggaagacctagatctgggcccaatggccagacaccctgcttgaccttgkcccaagcaataggggactcatctttaaaatgagggtatgggactaggtgatctgggccttaggagaggagtctagactgtggatacatagacttgattcactccacctagattcattcatttcacaaatacttattgattgcctcctggacaccccatactgggctagatgcactttaagaggaggtaaggtgttgagaaggaaca

SEQ ID NO: 19113 - DNA, 536 bp, Homo sapiens
accaattattaccaagagtactcacacaattcatttttgtgtgtatgtaaatataaaatcatcatcattctttttccagagaagactgaagaacaggtaggctccatccctgacttgagatcaagcagcaggttagccaaacccaaagattagaattcaatagtctatgattcccactaggttcattmattcttaactgcggcatgagccagtttctctacagaattactgccaatagaacatgattcacttcttaattgtaatttccctgcattttcttataattaagtggggaggttttagggacttttagtcacttttctaagaatatcttaaactttaaacttgcactattttgactctcattatacctagcattcaagtctcctgattaatttgttgatgaatttggcttccaagtttgaggatgatgtctagcatccaccatatgtttattaacttcttcactgagcaggaggctattttgaagactactttttattttattaagttccaggatacatgtgcaggatgtg

SEQ ID NO: 19114 - DNA, 504 bp, Homo sapiens
gtaccacaaagctgtgttctttggacaggtttggctgccccagcagtccatgagcgatttcctctttgtcactgagccaccatcatgaacaaattgttttgtcagttggcccggacctccaaagactcaagggtcacgttagcaggaaactccagctgtgagtgtgactgtgaggtggccatgccttaaagaarctttcatttttgttttgagttgtcatcatcttttcttgggttcaacaactttggatgaaactgcatctattgttgtttctacacctggaattaagctgtcccactgaggatagtcatggcaactccagggaaagaccatggaaaataatcagaaaatccttctgagagccagagaaagaactctgctttgcacgaagatgctcaaagtgtatcggagcctgtgtcagccttgcatgtgtaccaggagtaatcagactccaccacgggcccagttctcttcacctctttcagctatagttcatctactatt

SEQ ID NO: 19115 - DNA, 656 bp, Homo sapiens
tttgccttagttaaggatcttttacccagtcatatctctgacccctctcagctgagcagcttaagatgagaagtttccctggctaagaaagtaagtgagattgtttatgtgctttctattggaataattgtcttgttactgtgattctagagtgggggaggtcatctagatgtaaatagatgcacctagtcacagtcaacctataaaataattttggttgatgagcatgaagttttcaaaagttctgcctgtgaaggtaatgtgatggggaagtgtgggtggggccatgttcactttggtttgccccaagccccacctctgtctgtgttcatccaagcaaaatacttagaaaattatggtagtaagttcctcctgaaatgacagctgatgttcctatttttacattgtctacatagctctagaaagcatgagaatttgctgtgcttgctaaatcagtagtctgtggcatatgggcaaggtccagcacactgcctctgttactgcagcccatgagctaagaatggttttaaaatttctaaatagttgaaaaaaaatttaataatattatttcttgacatgttwtatgagatacaaatttcagcatccataaatgaagtttttggctctcagccactttcatttgttttcctattgtc

SEQ ID NO: 19116 - DNA, 522 bp, Homo sapiens
ggaaatgaggacgtagtagaataagaatggccattaactgagcacttaactaagtgccaagctttgtgctaagcattttacctacaataatatttttcaatataaggcctgtgccatcatagtacatattggattttctctgttctcgttggtaaaacagccattacccaaagcaaccttggcagccctgtgcctcttcctgccaggcgccccctggacttccctacaaaatagcaacttaatgagccaagcaggggacctttatgaccttgctccagcaccatggctgatatttgttatgcttaactattgcttggccttcctaatgttaaatatttagcattccacccttgttcagtcctcacagcaacacctttggggatgccgattccaatggcccaaaatatatcttgaccttgcagccagtttatatttttcttgatgtgagagayaaccctaaatataaggagatctttctctgaagtttgatcagctgacacaaatttcccaattttcaaggac

SEQ ID NO: 19117 - DNA, 557 bp, Homo sapiens
aaaatacaaaaaataataataataattagccaggcatggtggcagatgcctgtaatcccagctactctggaggctgaggcaggaraatcacttgaacctgggaggtggaggtttcagtgagccaaggtcatgccactgcactccagcctgggcaacagagtgagactccatctcaaaaaaaaaaaaaaaaaaaaaaaaaagatttcctgccaacaacaccacatcgccctagcaccagcagggggatcccatctacaacaaactgcccagcctgggaagtgctctttatcccagtggaggctcctttctcccacttaggacaccaaatggtccagtcaagactgggaaattatcattcgtccctgcacactctcttcctccacataaagatagcttgtgtgccaatggccccagtggggttgggagcctgtcaacaacaaaagattcaagctggaggggtgcccttcatccccactgggccagagagctccttcacccatagagaggtgccaggtgacccaaccagggaaagtgccttccacttccgcatgtggcac

SEQ ID NO: 19118 - DNA, 996 bp, Homo sapiens
taatacaaataaaaataaaaagatttaaagtcccctggaccttggtttggttgaattttgtgacatgtactttggggaaacctggatatcctggtttctaattttaacaattcatgattaatgagggccgatcacggtggctcacgcctgtaatcccagcactttgggaggccaagacgggcagatcacgaggtcaggagacagagaccatcctggctaacacaatgaaaccccgtttctacttaaaatacagaaaaattagccaggagtggtggcgggcccccgtagccccagctactcaggaggctgaggcaggagaatggcgtgaacctgggaggcggagcttgcagtgagccgagatcacaccactgcactccagcctgggcgacagagcaagactctgtctcaaaaagaaaaaaaaaaaatggaaaaaaaaaaaaaacaattcatgattaatgttaagcctatcaacctagtatccccccccytttttttttttttttttttaggaaaaaaaaaagaacagaggaaatctccactaactggccgggcacagtgactcacacctgtaatcccagctgtttgggagtctgaggcaagcggatcacctgaggtcaggagttccacaccagccaggccaacatggcaaaaccccatctctactaaaaatacaaaaattagccgggcatggtggtggtgcctgtaatctcagctactcaggaggctgagacaggagaatagcctgaacccaggaggtggaggttgcagtgagccgagatcatgccactgcactgcaggtccagcctgagagacaagagtgaaattctgtctcaaaataaataaataaataaataaataaatctccactaacagctttataacccaattttttcttttttcaaaatcaaggatagtcaatgccccacccccttaaacctaagttttccaggaaaaaaaaattatagcaaatgcatcggatcttttgctctacgagca

SEQ ID NO: 19119 - DNA, 996 bp, Homo sapiens
taatacaaataaaaataaaaagatttaaagtcccctggaccttggtttggttgaattttgtgacatgtactttggggaaacctggatatcctggtttctaattttaacaattcatgattaatgagggccgatcacggtggctcacgcctgtaatcccagcactttgggaggccaagacgggcagatcacgaggtcaggagacagagaccatcctggctaacacaatgaaaccccgtttctacttaaaatacagaaaaattagccaggagtggtggcgggcccccgtagccccagctactcaggaggctgaggcaggagaatggcgtgaacctgggaggcggagcttgcagtgagccgagatcacaccactgcactccagcctgggcgacagagcaagactctgtctcaaaaagaaaaaaaaaaaatggaaaaaaaaaaaaaacaattcatgattaatgttaagcctatcaacctagtatccccccccttttttttttttttttttttaggaaaaaaaaaagaacagaggaaatctccactaactggccrggcacagtgactcacacctgtaatcccagctgtttgggagtctgaggcaagcggatcacctgaggtcaggagttccacaccagccaggccaacatggcaaaaccccatctctactaaaaatacaaaaattagccgggcatggtggtggtgcctgtaatctcagctactcaggaggctgagacaggagaatagcctgaacccaggaggtggaggttgcagtgagccgagatcatgccactgcactgcaggtccagcctgagagacaagagtgaaattctgtctcaaaataaataaataaataaataaataaatctccactaacagctttataacccaattttttcttttttcaaaatcaaggatagtcaatgccccacccccttaaacctaagttttccaggaaaaaaaaattatagcaaatgcatcggatcttttgctctacgagca

SEQ ID NO: 19120 - DNA, 996 bp, Homo sapiens
taatacaaataaaaataaaaagatttaaagtcccctggaccttggtttggttgaattttgtgacatgtactttggggaaacctggatatcctggtttctaattttaacaattcatgattaatgagggccgatcacggtggctcacgcctgtaatcccagcactttgggaggccaagacgggcagatcacgaggtcaggagacagagaccatcctggctaacacaatgaaaccccgtttctacttaaaatacagaaaaattagccaggagtggtggcgggcccccgtagccccagctactcaggaggctgaggcaggagaatggcgtgaacctgggaggcggagcttgcagtgagccgagatcacaccactgcactccagcctgggcgacagagcaagactctgtctcaaaaagaaaaaaaaaaaatggaaaaaaaaaaaaaacaattcatgattaatgttaagcctatcaacctagtatccccccccttttttttttttttttttttaggaaaaaaaaaagaacagaggaaatctccactaactggccgggcacagtgactcacacctgtaatcccagctgtttgggagtctgaggcaagcggatcacctgaggtcaggagttccacaccagccaggccaacatggcaaaaccccatctctactaaaaatacaaaaattagccgggcatggtggtggtgcctgtaatctcagctactcaggaggctgagacaggagaatagcctgaacccaggaggtggaggttgcagtgagccgagatcatgccaytgcactgcaggtccagcctgagagacaagagtgaaattctgtctcaaaataaataaataaataaataaataaatctccactaacagctttataacccaattttttcttttttcaaaatcaaggatagtcaatgccccacccccttaaacctaagttttccaggaaaaaaaaattatagcaaatgcatcggatcttttgctctacgagca

SEQ ID NO: 19121 - DNA, 524 bp, Homo sapiens
aactaacctggtatagaggttcagagaaagttccctgaagcaaaataagccctttacccccaccttcacgaaattgttcattctcttccyttccttacaaaactccccactcttctccatgcaaatccaagtatcctattagtttttttttgaggacatagcttaagtcttatttatgctattaagctttaccttacttctctagcctccaaaaatctttttttttctaaaaaatcttagtgcattgatggttctttgttcctgctatcacacttgattatgtaatagattgcggattttacagttactgtaatttgattatccatgtttttacctaaaaatcctgcgttctttccctttagagtccacatgatgctataataaataaatatttgcttaacaaatagccgagtgttttggggtgtgcacagctgggtgctagaaatctatgtaacaaaagcagggactggaatcacggctgtaatacattgagcaaccttcctaaagcttgcgattaacctaat

SEQ ID NO: 19122 - DNA, 524 bp, Homo sapiens
aactaacctggtatagaggttcagagaaagttccctgaagcaaaataagccctttacccccaccttcacgaaattgttcattctcttcctttccttacaaaactccccactcttctccatgcaaatccaagtatcctattagtttttttttgaggacatagcttaagtcttatttatgctattaagctttaccttacttctctagcctccaaaaatctttttttttctaaaaaatcttagtgcattgatggttctttgttcctgctatcacacttgattatgtaatagattgcggattttacagttactgtaatttgattatccatgtttttacctaaaaatcctgcgttctttccctttagagtccacatgatgctataataaataaatatttgcttaacaaatagccgagtgttttggggtgtgcacakctgggtgctagaaatctatgtaacaaaagcagggactggaatcacggctgtaatacattgagcaaccttcctaaagcttgcgattaacctaat

SEQ ID NO: 19123 - DNA, 537 bp, Homo sapiens
tgctgtacactctggactccccagctcaaggtattatatttccatcttactgtgttaaattcagtgtcacaaagcccattggaaatataaagcagagtgcaatgaaagtaatcaygtagagatgatattattcttaggtggggacatatgctatgaataaatctggatctcgagttaatcaaagtgtggagaaagggagaaatggccaagaagagggaactgtggctttctagggtttttagttaggtgaaaatgatctctgttagcttgtaaaactatgtttatacttggtatagaaaaaaaaaatcagggactatgcctcaacaaatcgatttctaccttattatttgaaacaaatgcctaaagtgaattgcagtattttaaaattcattttcaaattttgattttccagtaagacaaggtataacatgttggtagtgagtcacaaaatgtccctttggcatatctagaatggtactgtctacactcacatggagacatacagctacatacacacagacacatacagacaaaggt

SEQ ID NO: 19124 - DNA, 536 bp, Homo sapiens
tttttgagatggagtctcgctctattgcctaggctggagtgcagtggcgcgatctcggctcaccgtaacctccgcttcccaggttcaagcaattctctgcctcagcctcccgagtagctgggattacaggcgcctaccacgcccggctacttttttgtatttttagtagagatggggtttcaccatcttgaacaggctggtcttgaactcctgacctcgtgatccacccacctcagcctcccaaagtgctgggattacaggcatgagccaccacgtctggcttttggcaagtcttaaaacacgtcaytggatggtcaagaagacaaggacatacaccaaggaaatgtatttttattcataaaatttgatacacttaccttttgtttctttttaaatttcctgcactgtgagttcatcaagccaagaatatcaatgcagatgtattaatgtcaattcctaaaagttactaacttcaaaaccctacctgtttgagcagaaattttgtagactttgaaaaccctcctaagtatttctag

SEQ ID NO: 19125 - DNA, 542 bp, Homo sapiens
gtatgactaagttatgccaatagaatatgaatagaagtgacgtatgcaatttctacaacacctacttgaaataatctgcttgccttagacttgctctttctcctccccatggtcrggaacacagagaaggcaatgaccagctttggtgattgaaccacactctaagtggtggtggggcaacaagatggaaggaacctaggtccctgaatggccatgtggagcccagtgaccctaccaacttggactgctcacctctggactgctaagtgagagcaaaataaacctctctcttatttcagccactaaattttgaggtctctgtgctcagcctgcaccttaacaaatgcagactatcattaataagaccccttacatggggaatagccagttgacttgagttcagatctaggctctgtgacttcctacttctgtgagtttgggcaagttgctgaactactgtttcttcatctgtgaaatgaggagaaccataggacctgtagtgagaattaaacaacatagaatatacacaataaagttggcta

SEQ ID NO: 19126 - DNA, 542 bp, Homo sapiens
gtatgactaagttatgccaatagaatatgaatagaagtgacgtatgcaatttctacaacacctacttgaaataatctgcttgccttagacttgctctttctcctccccatggtcaggaacacagagaaggcaatgaccagctttggtgattgaaccacactctaagtggtggtggggcaacaagatggaaggaacctaggtccctgaatggccatgtggagcccagtgaccctaccaacttggactgctcacctctggactgctaagtgagagcaaaataaacctctctcttatttcagccactaaattttgaggtctctgtgctcagcctgyaccttaacaaatgcagactatcattaataagaccccttacatggggaatagccagttgacttgagttcagatctaggctctgtgacttcctacttctgtgagtttgggcaagttgctgaactactgtttcttcatctgtgaaatgaggagaaccataggacctgtagtgagaattaaacaacatagaatatacacaataaagttggcta

SEQ ID NO: 19127 - DNA, 906 bp, Homo sapiens
atcacttctgctgtatcctattcattagaagcaactctctaaattgagcccacacttaagaggaagagatcacacaagagtgagagtaacaggaggtggggaatcattgggggtcatctcagaggctgcctaccatgatctcctaagcaatcctgcaaattcagtctcataacttgcatttgcagatagaacactgaggcttagtgaaccaaagcaacttagcaggtgattaggtctgtaggactctccagtttacctttcactggtccatgatatatctttgtctcaatgcctagcatggtgcaaatcatgtaacaggcattctaaaaatcagagatcatggatagcccacagatctttgagagtggaccttcagagagtgttaaaatttatttaagttcaagtccctttagaagccatatatcctctccacagtctccttcactccttattgtcttacccgggcataattcacccaattacactgactgtctggcccctgaagtcatttgagtttgggttcctgctataagtaattggtgacagaagtgaggtttgtcattcttcatcccctatccattcattcaaccagcaaatatttcttgaatgcttactatcagctaggcagtatgttagccaactgtggggagagactaaactattcaatgcaaacaggtccataattcaggaaacttggtgtgtatggatcagyatatggatgctttttactttcttgtatgttcaaaaatttctataatataaaggtaaaatcaaaagtgatccataaaatttctaagccatgttgtgaaaggaaggggtaaatactgggaaaataccttgttgaatcccacaatacttcttgaaggaagttttaatatttcagtttacagatgaagaaacaagttg

SEQ ID NO: 19128 - DNA, 534 bp, Homo sapiens
gtttgagccaggttgagttggaccaggccaaacggggcttatcctaggcatagagagggccaacagcctcgacatcaaatgcagcagcctcctgctgcggccctggagttttcacctactgcaattgtcagggagatccaagagttaagtccaaggagttagggagttcttggagacctggccgagaggtgacagagggactcaaggctccctggagcattgatttgaggggctccacacttgcagatttccctcccactcctatgggcaccagttggagtttggattcctagtgyaccctaacagatctttaccagaccctatgctttccctgatgataatataataagctgccagttttttactggccaattactaagcacagtcaaatcattatttgcagattccatatttgcaaatttgcttactcgctaaatttacttataaccccaatattaacatgtgcagtgtttcggcattttcatggctgttcacagacaagcacagaacagcaaaaaaaaatagttgcttgat

SEQ ID NO: 19129 - DNA, 911 bp, Homo sapiens
tttcactttaatatctcccttgtagtgtttgaaaaattttttaaatcgtgaataagtgttaattttgtatgaaaacaactaattcaaaaagtcaagcaaaggttctttaacatggatgcattaaggatcctcatctcgattcttccagtcttaaaagttactcagcatggtaagcatgatcacagatggaaccttcttcagtctataaaccccaatcccagcaaacattttcaacacaggtgacagttcattttcagaaaaagggttggtgttccaggaggctcacatagcacacaggaattgcctgaatactctcactcccttctgggcagcctagttgatgaccataaaaagctgtgaaagaatcyactgcctggtttattgtctgcgctcatcatgaaaatatgtactgatttaatatgctgaactctttcttctatactggggtctgcaaaaggcaaagcattcctacattagggaagctactgaggggggaaatatgcctgagatcattaagatgcctgaactgctccaggaaaaggaacaaacatgccttttaaaaccctgaagtaaagaaagtatccacaaaaggtctagaacaatgattctcagtagtaggggaggcagaggagtggtgaggcagatgtatactcccctctcttttctcctcggttgtagtaactgccaaagctgagccactgttattgataggaatgtactaagtaaaatacaacagaaaacagactgagaatcagtgagctagaatttgtttgcaattgctgtgattttctgttcacagaatcagaatcagaatcaagattttaaaggtatctccaagaaaagtgaaggtagctacattaattacttcaggtaaggccaatacaacaaaattccaaattaaactctaaatc

SEQ ID NO: 19130 - DNA, 1027 bp, Homo sapiens
gtaacatgtttttagtaatggcactggacttaactctacctggtatttgtgaaattcatttatatttctgtttggaatggaactgtatcctatttgtggttttattccctgaagcatttattgtagttaacactaaaaaagcatttctccaaggaaactgggcagtagtgcaaagactttcttgagattcaggtctttttgttgctttgcaggaaaaacattagacttttctatttcctccctgtccccaccccttggcttctgctctgtaaccactttcatcagcattgaggttgctcttctcaaagttagactgctattctcctcttcttcatatwgcctgatttagacatttcttccctatcattttgcttgtttcttttttttttctgtctgtattactttaaaaaattttttagagccagggactcactctgttgcccaggctgcagtgcagtggcacaatcatagctcactgtaacctggaactcctgggctcaagccatcttccagtctcaacctgcccagtagtgagaactacaggcctgtattaccacactgggctggctggctggcttatctatttatttatttattgagacatagtctcactatgttgcccaggttttttttcttttcttttttcccccactctctttaaaatctccattacctgaccttttatgttatttctttgcagacctacgatctggagctttatcttaatcccaagtacctggtgcccgaatgagataggatggaatggggtgggctactgatagaggaatgggtatttgttggaacctctttccaagactttcccccttttgtacagattttttgccctaatcactttaagtgagaatagggtagattaagcaaaacttacttgattttagtccataggttaatttctttcagctgaaattttcatttttaattctctctggattttggctcaggattaaacctttcagacgaatagaatttaatataattgtttatcatttaccattttcatatattt

SEQ ID NO: 19131 - DNA, 1030 bp, Homo sapiens
caaaaatttggacagggtatactggggatagcttatctctgcttcataatgtctggggtctcagaaagactttgtaggccatgggtgactcaatagttagggactgtaatcacctgaaggcttatcacttacatatctgatacctggtctagggtgaccgaagractagaactgctaatctgagcacctgtatacatggcctttccatgtgacttgatttcctgacagcatgacagcctcaaagtagacttcttacttggcagttgagggtttcaaagtgcaagtgccccagtgagcaagacagaaactgcatttcctttccatgacctagcctgagaagccaaattatatcacttccaccatcttctattatttggagaattgtaagaccacccaaattcaaggagaagaaatatagaccccacttctcattgggagagtggcaaggtctccttgaggaagagtatgtgggctgaaggggagagggtacgtattgtcaaggccatctttggaaatttttgtctgcctcaaaatgaaagggaaatttgagaacttaatgtgaattaattgttcttgaacaatagtatattcagataaaaatatttctgtaaactagtaatatttattactaaattgctgctatgttgatatccagctgataagcaattttgctctgataaaaaagacctcttaagtattatttgatgcaatgtcttttattttatttttctttcaccttggcaaaattttccttgtatggtgatgataatgtttgaagatcatgatgaatgagttcttaagtatatatgatgcctttaagtatgacattggagcatcaaaattttgtctctaaggagagatgttagtaaggcattatagtaactcagtgtattccttctaattttattttttggaggctttttttggctatatattttacttttgtttgtttgttttttaaggaaggggtgttatttatttcaatggatcgttaattccattaggtttattgagttgttattgcttaaga

SEQ ID NO: 19132 - DNA, 720 bp, Homo sapiens
attaaagcatctcttgcttgaacttgtaattcacggaaggtattaaacctttacttacaccaataccaaaaatagattttgtattaataacatagaggtggcttttcagactactatcacaagtttttgttttttggggggttttgagacagggtcttgccgtgttgcctaggctggtcttgaacttctgggctcamgtgatccgcctgccttggcctcccagagtgctgggattacaggcgtgagccattgcatctggccagctatcataagataattgaacaaaagaatatccttggctaattattggtcaaatttcaattagcaaatgactgcatattaccagtgagttttcaaagggacttgagaataggtctggatcagatcagatatcaaaataaactttctcccagacagattcagagcatttcatcaagatgattcaagtaacatgaatgaagacaaatcggggccaaaaggatgtagcctgcaaagtatgacagggcttgatggaataacatcaatattggtgttttaatatgcaatataattagatttcagatctagactcttctgaaaataatgcagacagagaagtgcctcaggtcaggattttaattcagagagtaagataagaataaatatcttgtggtagtgctcttttttgttgaagggtagactttactacagagtacatgttgaggtctgatatatttggca

SEQ ID NO: 19133 - DNA, 525 bp, Homo sapiens
tggagcatagttgtggcatggtgaattaagattttgctacagcctgtcactgatgcaagagcaaagttagaggtcacaaatagaaattgataaaaagatatgattttaataacaaaaaattacaacaaatgaaacaattaatcacagatgcaggggcaaaatcatgatacagtgattcctattattcctagaggacattcagaaataatagaaattgttgttttcctttttttgatagatgttgttaataataatcgctgcaatattcaaactttttcaactataagagcaaggattaaccctgagatgttaaaatatagggataytgaaggcataaattaaagtttaaaaatggaaatacttttataaaagagttgttcaacaattttggctacataaactagagcgttacagagtaatatatggaatttttttaaaatagtaaattaagcaaactgaaatactccattatgaaagccttgctggaaaaaaaaatagtggtgtttgacttgaatttcagctttt

SEQ ID NO: 19134 - DNA, 1634 bp, Homo sapiens
agacagcttgaattagtaaattgtatattattctagagtaaaagtccttattctttaagataactgtgtatattcacttttttgttgcatcaacactgatttgcaataaatacagaaatgcagtagttctatgtatttacaggatgtttcaggagacgtagagaccacaaatgttctgtgagagaaacacacaggactcccacctagtcatccttagagtgctggttatactccgcctctgtggtataggattatcgagacatcctgcccctcaaagctcatttaggccatatttgccagcatagatatacaatctcctttcaaatgcctagaaaccactacacaaagtgcatttcatttaattgattcacaaataatacataattttcttttcttctcacctgacctgcatgcatgtaaaattttgaagcaaattggctattaacaaattggagtaataaacattgtgtagtcaacwgtgtagggaagggatatttctagacacctgtgggtgtgtgagattatttcttcagatattttacattggtgataacagtaataataataataatcataacagtgatgtttactatttttgttgagtgtaatctgcagaggacagcatgatattatactcttttccaagaattatctcctttaatcaccatagcagtaggagataggtactgttttctctattctacaaatagaaaatgaaacacacacagcttgagtgaatttccccatgctacccagccagaaagtagcacaggtagaccttgaatcctgaatctggattcagacaatggactgcaactggagtatactgaatgacagtactgtcatttgtttttcaggttacactgccatattttcaaagaattgctaatgtgttttagataatttttaaagtgcaaaatacaaaatatgtcacatttgctggctaagtggactgtcagtcataggtggactttgcaagtactgataaggaatgagattgcagaggcaataaatgcaaatcccagggacatcacacaagatacagtatgcagttgcatttccttctgcttctgtttaaaaattattttatggtaccaaatactgcagggataacgaagtcaagatatgaagactggctgacttcctggcagatgtatcctaaagaaaaattgaaactgagatgacagttgatgaaatatgcaacgtgtgatatatcggtcttactctaaattctagaattactttttccatttattttgtcagcattcagagctctcaacaaactcaaaacttaacctaggacacttaaaaaataacagagttgaaatataagagtacacacacatgctatcatgggaacatcacagcaaagttgctgcttagacattagaagtagaacaccacaccaaaaaggccgaagctggtagtgagataacagcttagaggcttctctcttatttaccagactgggctcccagcttctccctccatttcctttaaatgaactgatatggtttggctgtgtccccactcaaatctcaccttgaactgtaataattccatgtgtcaagggcaggtggagataactgaatcatggaggtggtttcctccatactgttctcatgatagtgaat

SEQ ID NO: 19135 - DNA, 1049 bp, Homo sapiens
tcaggagccacractctgtaagtacacattcatgtgagttcagtttgtcgatttttagtaatataacttgttgaaaggacgagtttacaatacctaaagaatggaagaagagtttacattttattctgtggcttctggaaatgatctaattcagtgtttctcatctctgtctgcatggtagaatcacctgggatctttaaaaattattgatgtctaagtctgtgctgaccaattacatcatatttctgggagtgataccaggcctctggaatttttgaaagtttcccaggtgattctaaagtaaatcctgtgtgacaatctctgactaaattccctaacacaggctctgtgacaatcgtgaggaactgcagaaaagaaagaatacaatagcatttttctggaaatttagaaatactgttataaattgttgggctacaaagaaattgatgagcaaaacatcttaaccattccaagacaatatgctttaaaagactaaaatgattagagaacagggcagaatgttttggaatcaaaacatctttcattcttataaaagtataaaattgcccagaaaattacttggtgtgttgccatgagagattctatagatgtgtccatttcctaatgctgaagcagacatccagccccaaaggagactcagacgcggtcaagaggatgcagaccagagtggatgatgaggaggtggtaaaggtcaggtgcagatctgggggccagaaagcttagctgaaacaaaaaaaattcaaaagcaggccgaaaattatgtagaaccaaacctgagatttcatgatacattgtgattttctttattccagtcctgaccttaacagtggcttggagacaacaaatgctgtgtttcagggcattactgttcagtgctatttcctcgagatgatttctgcttcacctatatcaaatatcaattgtgaagcatctgaaaagaagttgtttagcaagcaacaagttacaaggtcttattcaggcatattattagtattatcagaaggctattttcataattcatagggctt

SEQ ID NO: 19136 - DNA, 1049 bp, Homo sapiens
tcaggagccacaactctgtaagtacacattcatgtgagttcagtttgtcgatttttagtaatataacttgttgaaaggacgagtttacaatacctaaagaatggaagaagagtttacattttattctgtggcttctggaaatgatctaattcagtgtttctcatctctgtctgcatggtagaatcacctgggatctttaaaaattattgatgtctaagtctgtgctgaccaattacatcatatttctgggagtgataccaggcctctggaatttttgaaagtttcccaggtgattctaaagtaaatcctgtgtgacaatctctgactaaattccctaacacaggctctgtgacaatcgtgaggaactgcagaaaagaaagaatacaatagcatttttctggaaatttagaaayactgttataaattgttgggctacaaagaaattgatgagcaaaacatcttaaccattccaagacaatatgctttaaaagactaaaatgattagagaacagggcagaatgttttggaatcaaaacatctttcattcttataaaagtataaaattgcccagaaaattacttggtgtgttgccatgagagattctatagatgtgtccatttcctaatgctgaagcagacatccagccccaaaggagactcagacgcggtcaagaggatgcagaccagagtggatgatgaggaggtggtaaaggtcaggtgcagatctgggggccagaaagcttagctgaaacaaaaaaaattcaaaagcaggccgaaaattatgtagaaccaaacctgagatttcatgatacattgtgattttctttattccagtcctgaccttaacagtggcttggagacaacaaatgctgtgtttcagggcattactgttcagtgctatttcctcgagatgatttctgcttcacctatatcaaatatcaattgtgaagcatctgaaaagaagttgtttagcaagcaacaagttacaaggtcttattcaggcatattattagtattatcagaaggctattttcataattcatagggctt

SEQ ID NO: 19137 - DNA, 587 bp, Homo sapiens
caacctactttcaatataattacctttccctgtttctccttctctctttctcttctcttttttctctaatctttacactaaatcaaaaaacaacactttactagcaaatgcagaaaacccactatatagtcattttttaggtttttttatttttaaatatgaacaaagactgaatatattaaaggtgtgcaatggatttgatgtacatatacattgtataatgattaytacaatcaaattaattaacacatccatgaccactcatgctgtacattagatcccagaaactgttcatttataactgacaatttgtaccctttgatcgctgtctccctattccccccatccctactcccagctcttggcaaccactgttttctgtttctataatttcaacttttttagatttcacatgtaaatgagatcacacagtatttatttttctgtctctggctatttcacttaacataatgtcttctaggttcatccatgttgttgcaaatggcaggatttccttctttttatggttgaataatattctgtgtgtgtgtctgtctgtctgtctgtctgtctgtctgtggtttgaa

SEQ ID NO: 19138 - DNA, 587 bp, Homo sapiens
caacctactttcaatataattacctttccctgtttctccttctctctttctcttctcttttttctctaatctttacactaaatcaaaaaacaacactttactagcaaatgcagaaaacccactatatagtcattttttaggtttttttatttttaaatatgaacaaagactgaatatattaaaggtgtgcaatggatttgatgtacatatacattgtataatgattactacaatcaaattaattaacacatccatgaccactcatgctgtacattagatcccagaaactgttcatttataactgacaatttgtaccctttratcgctgtctccctattccccccatccctactcccagctcttggcaaccactgttttctgtttctataatttcaacttttttagatttcacatgtaaatgagatcacacagtatttatttttctgtctctggctatttcacttaacataatgtcttctaggttcatccatgttgttgcaaatggcaggatttccttctttttatggttgaataatattctgtgtgtgtgtctgtctgtctgtctgtctgtctgtctgtggtttgaa

SEQ ID NO: 19139 - DNA, 547 bp, Homo sapiens
tgtcaacacaaccaaataatccttaactattaataaatggaacaaaagtaaagatattttgaaartatatgaaaatttatggtgattctatcttgaagagatagtgtcatttgctagaagagaatggtgagaagaaagaaataatagttctcttttttctcactataattcttaatactaaaatgttttataattagcatgaatttccctattactggtccttaagaagttaatattgataaatatctagtacctcagtataaaataacaatcagacaacaactcatctttgattgaaagtcaaataacaaaaaaattgataagctacctgtgaagatttttagagaatcccagttggaatttggatggtagccagatgtacaaaacaaggggttgacaattaccaagtaacaattgaataaatataaccagttggtagtttctgtttaccaatgtattgatgccctaagtctgtagatttgtaggatgtatttgcattgcagagaaggaggctaatggctccaaatgtgttagactatggcttttg

SEQ ID NO: 19140 - DNA, 259 bp, Homo sapiens
cttcacccgcaataaacaacagcagtatcgtttatcctgtatttactgggtgccagcactttaaatccatcattctctctagctgtcttggcccccttccaagccctggaagccatctggctattagaagaaataaagtgtcccttgttcaataggtctgttggtcagcctcatcattctgctgayggccctaccccaccatgactcttattcatttcatatgctcaggtagtgccttggttccattaactgggtttac

SEQ ID NO: 19141 - DNA, 1776 bp, Homo sapiens
agtaataattttcatatttattatctattctaatattcagttagattgctgtaatgtaacattcaatacatctaaggtactgcttttaaaaaataaataatgcttgccttggactgaagggactgagtcaataggagaaagaatcagaagatttgtactaaccttttctaaaaccagacaagaaccctagacaattgtcgtcaggcttttcccagttgttttctactggcacaaaccaacaatgtttattcaaataagcatatctgattctactttggcaatccatacacattgtcctttttcaactccaaaggatcatctgtgatttttgctgcttgtagtttattctctaattcactagttaaatcctttttcagagatacataagcagattaggaaacttaactgtcatgtgagaaattatcttaatacaatggtagtcttcaagctaccccagagatgctcacagactaaactaagatgcttgaatcattcagtttattaaatcaattagaaacacagaaagaagaaagagaagtgggaggttaacacatcaagtctaaaaggcaagcagggcagaaagaccacagaaactaaattttcttttaatccatgtttatatgatctgcctcctctgctgcattaggattccttattgatcttggagtaatgaggaccagagtgggtttataaagaccagagttaaaggtaagcaagagggcttagcaaatggaaagtgttcagagttaacaatatacacaattgctctagcaaacagacatagggataagtagtgtccacagctgttgttcaccatctggcttcatgagatgctatcaattttatttgtacttttggccagaatgtgtgtcaacctggatggttattataaggtgtcagaaatgctgagtgcttaatatgtctaatgtatcattatatcataaatactaggtgccttttggtccttcaatccttgcttctttatctatggtccatgtcccatatattaatgtctggcttatctgtgttaactcacgtaaggacttctgaccatgtcttaaaagccacttgcttattcattatttatacctatacatttggtaagtttcacctatatcttacaaacaactaatttattcattatctatgtttaacatggattttaagttttattcatcctattttttcttgtattccataacaaaatgaaatatttcaagttaatgcattaaatgcacattataataattaatggaaaatgtcacttaaatatgattaactatgtctaaagcattacatgtattatacttgtaatagaacttacttcaggattttatctgatgaatacaaatgagatcacattaaatagtgataagctgcattttactagctaatgctctcatcatgctaatacaggacctcgtcctatccaaattttctgacaggtaatttgggtggccctcagagttcctcaggtaaactcataaatagtctgcttcatctgagwattgtgcttctctggtggataaaatgtactcatgtgtttcaggtatgcaacacacttactctttagaaggtgtatgagccaccaacacagatacttatattctattgtcatttagcatttattttaaattctcttcatccatctctctgtggttcttagatatgagtccagtgtggaagctaggtaaaagcagatctcaatgattctgagtcattctaagaatagtacagtgtctggggtagccttaccagatcaaacccaatcttgaa

SEQ ID NO: 19142 - DNA, 577 bp, Homo sapiens
ttatccttgctcccaagccatagcctctctctttcccctcattctcctatttatcagcctgattttcctcaataattctcttcatttggatgattaggagttttaccagttccttctttatgactgtgtggaaagcaagttctaattaacataaggaggaggcctggcccctgctcaggcctcaagagaccaaaccaggacttcttcagttcctcagattttggggcgtatgggagctcttcaaatcccagcttcattatgtcatctttcacatttggagaatatttttgaaggagttgatccccttaggtgattctggtggaggctggtgtgtggggagacttctccccagctccttgctctaactgccctgggtgtggctggaggtctcaggaaggcctcgagtcaggaagagtmctgaagcccaaattttattttgtccactccaagggccattttgaagtagagtggtcacgttctgctaaatcatttgggaaacattttctgaaattttagcttgggattaaatggtaggaggagaccccgatctctggtgagttgaatggaaatacacttt

SEQ ID NO: 19143 - DNA, 544 bp, Homo sapiens
ctacaactcattggcatcctggcaagcaaattccagtggagtgggggcacacttgggttcagttccaagctcacctktgactttaggtgtgttacttaatcctgagtctcagtttccttatctccaaaaaccttccttgcaaatttgttttgaagattagacacaatatttatttaaagtgcctggcacacagtagatacttaataacagcaattttgacaataattaggagaatataattcaagccatagaatgttccagcaggaaggatctatgagatcacctagtccacgcccaattttactgatggagtccagaggtggtagggaatttacccaagatcacaaggctggtttggcagaaccagaattcgagtgtgggctcccaatctcccctcctgtgttcttttctttctaccaaacaggaccaaaataccttgcattgaaagtggggagatgctttaacctatttatgatttgccactttggtgggctctgaggtatgaatcttagctggaatggctttgaggaatcctagccattga

SEQ ID NO: 19144 - DNA, 544 bp, Homo sapiens
ctacaactcattggcatcctggcaagcaaattccagtggagtgggggcacacttgggttcagttccaagctcacctgtgactttaggtgtgttacttaatcctgagtctcagtttccttatctccaaaaaccttccttgcaaatttgttttgaagattagacacaatatttatttaaagtgcctggcacacagtagatacttaataacagcaattttgacaataattaggagaatataattcaagccatagaatgttccagcaggaaggatctatgagatcacctagtccacscccaattttactgatggagtccagaggtggtagggaatttacccaagatcacaaggctggtttggcagaaccagaattcgagtgtgggctcccaatctcccctcctgtgttcttttctttctaccaaacaggaccaaaataccttgcattgaaagtggggagatgctttaacctatttatgatttgccactttggtgggctctgaggtatgaatcttagctggaatggctttgaggaatcctagccattga

SEQ ID NO: 19145 - DNA, 544 bp, Homo sapiens
ctacaactcattggcatcctggcaagcaaattccagtggagtgggggcacacttgggttcagttccaagctcacctgtgactttaggtgtgttacttaatcctgagtctcagtttccttatctccaaaaaccttccttgcaaatttgttttgaagattagacacaatatttatttaaagtgcctggcacacagtagatacttaataacagcaattttgacaataattaggagaatataattcaagccatagaatgttccagcaggaaggatctatgagatcacctagtccacgcccaattttactgatggagtccagaggtggtagggaatttacccaagatcacaaggctggtttggcagaaccagaattcgagtgtgggctcccaatctcccctcctgtgttcttttctttctaccaaacaggaccaaaataccttgcattgaaagtggggagatgctttaacctatttatgatttgccactttggtgggctctgaggtatgaatcttagctggaatggctttgaggaatcctarccattga

SEQ ID NO: 19146 - DNA, 546 bp, Homo sapiens
taggaaggagaaaagagatggtttcatttctaaatcctgctgcttaaaaatgtagcccagttgaataaaactgcattattaaatgacactgacagttttgtaaagtttatttttaaaaaatattttccctgtgcctaagaagaaaacacacatctatttccaattttcaaatgtgtattaaaatcgcctcttaaaccctaagtatttttgcacacagttaagatatgaaaataaattattggccaggcatgatagttcatgcctgtaatcccagtactttggaggctgaggtgggtggatcgcctgagcccacgagttcgaaaccagcctggraaacatggtgaaaccctgtctcttaaaaaaaaaaaaaatacaaaaatacaaaaattagccggacttggtggtgcatgcctgtaataccagctactcaggaggctgaggcaggagaatcgcttgaacctgggaggcggaggttgcagtgagccgagattgtaccattgcactccagcctgggtgacagagcaagactccgactcaaaaaaaaaa

SEQ ID NO: 19147 - DNA, 537 bp, Homo sapiens
tttgaagacaggctctttattgcccactctggttcctgcaagctgtgtgatagctgctccaggaacaaataccttgctgtctgctacagggctggagagtgagaatggtaattgtctctgagctaagagatgrtattgacagaaattaactgtaatttactgcccaaattttttccataactatgttatgtctgaatattcttcctctagatttttgcataaataaacttatcttgttaagtttcagatcaatggtcaactttcagcagaacttttccaaagttacgccatgtctcagttcattttctatcagtttaccttgttttgtttactttgtaaaatttttgactagaatcattgtatttattcatttatcttctgtctcctttatttatttatttatttatttatttacttacttacttatttattttttgagatggagtcttgctctgtcacccaggctgtagtgcagtggcgcgatctcagctcactgcaagctccgcttcccgggttcacaccattctcctgcttcag

SEQ ID NO: 19148 - DNA, 537 bp, Homo sapiens
tttgaagacaggctctttattgcccactctggttcctgcaagctgtgtgatagctgctccaggaacaaataccttgctgtctgctacagggctggagagtgagaatggtaattgtctctgagctaagagatggtattgacagaaattaactgtaatttactgcccaaattttttccataactatgttatgtctgaatattcttcctctagatttttgcataaataaacttatcttgttaagtttcagatcaatggtcaactttcagcagaacttttccaaagttacgccatgtctcagttcattttctatcagtttaccttgttttgtttactttgtaaaatttttgactagaatcattgtatttattcatttatcttctgtctcctttatttatttatttatttatttatttacttacttacttatttattttttgagatggagtcttgctctgtcacccaggctgtagtgcagtggcgcgatctcagctcactgcaagctccgcttccygggttcacaccattctcctgcttcag

SEQ ID NO: 19149 - DNA, 603 bp, Homo sapiens
atatwatatattataataatataattatattattataattattttataatataatcataattataatatatacataaatatgttatattatatatctaatcatttaacccttaatcttttatgactctataaggtaggtactattagtattaccatgttgtagatgaggacactgagacagagaagtcaagttccttgtctaagtttacagagtgaataaggagaggagccaggattggaacccagcaccctagctcacggctacactctcaacctctagggtcctcaccctcatgagactcacagcctagcgataatactcctcccatttattgaacacctacatgttcatctataccaagcatgttacactccttgtttcatttaattcttatagcaactccatgagggagagagtaataccccattatataaatgagaaaattaaggctccaaaaggccacaatgcagcttataagtgacaaggatggcacttgatcccaggtctgtttaactccagagtctgggctgtgaaacactgtgctgttctgttctctaatccaaccttttgacatagctgaaactgagacaaggcctgggggt

SEQ ID NO: 19150 - DNA, 603 bp, Homo sapiens
atataatatawtataataatataattatattattataattattttataatataatcataattataatatatacataaatatgttatattatatatctaatcatttaacccttaatcttttatgactctataaggtaggtactattagtattaccatgttgtagatgaggacactgagacagagaagtcaagttccttgtctaagtttacagagtgaataaggagaggagccaggattggaacccagcaccctagctcacggctacactctcaacctctagggtcctcaccctcatgagactcacagcctagcgataatactcctcccatttattgaacacctacatgttcatctataccaagcatgttacactccttgtttcatttaattcttatagcaactccatgagggagagagtaataccccattatataaatgagaaaattaaggctccaaaaggccacaatgcagcttataagtgacaaggatggcacttgatcccaggtctgtttaactccagagtctgggctgtgaaacactgtgctgttctgttctctaatccaaccttttgacatagctgaaactgagacaaggcctgggggt

SEQ ID NO: 19151 - DNA, 567 bp, Homo sapiens
tctcaccaaaaaagtaaaaataaaaataagaaagaagtcctcacttgagagctgaacaaactgagtctcgggtagagtgggtgaaatgcctcactcaaggtctyacagcagggtctaggtggagctggaacactaatgcttaccgccaaggctgtaccacctgtgctgtcccttatgcagccctgagtgcttggtcttggtcgcatccaaatctggcccatcctgtggtcaggcacgtgaactcagcccacattgctggcaatctgggctctgctgcttactcttggcagtaacttccctggacaaagccagccctgaggcgatctggtcacaccatgctggggcctggggcattggtgcctttgagctggacatctctggtctcagaggccttgtctggggccccaaattccctcttgtttgccctagggtgttggacacattatgatggcttccatgtgtgaaattgccttgcagggtactgacagtgtagaaagctttttcatgggtgtaatcttttttttttttcttcagagatgcagtctagctctgtcgcccaggctggag

SEQ ID NO: 19152 - DNA, 966 bp, Homo sapiens
tcagaacatttcaaggacttttccttgccttcattgaggtagttttaccattttctttttaaacaataacaatgaattgctctcagaatgttttggtgattcttcccaagaaatgcttgactgtatttctgaagtctattctggacagcctaatgataattaaatccctgatttcttatcttggggcattttcagcacgttccccttcttttgtttatgagcagttgaaccgaaataatcgaagctttttttgcagtaacactattattaaattttgttttaagaaacrcccagttccaggagcaatttatcctctcctctggaaggaaagcaaaataccagaaagagacaatccagagtaatgtttcacaatatccaatgtttattttatgttgaattagacacatacgtattttcaactcaccagtcatatattgttagttttattttttcacacactgaaggaaactaaaaaaatgagacagaaaaaagtagttatttctcaatgatttagtaattattaagtaagtattcttactttttcagaaagaaaataaagtcaaaccttgatctgaagattgacgacctgattccactctgggtttgcatttttctcaattatgtttgtacaaacctgtaaaatcaccaaagcaaaagtgtaggttttcaagtttctaatttctaaaagtttacaatctatgcatactagattatgactttagcagtttacttatatacttaggaacctggttaaactttatttttcttgatgatttgtaaaatatgacatgggtttaatattaatcattgctgtttcgaggcactaggagcttgcttttaacctttttttaattagttttcaattgtcaggcttctaacattagattaatgtaaaaaagcaagagataaggttgatagagcatttgttacataccgtttgggaagcatctaccattaacacatcca

SEQ ID NO: 19153 - DNA, 966 bp, Homo sapiens
tcagaacatttcaaggacttttccttgccttcattgaggtagttttaccattttctttttaaacaataacaatgaattgctctcagaatgttttggtgattcttcccaagaaatgcttgactgtatttctgaagtctattctggacagcctaatgataattaaatccctgatttcttatcttggggcattttcagcacgttccccttcttttgtttatgagcagttgaaccgaaataatcgaagctttttttgcagtaacactattattaaattttgttttaagaaacgcccrgttccaggagcaatttatcctctcctctggaaggaaagcaaaataccagaaagagacaatccagagtaatgtttcacaatatccaatgtttattttatgttgaattagacacatacgtattttcaactcaccagtcatatattgttagttttattttttcacacactgaaggaaactaaaaaaatgagacagaaaaaagtagttatttctcaatgatttagtaattattaagtaagtattcttactttttcagaaagaaaataaagtcaaaccttgatctgaagattgacgacctgattccactctgggtttgcatttttctcaattatgtttgtacaaacctgtaaaatcaccaaagcaaaagtgtaggttttcaagtttctaatttctaaaagtttacaatctatgcatactagattatgactttagcagtttacttatatacttaggaacctggttaaactttatttttcttgatgatttgtaaaatatgacatgggtttaatattaatcattgctgtttcgaggcactaggagcttgcttttaacctttttttaattagttttcaattgtcaggcttctaacattagattaatgtaaaaaagcaagagataaggttgatagagcatttgttacataccgtttgggaagcatctaccattaacacatcca

SEQ ID NO: 19154 - DNA, 611 bp, Homo sapiens
agataccactcaaaataatattatttccagctttgtgttacatttctaaggcacacatgaattatccctgtgttcctagaagagagctctaattagatctcgatacctgtttaattctgaactatgaaaactttattctcatgatcagtacttccctgaggtgctctttctacgggagtctcttttttcccttaacatggtttctctttcttgcccacatgcactcctcaggcatttgatggaagcatacactaactccttccttggaagtgatactgataaatgagtatgtatcaggggcagaatggtgaccasttagctacaaagtcaacttgcagcaaaagcacaaaaaggttagcttttctttgacatcaataatgaggacacaatttcttatgatatttccttagaaattgcaaagtgcagagtgaaaatacaatgtatttttagttctttgcctttcctcatccgttgaaaaagcaagcaacttttttcttaaatttaaaactcattaatcacttctggattacagattaattttatctgaacatttccataatgtctgaatccacacatcaattatgtatacacacacacacacacacacacac

SEQ ID NO: 19155 - DNA, 534 bp, Homo sapiens
taataaacatcccaacacttaacggcctttaacacaaagctttatttcttattaatgcctcaagtctccatgcctcctcacttcaaaaccttgcctgatggagtagccattatttcaaacattgctagttactgaggcagaagraacagatctggaggatctgtcaaaagcaattaaatatccctgctgggaggtggcacatattcacgtttattctactaataaaatgtggtactatctttacaatatcaagaaacaatatcaagaaaacaatatcaagttgcacaagatggttagtatagtaacatgctcttgcactttgcacgtatgtgtgaatatgtgacgttgtattgagtgagtcatttcctattgcgcctcaaatggtaagtagggacagatcccttccccaggattactaaggaacaatagaaagaactttgaaactccatttccactctaatgatttcccctgcactcctccacacctgctgtgtaagaagagtgagaagaggaggggcagcaggaaccatggct

SEQ ID NO: 19156 - DNA, 544 bp, Homo sapiens
tcaataagtaaaattaatcagaaacttcaggaaagaggtatttcacagaggagrgataacaaagtgtttttagacacaataaacctggaactacatcatgttcattactaagtgccttgtgactcttcaataaacaggttagctataggtaagattatggtgtttatacattcatggaaactattctttttacaagttacttactacactgtttacagtggttggttacctctagggagcaggattgaagatggtattttatagggaaattttgatactttcaggttgtaagactactatattgttttgatcttttataacaaaataaattaatttgacaattgcagattaataaaaaattactttagaagttcaattggataatatacaaacatatgtacctagaaaaggaatgaaataaattttgtttatcagaaacaatttggttcctttacatttaaatattcactgatatagtagaaagtggataattctacaaactaaaactgctagagtcttaactaatacatttacttctattgtt

SEQ ID NO: 19157 - DNA, 544 bp, Homo sapiens
tcaataagtaaaattaatcagaaacttcaggaaagaggtatttcacagaggagggataacaaagtgtttttagacacaataaacctgraactacatcatgttcattactaagtgccttgtgactcttcaataaacaggttagctataggtaagattatggtgtttatacattcatggaaactattctttttacaagttacttactacactgtttacagtggttggttacctctagggagcaggattgaagatggtattttatagggaaattttgatactttcaggttgtaagactactatattgttttgatcttttataacaaaataaattaatttgacaattgcagattaataaaaaattactttagaagttcaattggataatatacaaacatatgtacctagaaaaggaatgaaataaattttgtttatcagaaacaatttggttcctttacatttaaatattcactgatatagtagaaagtggataattctacaaactaaaactgctagagtcttaactaatacatttacttctattgtt

SEQ ID NO: 19158 - DNA, 544 bp, Homo sapiens
tcaataagtaaaattaatcagaaacttcaggaaagaggtatttcacagaggagggataacaaagtgtttttagacacaataaacctggaactacatcatgttcattactaagtgccttgtgactcttcaataaacaggttagctataggtaagattatggtgtttatacattcatggaaactattctttttacaagttacttactacactgtttacagtggttggttacctctagggagcaggattgaagatggtattttatagggaaattttgatactttcaggttgtaagactactatattgttttgatcttttataacaaaataaattaatttgacaattgcagattaataaaaaattactttagaagttcaattggataatatacaaacatatgtacctagaaaaggaatgaaataaattttgtttatcagaaacaatttggttcctttacatttaaatattcactgatatagtagaaagkggataattctacaaactaaaactgctagagtcttaactaatacatttacttctattgtt

SEQ ID NO: 19159 - DNA, 572 bp, Homo sapiens
tcaagataatgtattttttatatattaccatgacaaacttggtatcatagaataaattctacgattctatgaattctagagaattctatggtatctcatagaatccgttggaagtgttcccttcccttttaattttggaagagattgtgaagagttagtatgaarccttcttcaaacatttagtagaattgttcagtgatgtcagctggtcctgacattttttgggtggaaagtgttttgatttctaattcaatctttttacctatatgtctatccatatgttctatttcttcttgagtcagtattggttatttgcatatttctagaaatttgtctatttcttataggttatctaattagctgacaaattttttatagtatactgtatatataatttttgtttctataagcttaatagtaattaacatatcttttttcattctcaatgtagttacttgaatcttttctctctctatctttgtcaatctagttaaagattagtcaattttgttgaccttttcaaagaaaaaagctttggttttattgatttttttctattctctatttaatat

SEQ ID NO: 19160 - DNA, 572 bp, Homo sapiens
tcaagataatgtattttttatatattaccatgacaaacttggtatcatagaataaattctacgattctatgaattctagagaattctatggtatctcatagaatccgttggaagtgttcccttcccttttaattttggaagagattgtgaagagttagtatgaaaccttcttcaaacatttagtagaattgttcagtgatgtcagctggtcctgacattttttgggtggaaagtgttttgatttctaattcaatctttttacytatatgtctatccatatgttctatttcttcttgagtcagtattggttatttgcatatttctagaaatttgtctatttcttataggttatctaattagctgacaaattttttatagtatactgtatatataatttttgtttctataagcttaatagtaattaacatatcttttttcattctcaatgtagttacttgaatcttttctctctctatctttgtcaatctagttaaagattagtcaattttgttgaccttttcaaagaaaaaagctttggttttattgatttttttctattctctatttaatat

SEQ ID NO: 19161 - DNA, 525 bp, Homo sapiens
attgtatagatacactgtgatttattcaaccagttccctacygctggatacttgtgttctaattttttgctttatgaacaaaaaaattgcaattgattttacaactatcatattagcacagataatatctatataatatacagtcatgcactgcataacaatgttttggtcaatgaccgactgcatatactatggccatcccataagattataataccatatttttactgtaccttttctgtgtttaggtacacaaatacttagtgttataattgcctgtggtattcagtacagtcacatgtggtacaggtttgtagcctaggagcaataggctatatcttactgcctgagtttctaactaggtttgtgtagatacactctgtgagttcacacaatgactgaatctcctaataatacatttctcagaacgaatttctgttattaagcaactcatgattctctctctatatatatagtgggtgtaatatatatatgtatatgtatgtatgtgtgtatatataaaaa

SEQ ID NO: 19162 - DNA, 522 bp, Homo sapiens
acttagaaagtctataaatacactaactacaccttgccgagaagttgaaaagttggagtttctggtatttaaggagttgtttgttcatttagtggtttaattatttaaaaaacactgttctggccaggtgcagtggctcacgtctgtaatcccagcactttgggaagctgaggtgggcrgatggatgacttgaggccaggagttcgaaaccagcctagccaacatggcaaaacgccgtctctactaaagatacaacaaattagccaggcatggtggcacacacctgtaatcccagctactcaggaggctgaagcaggagaatcgcttgaacccgggaggcagaggttgcagtgagccgagatcctgctactgtactgcagcctgggtgacagagtgagactccatctcaacaaacaaagaaaaacactgttctccccgtctaactatgtgccaggtactagaccaagagctgaaaagacaaaaaagagcaaaatattccctgccttcaaatagctcatagtc

SEQ ID NO: 19163 - DNA, 522 bp, Homo sapiens
acttagaaagtctataaatacactaactacaccttgccgagaagttgaaaagttggagtttctggtatttaaggagttgtttgttcatttagtggtttaattatttaaaaaacactgttctggccaggtgcagtggctcacgtctgtaatcccagcactttgggaagctgaggtgggcggatggatgacttgaggccaggagttcgaaaccagcctagccaacatggcaaaacgccgtctctactaaagatacaacaaattagccaggcatggtggcacacacctgtaatcccagctactcaggaggctgaagcaggagaatcgcttgaacccgggaggcagaggttgcagtgagccgagatcctgctactgtactgcagcctgggtgacagagtgagactccatctcaacaaacaaagaaaaacactgttctccccgtctaactatgtgccaggtactagaccaagagctgaaargacaaaaaagagcaaaatattccctgccttcaaatagctcatagtc

SEQ ID NO: 19164 - DNA, 578 bp, Homo sapiens
gtgaggcatcctgatggtgcacacacatgcctaggacaacagatgggacaaggcaatcccgaggcccctgcatagttgtgtttgggcactsggagaggtggcaccaggtaatgcaggcctgttctcaggagcccccagtgatgtacacggcagcaggctgtgggcatcagcattttttaaagtttccagacacaggcaactttgaaaaccatatatgtagtaaagagcatggactctgaaaccagatgagttcaaaacctagacttgattttgagttgtctgactttgagcaaataacctcatctgcaaaacaaagatagtaagagtactaaccccacaggggctattctgagcattgatgtgtatacaaaggtgctttataatagtgcctggcacataagaactcattatacgttcctcatcattattccaaatggatgttggagagttgctaaggcttatgacagctacaggggaaaacaatgggtatgactcgccaaaggcctaaatctatgttgaggtgggagctagaagtcaaaaattaacaaagttgagtgtatggacaaagtaaaataatg

SEQ ID NO: 19165 - DNA, 578 bp, Homo sapiens
gtgaggcatcctgatggtgcacacacatgcctaggacaacagatgggacaaggcaatcccgaggcccctgcatagttgtgtttgggcactcggagaggtggcaccaggtaatgcaggcctgttctcaggagcccccagtsatgtacacggcagcaggctgtgggcatcagcattttttaaagtttccagacacaggcaactttgaaaaccatatatgtagtaaagagcatggactctgaaaccagatgagttcaaaacctagacttgattttgagttgtctgactttgagcaaataacctcatctgcaaaacaaagatagtaagagtactaaccccacaggggctattctgagcattgatgtgtatacaaaggtgctttataatagtgcctggcacataagaactcattatacgttcctcatcattattccaaatggatgttggagagttgctaaggcttatgacagctacaggggaaaacaatgggtatgactcgccaaaggcctaaatctatgttgaggtgggagctagaagtcaaaaattaacaaagttgagtgtatggacaaagtaaaataatg

SEQ ID NO: 19166 - DNA, 578 bp, Homo sapiens
gtgaggcatcctgatggtgcacacacatgcctaggacaacagatgggacaaggcaatcccgaggcccctgcatagttgtgtttgggcactcggagaggtggcaccaggtaatgcaggcctgttctcaggagcccccagtgatgtacacggcagcaggctgtgggcatcagcattttttaaagtttccagacacaggcaactttgaaaaccatatatgtagtaaagagcatggactctgaaaccagatgagttcaaaacctagacttgattttgagttgtctgactttgagcaaataacctcatctgcaaaacaaagatagtaagagtactaaccccacaggggctattctgagcattgatgtgtatacaaaggtgctttataatagtgcctggcacataagaactcattatacgttcctcatcattattccaartggatgttggagagttgctaaggcttatgacagctacaggggaaaacaatgggtatgactcgccaaaggcctaaatctatgttgaggtgggagctagaagtcaaaaattaacaaagttgagtgtatggacaaagtaaaataatg

SEQ ID NO: 19167 - DNA, 515 bp, Homo sapiens
taaaatgtttgtgtaaaatttaacacattttaaacatgtctgatgacatcctataatacttctggaacatcctgcatgctctccaaattgaaccacaaacttaggtcccactttgaggatgcctgtcatcctagagaggtgagatacagcaaacacagacccaataaagacaccaaggcattagtgcggttcattgttatcaagcatcttttgacttttggtttacctagttgcaaaggtgtgaggtcgagcttccacaatcccttctttggacaaagccactaacacagagagcagttaagcaacacatccaagcttccaagactgaaatccaggttcccaggactgtttcgtgactgtccatgaagayagttagaaatcacaaggtcggtcgggtgccatggttcatgcctgtaatcccagcactttgggaggctgaagcgggtggattacatgagtccaggagttggagaccagcctggccaacatggctaaaccccgtctctactaaaaat

SEQ ID NO: 19168 - DNA, 515 bp, Homo sapiens
taaaatgtttgtgtaaaatttaacacattttaaacatgtctgatgacatcctataatacttctggaacatcctgcatgctctccaaattgaaccacaaacttaggtcccactttgaggatgcctgtcatcctagagaggtgagatacagcaaacacagacccaataaagacaccaaggcattagtgcggttcattgttatcaagcatcttttgacttttggtttacctagttgcaaaggtgtgaggtcgagcttccacaatcccttctttggacaaagccactaacacagagagcagttaagcaacacatccaagcttccaagactgaaatccaggttcccaggactgtttcgtgactgtccatgaagatagttagaaatcacaaggtcggtygggtgccatggttcatgcctgtaatcccagcactttgggaggctgaagcgggtggattacatgagtccaggagttggagaccagcctggccaacatggctaaaccccgtctctactaaaaat

SEQ ID NO: 19169 - DNA, 557 bp, Homo sapiens
tgtctagggttttataaaatttagatcatacattatagacaactgtatattctggatgttttgtcattaggagtgatttctttttctcatatattcttagaaaatatattttactagttttatagtaattgccataaaagagaaatttactaaatcactgccctatttagacacttttttttgctaaggtgctattaaaaacaattatttcccctttttagtcacatgaatgttattcccactgtgtgtgttattgaatgactagactactgattcatattgataaattgctgtctagaaatttattccaattttctacccatcttgtatatgcataaaagtattattttaatatatattcatgagagacatagattttgctttcatttctacattttgctggctttttagtaaaaaaaaagttttcttttattgtatttatgtatattcctcctactttttccactaatctgtcacattgcattcatcaaatactaaagwcttctttgtaataaggtctaattctgtgttttctattgtctcattgatctatatag

SEQ ID NO: 19170 - DNA, 536 bp, Homo sapiens
gttacttcaaggacttttagtaagaatgaactgttagctgctcatgaatgaggggtttgactaccctagtaatcacaagtatatacttcccaaaaatatgcctcaatgtgttaataggtcattttgcagcataatttgtacaatatatcattctgttaagttaaattatactggaatacttgaaataaaccatctatctggtttatatcttttcttagttcagtcatgtagttagatctgtggagctatgatctaaaaggagttatgtcactaatataatttgtagttctagaaatcccagttctccaagtactcaggtttactggttatttaattttaattttttgtagtgaaggctatcccctccctacctaacagggacctcgtgacagtttctataactcattagttataaactatgagaagctttctcatttatctgtgttcagcttaggaacagtcatggtgagtgttcatatgcaccttgagctcagcctcaccagaactgagtatacactggcctgctgyatccctca

SEQ ID NO: 19171 - DNA, 714 bp, Homo sapiens
atattagttcataggagattaagggtctcctggctaagtgagtgatggatgaggaaaggctgagaggaaattggtaagtattctgaaacggagacgtaagaggaggcagggagcaaaatgtgtgttggaggaggcatatgtgtggtgcccaatggcaaagggtaccagattgcactgaaacaatgaactctacaagatgtaagtcctgctggccttttctcactttagaatatgcatagtctgttctcttttgtcagggaaatgctgaaggctattacaacggagactttgcatattccataaaaaatgttattcttgcttcctctccctcccacctcaatgaaataatatcgagctttgtgactttataagactgaattaagaaaattctgaaaaatgggcgatagatgcttattttccttggtcactgactttagagaagacaattatttttgtcagtttgagtgtgatcattagagttgagattactagctttctactcccrtgtctttcttccttagtaacatggttttcaggtagatatattaccatgcagaataaatgagtctatttcctaggggaacccatctccagtagccagttttgactacttgattaaattctgggcaatgaagtataagcaaatggtctctatgaaacttctacaaagactccttaaaaaaaaagaaaaaaaggaaaagtagattatttttt

SEQ ID NO: 19172 - DNA, 714 bp, Homo sapiens
atattagttcataggagattaagggtctcctggctaagtgagtgatggatgaggaaaggctgagaggaaattggtaagtattctgaaacggagacgtaagaggaggcagggagcaaaatgtgtgttggaggaggcatatgtgtggtgcccaatggcaaagggtaccagattgcactgaaacaatgaactctacaagatgtaagtcctgctggccttttctcactttagaatatgcatagtctgttctcttttgtcagggaaatgctgaaggctattacaacggagactttgcatattccataaaaaatgttattcttgcttcctctccctcccacctcaatgaaataatatcgagctttgtgactttataagactgaattaagaaaattctgaaaaatgggcgatagatgcttattttccttggtcactgactttagagaagacaattatttttgtcagtttgagtgtgatcattagagttgagattactagctttctactcccgtgtctttcttccttagtaacatggttttcaggtagatatattaccatgcagaataaatgagtctatttcctaggggaacccatctccagtagccagttytgactacttgattaaattctgggcaatgaagtataagcaaatggtctctatgaaacttctacaaagactccttaaaaaaaaagaaaaaaaggaaaagtagattatttttt

SEQ ID NO: 19173 - DNA, 567 bp, Homo sapiens
gctcctctagaaaagcacggcatttctcccctcttcctctcttgctctctttctttttgcttattccttcataaaaaattggcaaatcagacccaacatagggaagtgcagctagttttgaaaactgtactttaagatacactcacatgtgcgcacgtgcacacacagtggactatttgagggcagggagactaagaagatgaagggatgagaaaccaggttgaataagattaactcagaaggggcatgataayattttcatgtagtctcatgataacataatctcaattactagaagagttatcacacagtaggatggaagagaggaagtaattgagtgcctactgcatgtcaggcacttcacaaagagtattcatatttaatttgttttaacataaaaatgttttctgatttgtataacacccaaaagtagaatacagaccaatataaaaggcaggaggaaagagcaggggaagtatggatggaagaaggaagaaacagaaatggatgagagaggagagccaaagatgaactgagaggcctctgaagataattaatggccagtct

SEQ ID NO: 19174 - DNA, 540 bp, Homo sapiens
attcagcctattttcaccaattgtattccaatttctttttggtgaactatttcttccccaatgtatgcactcttggtaaattaagctattttgtgctcctatgtaatctaagctaggggtggcagagcaggaccagaactaggttaaggcaagtgaagttcttagggtgcaaaatttaagtagcacacgtatttatataacattgagtgyattaatcttttttttttattaaatttatttttttattgataattcttgggtgtttctcacagagggggatttggcagggtcatgggacaatagtggagggaaggtcagcagataaacaagtgaacaaaggtctctggttttcctaggcagaggaccctgcggccttccgcagtgtttgtgtccctgattacttgagattagggattggtgatgactcttaacgagcatgctgccttcaagcatctgtttaacaaagcacatcttgcaccgcccttaatccatttaaccctgagtggacacagcacatgtttcagagagcaccgggttggg

SEQ ID NO: 19175 - DNA, 568 bp, Homo sapiens
gctgaccacaaattccaccccttgccagaaggatctgaccttctaaggaaaggtttggatggcgcaataatttgacacaaataaatgtgtctcttgttcaggtttggaagatgagacggaagtactagaaattcatttgaccatggaaggggcaaatgagtttccacttacatatggcagatatatgagcttctcctgagattataggtgagatgggatccattttcatcatggagtaaaaatgcaaccagtactccttctaccggaaactaagtagtccctatcaaacccatgcctgtaagcagtacctggatacctttctgctaccagagaaattstgtgggtcctcaacaagtgggtgtggaggcccagcatggaaagtcacttgcccagtgttacacaatggttagtggcaagctggtttcatcaggcaatttagccaataaaagagaatcacactaggtctgtcaagcaaaaagggatttaacattgagtaataagtttataaaatcaccgaaaaggctgaaagggcaagttaggaggattagcattagcttttaagctgggg

SEQ ID NO: 19176 - DNA, 568 bp, Homo sapiens
gctgaccacaaattccaccccttgccagaaggatctgaccttctaaggaaaggtttggatggcgcaataatttgacacaaataaatgtgtctcttgttcaggtttggaagatgagacggaagtactagaaattcatttgaccatggaaggggcaaatgagtttccacttacatatggcagatatatgagcttctcctgagattataggtgagatgggatccattttcatcatggagtaaaaatgcaaccagtactccttctaccggaaactaagtagtccctatcaaacccatgcctgtaagcagtacctggatacctttctgctaccagagaaattgtgtgggtcctcaacaagtgggtgtggaggcccagcatggaaagtcacttgcccagtgttacacaatggttagtggcaagctggtttcatcaggcaatttagccaataaaagagaatcacactaggtctgtcaagcaaaaagggatttaacattgagtaataagtttataaaatcacygaaaaggctgaaagggcaagttaggaggattagcattagcttttaagctgggg

SEQ ID NO: 19177 - DNA, 642 bp, Homo sapiens
aaggattcatagttcttaatttcagagattattacaaagctacactcaagacagtatggtactggcataaggatacacatacagaccaatggaatagaactgaaacccctcacgtttatggccagttgatttttgacaagacaatccgatgaacaaagaacagcactttttaacaaatgatgctagaagccaggcacagtgcttcacacctgtaatcccaggactttgggaggccaaggcaggaggatcacttgagcctaggagtttgagaccagccttggcaacatggtgaaatcccgtttctacaaaatataaaaattaaaaaagtagccaggtgtggtggcgcacacctcccagttactcaggaggctgaagcaagagaattgcttgagcctaggaggtcaaggctgttgtgagccatgattgtrccactgcactccaacctgggtgacacagcaagactctgtctcaaaataaataaataaaaataattttccttttgtttatcccttatagtcgatcattatatatcaattttaaaagatactatgcagtaaagggagcaaaacaaaatctttgttgttaaaaatggcaatgggttagataggcttaagaactgctgagtcccagctgaccctaact

SEQ ID NO: 19178 - DNA, 530 bp, Homo sapiens
tttatttttactatagccttcacgccctgaagcaaccacaaaatagaaaattttacatcgaatgcagtctctgtgcaaataagccagtccccacaatggctgaaataatcgttaccaacaatctgaagttattagtgccataatgacacartcttgacaactttcataattaaattttcaacagctttaattcctggcatgctttataatttgataacttcttttctggaaataaaggagaaatcaaaaatcagataggagaggagagaaccttcacccttctgataatatatgtctcaaatttaaagaaaataaaggcacttaggtcagcatctaaacctgaagctctatgctaatttctattttaaaatctgccactctcatctcacaaagagccaggtgtggcaaacatcctcttgcataagtctgtaaagcaaacctcatcaccaagagtgtcagagcccagagatttattataaagtgatatattttcaaagagcagcacaaagagtcttttaacactgaatttg

SEQ ID NO: 19179 - DNA, 530 bp, Homo sapiens
tttatttttactatagccttcacgccctgaagcaaccacaaaatagaaaattttacatcgaatgcagtctctgtgcaaataagccagtccccacaatggctgaaataatcgttaccaacaatctgaagttattagtgccataatgacacagtcttgacaactttcataattaaattttcaacagctttaattcctggcaygctttataatttgataacttcttttctggaaataaaggagaaatcaaaaatcagataggagaggagagaaccttcacccttctgataatatatgtctcaaatttaaagaaaataaaggcacttaggtcagcatctaaacctgaagctctatgctaatttctattttaaaatctgccactctcatctcacaaagagccaggtgtggcaaacatcctcttgcataagtctgtaaagcaaacctcatcaccaagagtgtcagagcccagagatttattataaagtgatatattttcaaagagcagcacaaagagtcttttaacactgaatttg

SEQ ID NO: 19180 - DNA, 573 bp, Homo sapiens
agaagattaccagtctgrcaaagtttagattttttaaaaaaggcacactatgtaaataatgaataaaagttatctgtgattttcaacataccagcaagaaataataagttcttatcgtagcagtagcccaccatggacaagagccacctgaaaggctctttcaaaatacccccaataactccagatgtagatacatctaattagaagttcataaatgagcttggtgggggagaaaaaagcataagcatcttaacactgtatgtaaaatttgcaaatgtacattagattctccaaaaggttaaaagccactgggctacattatccatgaatttgtgcattaataaatctttgacatgtcccatttagatatgaacagcttacgtaaatacacaaattagtatttctggtaaacatttattgtaagtacacagaaaaaaatctcaactttattgttttttgccacaattctagttacagatttctctctgcttatgaagttttctctttaataacatcatgagggttgtaaagcgaagacattttgaaataaaattcttatcgatttaatttatt

SEQ ID NO: 19181 - DNA, 573 bp, Homo sapiens
agaagattaccagtctggcaaagtttagattttttaaaaaaggcacactatgtaaataatgaataaaagttatctgtgattttcaacataccagcaagaaataataagttcttatcgtagcagtagcccaccatggacaagagccacctgaaaggctctttcaaaatacccccaataactccagatgtagatacatctaattagaagttcataaatgagcttggtgggggagaaaaaagcataagcatcttaacactgtatgtaaaatttgcaaatgtacattagattctccaaaaggttaaaagccactgggctacattatccatgaatttgtgcattaataaatctttgacatgtcccatttagatatgaacagcttacgtaaatacacaaattagtatttctggtaaacatttattgtaagtacacagaaaaaawtctcaactttattgttttttgccacaattctagttacagatttctctctgcttatgaagttttctctttaataacatcatgagggttgtaaagcgaagacattttgaaataaaattcttatcgatttaatttatt

SEQ ID NO: 19182 - DNA, 549 bp, Homo sapiens
caagtgtctactgtctgcacaggtctcatctcactgacaaccatgccgcacagcagtacctggctgaactctgggtgtttctgctcattccaaagtttttgaaatcaggatcagtatctcccatastcttacatgctgggaacaggtacaggttagggccaaatggagctataaagaagaaagacatgagaagtaccagagcttttcttaaaaacaacagcaactaaaggaaagtctctattctgatttctgatttatcatgacagaagtttgggaaggggatcctggtattccctgattattacaaaagtttattccattttagttgaatattaaccatctgttaattaacttagtactgatttaattttatgaatttttaaattactgcccccaataagaaaactctgagtcagcacggccgagtcattggttcagtcagttcacaatggagccaggattcaaatcttagtctacctgactctagagcccctattccactgtgcctttaagtcaagacgaagtctcagtattaatggagaactcatt

SEQ ID NO: 19183 - DNA, 859 bp, Homo sapiens
acatgtactggtacacttcatattcacaataatcctatgagttaasgctattactaccctcattttatggaggaagaagctgagacaagagatcaagtgacagagccaagatttcaactcaggttgactctagagtcccagatcttaaccactggcacaatgtatagaaattaatcaaactctttaaacacagtggaattgagtatactgtctactttaattcccgattttgtcatatatattctactattttacttctcaaatacaacgagtttttaaaaggatcggtaatcacaagacagccaacagtgtccctgaaattcccctagagatgctaactacaaaataaaacttatgaatcataattcaatagctttaaatattgtagtacaagaacatttttctaaatgaaattttatgtgcatctataacataagaaacagattaggctgggtgtggtggcttgcacctgtaatcccagcactttgggaggctgaggagggcagattacgaggtcaggaggtcgacaccagcctggccaacatggtgaaaccccatctctactaaaaatacaaaaattagcagggtttggtggcaggtgcctgtaatcccagctactcgggagcctgaggcaggagaatcacttgaagctggaaggcagaggttgcagtgagctgagatcctgccactgcactccagcctgggttaaagagtgaaactccatctcaaaaaacaaacaaaaaaagaataaagcagtattttattctatcaatgtatttcaaagctcaaacgtggccgggtgtggtggctcatgccggtaattccagcactttgggaggccaaggcggggggtggatca

SEQ ID NO: 19184 - DNA, 859 bp, Homo sapiens
acatgtactggtacacttcatattcacaataatcctatgagttaacgctattactaccctcattttatggaggaagaagctgagacaagagatcaagtgacagagccaagatttcaactcaggttgactctagagtcccagatcttaaccactggcacaatgtatagaaattaatcaaactctttaaacacagtggaattgagtatactgtctactttaattcccgattttgtcatatatattctactattttacttctcaaatacaacgagtttttaaaaggatcggtaatcacaagacagccaacagtgtccctgaaattcccctagagatgctaactacaaaataaaacttatgaatcataattcaatagctttaaatattgtagtacaagaacatttttctaaatgaaattttatgtgcatctataacataagaaacagattaggctgggtgtggtggcttgcacctgtaatcccagcactttgggaggctgaggagggcagaytacgaggtcaggaggtcgacaccagcctggccaacatggtgaaaccccatctctactaaaaatacaaaaattagcagggtttggtggcaggtgcctgtaatcccagctactcgggagcctgaggcaggagaatcacttgaagctggaaggcagaggttgcagtgagctgagatcctgccactgcactccagcctgggttaaagagtgaaactccatctcaaaaaacaaacaaaaaaagaataaagcagtattttattctatcaatgtatttcaaagctcaaacgtggccgggtgtggtggctcatgccggtaattccagcactttgggaggccaaggcggggggtggatca

SEQ ID NO: 19185 - DNA, 859 bp, Homo sapiens
acatgtactggtacacttcatattcacaataatcctatgagttaacgctattactaccctcattttatggaggaagaagctgagacaagagatcaagtgacagagccaagatttcaactcaggttgactctagagtcccagatcttaaccactggcacaatgtatagaaattaatcaaactctttaaacacagtggaattgagtatactgtctactttaattcccgattttgtcatatatattctactattttacttctcaaatacaacgagtttttaaaaggatcggtaatcacaagacagccaacagtgtccctgaaattcccctagagatgctaactacaaaataaaacttatgaatcataattcaatagctttaaatattgtagtacaagaacatttttctaaatgaaattttatgtgcatctataacataagaaacagattaggctgggtgtggtggcttgcacctgtaatcccagcactttgggaggctgaggagggcagattacgaggtcaggaggtcsacaccagcctggccaacatggtgaaaccccatctctactaaaaatacaaaaattagcagggtttggtggcaggtgcctgtaatcccagctactcgggagcctgaggcaggagaatcacttgaagctggaaggcagaggttgcagtgagctgagatcctgccactgcactccagcctgggttaaagagtgaaactccatctcaaaaaacaaacaaaaaaagaataaagcagtattttattctatcaatgtatttcaaagctcaaacgtggccgggtgtggtggctcatgccggtaattccagcactttgggaggccaaggcggggggtggatca

SEQ ID NO: 19186 - DNA, 509 bp, Homo sapiens
gatggttttayaaaggggagtttccctgcacaagctctctcatcttgtctgctgccatgtgagactgcctttcaccttccaccatgattgtgaggcctacccagccatgtggaactgtgcatctattaaacctctttcttctagaaattacccagtcgggcatgtctttaccagcggtgtgaaaatggacaaatacagtagcacacctcatagggctgaacaaaacggagaagatgagtggggagcaagagagagaaaaggggtctgtgggactccagcctttattgggcccagaacagtacccaaataagttttccacggggctctagtcggtggggtgagtgccagcaggcacatttcttggcttccgctgcaactgagcaggtcactctggcgtgtgggggctgtccaagtgggctgtgaggtctgtggggtgagtcatgcagattgtatccaacggttccatggcgggtagtcaccagggggaggcaactgtgtagggtcagtat

SEQ ID NO: 19187 - DNA, 509 bp, Homo sapiens
gatggttttacaaaggggagtttccctgcacaagctctctcatcttgtctgctgccatgtgagactgcctttcaccttccaccatgattgtgaggcctacccagccatgtggaactgtgcatctattaaacctctttcttctrgaaattacccagtcgggcatgtctttaccagcggtgtgaaaatggacaaatacagtagcacacctcatagggctgaacaaaacggagaagatgagtggggagcaagagagagaaaaggggtctgtgggactccagcctttattgggcccagaacagtacccaaataagttttccacggggctctagtcggtggggtgagtgccagcaggcacatttcttggcttccgctgcaactgagcaggtcactctggcgtgtgggggctgtccaagtgggctgtgaggtctgtggggtgagtcatgcagattgtatccaacggttccatggcgggtagtcaccagggggaggcaactgtgtagggtcagtat

SEQ ID NO: 19188 - DNA, 509 bp, Homo sapiens
gatggttttacaaaggggagtttccctgcacaagctctctcatcttgtctgctgccatgtgagactgcctttcaccttccaccatgattgtgaggcctacccagccatgtggaactgtgcatctattaaacctctttcttctagaaattacccagtcgggcatgtctttaccagcggtgtgaaaatggacaaatacagtagcacacctcatagggctgaacaaaacggagaagatgagtggggagcaagagagagaaaaggggtctgtgggactccagcctttattgggcccagaacagtacccaaataagttttccacggggctctagtcggtggggtgagtgccagcaggcacatttcttggcttccgctgcaactgagcaggtcactctggcgtgtgggggctgtccaagtgggctgtgaggtctgtggggtgagtcatgcagattgtatccaayggttccatggcgggtagtcaccagggggaggcaactgtgtagggtcagtat

SEQ ID NO: 19189 - DNA, 808 bp, Homo sapiens
cagccttaactcgcttagaccttgtcttagactctgattggacaactggcttgcagtggaacagagatcataaaaattgtcaatgccaactgatcgagctctgtggttttaaaggcttttctatctctaggttttgcagacttcaactgagatttgcaccctatgaaacaaagaaagaggagtgtgggggcaaaagaggaatctcacagactcacaccctcttttacatgggggctgaacaagaattccaagactatgttttstttaattaatcaatttatttattttcttaaagcaagctttgctatgtcacccaggctagagagtgatcatagttcactgcagccttgaactcctgggctcaagcaagtctcccaccacagacttctatgtagctgggactacaggtgtgtaccaccatgccaagctaaattttttttttcgttttttagagatagtggtcttgctatgttgcgcagactggtcttgaattcctagcttcaagtgctcctccctctttggcctcccaaagtgctgggattacaggcatgagcaggtcccaagactgtagtttaaatgctcactagctttccatagtgactatttgccttagactcctatctgattaggaaaataatctgccttccctggttgagtcattattctagggtccaggtttttttgcttgcttgtctgtttgttgagattaagataatctcacttgcgtccaagtttataaatggatcctattttgaggacgccatttttacatttgaaaggcgttggttgaactctcacttccggctgt

SEQ ID NO: 19190 - DNA, 808 bp, Homo sapiens
cagccttaactcgcttagaccttgtcttagactctgattggacaactggcttgcagtggaacagagatcataaaaattgtcaatgccaactgatcgagctctgtggttttaaaggcttttctatctctaggttttgcagacttcaactgagatttgcaccctatgaaacaaagaaagaggagtgtgggggcaaaagaggaatctcacagactcacaccctcttttacatgggggctgaacaagaattccaagactatgttttctttaattaatcaatttatttattttcttaaagcaagctttgctatgtcacccaggctagagagtgatcatagttcactgcagccttgaactcctgggctcaagcaagtctcccmccacagacttctatgtagctgggactacaggtgtgtaccaccatgccaagctaaattttttttttcgttttttagagatagtggtcttgctatgttgcgcagactggtcttgaattcctagcttcaagtgctcctccctctttggcctcccaaagtgctgggattacaggcatgagcaggtcccaagactgtagtttaaatgctcactagctttccatagtgactatttgccttagactcctatctgattaggaaaataatctgccttccctggttgagtcattattctagggtccaggtttttttgcttgcttgtctgtttgttgagattaagataatctcacttgcgtccaagtttataaatggatcctattttgaggacgccatttttacatttgaaaggcgttggttgaactctcacttccggctgt

SEQ ID NO: 19191 - DNA, 629 bp, Homo sapiens
ccactttactctggctggggaaagagccagaatgagttttgcatttggggaaccaccataattagctgcaagaaactatgggctaagaaaagggttgccaacccctggctatcacacattcctcaggcttcatttatcattcaaatggaagcatgaatcacacttactccatagcaggctccatataagggatgagataatgagactgtcaaggtccctgcactcccasctcggggagtgcccttgctactctagccttctgtcttgacttcaaccaactacagccatcaattctccttttgtcttcagtctagaccagtactagcaaagccagagctctctaaattcaacacgaatgtatgtcaaagcaaaggaatggattccacagatgctccaatgagtcacatgctccaagaactcaagaggacttcttaggaaaccggtgaagtgtttggaacatttgctaattctatcagatcatcccttttattgcggatgactctggatccacacaattttcatcaagagaaatttttttgcataatgccccagtgactaatccgatttggtgtggtgtagaaccttcgtggagccttgtattagtccattctaacactgctacaaagaaa

SEQ ID NO: 19192 - DNA, 629 bp, Homo sapiens
ccactttactctggctggggaaagagccagaatgagttttgcatttggggaaccaccataattagctgcaagaaactatgggctaagaaaagggttgccaacccctggctatcacacattcctcaggcttcatttatcattcaaatggaagcatgaatcacacttactccatagcaggctccatataagggatgagataatgagactgtcaaggtccctgcactcccacctcggggagtgcccttgctactcyagccttctgtcttgacttcaaccaactacagccatcaattctccttttgtcttcagtctagaccagtactagcaaagccagagctctctaaattcaacacgaatgtatgtcaaagcaaaggaatggattccacagatgctccaatgagtcacatgctccaagaactcaagaggacttcttaggaaaccggtgaagtgtttggaacatttgctaattctatcagatcatcccttttattgcggatgactctggatccacacaattttcatcaagagaaatttttttgcataatgccccagtgactaatccgatttggtgtggtgtagaaccttcgtggagccttgtattagtccattctaacactgctacaaagaaa

SEQ ID NO: 19193 - DNA, 540 bp, Homo sapiens
ttgatctctcttcctccctctccctctctctctttttcttcttagagttagagtcttgccttgtcacccaggctggagtgcagtggcacaatcatagttcactgcagcctcaaactccagggcccaagcaatcctcccacattagcctcctgagtacctaggactacagacatttgccaccatgcccagctaatttattctttttaatttttgtagagatgggggtctccctttgttgcccaggctggtctcaaagtcatcgcctccagtgatcctccctcttcagcytcccaaagggctgggattgtaggcatgaaccactgtgcctgacccatcttcatctcttacatttaagagagctactctctgactacaaaaaaatcaatcaaggttacataagaaacactagctcatgcacaaggctgtcaaactcctgagaagaactggccaaaccaggcactccacatgattagggagctgataggagattaaagaaatcatttttcaccttcatatagaaaagaatgtccagtaataggg

SEQ ID NO: 19194 - DNA, 620 bp, Homo sapiens
gtttcttatatttatttcttttaatcttttcttttaactcagactacgttttaaggttttgttgcctactaagttataatctgagtgcagaaggaaacttgatttggctctatggaatacattttacattcagtgaagctgagctctgttctcattcctgacaaaaggaatcaaaggcattggtttgagagatcaagtcatgtgttaataaaacacaaatattccatcaagtaatactctgaaggagcaggtgtagtttatttcttctccagaaagtcttccagcagataaataatgagaggtagtatggcataggaaaaaagtacactgaagtcagcctttctggttcaaccagctcagacccctgagctatttttgcctcagttttacgccttggagaacaatgccttgtcattactattcactttatgaccatacagtgcctggcacctggtgggcaattggtgaatgttttcactatcctcatccttgccctcatgaarcactccttctaggtcccacaaagaccgttggtattttatgacaaagtaccttacaaatatttttctttttttaaaggagaaattgtcgtaaatgaagtcaattttgtgagaaaatgc

SEQ ID NO: 19195 - DNA, 632 bp, Homo sapiens
ggtgcctgctcaaggtcaaacaacgcttccaaatggcagagcaaaacacctcacagaagtacagagtcacgcataaaggacctgcartaagatagggaaaggaacgctttctcgccaatctttctacctagagaccctgtgctacaaatcaacaaagtcaccatttccaaaacaaacaccttccttgaaggcacttgctgacttgctgacggctgagtcatctgactctccctttcccttaattcctagatcctgattcctaaatgccagcacagagtccacagtaagcccatctcgccaatcagcaaagagaagacaaaagcttccagtctctatgctcatgctgtgctggcatccctggtattcttttggggttggaagaacacagacaaaagaagaatgttaacaaaagaaatacatgttctaattacatgtaaattttaaggcattaagtttgccatattttaaaagttgattctaaaatgaaaaggtgtttcagatatgttttgttactgagtaccggttccaggcgcttcaagtgctggtgtaaattaagggccagtcgatcccaccatcggcctctgctgtcaggacaataaattctctgagacaaaaggctttcaagttctctg

SEQ ID NO: 19196 - DNA, 632 bp, Homo sapiens
ggtgcctgctcaaggtcaaacaacgcttccaaatggcagagcaaaacacctcacagaagtacagagtcacgcataaaggacctgcaataagatagggaaaggaacgctttctcgccaatctttctacctagagaccctgtgctacaaatcaacaaagtcaccatttccaaaacaaacaccttccttgaaggcacttgctgacttgctgacggctgagtcatctgactctccctttcccttaattcctagatcctgattcctaaatgccagcacagagtccacagtaagcccatctcgccaatcagcaaagagaagacaaaagcttccagtctctatgctcatgctgtgctggcatccctggtattcttttggggttggaagaacacagacaaaagaagaatgttaacaaaagaaatacatgttctaatyacatgtaaattttaaggcattaagtttgccatattttaaaagttgattctaaaatgaaaaggtgtttcagatatgttttgttactgagtaccggttccaggcgcttcaagtgctggtgtaaattaagggccagtcgatcccaccatcggcctctgctgtcaggacaataaattctctgagacaaaaggctttcaagttctctg

SEQ ID NO: 19197 - DNA, 478 bp, Homo sapiens
tcagactctttgtgggtcaattactgagaatcatcttaggaactctggcttcctcgcccaacttttaatgctttcttatttgcctgatacatcttatcttttatttttaattttttttgaatctttttattttaaatctatctttttaaaagacacattgctcgtgttctgttacccagcctgaatatttatgtcttttgatttgtgaatatttattataattattattctgttaggacaaatttctactatataattttatgtgttctcttatcattctttctrcattttctttcttcttttttctctattatatcagctatctcttgtgccctgcacacactcttccttcctcttactccaggccttcctggggtgatcaacttttcattggtataacctgacagcactgcctcacctgcatcttacagctcttgcttcttgcttattattcaatacgcctccctttatcaaccct

SEQ ID NO: 19198 - DNA, 561 bp, Homo sapiens
tctcctttatcctcataaccagtgaagatgattgttatttctaatgtttaccaatatgttgagaagaaaatagaatttcatttttggtttcacttatacatttatcattattggaaataagggcatattttttataaatttttagctatttctatttcctcttcaaataattgtcttgatatgttttgcccattttatttgatttttttcttttttgtagacattgcagtgaatgcattgctcatttttacttgagttgtttgtgctttactataaatttttagagtatctttctatattaaaaattttagtcctttgtcatgttacaaatgttttcctccagtctacagtttttacagattttgttgtattttttttagtttttagtctttttatgggcaaatttatctaacttttattctctaaaatatgcttctattactttatattgttattaatatctagagctttaatccatctggaatttaatttagcatataatgtaaagtcgaygtctacatttgttttcttccagacagatggcaaattatgtctatatta

SEQ ID NO: 19199 - DNA, 569 bp, Homo sapiens
tgcccataagtgtctctggctctttccaaagaggtgaaatcttctggagcacaaagttcaggtcagaaagtggccttggaaggggtcccagtgtggatggagaaggccgtattgtgggggaaaggcagggggctccctcagcctctgctcatcccagagacatgcctggtgcaccccaccccatcgacaccaggcctcctcataggtgagcccccagtccaaaaagcctgagaaaatgcttccaactcaactgcctcacggccctggcctccacacgagcagctccagctgaactggcggggaccacctagacactggggaaggtaacaggggcagggacagcagagcacttgagcagccgggggctgaatcgctggccctgagctgccgggacacrccacctcccccagcacacagctctgcgcttctaccttctccagagcagaggtggggtgagtcatcccacccccgctcctctgctctccttttagagccccagtctccctacacaacaggctcagaggctgcccacagcccttgaggaggcagaaatcagcagtgtcagttgc

SEQ ID NO: 19200 - DNA, 565 bp, Homo sapiens
agccacaatatcataaaggaattgygttcagaacaagaggatgccttgggaatgagaacaggctctttgcccttgggagcactgtccctagggtctatgggtccttccttctggaggacagggccaaatttctgtctgaatgtttcctttgtaaagtaagtcttcatagatgacctcttggaagaagactcaatgaaacattgcaatattttctctgagtcccaggtcgcctgattgtgaacacaggataatttactagaaattttgtgttattaaatgcgatttttttgttctatgttcatgagagattttggtctgtagttttattttcttgtaatgtgtttgtctggtcttggccacatagctgagttgggaagtagttcctccttttcaattttctggagagttcatgtagaattggcattattttaactttatatatttggtagaattcaccattggagttaaataggtccgaggtttttctctgtgagagaattttaactgcaaggcaattttaataatagatataggactattctggttatccattccttctttagtg

SEQ ID NO: 19201 - DNA, 519 bp, Homo sapiens
gtcttaggtgactcaagtaataaaaccctgtaaaaatctctctggacaacagtccttcagccagtcttttcctgattatacataccctcctcttctatttaaaatctgcaactcaaggagcatgaaaatttaaggtaatttaatatagaggttatcagcatatagaaatctacaacttgaattatattattgggtaacagtgttcttcgtaatcaagacaagtttagcctaataaacacactccgaaaagcagataattggatttggaatataatacatttgataaaattgatacaaattatatttacaactattaaaatcataaatatcttggtgtctaagatactaatcttcaattatgtacatatcatttcctgaaaatggcagatgtttgttgaattcataatgttttattctccaattacattatttacttttayttatctcttcttgatgagtcatgtatttttcatttagttacctttatgcctatagttagaattctgtgtaattaaatta

SEQ ID NO: 19202 - DNA, 506 bp, Homo sapiens
acccatggccttgagacaggctatgagcatcaaaatatctctactggctgggtccaggtatgagarttattgttgcacatgtgtgattaacccaggtatatgtcacaatttcacctgtgagcagggacaaggcaggagagtcacatcacctgagattatacagtataatctcatttgtaggctgggcctagtcagaagagtcatataacctgggtacagcctcaaacagtatgtcaccaagccccccacagacaagaagaaaaagaggaaagtcactctacctgggtgctgggctctgcagtatgtaataatccccttttggcagagtctagaaaatgaaagagagtcacatcacctaggttttgcagtcagcgatatgtcacaatttctttggtgagcaggacccaggcaggagaggagagtcacatgacctagatgttaagtcatgatatttcacaatgtcgcaatgtcctctggggacagggcagaggcagaagagacaaatt

SEQ ID NO: 19203 - DNA, 576 bp, Homo sapiens
tcctggtttcaacagcttcaacatttacctatttgctcagtccaataatacacacaaacgagtttcatgattcctatacccatactattgccaataacaaacttgataagttatttttgccttctgaatacaccacactgagcatatagagtccagcaagtactatattcaaaagtattcaaattgctttttacatttgggcctgtttttattccatgtggggttttctccatatttgtttatttaattttattttatgaatgctaacagcatggctacaatagcagaatacacattcttttatgtgcacatgagatagtcatgaagatagaccrtgaagatagaccatctgctgtgctataaaatcagccttagcaagagtaaaagaattgaaatcataccatatatgtcctcatcacagtggaattaaattagaattcaataacatatctgaaaaattcctaaatatttgtaaatttaaaaatgtttctaaatactccttaagtcaaagcagaaattacaaaggaaattagaatatatttagaactgaataaaaatgaaagcataacatgtcaa

SEQ ID NO: 19204 - DNA, 576 bp, Homo sapiens
tcctggtttcaacagcttcaacatttacctatttgctcagtccaataatacacacaaacgagtttcatgattcctatacccatactattgccaataacaaacttgataagttatttttgccttctgaatacaccacactgagcatatagagtccagcaagtactatattcaaaagtattcaaattgctttttacatttgggcctgtttttattccatgtggggttttctccatatttgtttatttaattttattttatgaatgctaacagcatggctacaatagcagaatacacattcttttatgtgcacatgagatagtcatgaagatagaccgtgaagatagaccatctgctgtgctataaaatmagccttagcaagagtaaaagaattgaaatcataccatatatgtcctcatcacagtggaattaaattagaattcaataacatatctgaaaaattcctaaatatttgtaaatttaaaaatgtttctaaatactccttaagtcaaagcagaaattacaaaggaaattagaatatatttagaactgaataaaaatgaaagcataacatgtcaa

SEQ ID NO: 19205 - DNA, 676 bp, Homo sapiens
tgtcatttttaattattctgagagcccttttattggtacacttagccttttatatttatttcacattaaggctgagtcttaattccgtcattttgttttgtgggggttctcctgtgtacctagtatgaagttattattttgtgactacggttgtgtttttcttttttatattatccacccaactgtgtggaaggtagatatcttacttttaccctctttagtgatggccgtaaaattttttgtgagattatctctaacagctaatatcagttacaaatgattaataccttttttatggaagataagaaattaaatgttatctctttctcttttctgttctttgttaattttaatgtaaggtggttataaatatgttcctcccattttttacaacttttattattttcaatttaaaaaatatcagttttataataatattagaaacacttatcttgtctctatatctgtctttagtgcttactctcagctatacttaactcgttttctgtttcttatttttaattaatatatatttgttctgacataaagtttcccaaatttcattttatttttcaggaagtytacttcaagcattaatcctcttagtattaaatctgagaatatctttcacacatattcatacagatctgagaatatcttaacacacataaacaaa

SEQ ID NO: 19206 - DNA, 582 bp, Homo sapiens
tgccattaagaaagtatttcttttgcctagtctcttgggagtaggcagaaaagcaatcatacgtactcatgtyggtgactttaataatattttggcttccatggggaaaatatatttttttacttttgagtaatgtgatcagtagcaattctgtacttcagatatctaagatgaaagtctgagtcttatgcactgtaatagaaaaagcttagaaaatctatctcatactctcaaacagacaatccacagataatcacagttcactgtcagaaatattgctttaacccacattttccatataataactcagtactattgaaaatgatactctgtagcagtcaggtctcgaatgattgtggtcagctacagaaaggaaaatgtccaaatgtattgttaaaaacataaagtaaggctttggaaacttaatggtaaatgattttaaaaaatgtataaaatatcactacaaatcaagtttagctataatgaacagtgtgcatataatggctaaggtatttttaaaaatatttttagggtagtttgtttttcatcagagaagaaaaatgacggatatacaagtgagct

SEQ ID NO: 19207 - DNA, 582 bp, Homo sapiens
tgccattaagaaagtatttcttttgcctagtctcttgggagtaggcagaaaagcaatcatacgtactcatgttggtgactttaataatattttggcttccatggggaaaatatatttttttacttttgagtaatgtgatcagtagcaattctgtacttcagatatctaagatgaaagtctgagtcttatgcactgtaatagaaaaagcttagaaaatctatctcatactctcaaacagacaatccacagataatcacagttcactgtcagaaatattgctttaacccacattttccatataataactcagtactattgaaaatgatactctgtagcagtcaggtctcgaatgattgtggtcagctacagaaaggaaaatgtccaaatgtattgttaaaaacataaagtaaggctttggaaacttaatggtaaatgattttaaaaaatgtataaaatatcaytacaaatcaagtttagctataatgaacagtgtgcatataatggctaaggtatttttaaaaatatttttagggtagtttgtttttcatcagagaagaaaaatgacggatatacaagtgagct

SEQ ID NO: 19208 - DNA, 557 bp, Homo sapiens
cttgctcaaagttgacaccctggagtaagactcagcaaaaggaaggagagagtagcaccagatttaaaattatctctttgtgatactttgaagctcatgggaccacggctgctcaacttcctgcagctccttctcccttcttcagtctggaagagcaggatgaggactggggaggtgaaggctgctatgaaacgagacccaatatccacaagtccaaagaccagcccactcttctccttgcctttctgatcaggggaagaatggatggctgctttcttttttctagatgtagcctcctttgattttattattatgaaatgtatgcaaatgytgataggctgttttacactggcatgaatgcacattggggaagtgtttatgtgtacagcagtgggggagtacattctagaaacctttgattttggaagaagaaaatgggctgtattccatcctggtcaaaacacttcatcaaaagtgcatccatgcattgaaaaggctgagccttccgcctggcaatgctctggattttgatggagttgtttttaatgcacctttct

SEQ ID NO: 19209 - DNA, 352 bp, Homo sapiens
ggtttctttgcatttctctttaaaattacaacttctgctccctgatattgaataycacatattctgtttatgttttctccatagcagtcatctatttttttattttacttttttgtgtattacccatctatttcaactggattgcaaattctaggatagcagaaattagttttcctttggtccattactgaatctccagtatctagaacaatgcctggcacaaactagtgttcaatacaagtttgtgtaatgaatatatacatttattaatttacacatttaagatatctccagttaagatataaatgaagccaagagtcagttagtctagtatatcccactcttaaatttt

SEQ ID NO: 19210 - DNA, 607 bp, Homo sapiens
gatcttggcaccaagctctactttgaggtttagtacgttctcatgtttagaaaactgtattttgtctattccttggaggggtctggccacaraacatgattgattgcttgaggtgactgtcctgcttgcttatctgggatagtcccagcataattaccagttctctctcaaaagtgtcctggtctgagcaataaattatgtgttcactatgcttattaccaaagagcagattcggacagactgtgccccgggctgctctcagacaggccctgagatgtctggtctctgctctgtgtggccttgttctctctagctggaactcaactgcatcagggttataaggcctcatggccctcttgaagacttccgtgggcggtcagcattaatcagaggccaagctgagcgtcacagcatccccaaaactggttctttctctctttgaatcccctgaaaagaacaatattgattcaacctgatgaatatttgtgttttcaagtcaacaacattttgagtatctgctatgtgcaaggtgctgagctggggttggagagtggagtcttgaaacaaagatgaatgaggcacgtgactgagtttggggagggttgtg

SEQ ID NO: 19211 - DNA, 607 bp, Homo sapiens
gatcttggcaccaagctctactttgaggtttagtacgttctcatgtttagaaaactgtattttgtctattccttggaggggtctggccacaaaacatgattgattgcttgaggtgactgtcctgcttgcttatctgggatagtcccagcataattaccagttctctctcaaaagtgtcctggtctgagcaataaattatgtgttcactatgcttattaccaaagagcagattcggacagactgtgccccgggctgctctcagacaggccctgagatgtctggtctctgctctgtgtggccttgttctctctagctggaactcaactgcatcagggttataaggcctcatggccytcttgaagacttccgtgggcggtcagcattaatcagaggccaagctgagcgtcacagcatccccaaaactggttctttctctctttgaatcccctgaaaagaacaatattgattcaacctgatgaatatttgtgttttcaagtcaacaacattttgagtatctgctatgtgcaaggtgctgagctggggttggagagtggagtcttgaaacaaagatgaatgaggcacgtgactgagtttggggagggttgtg

SEQ ID NO: 19212 - DNA, 607 bp, Homo sapiens
gatcttggcaccaagctctactttgaggtttagtacgttctcatgtttagaaaactgtattttgtctattccttggaggggtctggccacaaaacatgattgattgcttgaggtgactgtcctgcttgcttatctgggatagtcccagcataattaccagttctctctcaaaagtgtcctggtctgagcaataaattatgtgttcactatgcttattaccaaagagcagattcggacagactgtgccccgggctgctctcagacaggccctgagatgtctggtctctgctctgtgtggccttgttctctctagctggaactcaactgcatcagggttataaggcctcatggccctcttgaagacttccgtgggcggtcagcattaatcagaggccaagctgagcgtcacagcatccccaaaactggttctttctctctttgaatcccctgaaaagaacaatattgattcaacctgatgaatatttgtgttttcaagtcaacaacattttgagtatctgckatgtgcaaggtgctgagctggggttggagagtggagtcttgaaacaaagatgaatgaggcacgtgactgagtttggggagggttgtg

SEQ ID NO: 19213 - DNA, 547 bp, Homo sapiens
ccctctctcttgcttcttctctcatgggatatgccagctccccctctgctttccactgtgattataaacttcctgaggccctcaccagaagttgatgctggcaccacacttcttgtactgtctatagaatcacgagccaaaataaacctrttttcataaattacccagcttctagtattcctttatagcaatgcagaacagactaacacagtaatggttgcacaacttctgtgaaccactgatttgtacattttaaattggtgagttgtatggtatgtggattagatctcaataaagctgttacgtatatttaagagaaacagccagtatctttatgcaaataactcagttagttgtgcaagttgataattcctaatatgaaaacctgaaatctgaaatgctccaaaatctgaaactttttgagcgtcaacatgacacttggaggaaatgctcactgaagcatttcggatttctgagggacgctcaactggcatgttacctgcaaatattccaaaatctgaagaaatctgaaatccaagacacttct

SEQ ID NO: 19214 - DNA, 1275 bp, Homo sapiens
tttttgagatggagtttcgctcttcttgcccaggctgaagtgcaatggcacaatcttggctcaccacaacctccgcctcctgggctcaagcgattcccctgcctcagcctcctgagtagctgggattacaggcatgcaccaccacacccggctatttttagtagagatgtagtttctccatgttggtcaggctggtcgcgaactcccaacctcagttgatccgccggcctcagcctcccaaagtgctgggattacaggcgtgagccgtgcgccgggccaatgctaggttttcaatcagcgtttaagaatgtgtttcttttgtttgcttttggagttgactcagcatggatatgaatagcagatggatatgaatagcaggagtacgggggcaaggactgggttcttaaatcagcataataaagaataaacaggcagggtgccatggctcaggcctataatcctagtactttgagaggctgaggtgggaggatcccttgagcccaagagttcaagaccagcctgggcaacacagtgagaccctgtccctaaggaaaaaaaaaattagctgggcttggtgggtgcacacctgtaatcccagttactcaggtggcggaggtgggggcattgcttgcgcccaggttgaggctgcagtaagccactgcacttcagcctggactacagagcaagaccctatccttcagcctggactacagagcaagaccctatctaaaaaaaaaaaaaaaaaaaagagagagaataaacatgattcttgccctcaggaaaaacttttgtgttgactaaagggaaaggaatctagaaagagctacatttaaataaacgttttgtgtttaaaaaatactttcatttttaagggtggtgcaagctagaaaggagagaggatctacagttaacagaacataaatgtgagttatwcaagtgtccatagcacaaattcatttataggcttgctccttctcaccaaaactttatgtttgcaaagatgttaaagacaaggtaatggaaatggaggcaaggagggcattgaggacattcaggcttaacaagggtggagaaacggagaaggttaaggaggtgcaagcacggaagaacactccaacctttccttgcttagattattctccatatattctttcttttttttttttgggacggaatttcactcttgtcgcccaggctggagtacatggcgcgatctccattcactgcaagctccgcctcccacgttcacgccatcctcctgcctcagcctcccga

SEQ ID NO: 19215 - DNA, 692 bp, Homo sapiens
aaaagaatactgtaacattaaaagacatttgatatcttatatccctccatcctaacttaagatatcttttttggctccaaatttatccctctttttgaaaatagtctgtaccacacacctcttaaacaccctctgagatccttccagccactgctgtggcagtgagaactgtgaatgttcccagcagctctggcaggtgtaaactgacagtatcttgcctcaggcctgcagctgccatctctcaaacccagcccagggcatctcttctgacactgcagcttagaaagcactggaacccattcagtgccaagccagtgcattctggaagctcggctcaggcaggtgtgcagagccttttacctatggggaaggggccagtgggtaagtgccctcccctttaccccaggggcrggtcctgagacacttcttacagtcctcagacagttccctccaaatcaagcagccaggaatgtggccaccccagtgacacgcactcaagtgcttctgcctccctccctgcgtcagttcccggagcctcaattatgctccctgggctcacaccccccagtagtgtattcacacacaagcttttgtctcaagctctgttttctgggcaactctcacagatccaaacattttccttgcctaaactctcacccaaatatctttgcttctaaatcagaaaatgggtg

SEQ ID NO: 19216 - DNA, 847 bp, Homo sapiens
actgagctagaccacttggctccctggcttcagccccctttctaggggaggaaacggttctgtctcactggcactccaggcaccactggagtatgaaaaaaaactcctgcagctagcttggtgtctgcccaaatggctgcccagttttgtgcttgaaacccagggccctcgtggtgtagtcaccygagggaatctcctggtctgcgggttgcgaagatcatgggaaaaacacagtatctgggctggagtgcaccgttcctcagggcacagtctctcacagcttcccttggataggggagggagttccctgacaccttgcgcttcctgggtgaagtgacgccccaccctgcttcgtcttgccctccgaaccagtcccaatctgatgagctgggtacctcagttggaaatgcagaaatcacccagcttctgtgttgatctcgctgggagctgcagactggagctcttcctgtttggccttcttgccagccacctgcaccttgacaagatattttaaacagcaagagtatgttttttcttgtctaagagaacacacatgtacacagagcacaaagaacatacacacacacacatgcagatggacgactttctaaagcacccaaacttgggattgtcatcataattaagaagaggacatgttcagggtgaggaagcacacaggagccattcatgtgcagtgtgtcatgcaagacggattcctccctgacctgtttttaaaaatctgttccaacgagcccagcaggagcagggggcaggcccagctgcccgcaagtcagggcaaccaatgccatgtgcttgcattggaagaaataaagcaaacccaagaacc

SEQ ID NO: 19217 - DNA, 551 bp, Homo sapiens
atatactgcccaaatttcaacatggtttagaatcatagaggtgtttactacaagggataccagagatcatcatgttcagtgattcccattcttggttccatrtgaaaatcacccgaggcactttttaaaagtgctgatgcatagatcctactcccagagattcttatttaactgaccttaggatgcagtatttaaaagttttaatagccttttaaaaaagtttttcaggtaattctattgcacccccttctctccttgcacaggcctggcacataactagttttcaatgaatatgttataaatgcatgactgaatagagataaatatgagggaacacattatttccacatatggaattttatagagatggaataaaacaaagagccagaaacaaccattacattttttgaattttgaaaatttctgaaattccagaaacttgccattttcttcctaaaatgtcaaatctcctcatcatcactctaagtctctttttcccagaatcctcaactaaaaccaccaggcaggtgtaagatagagacaaagaggga

SEQ ID NO: 19218 - DNA, 551 bp, Homo sapiens
atatactgcccaaatttcaacatggtttagaatcatagaggtgtttactacaagggataccagagatcatcatgttcagtgattcccattcttggttccatatgaaaatcacccgaggcactttttaaaagtgctgatgcatagatcctactcccagagattcttatttaactgaccttaggatgcagtatttaaaagttttaatagccttttaaaaaagtttttcaggtaattctattgcacccccttctctccttgcacaggcctggcacataactagttttcaatgaatatgttataaatgcatgactgaatagagataaatatgagggaacacattatttccacatatggaattttatagagatggaataaaacaaagagccagaaacaaccattacattttttgaattttgaaaatttctgaaattccagaaacttgccattttcttcctaaaatgtcaaatctcctcatcatcactctaagtctctttttcccagaatcctcaactaaaaccaccaggcaggtgtaagatasagacaaagaggga

SEQ ID NO: 19219 - DNA, 657 bp, Homo sapiens
tacatattttaggaaatcctgatttgatccatgagggccagaaatgaaaacattctgaaacaaaattaagataagaacatagaatgagacgatgaaaactgagatcatggtagataacaggaactaacattttcccaagttttcaagcccaggtcaactgygtgaaactagtctacagcatacatcctgagaaagccccggtaacaggtcctcgtattgtacactttatattttcaaaaggcccaactaaataaaacatttggagaagatccagaatggtccaggaactactgtcactgaaggatcgaatggatttttgccagattgttcactttcgtcaacgtgtgttcatggtcatctatggataaagaatgttgcctaaagggcagtgcatagctgcttccagattgtagatttattagctaataaaatgcttcattgaaattttatatccattttcttcataatatatttcaattcacagcatctttagtcacaggtgtgaatggcctaggcaaataggtcagatatagcaagaatcctaaagctatagtcagcctgtggtactgaagacctagaaagaatactggagcttagtgaataaacaaagagtgaaggaaggtgagtgaagagaggtagacagggactaaaatccca

SEQ ID NO: 19220 - DNA, 560 bp, Homo sapiens
ggtctttgtaaggaaaaaaatctagagaaattaactagtgtttgaaaaggcaggcagtaagcaccaagtaacagaaggtgctcccttcagggacttggtgtrctcacaaaaagaaagcatccttaaagcaaggaatcatggagatgacctcatcatgcatttcttagagtggatgggactgtccatctctcctgggttccagttttaattaaaggcagcttgcagtgtaacatcaccctcacagcctgctaaagcttaagactctgagattacatacaaggcacgtgagtaggggaatgggggggaaatagagtaaataggtgatttctggtacaaatggggaaagaatgagtttagggatgactcattttttcctcctcaatactatcatattcacccagaaatagcaaatttcagcattcaactcatctagactgcttgttgaaaccccaaagtgacaattatttgaaagtcatgccccttcaacatgatttttgtttaatgtgggataaggtgaagcacaatccacctcaagaccaaatacactcagaagcaagcca

SEQ ID NO: 19221 - DNA, 560 bp, Homo sapiens
ggtctttgtaaggaaaaaaatctagagaaattaactagtgtttgaaaaggcaggcagtaagcaccaagtaacagaaggtgctcccttcagggacttggtgtgctcacaaaaagaaagcatccttaaagcaaggaatcatggagatgacctcatcaygcatttcttagagtggatgggactgtccatctctcctgggttccagttttaattaaaggcagcttgcagtgtaacatcaccctcacagcctgctaaagcttaagactctgagattacatacaaggcacgtgagtaggggaatgggggggaaatagagtaaataggtgatttctggtacaaatggggaaagaatgagtttagggatgactcattttttcctcctcaatactatcatattcacccagaaatagcaaatttcagcattcaactcatctagactgcttgttgaaaccccaaagtgacaattatttgaaagtcatgccccttcaacatgatttttgtttaatgtgggataaggtgaagcacaatccacctcaagaccaaatacactcagaagcaagcca

SEQ ID NO: 19222 - DNA, 560 bp, Homo sapiens
ggtctttgtaaggaaaaaaatctagagaaattaactagtgtttgaaaaggcaggcagtaagcaccaagtaacagaaggtgctcccttcagggacttggtgtgctcacaaaaagaaagcatccttaaagcaaggaatcatggagatgacctcatcatgcatttcttagagtggatgggactgtccatctctcctgggttccagttttaattaaaggcagcttgcagtgtaacatcaccctcacagcctgctaaagcttaagactctgagattacatacaaggcacgtgagtaggrgaatgggggggaaatagagtaaataggtgatttctggtacaaatggggaaagaatgagtttagggatgactcattttttcctcctcaatactatcatattcacccagaaatagcaaatttcagcattcaactcatctagactgcttgttgaaaccccaaagtgacaattatttgaaagtcatgccccttcaacatgatttttgtttaatgtgggataaggtgaagcacaatccacctcaagaccaaatacactcagaagcaagcca

SEQ ID NO: 19223 - DNA, 624 bp, Homo sapiens
tgaagacacaaatacatgaggcaaggctggaacacataaggcaggaaccacacctgttttacctgtattctctttctagtgactaacacaatgtctgacatagaaacagtactaaatgaatatttgttggaaaaattagagaactaaaacttgtcatgtacttattggtttgactttttggaagctcagagttcaaaaggactgctcatttcttgcagttgtacgagacactgtgatattgaatgtgcatgcatacacacttccttctatccaagtgaattagtggagaaaaagagtaggggacaaggcttgggtgaaaatatagacttaattactgagtagaagcaatgggaaattaacacactctattataaacaccccacgtttctcatctctaagatgggtataatttcacaatgaggtaatataaaggaattaggtatcacaaatgctcagtattttgggctctcctaacaattgaactatctgggaagtgtaaagttcatctattgattttcttctttacaatagtaaatatacratagtaaaagtgaaggtattttcccttttgagatttgttctctccaccatagttctcttcacagtagactattaaatgcactg

SEQ ID NO: 19224 - DNA, 817 bp, Homo sapiens
agtttcagctttctacatacggctagccagttttcccagcaccatttattaaatagggaatcctttccccattgcttgtttttctcaggtttgtcaaagatcagatagctgtagatatgcggcgttatttctgagggctctgttctgttccattgatctatatctctgttttggtaccagtaccatgctgttttrgttactgtagccttgtagtatagtttgaagtcaggtagtgtgatgcctccacctttgttcctttggcttaggatggacttggtgatgcgagctcttttttggttccatatgaactttaaagtagttttttccaattctgtgaagaaaggcgttggtagcttgatggggatggcattgaatcttaagactgaattcatttttatcttcttgaatatcctttccaagatttatttttcattgtaatatgaattataattttaccaggaaggaaataatataaaaatgataatttactattcaatttattgttacatgtattccactagtgcagtacttgtttttaaactgtatgccttcattctactcaaatgcagatatttaaatagaagaaatgttaaaataacctttcatatcatttcatatttttaaagtattaaaaagaattcaaagcatttttacctagatttgaatattaatgcttgcagctttaacagaaaaactgtagtttccatagatcctataattaaactggggacttgaggtcactgttttacataatacaaaggctttctttaccaaacttttttcataatagacatatagggataatgtgggttgaaaa

SEQ ID NO: 19225 - DNA, 817 bp, Homo sapiens
agtttcagctttctacatacggctagccagttttcccagcaccatttattaaatagggaatcctttccccattgcttgtttttctcaggtttgtcaaagatcagatagctgtagatatgcggcgttatttctgagggctctgttctgttccattgatctatatctctgttttggtaccagtaccatgctgttttggttactgtagccttgtagtatagtttgaagtcaggtagtgtgatgcctccacctttgttcctttggcttaggatkgacttggtgatgcgagctcttttttggttccatatgaactttaaagtagttttttccaattctgtgaagaaaggcgttggtagcttgatggggatggcattgaatcttaagactgaattcatttttatcttcttgaatatcctttccaagatttatttttcattgtaatatgaattataattttaccaggaaggaaataatataaaaatgataatttactattcaatttattgttacatgtattccactagtgcagtacttgtttttaaactgtatgccttcattctactcaaatgcagatatttaaatagaagaaatgttaaaataacctttcatatcatttcatatttttaaagtattaaaaagaattcaaagcatttttacctagatttgaatattaatgcttgcagctttaacagaaaaactgtagtttccatagatcctataattaaactggggacttgaggtcactgttttacataatacaaaggctttctttaccaaacttttttcataatagacatatagggataatgtgggttgaaaa

SEQ ID NO: 19226 - DNA, 817 bp, Homo sapiens
agtttcagctttctacatacggctagccagttttcccagcaccatttattaaatagggaatcctttccccattgcttgtttttctcaggtttgtcaaagatcagatagctgtagatatgcggcgttatttctgagggctctgttctgttccattgatctatatctctgttttggtaccagtaccatgctgttttggttactgtagccttgtagtatagtttgaagtcaggtagtgtgatgcctccacctttgttcctttggcttaggatggacttggtgatgcgagctcttttttggttccatatgaactttaaagtagttttttccaattctgtgaagaaaggcrttggtagcttgatggggatggcattgaatcttaagactgaattcatttttatcttcttgaatatcctttccaagatttatttttcattgtaatatgaattataattttaccaggaaggaaataatataaaaatgataatttactattcaatttattgttacatgtattccactagtgcagtacttgtttttaaactgtatgccttcattctactcaaatgcagatatttaaatagaagaaatgttaaaataacctttcatatcatttcatatttttaaagtattaaaaagaattcaaagcatttttacctagatttgaatattaatgcttgcagctttaacagaaaaactgtagtttccatagatcctataattaaactggggacttgaggtcactgttttacataatacaaaggctttctttaccaaacttttttcataatagacatatagggataatgtgggttgaaaa

SEQ ID NO: 19227 - DNA, 722 bp, Homo sapiens
aagtgatcttccctcctcagcccctcaagtggctaggaacacaggtgtgtgccaccatgctcagctaattttttttttttttttgtattttttgtagtgacagcctttcaccatgttgccccagctggttgcaaactcctgggctcaagtgatccacttgcctgagccccacaaagtgctgggattacagtccccaacggtgatttttataattttacgtaaagtatgggcccaagagtacaaaatttgacctctattataattagatgcaagtttggcagaacattatgtcctctagatgtatccttttaattttagactataccaccttattttgtgataataaaatcaatgacagcaataatagtgaacatttaatgagtacttactctgtatcaagattgctcacgttatgttcattgtcccatacaatccactcaacagctccccgaggtcagcattattattagctccattttatagattggaaattgagactcagacaggtgaagtcttttckcaaagttacatagctagtaagtgataccacttgtcaagaactgtgaaagcactgagattttattatgtttgtaaactaaaacattagcctgctacacgttcatggatgctggcaggagacatgaaacttcagagacaaagtacagtttattactaagatcaataacaatagccagagtatctgtaattttgtttcaggatcc

SEQ ID NO: 19228 - DNA, 722 bp, Homo sapiens
aagtgatcttccctcctcagcccctcaagtggctaggaacacaggtgtgtgccaccatgctcagctaattttttttttttttttgtattttttgtagtgacagcctttcaccatgttgccccagctggttgcaaactcctgggctcaagtgatccacttgcctgagccccacaaagtgctgggattacagtccccaacggtgatttttataattttacgtaaagtatgggcccaagagtacaaaatttgacctctattataattagatgcaagtttggcagaacattatgtcctctagatgtatccttttaattttagactataccaccttattttgtgataataaaatcaatgacagcaataatagtgaacatttaatgagtacttactctgtatcaagattgctcacgttatgttcattgtcccatacaatccactcaacagctccccgaggtcagcattattattagctccattttatagattggaaattgagactcagacaggtgaagtcttttctcaaagttacatagctagtaagtgataccacttgtcaagaactgtgaaagcactgagattttattatgtttgtaaactaaaacattagcctgctacacrttcatggatgctggcaggagacatgaaacttcagagacaaagtacagtttattactaagatcaataacaatagccagagtatctgtaattttgtttcaggatcc

SEQ ID NO: 19229 - DNA, 1152 bp, Homo sapiens
ttttttccatagttaagcatcaatctgaatcatttcacgtgctactgaagygtgtgcttagctagagttcctattaagatatttgtatctgtggcttccaagaaactactgaacatgttttgttgtttttggtttggcaattagggcaaagaagaaactacataaggcagagtaaggatgaaaggttggagatacaaaaaaggagggaatggtagtcactgctgaggaaaaccaatactgaaaacccattcgtgcatctggagaaggtgacaggactatttacttatgtatttatttatttttgagatggggtcttgctctgtcacctaggctggagagcagtggcacatacaatcacatttcactgcagcctcaacctcctaggctcaagagagcccctgactcatcctcctgagtacttgggtctacaagcgtgcaccaccatgcctggctcattttttattttcttttttcaagacacaagatctcactatgttccccaagctggtcttgaacgcctggattcaagcaatcttcccacttcaggctctcaaagtgttgggattacagctgtgagccaccacacttggccagacagggccatttctaatagagtacagtacccaagcaaatatctctgtgtgtcctctcccaccatgatatttaaacacaggtgagctttgttaaaataaacataaaggacaagcttgatcaaaaggtacgatgtaactatgaggtgtaatagtcagtaaagtataaaagtgagcaattaagacaatttttcagtctcaggttcttaagtggatgtgaggagaagcatctgccattgacttggtgatacccagaatatggtataggagggctttagatgtgtctattacaagtacaggtggagatgccacaggcttctctcctcagggactacagactaggttaagggtcagtgtataccccagtgagcctttcttcctacattccacttgcactgtgggcgaaaggagcaagctttaaactcgcagaggactgattcgtaactcatctttcattttcttttgagccacagaatgtacatggaaataggaaattgatatatataacaattcatttaagtcatgataaaggctttgtaggattttacttcctaagtttttt

SEQ ID NO: 19230 - DNA, 576 bp, Homo sapiens
tttttcttatagaaatgcaatccaatgtttgtgattctgaacatgtagggacaaaggttaaaaaatggctatgaataaaagcaataaaaccattgcattttaatagacactaccaggcacaactcattgtgaccatcttcaccctgtaatgagcatgggccaaagtggccatattttatgttatgtgatcccattctgattctccccaaccaccacctttgatcacaagcaaccaatcaakaatatgcacctgacccaagagtaacaaatatatgccctatgcattaactaatgatccaagctaatcaaattatttctttggagattttgaatcaagaagtctccaattgttcaaaatgggagaaaggtggaagaatattcttataaaaatatttgaatagcaaaaaccatttctattaatagctttagtctccatgaatctttcatctatttaaactcttggttatacatttcctatatctaaaaatataataaaatttgtattactgttgtttgagaagtagtattctagcaattaaacaagtctaaagaaaacatggagaaggcataaaaatg

SEQ ID NO: 19231 - DNA, 560 bp, Homo sapiens
catctattaacatacagaggtgttgagtctctcaatcttgtcttttacagctcccttgttctatatttcattcacctctgcattattataaaatgattaagatattgtcatttgtttcgaataatttcatgttttgattttttatattcagaattcgaatacatcagaatttatatttttgtgtgttgtataaggtagggctctaatttttcctcccaaaataaacaggctactgtccccaaaccacttaaagaaagccacccctcctatacttatttgaaatgccacctttaccatatactaaatcgacatgttctagagtagaattaggaaaatcccaayattcaggtctaatccccttggacacaaaatttattgctctttaagaatatatgaatgtaaatatatataaacaatatgtaaatatataaaagaacatcacagaagcttaaatacaaaagcttgtaaataaagtagtacataacatttactgcttagtaagtctattacttacaagatgtagccacctacagatgtgctaatgaacatttgtggtgagg

SEQ ID NO: 19232 - DNA, 541 bp, Homo sapiens
tcaaaattcatgtctttattgtatgcaaagaacattcattccattatgacagtcccaaaggtcttaactcatcccagcatcaattctaaagtgtaagtctcatctaaattagatataggtgagaaacagcaccctactcctggtaccaaaaattgtattagtctgtgtgtgtatgtgtgtgtatagatagatacctagattagagatagagacagatgatagatagatgatgatatatatagacagagagatagatgatagatagatagatagatagacagattgccagacaagatgtggaagtggaagactgatactgaaattctcaaccctgtgtaggcctaggctaatgtgtgtgtttgtttctcagtttttaactaaaaaaaattttaaagtaaaaaacaaaaatacttaaaatagaaaaaaactcataaaacaaagacatgaagaaaatatttttgtacagctgtacaatgtgtttgtgttttaagctaaaggttattatgagtccaaaggttttaaaamataagtttataaaata

SEQ ID NO: 19233 - DNA, 1226 bp, Homo sapiens
aaattaatagaatatggattagcctgagtgctattaaacttgttcaacttatttaaaacaccaaaacacagttgtttaaacaacacagaagttttttccctttcacatgacaatccagggattagcaaagcagtttagggctcgtaggaaagctctgtcatatttaacaaatggcttcctacttatatgtcccagatggctggtccacttaccatcttccaaccagtaaatagagggaaaaggaacaaagagcattttaagaatgataactgtaagtggctcacattgtccctcacatctcgctgtccagatcttagttatatggcctcactgatacacaagggaagtgatgaaatgtggtcatcagtggaacagccacatgctcagataaagctttaytacaataggagaagggaaaaaatgggtattgacagagaactagtagtttcttgtaagctgatctgcagaatgtgtagaacataagaagtaataagtaggtaagaaaattaggtgagaaaatcttttagcatgcaggacaaaggctcataaaaatttaaatgaatgaatgaaaaataagagacacaaaagataaatcccagcattccaaaatgtttcctttttttctttttttctttttaggcgaagtctcactgtcacccaggctagagtgcagtggtgtgatctcagctcactgcagcctccgcctcctgggttcaagtgattctcatgcttcccctcctgagcagttgggaccacaggcacgtgccactatgcctagctaattcttgtatttttagtagagacagggtttcaccaagttgccgagcttggtctccaactcctggcctcgagtgatctgcccacttcagcctcccaaagtactgggattacaagcatgtgcctcagcatctggcctcatcccaaaatatttctgagataagttccagataaaataaggaaagttgattacagaaattcataaaaacataatagaggtatatttcccacagcaagacatggactctcggaaagggtacatcaccaagtctcaagcatattacaataagattaccaaataccaaggataaagtgaaaatcctgacagcttctagaaagaggaaacaaagaaaggagggggcagaaaatgaagaaaagcctagtaaggttcttgacttattcatggaaacgatatataggctgattagatatgcacttggtataaaaaa

SEQ ID NO: 19234 - DNA, 525 bp, Homo sapiens
cttcagtctgtggctgaaagcctgagagtccctggcaaaccactggtgtaagtccaagggtccaaaagctgaagaatgtggagtctgatgttcgagggcagraaacatccaccacgggaggaagatgaaggccgggagactcagcgagtctgctctttccattgtcttctgcctgctttattctagccacgttggcagctgattagctggtgcccacccagattgagggtgggtcttcttctcccagtccactgactcaaatgttaatttcctttggcagcaccctcatagacgcacccaggaacaataatttgcatccttcaatccaatcaagttgacactggatattagccatcacaatactcttaacatgaaaatctttcatgtttaatctttcatgttttcatgtttaatctttttgaaattaaaagccaacctctttgattttacctcataatgttcaatagattcccaaaactaaagaagaattgcttcttcataaaagatgcgttgctttttaaaaaa

SEQ ID NO: 19235 - DNA, 539 bp, Homo sapiens
tatttattatcttcaagcgccaggtattgtattaggtgccatctgtctagtaactcactgaaactgacaacaaccctatgaaaaaggcactgctgtttttatgatattacagataaggaaacttggtgataaagtttcagaaactagtaaccggccaaggttacatagctaaaaggtgagggaaccaggatctaccccagggcgtcrgactcctgaacccaactctctttactgtgaggttgtgctgtgttgagcagcatggagggctgaaggcagggaaatgttagcctggatgtatttctctctggatatatttcctataaattacatcctccccctcttgtatatgagcatctggtaagaagacactgaataaattagcttttttttttttaagccttataaattccaagtgttagtataactcatatacaccctcttaacatcattatcatcaacctggaaaaaatggtgggtggttagtattctaaggtcatgacaacagtttggagtacagggactttcccaagaattctact

SEQ ID NO: 19236 - DNA, 868 bp, Homo sapiens
aataaaatcatrtcctttgcagcaatatggatgcagttggaggccatcatcctaagctaattaactcaggaacagaaaactaaatgccacacattctcacttaaatatcctttaaacattgagcacgcacagacataaagatgggaataataaacactgtgaactacaagagtggggagggagggaagagggcatgggttgaaaactacctattggtactgtgcatactacctgagtgccaggatccatatccccaacctcagcatcacacaatattcccatataacaaacctgaacacgtgcccccgtttataaaagtcgacattttttacaaatcagcatctaaatgttttaattatgatagtcacaaaaaggagtgaagtactgagttatgctacaacacgatgacgctctgctaagtaaaagaaccttaaagatattgtgctaagtctacatgtgactatttatatgaagtgtccagtacaggaaaatctagagacaaagtaggctactggttgcttaagtctggaggaggagggtagggaaataggaaagaacagctaaaagaaacaaggtttcttttggaggtgataaaaatattctaaaatagactgtgatgttgcttgcatgtacatgtgagtataataaaaacaccttattattcacttggaatgggtaaattgtatgtgaattacatctcaacacatttttatctaaaaattttaaaactttaaaaattaaaaaaggtatgttaaaaactttaggcaaatttaatagagtttgagcaaagaacaatttagaaactgggtaacactcagaagcaaaagaggttcagagagctctgctcaccaatgggagcagcaagctt

SEQ ID NO: 19237 - DNA, 868 bp, Homo sapiens
aataaaatcatgtcctttgcagcaatatggatgcagttggaggccatcatcctaagctaattaactcaggaacagaaaactaaatgccacacattctcacttaaatatcctttaaacattgagcacgcacagacataaagatgggaataayaaacactgtgaactacaagagtggggagggagggaagagggcatgggttgaaaactacctattggtactgtgcatactacctgagtgccaggatccatatccccaacctcagcatcacacaatattcccatataacaaacctgaacacgtgcccccgtttataaaagtcgacattttttacaaatcagcatctaaatgttttaattatgatagtcacaaaaaggagtgaagtactgagttatgctacaacacgatgacgctctgctaagtaaaagaaccttaaagatattgtgctaagtctacatgtgactatttatatgaagtgtccagtacaggaaaatctagagacaaagtaggctactggttgcttaagtctggaggaggagggtagggaaataggaaagaacagctaaaagaaacaaggtttcttttggaggtgataaaaatattctaaaatagactgtgatgttgcttgcatgtacatgtgagtataataaaaacaccttattattcacttggaatgggtaaattgtatgtgaattacatctcaacacatttttatctaaaaattttaaaactttaaaaattaaaaaaggtatgttaaaaactttaggcaaatttaatagagtttgagcaaagaacaatttagaaactgggtaacactcagaagcaaaagaggttcagagagctctgctcaccaatgggagcagcaagctt

SEQ ID NO: 19238 - DNA, 868 bp, Homo sapiens
aataaaatcatgtcctttgcagcaatatggatgcagttggaggccatcatcctaagctaattaactcaggaacagaaaactaaatgccacacattctcacttaaatatcctttaaacattgagcacgcacagacataaagatgggaataataaacactgtgaactacaagagtggggagggagggaagagggcatgggttgaaaactacctattggtactgtgcatactacctgagtgccaggatccatatccccaacctcagcatcacacaatattcccatataacaaacctgaacaygtgcccccgtttataaaagtcgacattttttacaaatcagcatctaaatgttttaattatgatagtcacaaaaaggagtgaagtactgagttatgctacaacacgatgacgctctgctaagtaaaagaaccttaaagatattgtgctaagtctacatgtgactatttatatgaagtgtccagtacaggaaaatctagagacaaagtaggctactggttgcttaagtctggaggaggagggtagggaaataggaaagaacagctaaaagaaacaaggtttcttttggaggtgataaaaatattctaaaatagactgtgatgttgcttgcatgtacatgtgagtataataaaaacaccttattattcacttggaatgggtaaattgtatgtgaattacatctcaacacatttttatctaaaaattttaaaactttaaaaattaaaaaaggtatgttaaaaactttaggcaaatttaatagagtttgagcaaagaacaatttagaaactgggtaacactcagaagcaaaagaggttcagagagctctgctcaccaatgggagcagcaagctt

SEQ ID NO: 19239 - DNA, 868 bp, Homo sapiens
aataaaatcatgtcctttgcagcaatatggatgcagttggaggccatcatcctaagctaattaactcaggaacagaaaactaaatgccacacattctcacttaaatatcctttaaacattgagcacgcacagacataaagatgggaataataaacactgtgaactacaagagtggggagggagggaagagggcatgggttgaaaactacctattggtactgtgcatactacctgagtgccaggatccatatccccaacctcagcatcacacaatattcccatataacaaacctgaacacgtgcccccgtttataaaagtcgacattttttacaaatcagcatctaaatgttttaattatgatagtcacaaaaaggagtgaagtactgagttatgctacaacacgatgacgctctgctaagtaaaagaaccttaaagatattgtgctaagtctacatgtgactatttatatgaagtgtccagtacaggaaaatctasagacaaagtaggctactggttgcttaagtctggaggaggagggtagggaaataggaaagaacagctaaaagaaacaaggtttcttttggaggtgataaaaatattctaaaatagactgtgatgttgcttgcatgtacatgtgagtataataaaaacaccttattattcacttggaatgggtaaattgtatgtgaattacatctcaacacatttttatctaaaaattttaaaactttaaaaattaaaaaaggtatgttaaaaactttaggcaaatttaatagagtttgagcaaagaacaatttagaaactgggtaacactcagaagcaaaagaggttcagagagctctgctcaccaatgggagcagcaagctt

SEQ ID NO: 19240 - DNA, 575 bp, Homo sapiens
cccaggagccgccgggtttgctccaaggtcaggtgtgtgacccgctcgtggagcccctgtaaggttgagaggcggatctgggtaagtgctggctcggccctccctgcctccatactggccaccaggatgagcctccaaaaccaggcccagtccatcccttccctgtgacaaacattccatggctccctatcacccacaggacacaaaccagctgctctgctgtaccctctgtccccagccacaccagaccttttccctctgccagccttcgcacatgctgttccctctgctgacaagacctcagtttcctcattcacctgacaaactgatgctcatcctgtaaggcccacctcaaaggctgcctgccacctactcagtggggacttcctagaccactaggcatcgtcattccctccctcagcctagyggcaccaaggcttagtgctttcttcattctgcctggtttcagagctggtttattcctgtctgtgtagtcttccatgaggcctagaacttcctccaaggcaagaatgaggcctgattgcgctgcctctatggaacttggcacaaggcta

SEQ ID NO: 19241 - DNA, 687 bp, Homo sapiens
tttttttttttttgagatggagtttcgctcttrttgcccaggctggagtgcaatggcgtgatctcggctcacagcaacctccgcctcccgggttcaagccattctcctgcctcagcctctggagtagctgggattacaggcatgcgccaccacgcccggctaattttgtatttttagtagagacggggtttctccatgttggtcaggctggtctcgaactccggacctcaggtgatccgcccacctcggcctcccaaagtgctgggattacaggcgtgagccactgggcctggccgaaagttgtcaattcttaagcctggcttttagataattaaaaccttggttattgtacagactcagaaatctgaacaattaaaatgagaaagcagtctcattttgatctttttttcccatccagtccctcttctatatgaagtgacccatttaaaaatatattctgttcactctcatttctattgtttgtcatggttaatagatcccggccctggagagactttagagtcctctgatctaacttcaaagtacatagctagtggttgggggagctggcctgacctctcctggggccccagtttcctactctgtcttttatgctgaccaatattaggttaagtgtattgcacacatactttacaaagtcttttagtacctgattcaattgtgctt

SEQ ID NO: 19242 - DNA, 687 bp, Homo sapiens
tttttttttttttgagatggagtttcgctcttattgcccaggctggagtgcaatggcgtgatctcggctcacagcaacctccgcctcccgggttcaagccattctcctgcctcagcctctggagtagctgggattacaggcatgcgccaccacgcccggctaattttgtatttttagtagagacgrggtttctccatgttggtcaggctggtctcgaactccggacctcaggtgatccgcccacctcggcctcccaaagtgctgggattacaggcgtgagccactgggcctggccgaaagttgtcaattcttaagcctggcttttagataattaaaaccttggttattgtacagactcagaaatctgaacaattaaaatgagaaagcagtctcattttgatctttttttcccatccagtccctcttctatatgaagtgacccatttaaaaatatattctgttcactctcatttctattgtttgtcatggttaatagatcccggccctggagagactttagagtcctctgatctaacttcaaagtacatagctagtggttgggggagctggcctgacctctcctggggccccagtttcctactctgtcttttatgctgaccaatattaggttaagtgtattgcacacatactttacaaagtcttttagtacctgattcaattgtgctt

SEQ ID NO: 19243 - DNA, 687 bp, Homo sapiens
tttttttttttttgagatggagtttcgctcttattgcccaggctggagtgcaatggcgtgatctcggctcacagcaacctccgcctcccgggttcaagccattctcctgcctcagcctctggagtagctgggattacaggcatgcgccaccacgcccggctaattttgtatttttagtagagacggggtttctccatgttggtcaggctggtctcraactccggacctcaggtgatccgcccacctcggcctcccaaagtgctgggattacaggcgtgagccactgggcctggccgaaagttgtcaattcttaagcctggcttttagataattaaaaccttggttattgtacagactcagaaatctgaacaattaaaatgagaaagcagtctcattttgatctttttttcccatccagtccctcttctatatgaagtgacccatttaaaaatatattctgttcactctcatttctattgtttgtcatggttaatagatcccggccctggagagactttagagtcctctgatctaacttcaaagtacatagctagtggttgggggagctggcctgacctctcctggggccccagtttcctactctgtcttttatgctgaccaatattaggttaagtgtattgcacacatactttacaaagtcttttagtacctgattcaattgtgctt

SEQ ID NO: 19244 - DNA, 571 bp, Homo sapiens
tttctatcctcagcatttggcacaggtcatagaacataatgaagctccaacaaatgttgaatgaaataatgaatgtgcgaatatttttaaagttcctagaagtaaatatgrattttagatttttataagatcttgcatcacaaaaaaagcattgagtactttgcctttctggttttatttttacaagctaaccttcctttaaagcttaaaaaaaaaaaaaaaaaaaaaaaacctgtcctggttctcagcacagccacatcagagaatgccttagggagcaagagaataaagggaggccctttagaaagactatgtttgatctctggttaaacttcctttaaagtaataattccatgatcacctattataaaaagtttcccatagtgccaaaagttctaatctatggcttaagtggagatatataccttaagctacctcaaactgaaaactattttagcttcagtggaacttttctgcttctattttttggtatgattttggtacaaagaaaatcatacttaaaagaaaaaatataaaaggccagaggtggaagaggactggctacctagga

SEQ ID NO: 19245 - DNA, 536 bp, Homo sapiens
cgaytacatggtttaaacttctatttgttcatcacgacccatctcagatgggcccctctctgaggagccttctctggcttttcctctggcccccacccctgctcctgcagtagcgtcaagctggattagaggctccctcctcggttttcacggcgccttacagtgatctccttagaacagaactgtctatctgtgggtatccccactccctgaccccagactggccccaggctgcgaactcctcaaggacaggggctgggtttgaccctctgtgtgtccacagtcccccaaccccgggctggacacagaacaaggcacagaacaaagtgaaaaatgcctttgtgctttggaatccacaaagccctaagaagctctcttatgtctttgcccttccctgttaagatttccagttgcaaaatgtcagaagctcggtctcgggcttctagacccacctctgaccagagtcatgacctgggcaagtgctatcctggggaccgcctgggacaagcagccccatgccccatactcctgcccat

SEQ ID NO: 19246 - DNA, 536 bp, Homo sapiens
cgattacatggtttaaacttctatttgttcatcacgacccatctcagatgggcccctctctgaggagccttctctggcttttcctctggcccccacccctgctcctgcagtagcgtcaagctggattagaggctccctcctcggttttcacggcgccttacagtgatctccttagaacagaactgtctatctgtgggtatccccactccctgaccccagactggccccaggctgcgaactcctcaaggacaggggctgggtttgaccctctgtgtgtccacagtcccccaaccccgggctggacacagaacraggcacagaacaaagtgaaaaatgcctttgtgctttggaatccacaaagccctaagaagctctcttatgtctttgcccttccctgttaagatttccagttgcaaaatgtcagaagctcggtctcgggcttctagacccacctctgaccagagtcatgacctgggcaagtgctatcctggggaccgcctgggacaagcagccccatgccccatactcctgcccat

SEQ ID NO: 19247 - DNA, 536 bp, Homo sapiens
cgattacatggtttaaacttctatttgttcatcacgacccatctcagatgggcccctctctgaggagccttctctggcttttcctctggcccccacccctgctcctgcagtagcgtcaagctggattagaggctccctcctcggttttcacggcgccttacagtgatctccttagaacagaactgtctatctgtgggtatccccactccctgaccccagactggccccaggctgcgaactcctcaaggacaggggctgggtttgaccctctgtgtgtccacagtcccccaaccccgggctggacacagaacaaggcacagaacaaagtgaaaaatgcctttgtgctttggaatccacaaagccctaagaagctctcttatgtctttgcccttccctgttaagatttccagttgcaaaatgtcagaagctcggtctcgggcttctagacccacctctgaccagagtcatgacctgrgcaagtgctatcctggggaccgcctgggacaagcagccccatgccccatactcctgcccat

SEQ ID NO: 19248 - DNA, 536 bp, Homo sapiens
cgattacatggtttaaacttctatttgttcatcacgacccatctcagatgggcccctctctgaggagccttctctggcttttcctctggcccccacccctgctcctgcagtagcgtcaagctggattagaggctccctcctcggttttcacggcgccttacagtgatctccttagaacagaactgtctatctgtgggtatccccactccctgaccccagactggccccaggctgcgaactcctcaaggacaggggctgggtttgaccctctgtgtgtccacagtcccccaaccccgggctggacacagaacaaggcacagaacaaagtgaaaaatgcctttgtgctttggaatccacaaagccctaagaagctctcttatgtctttgcccttccctgttaagatttccagttgcaaaatgtcagaagctcggtctcgggcttctagacccacctctgaccagagtcatgacctgggcaagtgctatcctggggaccgcctgggacaagcagccccatgccccatacycctgcccat

SEQ ID NO: 19249 - DNA, 566 bp, Homo sapiens
gtctgtggaaattaaattacctgtttaatccttcctgaaaaaaattgcttgaaattagttatacccctacaaggtgggaaaaaaatctatgacaaatgaggacatggaatacataaagcagtagacctaacccaggcatgatacaaaaaaatctcagtaaacaggtatgcaactgacttgtaaagcaactagtctaaattacatgtgtgagagctggaaatacagcttcaggagcaaaatgagtttattttagcaaacatggtgccattattaggaagctaataggataccttaattggcagaggtagaattacattttttctctgcagatgcaatcatacttaatagttttatagcgaatgatgattgtataattacaatatggtaaatagttgataagttttcaatgtttaagaatcaacctataaataaagcataaaagacttgtaytgattgatgtcctgtggctccttaaaatgtgtaaaacccaagtgtagcccgaccactttgggcacatgctgtcaggacctcctgaggctgtctgtgacacgtccttaaccttggca

SEQ ID NO: 19250 - DNA, 628 bp, Homo sapiens
cagaggctcacgcctgtaatcccagcactttggaaggcagaggtgggcagatcacgaggtcaggagatcaagaccattctggctaacatggtgaaaccctgtctccactaaaaaataaaaaaataaaaaataaaaaawaaattagccaggcatggtggtgggcacctgtagtcccagctacttgggaggctgaggcaggagaatggcgtgaacccgggagttggagcttgcagtgagctgagatcatgccactgccctccagcctgggcgacagagcgagactctgtcgcaaaaaaaaaaaaaaaaaaaaaaaaaaaaaaaaaaaaagaattgagaaatagaatggaaaaaaggctagttgtggaactttttaaatatctgtaaaagaaatagaagtatgagatgtcatatgtaagcaaagcaacaggtttatatatcccttccaaaataagtaaaccaatttcagaaatggatctcaaacttattaggtgtaagaaggtagcagctaaagctcaggacaaactgccaagatgaaagtattcacaattttagagctgtgcgcaattgcactgtaagctaacgagaaatatatttcttaattttcagaaccgtagaaagaaagaactcc

SEQ ID NO: 19251 - DNA, 616 bp, Homo sapiens
attacaatcagaagacattgaagttatcaactcctatagcacaaaggttgacacatgagattaacaaacttttttagctattggcacgtgaaagaaaagatccagaagtaatgtgaaacacaaataactcccaagactttcttctttctctttctttctttctttcccttccttccttcctttttttttcttcttcttcttyttttttttttttttttttgacagagtcttgttctgtcacccaggctggagtgcaatggtgtgtcagctcactgccacctctggctcccgcgttcaagcaattctcctgcctcagcctcccgaggagctgggattacaggcgcctgccaccacgcccaggtaatttttgtatttttagttgagacagggttttgccatgttggccaggctggtctcaaactcttgacctcaggtgatccgcctgctttggcctcccaaagtgctgggattacacccagcttttttttttttttcttcagatctagacctacagaactaccacgattttaaacactcaatttcagggaactggaaaactggaaacccattatgggtttccaccatatttagacccttcattagaaggagtaaaatg

SEQ ID NO: 19252 - DNA, 617 bp, Homo sapiens
aggcggaaggcctggccgcagtcgggacagcagtgcgggcggtcggccgtgctgcaccgcctggtgccgtcgcagcgccgagctctggctgaagctgcggccgcagtgcgracacgggtagggtcgctcgccggtgtgcgtgcgctggtgcgtgaccaggtaggagcggcgcccgaagcccgccgcagaaggcgcacggctacgggccgctcgccagtatggatgcgtcggtgcgtaaccaggtgcgacttgtagacgaagcgcttgccgcagtccgggcacgggaagggcttctcgccggtgtgcgtgcgctggtggatggccaagtgcgagcggtacacgaagcccttgccgcactcctcgcagccgaagggcttgacggccgcgtggtagcgctggtgcttggccagccgcgagcggtgcgggaagaccttgccgcacacgtcgcacgtggtctccggcctcccggccggcggggccactgcggcggggaacgcccagggcgacagcaggttcgcacccggctcccggccgggcaggaaaggcttcgcttcagagccgtcggccaggacccccaggccgcctgggtcgggtccccacccctctggagtctgcgc

SEQ ID NO: 19253 - DNA, 694 bp, Homo sapiens
  misc_feature (1)...(694): n = A,T,C or G
atggagaatgtggtggttggagaatcttgaagaagagtgaatgaggtcaatgctaattttatagatctaaaacaaacaaacaaataaacaaaaaacaactattgccaagacttctagacaacatgtagcaatcttggctaacaaagaaagcaaatgaagcagcatcacacagcaggtccaaaaagcatcatttgaaatgtcacatatgacctcttctgttgttcaatatgcatagattaacttgataagaatggcaaattcatacgatgtgtcagaccatctttattgatttaccctaatgttatgcataaagtttatctcttccccccattcgttctcatcctcccttctctctctctctctctctttctntgacacacatacacacacataaagaagcaaagtcaccagctgagagcgaagtttggggtggaagttttgaggtttgagaaaaaagaagtctgaaagtctaacctctttttgaaatgagcctgtgatgaagagtgacaatcggcaaagcaaatctaataggatctctaaagagccttttcctgttgttyacaattgtggctaaagccctgcactagaaaacaacaaatgctaagatcctccctgcatcccctacccccgaccccctggggcacacacaaccctcctccaccacgttctaaaaagactggaaggacttggaaaa

SEQ ID NO: 19254 - DNA, 576 bp, Homo sapiens
  misc_feature (1)...(576): n = A,T,C or G
ttttaacttcaggggtacatgtacaggatgtgtaagtttgttacttaggtaaacgcgtgtcatggagatttgctatacagattctttcatcacccaagtattaagcctagtatcttagttgtttttcctgatcctcaaacaacattntaatgaaaactttttanaatacaaaactagcaaataggcattaatagcgttagagcagccagattgtttcatttttaaatttgcaagcatttttacatgggtcttgtctacccacttttacttccttacttgctcctgctgttacgttctctgtcaattgttaaatgtsaaaaccaggccaggcacagtggctcacgcctgtaaccagcactttgggaggccaaggtgggcagatcgcttgagtataggagtttgagaacagcctgggcaacaaacatggcaagaccgtgtgtgtgcaaaaagttatctgggcatggtgattcatgcctgtaggctcagctactcaggaggctgaggtgggaggatggcatgagcccaggaggtcgaggctacagtgaggtgtgatcatgccacctcattccagcctgg

SEQ ID NO: 19255 - DNA, 828 bp, Homo sapiens
cacattctcaaggtatagcaacatttagtgcatggtctagagcacagaaggagggaaagcatgttggtgtaataaatcttacattatattttgaatatcaagtggaatatttgcttgtgatcataggccaaattttttwaaaataatactctttgccccattttcttccagaaagttttctgaaggtgaaatttagaaaaacagtgaattcaacaatatgttttttagaaataactcaccacaaaaaataaattggataagggagaagtagagaaataaaaatattatggcaaaaaatctcagctcaggaaaagccctatagtattatgaaaattttctgtctaccaagagaaagaaggaaaaagccagcatttccattgttctgattatcaacatatagaaagctgattgttatgagagacaaagttttcctacacatgagatctaaaggaaccaacagtggacaaattcaatctccaaatcaacacgtttgtttgagggcccagagcagtgacagaggctaacacaaatgggcagatttctcaaatatacactacagactaggacagagaggtcttcatgtctttctcgtctctttgaccatatttctgtaatatgagatattgccaaacagctctttagcttctgttgtgtcttgtggatgatgggcatacttctccaagaagagcaaaattagcacaattagagatttgtgatggtgaattttatctgtcaacttgagtgggccctagagtgcccagagaaaacattgtttctgggtgtgtctgtgagggtgttttctaatgagattagcatttgaatgggtgg

SEQ ID NO: 19256 - DNA, 561 bp, Homo sapiens
gggcgtggtggtatgcacctgtagtcccagctactcaggaggctgaggcaagagaatcacttgaaaccgggaagcagaggttgcagtgagccaagatcataccactgcactccagcctgggcaatagagcgagactctgcctcaaaaaaaaaaaaaaagaaaaagaaaagaaaaaaggtatatccacttccagggatacaatttagttatccccatctctattcttctacacaagagggttgctatcaacaaataattttaagcatacgaaaaggcaaaacaaaataacacatccaaagagccaaaggaatcaacacaactagacccagatatgwcatcaatgcagaaaatatgagacagagaatttaaaataactacgattaaaatattaaaggctctaatgaagaaagtaaatgataagcaaaatgaagattccttttaaatacatatcaaggcagaaaaaactaacctacaaaagattaaaaaaaaatcaggctggcctcaaacttcacattaacattcaaatacagcaaaactaactgtggtatacaaagtgaccca

SEQ ID NO: 19257 - DNA, 561 bp, Homo sapiens
gggcgtggtggtatgcacctgtagtcccagctactcaggaggctgaggcaagagaatcacttgaaaccgggaagcagaggttgcagtgagccaagatcataccactgcactccagcctgggcaatagagcgagactctgcctcaaaaaaaaaaaaaaagaaaaagaaaagaaaaaaggtatatccacttccagggatacaatttagttatccccatctctattcttctacacaagagggttgctatcaacaaataattttaagcatacgaaaaggcaaaacaaaataacacatccaaagagccaaaggaatcaacacaactagacccagatatgtcatcaatgcagaaaatatgagacagagaatttaaaataactaygattaaaatattaaaggctctaatgaagaaagtaaatgataagcaaaatgaagattccttttaaatacatatcaaggcagaaaaaactaacctacaaaagattaaaaaaaaatcaggctggcctcaaacttcacattaacattcaaatacagcaaaactaactgtggtatacaaagtgaccca

SEQ ID NO: 19258 - DNA, 561 bp, Homo sapiens
gggcgtggtggtatgcacctgtagtcccagctactcaggaggctgaggcaagagaatcacttgaaaccgggaagcagaggttgcagtgagccaagatcataccactgcactccagcctgggcaatagagcgagactctgcctcaaaaaaaaaaaaaaagaaaaagaaaagaaaaaaggtatatccacttccagggatacaatttagttatccccatctctattcttctacacaagagggttgctatcaacaaataattttaagcatacgaaaaggcaaaacaaaataacacatccaaagagccaaaggaatcaacacaactagacccagatatgtcatcaatgcagaaaatatgagacagagaatttaaaataactacgattaaaatattaaaggctctaatgaagaaagtaaatgataagcaaaatgaagattccttttaaatacatatcaaggcagaaaaaactaacctacaaaagattaaaaaaaaatcaggctggcctcaaacttcacatyaacattcaaatacagcaaaactaactgtggtatacaaagtgaccca

SEQ ID NO: 19259 - DNA, 570 bp, Homo sapiens
taccaactgtaaagtgaaaagcagacatcttatttcaacctaataaagcaagatactgcttttcaagatttaatgtacaatayatcacctagggatcttactaaaatgcagattcagtaggtatgaagtgggacctgagattctgaatttcttacaaggtcaaatatgctgcattctgttgtccaggactgtgccagggcatgatatttgggttactgactctgattttaaaactgggaatttacaaagagatattttcctttttgccaatatggattaataaattggtaaatcttattgaaaatgtgttaagaaagaagagaatacaaaacgaatgaatgggtgggtccacttttaatgagagatggcctttccatcgtgagaaaaattgctataagttagcttgtaaccagaaaataaattcctttgaaaaattcaccttgtgaattttttgagtgatttccctgtagatctcctacttgaatttcaattttgatgcagaaacttgggtcagcattcaagacccagaaagctcactaatgtatcaagcaacctgagctatcatagttc

SEQ ID NO: 19260 - DNA, 532 bp, Homo sapiens
tgcaaatactggtaaacatcaactcttgcttaattcttttctccactggcctcagcccccattcatccatctttgtttccacaacatgtacagtgtcaagtaaactcctcattttatataagatttataacaaagagaggaaacgggggaaaaattattccctgcaggccccttaaagacgtgactgaagagagaaacttgcaacaactccctaaaccaaccagcgtaagtacattcaacccacaagcttggggaaggagtaagagcgtcacttgcattgaacttctctttcctctattgggaacaaaatattattttgtttttcatctgataatttattaacaaagagaaaaacaaaaaataaagccctaagtgcctcctctctgatgttcagatcctgacagttaaatagatttctaacagtgtgcttgtaatgatcaaatggcaagtgaacttagaggtcttaaggagttaattatgatagaatttaaactgtagtatatttttactttctatataagatktacctaaa

SEQ ID NO: 19261 - DNA, 565 bp, Homo sapiens
tgtattctgcctagaaatatgcccataaaaagtcacagagtaaataagaaagaatatcatttcaaatgactcgttttgctttactgaccagaaagatacatgggagcagaagtctttttttttttttttttttttgagatggagtctcgctctgtcacccaggctggagtgcagtggcacgatcccagctcactgcaacctctgcctcctggattcaagccattctcctgcctcagcctcccgagtagccrggactacaggcgcccgccaccacacccgcctaattttttatatttttagtagagacggggtttcactgtgttagccaggatggtctcgatcacctgaccttgtgatccgccagcctcggcctcccagagtgctgggattacaggcatgagccactgtgcccggctgggagcagaagtcttatgatcaaaaatatatataagatcaagaagaaagtgaggagccaaggctgaagaatctggaggagttatccccttatgattttatgtaagggggtaagccattcaagaaaataactagtgtttgctaaaatttt

SEQ ID NO: 19262 - DNA, 668 bp, Homo sapiens
caaggacaaaacattacatggaaaacatggtagaagaggaaaattaactgattaaatgggagaagttacacacaaattaggaatcccacaagaggccaacaaattcaaatggcaaaatgagatagtttagaatcagaacgttattcctcaaagtgtggccgtgggtcacccactttagaatcatctgcgaactggttgaaatgcagattagagggctcccacttcagttctctggaatcaaagcctgggaatagggtttggtaacaagtgacaaatactctagttacttcttatgcacacgaaaatctggaaccactgggccacgtaattttacacattgcaaataaatagaaaaagaaaacatctagaatggcagtttgcacaatttaaggagtaaactatttgggaatcttaatccaaaaattcagaaaaccgactcaataataagcagcacagtatccatgcattttccatttttaatttgtagaacaaatattgattggaatactrgataatacacacagtatttatgttgctttgatttataccctgctatgataaactattagacatgaattccctggccttttttccatttattaaaaaaaggagagtcttgatatctatggagttataagaaaagaggttcaaggaagagaagacgggga

SEQ ID NO: 19263 - DNA, 594 bp, Homo sapiens
tacaatgtagccagggagacatttccctaatgtgggccaggccctctttcacatcactcttggcacatagtggggacacatgcactgctcctctcttctttcctggtcatggccaatgattgcatataccttaagttttatcctaatcagtacttcctctgtaagcttcctctggctccccaagtccttgataaatgtgccttttctgtaaccccactacatagcgagaaacaaacaggtatgttattaactggtacctgtatctggttgtcacagcacctgtcacacaaacaaaatgaacaaatgaacaaatgaatgaatgaatgaatgaatgaataaaagcagcattctgagtcttttcaatatagttgtcaaggggttgaatgtcaagtagaaagggacagggtgggtagggaaggggatgtttaattggtagaatcaatatttcttaatccaagacccaaacagaagtggttacagggctgaggactgctccggaggccctgaattgctgctctattgttcacagaycttgagcttgctgggcacagaggagggctgggcagaggtgtctccagctaaatagctgcaatc

SEQ ID NO: 19264 - DNA, 509 bp, Homo sapiens
atagttcctggtgagctttctatttttttaaatattttttcttaaggagtagaatattgttgtgaatattttctattgatctggaatagtacctccagctggcaatctaagggttccaatatgactttccatatgaatatttttggagcccagagagttatctttggtactaaaaaatgaattggctatcaatctttattatttgggaggtttactctatttcagtaaaaaatttgaattccagtctataagtgggtcttcataataatttattcatggctacaatgaactggagctgattagagagtgctccatttagataatcatgtactcactggttcccagaaggccatttccatacctacatactattagtctggttcctgcttgcatttaaatatgcagtcttttattttgacaatgcacaccatctaattccagcasacacaatctccttgattcatctaactgtagaaattcaaaataaggactctttcttcttctgttca

SEQ ID NO: 19265 - DNA, 519 bp, Homo sapiens
tgagacaaaatatcctggctgacatccccattggacatctataccattttggtctatttgggagtggacacagctcctcaccatttatagaaactgactcctgtctggttctctccagacaggttcaagagacctaaattctcctgacatcaggccatttcccttttcttggagtccttcccattccaaatcattgaatcatctgccttcatgggcttaggcatcagaaaatcaccacagcttaacccgccctccagagagaagagataaagaaatacttctcgttttyccattatgagccagtagacaagaaaataaaatatggtttatcaatcaatttatcctgccacacctactaatattatatgaggttttgtggcctagccttggcatctaaccataattaattacactatttccatgggaaattaattctaggttataaacacttagacttaggaactttgagaacccaatatattaataatatgtattctctatataccattatttttcttg

SEQ ID NO: 19266 - DNA, 574 bp, Homo sapiens
agaacgactgaggctgaaaagccctagatctatgggaggagattgtgtgtaagacagttacatccttcacttcgaggaaaagccagtgcccttcttcttgtcccttcttggattcaggcctgaatagactgggaagtttctccattatctctttgccttcttttattcccccayttgtatgtttttttttcctaaaaatgaaagaggactaatatgcataatcttattacaaaacaccccatttacagataaggaaactggggctgaaagaagtttcaaatctctctgaatgttgtcttcttggtatagggaagggttagagtgttattaatattatagcattacattctagtgttaacctgttaagttcctttttgtcttcaagtgcattctagtcaataagagattttcacgctgggcatggtggctcacgcctgtaatcccaacactttgggaggccagtgtggatttatcacttgagcccaggagtttgagaccagcctcagcaacatagtgaaaccccatctctacaaaacagttagcggggcatagtggtgtgcacttgtagtccagc

SEQ ID NO: 19267 - DNA, 574 bp, Homo sapiens
agaacgactgaggctgaaaagccctagatctatgggaggagattgtgtgtaagacagttacatccttcacttcgaggaaaagccagtgcccttcttcttgtcccttcttggattcaggcctgaatagactgggaagtttctccattatctctttgccttcttttattcccccatttgtatgtttttttttcctaaaaatgaaagaggactaatatgcataatcttattacaaaacaccccatttacagataaggaaactggggctgaaasaagtttcaaatctctctgaatgttgtcttcttggtatagggaagggttagagtgttattaatattatagcattacattctagtgttaacctgttaagttcctttttgtcttcaagtgcattctagtcaataagagattttcacgctgggcatggtggctcacgcctgtaatcccaacactttgggaggccagtgtggatttatcacttgagcccaggagtttgagaccagcctcagcaacatagtgaaaccccatctctacaaaacagttagcggggcatagtggtgtgcacttgtagtccagc

SEQ ID NO: 19268 - DNA, 552 bp, Homo sapiens
tggtcctgtgttactcctgcagggtgtaggtagctcctccttgttctcagtctgtcgactcagctactttaaacacagaggatggggagatggatctcaaagttatcaatgtggaagaccatgtctgtaagtgccccggccctcccaatggccatcccatgccaactctggctctcagccaccttacttgataatattaatgaaagcaaatatttttgtgggcagactgtgtgcgatccattgagttgtgtactttatggagctatttgtgtaatccccactacaattgttcacagtaaatcctcttaatattcccacttttccagataaggaaatcaaggcacagggaagtaacttgctacagttatacagctaataaacgtagagctgggatttgaacccatgaagtctgattccagagttcctacccttagccactatacttaacattgcctctgaaataaatataatatgtgcttggggtataaagcccagtcatttcarataaataactcccaaatcagcatgagactaaagttgacagctttaaac

SEQ ID NO: 19269 - DNA, 1876 bp, Homo sapiens
  misc_feature (1)...(1876): n = A,T,C or G
acattgctgctgccggctgaaagattttaataacagccttttgttgacaagagaagcaggatcccgacatgttctaaaataagctacaaggagtcagaagggtaggaggggaagcaaaggggaggaggccatcaaaaggaaaaactgcaaaatcccactcaagtccagcttctctaaatggtcagcctgtggttgaacttgtgtgcagatgaatcacctggagatgtcgttaaaatgcagatagtgattccgtggggtcggtgaggtctgagatttgttttctctaacaagctcccaggtgatgctgatgctggcggtcygaggaccacactttgagtagcaaggcccttaaggctcaggcaactgcagctgtaagactgtctgcatgtttgttctaaagctctggaatgtctccagagagaaacctgcagcctgccaggacccacagagccctccaacctttctagtaagcagcaggccctgcagtagccccaacacctgcaaaaatgggcagcgagatatgaaggagggcagatccatcttccctggaatgtgggctcgtgggaatcagctgctaaagaaagaatgagnnnnnnnnnnnnnnnnnnnnnnnnnnnnnnnnnnnnnnnnnnnnnnnnnnnnnnnnnnnnnnnnnnnnnnnnnnnnnnnnnnnnnnnnnnnnnnnnnnnnactaaattttaaagatcacacctgtctcatttatttagctaacttaaattagccaaaaatgtctcctatataaaaataataactagcaaatattcattacatatcagatactcattctaagtactccacatgaattacaatttagtaatcaaagcaatcccataaaataaataccacaattatcattcccacttatagatgagggaactgagactcaagacttattaagggacatttgctggcttatggcagaaatagaaatccaagtctgtttggcactaaaccccattatttacaggagtgatctgataaattgaaaacactgttgcctgacagaggaaaaataacattggcctaaaataactaataggataataattttcaaaataaggaacaatattctagtaagttaaaaaaaagtctgaccaaaaattaggaagaataaggtaatgaaaataagacctcatcttttattaagtgagttagtgaagggcagaggtaaggcaaagttgatgatcttggtattacaaatcagagcaagagttatatgaattatctgtaatgaaatgcattatttgcaattaaaattatacgaacactgatcatctagcgagagtaagattagtgtcctggttctggaaagcatcagtggaggtatgtgtggcgtcttgctgagcataaagtaaaggtgcgagtcaaagaagaatgaaaatggtagaggggggctttagaaaaatgaaatcatcctttgataggattaattttttaaacgagttttgcctcttgtcccccagagcattgatttttcctttgaaagaagaggtgcaggcagattatgagaggtgtagtgtgaaggtggaaggctcaggactgagcccagctctgcatcaatttttcaggtaatactgagactgccttgaaacctaagactttttttttttttttaagtagtaaggcccccttttcacagaaaaccttatgtttaacatatgaaacagagaagaaaagaggactgtctaacgggggctggaggttggaggctgaggtgtcattctcctcaactcaccatctcccactctggctcttcgcaggtccctaggagcccccatggtctcccctcaagcacattagactggttctccttgaagggtcttctgagtctagagtgaagatctctgagctccat

SEQ ID NO: 19270 - DNA, 514 bp, Homo sapiens
gcctggtgctgtcactgaagttatctcatgaggaaaagagtcatgatgtcactatgggacacatttaggggactcggatgacatttagggaaaaaacagaaaaggccttgatgtttctgggagccaacagccagatgtctggaggccatcaggggaggctccgctgggaagcagccccaggactcacacgtccacacagtaactgcaaggcctcactccctgctctacccatcttgggattcagggcattgactaactgtccctttggccagaaactctcaagcaggcatttttgtgagctcaagccttcagatgcaggtttttcctctagttggagtttgyattctgtccatttttttttttttttttgagacggagtctcactctgtcgcctaggctggagtgcagtggcgcaatctcggctccctgcaagctccacctcccaggttcacgccattctcctgcctcagcctcccgagtagctgggactacaggtgcccaccaccacgcccgg

SEQ ID NO: 19271 - DNA, 1033 bp, Homo sapiens
tttttaatagtgagaaccttttagattttaaaagctcacatttgtgtaaacattacagtctgaattatgtggacaaatatcaaatgcgttgacatttttaactggaaatttgggctattttggttgtggataattttttatcctttttgtttttccatattttctaaattttgatataatgaacaagtattgcctttctaaaaaaggaaaaacagcattttgttttatttcaaccatattggatgtgaataaaagaaaagaaaaagatgattctgagcttaccagtgtgtgtgrcccacattaacagaaatgacatgtaaagaaaatctagtttggagtggaaaatcctattttaggtagttgatttctttcacttgaggtaccatttatatatccatgtggggatagcctagtaggaagatgaaatggtaggacagagatcttgatggaagtcagtagttgcggcacagttctgaggcccagctactccaaaggcagagggggaaacatccctttagcccaggattggagactgcaatgagttatgttcatgcctttgcactccagcctgtggaagagaatgagattcctatctctaaaacgaaaagagggccaggcacgatggctcacgcctgtaatcccagcacactgggaggcccagatgggctgattgcttgaggccaggagttcaaggccagcctggccaacgtgttgaaaccctatctctactaaaaatgcaaaaattaactgggtatggtggtgcatgcctgtaatcccagcttctttggatggctgaggcaccagaattgcttgaacctgggaggtggaggttgcagtgagctgagatcgtgccagtgcactctagcctgggcaacagagcagactctgtctcaaaataataataataataatatttaattaatttaaaaataaaaaccaaaagagaagatctgatggacttaaaagtcatatatctcaggtgataggtgaaaccacaagtttgccttgaaaagtgtgttgataacaatagcca

SEQ ID NO: 19272 - DNA, 1033 bp, Homo sapiens
tttttaatagtgagaaccttttagattttaaaagctcacatttgtgtaaacattacagtctgaattatgtggacaaatatcaaatgcgttgacatttttaactggaaatttgggctattttggttgtggataattttttatcctttttgtttttccatattttctaaattttgatataatgaacaagtattgcctttctaaaaaaggaaaaacagcattttgttttatttcaaccatattggatgtgaataaaagaaaagaaaaagatgattctgagcttaccagtgtgtgtgacccacattaacagaaatgacatgtaaagaaaatctagtttggagtggaaaatcctattttaggtagttgatttctttcacttgaggtaccatttatmtatccatgtggggatagcctagtaggaagatgaaatggtaggacagagatcttgatggaagtcagtagttgcggcacagttctgaggcccagctactccaaaggcagagggggaaacatccctttagcccaggattggagactgcaatgagttatgttcatgcctttgcactccagcctgtggaagagaatgagattcctatctctaaaacgaaaagagggccaggcacgatggctcacgcctgtaatcccagcacactgggaggcccagatgggctgattgcttgaggccaggagttcaaggccagcctggccaacgtgttgaaaccctatctctactaaaaatgcaaaaattaactgggtatggtggtgcatgcctgtaatcccagcttctttggatggctgaggcaccagaattgcttgaacctgggaggtggaggttgcagtgagctgagatcgtgccagtgcactctagcctgggcaacagagcagactctgtctcaaaataataataataataatatttaattaatttaaaaataaaaaccaaaagagaagatctgatggacttaaaagtcatatatctcaggtgataggtgaaaccacaagtttgccttgaaaagtgtgttgataacaatagcca

SEQ ID NO: 19273 - DNA, 1033 bp, Homo sapiens
tttttaatagtgagaaccttttagattttaaaagctcacatttgtgtaaacattacagtctgaattatgtggacaaatatcaaatgcgttgacatttttaactggaaatttgggctattttggttgtggataattttttatcctttttgtttttccatattttctaaattttgatataatgaacaagtattgcctttctaaaaaaggaaaaacagcattttgttttatttcaaccatattggatgtgaataaaagaaaagaaaaagatgattctgagcttaccagtgtgtgtgacccacattaacagaaatgacatgtaaagaaaatctagtttggagtggaaaatcctattttaggtagttgatttctttcacttgaggtaccatttatatatccatgtggggatagcctagtaggaagatgaaatggtaggacagagatcttgatggaagycagtagttgcggcacagttctgaggcccagctactccaaaggcagagggggaaacatccctttagcccaggattggagactgcaatgagttatgttcatgcctttgcactccagcctgtggaagagaatgagattcctatctctaaaacgaaaagagggccaggcacgatggctcacgcctgtaatcccagcacactgggaggcccagatgggctgattgcttgaggccaggagttcaaggccagcctggccaacgtgttgaaaccctatctctactaaaaatgcaaaaattaactgggtatggtggtgcatgcctgtaatcccagcttctttggatggctgaggcaccagaattgcttgaacctgggaggtggaggttgcagtgagctgagatcgtgccagtgcactctagcctgggcaacagagcagactctgtctcaaaataataataataataatatttaattaatttaaaaataaaaaccaaaagagaagatctgatggacttaaaagtcatatatctcaggtgataggtgaaaccacaagtttgccttgaaaagtgtgttgataacaatagcca

SEQ ID NO: 19274 - DNA, 1033 bp, Homo sapiens
tttttaatagtgagaaccttttagattttaaaagctcacatttgtgtaaacattacagtctgaattatgtggacaaatatcaaatgcgttgacatttttaactggaaatttgggctattttggttgtggataattttttatcctttttgtttttccatattttctaaattttgatataatgaacaagtattgcctttctaaaaaaggaaaaacagcattttgttttatttcaaccatattggatgtgaataaaagaaaagaaaaagatgattctgagcttaccagtgtgtgtgacccacattaacagaaatgacatgtaaagaaaatctagtttggagtggaaaatcctattttaggtagttgatttctttcacttgaggtaccatttatatatccatgtggggatagcctagtaggaagatgaaatggtaggacagagatcttgatggaagtcagtagttgyggcacagttctgaggcccagctactccaaaggcagagggggaaacatccctttagcccaggattggagactgcaatgagttatgttcatgcctttgcactccagcctgtggaagagaatgagattcctatctctaaaacgaaaagagggccaggcacgatggctcacgcctgtaatcccagcacactgggaggcccagatgggctgattgcttgaggccaggagttcaaggccagcctggccaacgtgttgaaaccctatctctactaaaaatgcaaaaattaactgggtatggtggtgcatgcctgtaatcccagcttctttggatggctgaggcaccagaattgcttgaacctgggaggtggaggttgcagtgagctgagatcgtgccagtgcactctagcctgggcaacagagcagactctgtctcaaaataataataataataatatttaattaatttaaaaataaaaaccaaaagagaagatctgatggacttaaaagtcatatatctcaggtgataggtgaaaccacaagtttgccttgaaaagtgtgttgataacaatagcca

SEQ ID NO: 19275 - DNA, 570 bp, Homo sapiens
tatacaggaaaacaactgctgctcttctcatgttggatgaggcctgctaaaaacacctgacaccagctgttagtctgatccttgatgtctggtacaatcttgggttattctccttggaaaagtggatgctcagaagtgccagtatccccrtgagtcccagttaactgaaattcatattgttaagcccatgcatggatagtcatgacatcagttcatgagattccctgggaaagctgggaaaggtaactgatgaagtccatgttttgaattattttaattattttgagctcctgcttctaatggcctttagataaatattcacttggaaaggatttattttttctactggtccttttttggaaggtccagtcatatctcctccagagtgactttgtgtccaatccttcagatgtgtttcttctaaggcctgatgatctgtcaaaaccactagtcaagattgtgatattgttggtaatatccagagcggggagaggacaatagtactcccaatattgcgggaggtgtacacccctctttgtgttattgttcttaatatccagggggaaaaca

SEQ ID NO: 19276 - DNA, 570 bp, Homo sapiens
tatacaggaaaacaactgctgctcttctcatgttggatgaggcctgctaaaaacacctgacaccagctgttagtctgatccttgatgtctggtacaatcttgggttattctccttggaaaagtggatgctcagaagtgccagtatccccgtgagtcccagttaactgaaattcatattgttaagcccatgcatggatagtcatgacatcagttcatgagattccctgggaaagctgggaaaggtaactgatgaagtccatgttttgaattattttaattattttgagctcctgcttctaatggcctttagataaatattcacttggaaaggatttattttttctactggtccttttttggaaggtccagtcatatctcctccagagtgactttgtgtccaatccttcagatgtgtttcttctaaggcctgatgatctgtcaaaaccactagtcaagatwgtgatattgttggtaatatccagagcggggagaggacaatagtactcccaatattgcgggaggtgtacacccctctttgtgttattgttcttaatatccagggggaaaaca

SEQ ID NO: 19277 - DNA, 572 bp, Homo sapiens
ggagccccagcccccatacccaagcacccaagcccagcaccacactcccgaccagctccccaagactttgaaacttsaagcccattcccatcatctgtggcactggccctgcctgctcaggcctgggtagcagagtgcacaatacatggaatgtctgggcaggccaccatgggacagagcacagaggacacccatacagcagctgagaatgaccacaggccctctggacccagtcgccggctgctcccaaagctgtctgctccttcagtgtccagctatgccatctaccccagaagattcccccttggcttgatgacctggttgcagcatttaccttggtacacaatttgtattgttttaggtgattaaaagtaattctcaccaactccacatgccataagcctgggtaagaaatgccccacctggtgcactcccaggccccaagccctatgctaattgactattcaaggcattctctggcacccactcactcactatgcctcagttcccacctgtaggttagcaaatatgtcatgggacaccaggtaagcgtgactttgttgaggagttaa

SEQ ID NO: 19278 - DNA, 572 bp, Homo sapiens
ggagccccagcccccatacccaagcacccaagcccagcaccacactcccgaccagctccccaagactttgaaacttcaagcccattcccatcatctgtggcactggccctgcctgctcaggcctgggtagcagagtgcacaatacatggaatgtctgggcaggccaccatgggacagagcacagaggacacccatacagcagctgagaatgaccacaggccctctggacccagtcsccggctgctcccaaagctgtctgctccttcagtgtccagctatgccatctaccccagaagattcccccttggcttgatgacctggttgcagcatttaccttggtacacaatttgtattgttttaggtgattaaaagtaattctcaccaactccacatgccataagcctgggtaagaaatgccccacctggtgcactcccaggccccaagccctatgctaattgactattcaaggcattctctggcacccactcactcactatgcctcagttcccacctgtaggttagcaaatatgtcatgggacaccaggtaagcgtgactttgttgaggagttaa

SEQ ID NO: 19279 - DNA, 538 bp, Homo sapiens
tcccaagaatgctgtaattggaatataatttttgatgtgttttttaaacatttcctgcttctgtcatataatttgtttccagcatgttggaaacactcttcttatggcctttgtgttcagtatgtgaaactcattcatcgtttaccaagtttgagatgtaaaaattttaaaaaatccttcttttctgccattgatgtagtaaattacgtcattgattgactttaataggatttttttttccttttgattcaactcagcgcctttggatggtaaagtaatctaaacctttccagactggtcatctggaaatactgtggaactgtaaaaaccactaggctgggttttctctgtggccagcagcttcagcacastctggcctacaaccatggtacaccctagatttaagagcgtaaacctgccaaagacggagttcagtcatgcgtagagttactattgaaggattatgtcccactctttggagtgttaaccccaccaataaatgtagaaattgatttcttatctattttcccctgtgcga

SEQ ID NO: 19280 - DNA, 1038 bp, Homo sapiens
agcattttttttctgttccaacatttctgaagcagctcagatgtcactatcttgtttctgggatttaaaaaatgttgggccttcatgtgaataaattaatctttagaacttgtcatctacaacttaaagaaaaaaaaaacctcagaatatagataactctaaaatcatatgatggcattttgagtagtaccctcaggtgagttaacttaatttaaaagcactgctaattacagtgtggaccaggaccattgtgggccttgctagaaatgcagaatctcaaatcccttctcagacctactgaaacataatctgcattttatcaaaatctattggtgattcatatgcatattaaaagtttgaaaatcactgcatttcttctcgtgctaaatctgtttgtaaatagtaaatttgtgaatttgaaaaagccatacaaagtttgcagtgagctgagatcacaccactgcactccagcctgggtgacagagtgagactstgtgtcaaaaaaacaaaaaagaaaaagccataatgcaggagatggtaaaaaacattaattatagggtcattactgaattaccctttctaagattacatatttggaaataatttcactgcttctatttgcatgtaattatagctaattttctggagattcttatgttatttaaaaatgaagccagatctgataaaagctgaaagctgtccagctttctcatcctgccttatccttcaagttctgctctgatgctgtatttggacgcatactcatcaggctgggatatagcaccagcctaaacgcttctaatcttggcgtctctttgacttatacttggtctgtagtttaaagaagtaattaaataattactttttaaacagccttaagaagtaacagctttattgggctgtatctggagcagagataaatagaaatggtaatactattaattttaaacccagtgtgtgacaatgatgacaacaatttgtttagcacttactgtgtgtcatgtcgtgtattaagtatgctatgtgcatttaatctca

SEQ ID NO: 19281 - DNA, 1038 bp, Homo sapiens
agcattttttttctgttccaacatttctgaagcagctcagatgtcactatcttgtttctgggatttaaaaaatgttgggccttcatgtgaataaattaatctttagaacttgtcatctacaacttaaagaaaaaaaaaacctcagaatatagataactctaaaatcatatgatggcattttgagtagtaccctcaggtgagttaacttaatttaaaagcactgctaattacagtgtggaccaggaccattgtgggccttgctagaaatgcagaatctcaaatcccttctcagacctactgaaacataatctgcattttatcaaaatctattggtgattcatatgcatattaaaagtttgaaaatcactgcatttcttctcgtgctaaatctgtttgtaaatagtaaatttgtgaatttgaaaaagccatacaaagtttgcagtgagctgagatcacaccactgcactccagcctgggtgacagagtgagactgtgtgtcaaaaaaacaaaaaagaaaaagccataatgcaggagatggtaaaaaacattaattatagggtcattactgaattaccctttctaagattacatatttggaaataatttcactgcttctatttgcatgtaattatagctaattttctggagattcttatgttatttaaaaatgaagccagatctgataaaagctgaaagctgtccagctttctcatcctgccttatccttcaagttctgctctgatgctgtatttggacgcatactcatcaggctgggatatagcaccagcctaaacgcttctaatcttggcrtctctttgacttatacttggtctgtagtttaaagaagtaattaaataattactttttaaacagccttaagaagtaacagctttattgggctgtatctggagcagagataaatagaaatggtaatactattaattttaaacccagtgtgtgacaatgatgacaacaatttgtttagcacttactgtgtgtcatgtcgtgtattaagtatgctatgtgcatttaatctca

SEQ ID NO: 19282 - DNA, 1038 bp, Homo sapiens
agcattttttttctgttccaacatttctgaagcagctcagatgtcactatcttgtttctgggatttaaaaaatgttgggccttcatgtgaataaattaatctttagaacttgtcatctacaacttaaagaaaaaaaaaacctcagaatatagataactctaaaatcatatgatggcattttgagtagtaccctcaggtgagttaacttaatttaaaagcactgctaattacagtgtggaccaggaccattgtgggccttgctagaaatgcagaatctcaaatcccttctcagacctactgaaacataatctgcattttatcaaaatctattggtgattcatatgcatattaaaagtttgaaaatcactgcatttcttctcgtgctaaatctgtttgtaaatagtaaatttgtgaatttgaaaaagccatacaaagtttgcagtgagctgagatcacaccactgcactccagcctgggtgacagagtgagactgtgtgtcaaaaaaacaaaaaagaaaaagccataatgcaggagatggtaaaaaacattaattatagggtcattactgaattaccctttctaagattacatatttggaaataatttcactgcttctatttgcatgtaattatagctaattttctggagattcttatgttatttaaaaatgaagccagatctgataaaagctgaaagctgtccagctttctcatcctgccttatccttcaagttctgctctgatgctgtatttggacgcatactcatcaggctgggatatagcaccagcctaaacgcttctaatcttggcgtctctttgacttatacttgktctgtagtttaaagaagtaattaaataattactttttaaacagccttaagaagtaacagctttattgggctgtatctggagcagagataaatagaaatggtaatactattaattttaaacccagtgtgtgacaatgatgacaacaatttgtttagcacttactgtgtgtcatgtcgtgtattaagtatgctatgtgcatttaatctca

SEQ ID NO: 19283 - DNA, 1038 bp, Homo sapiens
agcattttttttctgttccaacatttctgaagcagctcagatgtcactatcttgtttctgggatttaaaaaatgttgggccttcatgtgaataaattaatctttagaacttgtcatctacaacttaaagaaaaaaaaaacctcagaatatagataactctaaaatcatatgatggcattttgagtagtaccctcaggtgagttaacttaatttaaaagcactgctaattacagtgtggaccaggaccattgtgggccttgctagaaatgcagaatctcaaatcccttctcagacctactgaaacataatctgcattttatcaaaatctattggtgattcatatgcatattaaaagtttgaaaatcactgcatttcttctcgtgctaaatctgtttgtaaatagtaaatttgtgaatttgaaaaagccatacaaagtttgcagtgagctgagatcacaccactgcactccagcctgggtgacagagtgagactgtgtgtcaaaaaaacaaaaaagaaaaagccataatgcaggagatggtaaaaaacattaattatagggtcattactgaattaccctttctaagattacatatttggaaataatttcactgcttctatttgcatgtaattatagctaattttctggagattcttatgttatttaaaaatgaagccagatctgataaaagctgaaagctgtccagctttctcatcctgccttatccttcaagttctgctctgatgctgtatttggacgcatactcatcaggctgggatatagcaccagcctaaacgcttctaatcttggcgtctctttgacttatacttggtctgtagtttaaagaagtaattaaataattactttttaaacagccttaagaagtaacagctttattgggctgtatctggagcagagataaatagaaatggtaatactattaattttaaacccagtgtgtgacaatgatgacaacaatttgtttagcacttactgtgtgtcatgtcrtgtattaagtatgctatgtgcatttaatctca

SEQ ID NO: 19284 - DNA, 671 bp, Homo sapiens
  misc_feature (1)...(671): n = A,T,C or G
tnnnnnnnnnnnnnnnnnnnnnnnnnnnnnnnnnnnnnnnnnnnnnnnnnnnnnnnnnnnnnnnnnnnnnnnnnnnnnnnnnnnnnnnnnnnnnnnnnnnntgagtttcatgttccatcagtacagagcctatgcattatataaagatgctagagcagaaatagccaactatatttgtttataactttcacatactgtagttttttaatatatactgtattttattcctgctgcaacttgttggggtagataatattcagtaagtcccaaactagcagtttaatgttatggtttgaatgtgttcctcmaagttcatatgttgcaaactgaatcctcaatacaacagcgttgagaggtgagactttaaaatgtgactaggccaggcatggtggctcacgcctgtaatcccagcactttgggaaggtgaggcaggaggatcacttgagcttaggaatttgagaccagcctgggcaacatagtgagattccatctctacaagaaagaaaaaattagctgggcatcactgcatatgcctgtagtcctaactacttgggaggctgaggtgggaggatcacttgagcctgggaggttgaggctgtagtgaaccatgactgtgccactacacccttgcctgggtgacatagtgagaccctgtattacaaaaaaaaaaa

SEQ ID NO: 19285 - DNA, 469 bp, Homo sapiens
ttcaagaccagtctgaccagtgaaaccccgtctctactaaaaatacaaaatgagccaggcgtggtggtacacacctgtaatcccagccacttgggaggctgagacaggtgaatcacttgagtccaggaggcagaggttgcagtgagctgagatcacaccattgcactttggcctgggcaacaagagtgaaattccatctcaaaacaaaacaaaaaacaaaacaaaaacactgtatggctataatatcactttacctgccatatatgccataaaattgttcttcatattatttaagattataatttcatatagaatgctttcaaactatgttcagttgaaactgaaagkaacatagtttatagatttgtttctttgatatgccataacagatgtttaaacaattattaaatatttactcaaaaatagttgacttactaattctgtacatttctgcagatataagaaactc

SEQ ID NO: 19286 - DNA, 469 bp, Homo sapiens
ttcaagaccagtctgaccagtgaaaccccgtctctactaaaaatacaaaatgagccaggcgtggtggtacacacctgtaatcccagccacttgggaggctgagacaggtgaatcacttgagtccaggaggcagaggttgcagtgagctgagatcacaccattgcactttggcctgggcaacaagagtgaaattccatctcaaaacaaaacaaaaaacaaaacaaaaacactgtatggctataatatcactttacctgccatatatgccataaaattgttcttcatattatttaagattataatttcatatagaatgctttcaaactatgttcagttgaaactgaaaggaacatagtttatagatttgtttctttgatatgccataacagatgtttaaacaattattaaatatttactcaaaaatasttgacttactaattctgtacatttctgcagatataagaaactc

SEQ ID NO: 19287 - DNA, 532 bp, Homo sapiens
cagttctagcatctataaccattgtattttactctgctcacttgagacatttcttagcatctgtgtatatccagtattttcagaaaacataggttcccaagttatccgggaaacatgaaaaaactttttatagatgtcctctcctgaataaatctcattgtagaattgctacttaaggcaatttttttttcacaatctggaatatttatcaaaaagaaaggaaatggcttgctcagtgttaagccaagcacatattttaagtgttgtatratttggacaggacaataaaaagggatatccggtaaaaaggaagaatagataagaactatctgccaaaactaaactttaagagatgttgtcatgttacctctttttttaataccttgaacatcttggttacaatttaatcttactatagcctgagagtttaaatgccaatacatgtttatagccctagccctgacactaagtagatttgtggtcttcagaattcctttacaattcaatacaatacatatattgattgtctaat

SEQ ID NO: 19288 - DNA, 532 bp, Homo sapiens
cagttctagcatctataaccattgtattttactctgctcacttgagacatttcttagcatctgtgtatatccagtattttcagaaaacataggttcccaagttatccgggaaacatgaaaaaactttttatagatgtcctctcctgaataaatctcattgtagaattgctacttaaggcaatttttttttcacaatctggaatatttatcaaaaagaaaggaaatggcttgctcagtgttaagccaagcacatattttaagtgttgtatgatttggacaggacaataaaaagggatatccggtaaaaaggaagaatagataagaactatctgccaaaactaaactttaagagatgtygtcatgttacctctttttttaataccttgaacatcttggttacaatttaatcttactatagcctgagagtttaaatgccaatacatgtttatagccctagccctgacactaagtagatttgtggtcttcagaattcctttacaattcaatacaatacatatattgattgtctaat

SEQ ID NO: 19289 - DNA, 532 bp, Homo sapiens
cagttctagcatctataaccattgtattttactctgctcacttgagacatttcttagcatctgtgtatatccagtattttcagaaaacataggttcccaagttatccgggaaacatgaaaaaactttttatagatgtcctctcctgaataaatctcattgtagaattgctacttaaggcaatttttttttcacaatctggaatatttatcaaaaagaaaggaaatggcttgctcagtgttaagccaagcacatattttaagtgttgtatgatttggacaggacaataaaaagggatatccggtaaaaaggaagaatagataagaactatctgccaaaactaaactttaagagatgttgtcatgttacctctttttttaataccttgaacatcttggttacaatttaatcttactatagcctgagaktttaaatgccaatacatgtttatagccctagccctgacactaagtagatttgtggtcttcagaattcctttacaattcaatacaatacatatattgattgtctaat

SEQ ID NO: 19290 - DNA, 553 bp, Homo sapiens
gctagctttctaacagtcttgtttaacttaactgcagacagcatgaggccagggaaaaggtgaacaatatttctagccttatctggcatctagctatattcatagtttaaaggtagtcctcaaagaaacaagagtcagggtaaaagagctaatatttgagtacctactttcaacatatatgtcacgtgctgtgctaacagtccctcttttttatttttcagtcttatttaatactcatacccacataaaatactggtgctcccagcagtcaaatatctttctcaggaactcacagctggtaaataacagagctaacattcagacagaggtctgttcacactacatacccttgggaacagaaaggctccagggaactgcagggtcctgggtatctttgtgacgacattcctccagggctagaagagctgagggaactgatgacagggtgagaaaggcaagcagacttcctcaaatataccatggaaatggcccttttgcccttcctaacaatgttctcttggggatatgcttagtagasaaggaagatgatgta

SEQ ID NO: 19291 - DNA, 1258 bp, Homo sapiens
  misc_feature (1)...(1258): n = A,T,C or G
tgtgtgtgcatgtatgtgtgtgtgcacttgtgtgcatatgcacttgtgtctacatgtgtgccttgctgtgtgtgcacacatgtgtgtgtgtgcatgtgtacatgcctatacatgtgtgtgtgcttgcatctgtgtgtgtttagttctttgtttgattagatcatcctatattcgagtgcaggctcttagtgtcctgtctttggggatcctgtgtcagactcccaccttgatgagctacctggctgagccatgaacacctgagctgtagctctctggtctttagcacatagtccagtacgaagtagcttcagtcttttcttaatgatctaaagctttcctttaactttgttttcttttttttcccacccctgaggattttctattttctttaagttaaatgagacatttaatagatttttattttttatgttaaacttttgttttaaagtgagaactttgttcagatattgaattggtcatactgctggaaacatataactaaactttaatttcaaactacaagtcaaatcatataatctaacagatagtcagacacaaagaaaatacataaaattaatacttagggaaggtaaatgagacacctgcagccaaccctcaatttacttagagtattaattagaaactgattcgttcataagtgaatataacaactatgttttctattaactttcattttgtccttatttcaagacagtgtgtttattcattggttgagtggctagcttaatcctggattttaactgtcaatggggaatatgaggattgtgaaataaattatttagaaaaccactataatacaggttttgctaagaatttatccttatgcccacgcggtttttggatgactggcattttagaagcttaaatattttattgcactgatataaaatgtaaatgactaatcattactgcgattaaaccaaaaagaaacatgtatgatraagacagtatcttaaatctaacagcaattaccacaattatttttcagattcgtcaggtacctgatattcctgcatataacagcatgtggacttttacgcctgggagcgacctggaaattctattatctagctctctcatagtaggtgagtatggtgttaggggagtcgatcatgaagaaatactgacctttctgtgtntggtgatactagattcataaagtatctgagaggcatgcataagctctaagctcatgcatgaaggacaagtagatttggaagacatccacactttcttc

SEQ ID NO: 19292 - DNA, 1725 bp, Homo sapiens
  misc_feature (1)...(1725): n = A,T,C or G
tcggtcatgggggattgtcacgcaaatggcaatattttagactttcacaatgccttccatgaacacrttcatttgggtaacaatgggaatagtttatactattttagagttttagaactacaaagacaactaagatagcttttcagaattctaaatatcacatataagggcatggaaaaagttaattcacattttgggggatacacagctcgttagtgctgcaaacaatggcagaagataaatctggagtgacaatctgatactctataatgcagcttaggtcatggattacctcctgtgctagcaaatatcatcaccatgctaattgttctcgaatattatgcatcagaatcacttgcaggatttgttaaaatcatagaatttagggccttatcccaagaatctctgttttagcacatctgggttggggcttgatagtttgcattttcctaagtttccaggtcatgccgatgctattgagccggagaccaccctttggaaccacctcttatactatgttcattttataatacacatcatcatttcttcttgcttatgcacccaaaccctctaacatcataattgtctcctatcaacctcacaaccactcacatttgcaactgtaaataggcaggcctggctttgacgcagggaacaacgctttcttgtaagacaaacatcgtcagtaatggatgtgcgcactctgtcttcaccccaacactactttcaaggtctcctatgaggtgaggtatccttcattcatctgttgaacagcaaatcttttggattcatattttattgtagatgcaaacaaacaatacaagatgataattgttgtaacagaaaaatgtgaagagtgtcaaataagcaaagaaggtaaaacagaagtcttgaagttcaaagactggagtagcacttgacattatgcttagggaatggagaatgggtggggtttccataggttgacaaattgagaaggaaatttgtgaataaaatgcctaaaatgtaatttagtggttcatttcactcatttactcattcatttattcatcagcagatctattgactcccccggccaaattttcactagataacaaactctaaggcattaggcatgaaaaataactgagcacatatttccgctttcagtgacagggcaaacagcattgtgagtgttttaatggtaatgtggccagatttcctttagaacactgtggaagagtgattaatttgtcctgaggaaattggcatatcttcctaggagggaagagttagttggagaatatactaccttggctttaaatcattaactatatttacaatcggagtatgtagctaacatgagctaattttgcaacaaataaattcacacatgtattaggactcaaatgaaatctcatggttattcttgttagacaacactaagctttctctgccagggtgatacatggatccaggctccttccatggtgtagttctgggggccttctcgctncacaccacctgtgtccacccagcagaatgagaaatgacaatttagagcggcagtggcaggtgcctatgagctgttcggttcttctgctcaccttacgttaactagaaatcagtcgtgtggctacaatgaactgtaagagagaattggaaatgtagtgtagttgatccagggagaagaagaaatccaggatttgagaaaaggatacttggtataatagtaggtgcaaatgc

SEQ ID NO: 19293 - DNA, 1725 bp, Homo sapiens
  misc_feature (1)...(1725): n = A,T,C or G
tcggtcatgggggattgtcacgcaaatggcaatattttagactttcacaatgccttccatgaacacgttcatttgggtaacaatgggaatagtttatactattttagagttttagaactacaaagacaactaagatagcttttcagaattctaaatatcacatataagggcatggaaaaagttaattcacattttgggggatacacagctcgttagtgctgcaaacaatggcagaagataaatctggagtgacaatctgatactctataatgcagcttaggtcatggattacctcctgtgctagcaaatatcatcaccatgctaattgttctcgaatattatgcatcagaatcacttgcaggatttgttaaaatcatagaatttagggccttatcccaagaatctctgttttagcacawctgggttggggcttgatagtttgcattttcctaagtttccaggtcatgccgatgctattgagccggagaccaccctttggaaccacctcttatactatgttcattttataatacacatcatcatttcttcttgcttatgcacccaaaccctctaacatcataattgtctcctatcaacctcacaaccactcacatttgcaactgtaaataggcaggcctggctttgacgcagggaacaacgctttcttgtaagacaaacatcgtcagtaatggatgtgcgcactctgtcttcaccccaacactactttcaaggtctcctatgaggtgaggtatccttcattcatctgttgaacagcaaatcttttggattcatattttattgtagatgcaaacaaacaatacaagatgataattgttgtaacagaaaaatgtgaagagtgtcaaataagcaaagaaggtaaaacagaagtcttgaagttcaaagactggagtagcacttgacattatgcttagggaatggagaatgggtggggtttccataggttgacaaattgagaaggaaatttgtgaataaaatgcctaaaatgtaatttagtggttcatttcactcatttactcattcatttattcatcagcagatctattgactcccccggccaaattttcactagataacaaactctaaggcattaggcatgaaaaataactgagcacatatttccgctttcagtgacagggcaaacagcattgtgagtgttttaatggtaatgtggccagatttcctttagaacactgtggaagagtgattaatttgtcctgaggaaattggcatatcttcctaggagggaagagttagttggagaatatactaccttggctttaaatcattaactatatttacaatcggagtatgtagctaacatgagctaattttgcaacaaataaattcacacatgtattaggactcaaatgaaatctcatggttattcttgttagacaacactaagctttctctgccagggtgatacatggatccaggctccttccatggtgtagttctgggggccttctcgctncacaccacctgtgtccacccagcagaatgagaaatgacaatttagagcggcagtggcaggtgcctatgagctgttcggttcttctgctcaccttacgttaactagaaatcagtcgtgtggctacaatgaactgtaagagagaattggaaatgtagtgtagttgatccagggagaagaagaaatccaggatttgagaaaaggatacttggtataatagtaggtgcaaatgc

SEQ ID NO: 19294 - DNA, 546 bp, Homo sapiens
aaaaaaactacgatattatcaccatcagtgaaatctatttytgaaattgagaacaattcttgttaaacagttgagcttaatatgacttacactttcatcactttactgcaaaggtcattgtatagtgatataaaaaaatttgcatttatatataaaatggaattagactagaggctcaggtaaacattttctggaaatctagcaggccattcaaaagtcaggaaaagaataggcaactctttgttccatttgacagcccacataggaagacacttagtattcctgtcccatccattaaatgatattactgatacacaatcattagacaataaaatttacacactgcccctaaattttctaatttttcccttggcaatgatacgttttctgtctaaattattacacgcccctcaccaacccactgtgatctcctgcctttactttacttagttccacatctcatttcatttcatcctcattctttccacatttgataaacctatgctaagctgtggctcattaataatggtccaggctggaaatgtc

SEQ ID NO: 19295 - DNA, 546 bp, Homo sapiens
aaaaaaactacgatattatcaccatcagtgaaatctatttctgaaattgagaacaattcttgttaaacagttgagcttaatatgacttacactttcatcactttactgcaaaggtcattgtatagtgatataaaaaaatttgcatttatatataaaatggaattagactagaggctcaggtaaacattttctggaaatctagcaggccattcaaaagtcaggaaaagaataggcaactctttgttccatttgacagcccacataggaagacacttagtattcctgtcccatccattaaatgatattactgatacacaatcattagacaataaaatttacacactgcccctaaattttctaatttttcccttggcaatgatacgttttctgtctaaattattacacgcccctcaccaacccactgtgatctcctgcctttactttacttagttccacatctcatttcatttcatcctcattctttccacatttgataaacctatgctaagytgtggctcattaataatggtccaggctggaaatgtc

SEQ ID NO: 19296 - DNA, 528 bp, Homo sapiens
caagatgaaatacaacaatcacaaacactggcaagtattaaatatcaatcacttggaaaaatatattgattgcatgcctcctgtgaacaggtacctgaccaaagcaatctggatatgcaaaggaactgaaagatacagaaactggcattgggaagtgcataatagaatgcaaaagatacaggaacatgctggctgatgggaaaattggggaagtgcatatttttaaacagcccaacagatagtgaaattgttaggggcgcagtaaatgtgcagtaaattacaattaaattgaatgataggccactaaycatgtaaacgatcttgggcaatatagggtgtgaacaagctttcaaagaacatgtcacacagaaatgattaggtttttacattcaataaatttagttagcatagattggttaagaaaatactaaacttctactgggtatgagactttctagatgcactggacatatagagatgagtaagaactggtcactctcaggaagctctagtctattctgggaggcg

SEQ ID NO: 19297 - DNA, 528 bp, Homo sapiens
caagatgaaatacaacaatcacaaacactggcaagtattaaatatcaatcacttggaaaaatatattgattgcatgcctcctgtgaacaggtacctgaccaaagcaatctggatatgcaaaggaactgaaagatacagaaactggcattgggaagtgcataatagaatgcaaaagatacaggaacatgctggctgatgggaaaattggggaagtgcatatttttaaacagcccaacagatagtgaaattgttaggggcgcagtaaatgtgcagtaaattacaattaaattgaatgataggccactaacmatgtaaacgatcttgggcaatatagggtgtgaacaagctttcaaagaacatgtcacacagaaatgattaggtttttacattcaataaatttagttagcatagattggttaagaaaatactaaacttctactgggtatgagactttctagatgcactggacatatagagatgagtaagaactggtcactctcaggaagctctagtctattctgggaggcg

SEQ ID NO: 19298 - DNA, 580 bp, Homo sapiens
ttgtatttttagtagagacggggtttcaccaagttggccaggatggtctctatctcttgacctcgtgatccacatgccttggcctcccaaagtactgggattacaggtgtgagccaccacgcccggcccattattacaacttctaacacaaacttttacttggccagagcgggacagaaatctgaaatccaaggtcacagggtctgtgttggactcctcttgggtcctttataatgtagagccacctcctgaaacatcttttgcttctctcctgctctcataccctccatggctccccattgcccttagggaacaaagccgaagctcctgagcccatgcccagccctgcggtcctcctctgaggacactcctgccccacgcattccagacaccggctaatctctagattccaaggccctctcccacctcttagctgagttccagtgccacattcttgctgtgtgaccttgcaagctctgttttcttctctgggccagggctgagggggaggaaaagctcaccttcccccagctktgggggaaggaagcccagaggtcccgcggctgttagctgggaggcc

SEQ ID NO: 19299 - DNA, 547 bp, Homo sapiens
tgcccaggctggagtgcaatggcctgttctcggctcaccacaacctctgcctcccaggttcaagcgattctcctgcctcagcctccgagtaggtgggattacaggcatgcgccgccacgcccggctaattggtttctccatgtcagtcagggtggtctcgaactttcgacctcaggtgatccgctcaccttggcctcccaaagtgctgggattacaggcaggagccaccgcgcccagccgaaatatttcaaagatacagaaaagtacagaaggtactataatacaccccgaatcaagcaattattattttgctatgttttattcagtygttttctcaaagaaatataggatctcagaatcagtggatgcccccctccacccccagctcatgctcttctctgtgccccctcccataaatacctgcccctacatctataaataatgccacctgtttgctgtcaccagaaaatgtggggcttgttctagaacttcacataagtggggccagacagtaggaacccgtctgtgtctggggaacactgaggta

SEQ ID NO: 19300 - DNA, 559 bp, Homo sapiens
tttgtgattttttcttaaaactcctgaatattggctgaaattgcgtacctgatcttttatgaagcctctgctttcattcgagtctttaacagagtagtcagagttattttaaaattaaaagccttttttgacagttataatatactatatttcaagcatattttgatatggaaacaatckaaatgtcaattgattaatatgtaaagaaagtatcaatacatatatcatgtaaaacatatgatctatatatgtatatagagttaaatacagtatatatgttttggagatatagatgatctatatgcatatagatatatgcatatacatgtaatatgcatcatatacatttacatatattaatatatcataccttatattatttatcacatattatataatataatattgtgtatatataatattgtgtatgtaatatattatatattatatatacatatatagtaatctatataatctataattataattatatatttattatgtaatataatatataatacatacattatatattatattttatatacaatattatatt

SEQ ID NO: 19301 - DNA, 559 bp, Homo sapiens
tttgtgattttttcttaaaactcctgaatattggctgaaattgcgtacctgatcttttatgaagcctctgctttcattcgagtctttaacagagtagtcagagttattttaaaattaaaagccttttttgacagttataatatactatatttcaagcatattttgatatggaaacaatctaaatgtcaattgattaatatgtaaagaaagtatcaatacatatatcatgtaaaacatatgatctatatatgtatatagagttaaatacagtatatatgttttggagatatagatgatctatatgcatatagatatatgcatatacatgtaatatgcatcatatacatttacatatattaatatrtcataccttatattatttatcacatattatataatataatattgtgtatatataatattgtgtatgtaatatattatatattatatatacatatatagtaatctatataatctataattataattatatatttattatgtaatataatatataatacatacattatatattatattttatatacaatattatatt

SEQ ID NO: 19302 - DNA, 569 bp, Homo sapiens
tggagaaaatgaaggtttctatgtcgtagtgtaattaggaagatccaatgatttaatgaatgtttagcccttagcatggtgcctggcaggaaccaagcacttgggaaacattagcagctgctaaaataggtaactgcctccccacctccccaccacgtcctgcaggatctcacagtggagtaataagtgctaggacmaaaggacaagcaacatctcatgaaagcagagataaaagtgccttcctcaaatactcaagggctctctggtgcaagaggagttaaatattgtatgaaatactaagcatttagccaagaccaatacagtaaagtcttttcctacaggcagaagaggccatagctagaaagggctacctcaataggtggtgagttccccatcactgcagatgttcaaacagactctgcacagcacccttctaaaatgttgaagataagatccaagtactgtcatatggaaatatatgttcctaaatgtcacttttaatcttgaaatgccatggataattatttctgagcctgaggatcacagaaagctgccaccgagatagcgaa

SEQ ID NO: 19303 - DNA, 545 bp, Homo sapiens
ctctctgggccctgcttctgtttctcaaaaggtaagtcaatttagttttagtggtaataaatagataaatgatttaaataaagaccagctcaattctgaaaaagaagaaagtaacttcaaaaaaatgattaatgtttaacatgctctctttagaaataccatatagacttaaatagtctggactagtttttcttggaaatgatcatcatracttctggaactattttaacaggcgtggaaatgtgctttaggttttttgtgtgatcaaaaattggaatgactagctcagcatctgtctcagtcagtttggctgctgtaacagaaataccataagttggctgggttaagcaacaagtatttatttctcacagttctggaggctgggaagtccaagagcaaggtgtcagcagattcattgtctggtaggggtccactttctgtttcatagaggccgtcttcttgctgtgtactcagcatgcaagcaaagaggcaagagagctctctggggtttcttttataaggttgttaattccacttatgaggct

SEQ ID NO: 19304 - DNA, 508 bp, Homo sapiens
tgtgatatctataaattgtattatttattgtctgcttctccttattagaatgtagaatgctrctgagtggctgttttgtgtgttttgcttccttcttttccctctagagcaatgactggcatgtagaaggtacttacaaataatcataatataaagcaatgaagtggagaaaaccaacagagtctttcaaaggaatataagagaaacatcaaactcatattggctgaagctatgtctcatttggtcatgtaagggtgtctgatttgtttggtgaaaagggtggtgcctgcctctatgtactttaggtataggacacagaatgctcatgagtcttgcaattaaagaaaatgtttccttggagaaatgggtggcataaagcctcagagggcccagaatgagtcaaaacaaatcaagtgggagagttgagcaggggtaggaacatgcacggccttctaaactactgcaaatctggattccttgaacacagtgagaataaggagttgggtca

SEQ ID NO: 19305 - DNA, 565 bp, Homo sapiens
cccaagactgggcaatttacaaaagaaagtggtgtaatggatgtacagttccatgtggctggggaagtctcacaattatgacagaaggcarggaggaacatgtcatgtcttacatggatggcagcaggcaaagagaaagagcttgtgcagggaaactcctgttcttaaaaccatcagatctcgtgagacttattcactatcacaagagcagcacgggaaagacccgccctcatgattcaattacctcccaccaggtccctcccacaacacgtgggaattcaagatgagatttgggtggggacacagccaaaccatatcactaggtgattgtttttcttctcttgtttcactggtcttagtctccttggcctcagctagaccataagaaagagcaaacgtgtgctttgttgttatttattactatctgatccaatcatgatattttagagccagttttcttctcctgaaaacctggggcagtttgcatcataaaccacagcaagagagatcaacagtgattaagtggcaagcagtgctactgagaacaagtttttcacaacacgct

SEQ ID NO: 19306 - DNA, 565 bp, Homo sapiens
cccaagactgggcaatttacaaaagaaagtggtgtaatggatgtacagttccatgtggctggggaagtctcacaattatgacagaaggcaaggaggaacatgtcatgtcttacatggatggcagcaggcaaagagaaagagcttgtgcagggaaactcctgttcttaaaaccatcagatctcgtgagacttattcactatcacaagagcagcaygggaaagacccgccctcatgattcaattacctcccaccaggtccctcccacaacacgtgggaattcaagatgagatttgggtggggacacagccaaaccatatcactaggtgattgtttttcttctcttgtttcactggtcttagtctccttggcctcagctagaccataagaaagagcaaacgtgtgctttgttgttatttattactatctgatccaatcatgatattttagagccagttttcttctcctgaaaacctggggcagtttgcatcataaaccacagcaagagagatcaacagtgattaagtggcaagcagtgctactgagaacaagtttttcacaacacgct

SEQ ID NO: 19307 - DNA, 564 bp, Homo sapiens
attaaggtgccctgctagtcctgaacacaataccgctttgtataaggaggtgaaaaaaagaacctaggaacacacattccttgaagatarcctgaagagagtcagtgtttcagaatgagttgaaagatttggttaaatgcttgtgaatacaagtagtggtttaaagttagatgtaaaaatgtctgtgatatttatcttttaaaatgtaggcaaacttgaaataaaagacaataaatcacattacaataatacactgaaatgcagctagttacatcttagtctgtctcttaaaatgacagagagggtttgggataaaatcaaatagaacacagaaaatgaacattgatgacctttagataaaagagaaataattgaaataggatgtattattccttattattgctaagaataggacaaaagggaatgtttttatgtttaaacaaagaggaacataagtaaaaataaatgtgattaactgtagtcactatgttgtacaatagctcacttgaacttactcctgtcacctaattaaaattttgtatcctttgaccagtatctccccaa

SEQ ID NO: 19308 - DNA, 564 bp, Homo sapiens
attaaggtgccctgctagtcctgaacacaataccgctttgtataaggaggtgaaaaaaagaacctaggaacacacattccttgaagatagcctgaagagagtcagtgtttcagaatgagttgaaagatttggttaaatgcttgtgaatacaagtagtggtttaaarttagatgtaaaaatgtctgtgatatttatcttttaaaatgtaggcaaacttgaaataaaagacaataaatcacattacaataatacactgaaatgcagctagttacatcttagtctgtctcttaaaatgacagagagggtttgggataaaatcaaatagaacacagaaaatgaacattgatgacctttagataaaagagaaataattgaaataggatgtattattccttattattgctaagaataggacaaaagggaatgtttttatgtttaaacaaagaggaacataagtaaaaataaatgtgattaactgtagtcactatgttgtacaatagctcacttgaacttactcctgtcacctaattaaaattttgtatcctttgaccagtatctccccaa

SEQ ID NO: 19309 - DNA, 564 bp, Homo sapiens
attaaggtgccctgctagtcctgaacacaataccgctttgtataaggaggtgaaaaaaagaacctaggaacacacattccttgaagatagcctgaagagagtcagtgtttcagaatgagttgaaagatttggttaaatgcttgtgaatacaagtagtggtttaaagttagatgtaaaaatgtctgtgatatttatcttttaaaatgtaggcaaacttgaaataaaagacaataaatcacattacaataatacactgaaatgcagctagttacatcttagtctgtctcttaaaakgacagagagggtttgggataaaatcaaatagaacacagaaaatgaacattgatgacctttagataaaagagaaataattgaaataggatgtattattccttattattgctaagaataggacaaaagggaatgtttttatgtttaaacaaagaggaacataagtaaaaataaatgtgattaactgtagtcactatgttgtacaatagctcacttgaacttactcctgtcacctaattaaaattttgtatcctttgaccagtatctccccaa

SEQ ID NO: 19310 - DNA, 1043 bp, Homo sapiens
acaagaagaggtctctctggaagtgtcccaaaaggctgatgacattggctatactccttgtgctctcctttcttcagagaggaaatgaagaaacaacagcacctctcttggtactgagctatgctgactcgggggaggaggcatcatagacaaaatcaaactactactcctattcatctcaacataggcattctctgttcagtgatttctggggctgctgcaacttcttaattgtattctgtggttctcacagaagtattctggtctgtatatagttgttaaattggcattcygtgagggctggggggcgggggacaataaggaccttttattctgccatcttgctgacatcaccctagcatcatatttcttaactgtaggagtatgtcagtcattttcactagaaactagaaggccttgggatgagattgtctgtcttgctcatcactatgtcctcagtactcagcatagagtaggtgctcaataaatatttgctgagaagttaataaataaatagatataggtatcttctaggatatagagattatgtgtatgcttttgttgtagagagtggagttagggataaacacctagaaagaaatatttcaaggcgagctaaaacgttctttatgtatatgacaacaggtgatggggaagatggtggcatagtgtgtattagaaagtgcctgtgcctcagtagttgtaaacaatataaaaatattcacagtcaaatgattcagaggacctagtaagaattaccaaatgaatttgtttaatatactacttctgtcccagaatcttgtatatcacagctgcttaataaatatctctctatgtaaattcctaatcctttacctaattttacaaatttttatgtgtgtgcatgcgcatctggaattatgaacatagactgagtgaatgtgctttgcaaagggaggctcgattgaaaaccacctttagcagtataagatctgcatcttatcttggatgagaaatgatcttcagcaatacataccagtggatatgtttctggcctttctaat

SEQ ID NO: 19311 - DNA, 862 bp, Homo sapiens
ccatttgagtaattaaagtgtgaggatgctagtgtgtctttagcactgctgattctgcttaacattcaatactgtttctattccatattctattctctatagtattacattccactgtctgtatttatgagaacatttgacaatattccagtacattatttttaaaaatgacttctgtttttccccacttttatcaacttattcttgtcttcaggtactattattgcttcctccctcattgatattgtctttaaagttcttatagccttcctctttgttactgctactttaagatgggatcttaaatcattttcctgatgttcttgtcgcttgcagctaaagcttctaaccttttgcacatcatagcagyatacagagaaactattaatgtttatacagcacactagatatgtggttgagtgtgttcacactgcaggtggctatctctgggtctcctcgcagcttcagaccctgcctggctgcacaagaccagaacaatcagaacacctgctaactactcatacagaatggcaattaggaagctctgccattcgtgtgcatgtatacaatttgtatgggtataccctcatgtacacccatacaaatagtagcatgagctatatttatacattcttattggatttctgaattaaatggaaaggaaacttcatgtttccacatactcattagcttctcccttaagagcctttaattcagcgaatttagtgaaccaataagaaaacaagatataattagaatgcatttagctttttaaaagcagatgaggcaaaatcctgattgtgatttaaaaacctttcgtgcattttgagtacaaagattttgataaacaatcaataatttt

SEQ ID NO: 19312 - DNA, 857 bp, Homo sapiens
ttttttttttttttttttttttttttactttgtactgaagttatcagaataaaatatattttgctatttaggcctttggatggaaactatttttctcatcaatttctaaaagtaacatcagtgctaaraaaaaaaattcagggttattcaatttggaagttagatttctttcaattttaaacttctagacagacagagctgtgaaccaagatgttaggcaaaaagccacataagatttttaaaaatctagtggttttgttcttagaacatgtaataccaatgatgtcaagtcaccaagaaagttctatttcatccagcatctttggtttaagaatgcaataaaatatttaatatacctttaaaatgttttcattgttaatgataacaaactcttaacatttgtactgctatattcataataaaatctaccattctttaggtcctagtactagacacgtatttaacatatatgtctcattaaatacacccaccaaaatagatgatagttttctgatttcccaaatgaggaaataatggccctgagaagcataagtatttgcccctgcttatctgaaaagacagttgaaatctttgtataggtatcccaaaccccttggaaaaagactgcttaaagtctgaatatgctctgatagtttttccctttaaacttctagtattactaaatttctcttcataattctttagcagttagaccattttacataattgtcttcagatgaagaactttgtcctctgaatagaagtaaaaggcctcggccgggcatggtggctcacgcctgtaattccaccaatttgggaggccgaggtgggtggatcacctgaaggcaggagttcaa

SEQ ID NO: 19313 - DNA, 1406 bp, Homo sapiens
tttagtagagatggggtttcaccatgttgtccaggctggtctcaaactcctgacctcaagtgatccacccactttggcctcccaaagtgctgggattacaggcatgagccactgagcccagccgggaacccacaggttttttggatggtctctgaatgtcatgtaactcttttattttttatcaaaaaaaatttttttgacacartatcttgctgtgttgcccagactggagtgcagtggcaagatcacggctcactgcagcttctaactcctgggctcaagtgatcttcctgtcacatgagtctcccaagtagttggaacacaggtgccagccaccacacctggctaatttggtttggttttgtttttttagagatgggctcttgctatgttgcctatactggtctcgaactgctggcctcaggcaatcttcctcccttggccacccaaagtgctgggattacaagcatgagccactgtgcacagctgaaattttttgacttagtctttttgtacatgtgatattttattcatagaatccataaatggaagggaaatttctgagttcagagcaatacatatgatacaaaacttgatatatagactagagtttcttagccaaactggaggggctggcttaggtaatccatggattccctgaaactggggacaccattggaaatatgtgtgagctcaggggcagtttcctatgatttttaggcctcaaaatgtctcttggactcaaaattgccttagggcagaggacgtgtgtacccccagtatagaatctcggacagtgaatgtgagtaaacattcggcagaaaagtctgccaaactgagtgctctgatgtgactttttcatcaagtcagtattcctgggatctcttgtacgtgataatctcactcttgtacatgataatctcactcttgtacatgatactctcactcttataaggtttcatcgtttctgcttaccctagttttctttcccactctgttccctctcccaccagactggactctgaaatgggcatgtacagagacgaagagaccccaacatgcttcaggctttgagtggagaggacacagcctctgctgggacagggaatagagggatgtggagtccctgaagatgcttttggacaatggtctgaggttgggacagtggcaggagataccattcacccaggatctccaggacaagagatcagcctggcagttacatgtgttttttttcaaactggttgccaggttggcatgaacgatgacatcagagattccgaccttcctgattggagggaccggactccgtggtgcctggagatcagttggacaacagtatcttctcagagctgttctctactcctgacttctcctaggcttgagaattgataacatactcttct

SEQ ID NO: 19314 - DNA, 516 bp, Homo sapiens
agttagcatgggtaattcattgagcaatatcaaaatattttctatttcagacttggatatttggacttaatcatactcacttgtgtggaaagggggacagaaaagtaaacttgctcatttccaattaaacccaggaatgagattaagaccacattcttgaatttttggttcaggtcttacccaagtaagcaaactcatagcttcaactctttgtttggttctcatgaaacgaatgagcaaatacaatgtcaagcagcaaattttacttgctttattttttctacatgtaaaatttcacttgaaaatatgagatgagcagtttagaagtaaagtgcatggaatttggaggcaagmagatttgagcttgtgtaggtgcaatatcaacacttgactctgtcatctggaacaatcacataaactctgtatcccttggattatttacatgttcggtgggaattaaaatactacttaaaaacagaattattatgggagataattgtgatcatacctataaga

SEQ ID NO: 19315 - DNA, 519 bp, Homo sapiens
cagagtgtgagaggaggtgccacatgcttttaaacagccatctctcacgacaactcacttattatcacaagaacagcatcaaggatatggtgctaagctattcacgagaaacccactcccaccattcagtcacctcccattcagccccatctccagcattggggattacaattcaacatgagatttgggtggaggcacagatccaaactacatcatcctctcatccaagagtttcttaacaacaatttaaaattgattcctaggtgaaattagtttttaatatctaagttcattgaattttaatcaaagaatattgcctataagattttaactttctgcaacttacttgttgatgtttcttagtgatctagcgtatgatctgttttgtgtgcacctgaaaaacaaggaatttgttttttcattctgttaactgatttcaaaatgtttattgggtctcaattttctgccaatgcctagtttagactgtaaggatacagaasaaaacaaaataagtgaaat

SEQ ID NO: 19316 - DNA, 535 bp, Homo sapiens
gatttggcaggtggaataatcagttgaaagactgtttaaaaatttagtccctcatatctccaatccaaatttatacatctgaacaaatatccatcccccattctggcaggagacttgaagtttattctctaaggatgataaacagatgatctttgaattaggcaataccaggtacaactaaaacagagataccaaacagaaaacatggggactaagataaaccttatgtataggacctaagatctctagccatcttccctcatatagctcagtaatgttggcagccagatatatatgttcttcttaaattctagaaattttatattgaaatcttttactactgatttccttctattttctctatcctctattcatagaatttcaactattctaaaacattctcccccttctrtggagggggtcaaaggcatcttctttgagaacctatcttccaagagaaataagcacaagacactcaaatcaaaagttttccaaatattatcctagagagaagagcaccattgagaagcactcc

SEQ ID NO: 19317 - DNA, 518 bp, Homo sapiens
gttctgcttctcttagaaggaggcaccttgggcagtcactttgcctgtctcagcctgtttcctcgttgacagaaggcaatgccgagaccaccacagctttacaaatgttgggagaatctcctcaaggtagtgaacaaggagtgctccacaaatcgttttccacgttctcattcatgtgttggtgcgtctgacggatcctcagctgtaaaatggagatcctaataatctccgttattactgattgcattaaagaagttagtcagtgtgaagcatgaagagcattacctggctcacaacgagcactcacccagtcagtgttaggtgtcatcatcatcctgatatatactgtgcaggagggaaaattagraaattctgcagcttgcttttgatatttcttggcatatgcctagtgtcacttatacttggagaactaaaaaatagcatcactggagatttggattgatggggacccatgaccactgggcattgagcctttgtggcaaaatctcagcaagaca

SEQ ID NO: 19318 - DNA, 408 bp, Homo sapiens
cagagtgaggatggggcacagcggccgattccactgcctggcgggaccacttcctttccaggcagggcggagatatgcagggcgtggggaccctgctcggtgcagaacgtgctggccattgggccactttgcacgggccccatgccctggccactctcctcagtgctgaatccatgaaagattataacgaggaggaaagaatttttacctgctcagcggatttgtcctccctctctccttactggttaggagatccaggccagcagttcacactccgttacaaaactctacagagcttccgagctagcagcmgcacacattcggggaacattgaagggattgtcttcttcttttgtgggtggttatgttagtggttgtggagagagagagaagggtgaataaaaaata

SEQ ID NO: 19319 - DNA, 554 bp, Homo sapiens
ctcaaacctttgggctacaggaatcctcctgtcttggcctcccaaagtcctgggattacagacgasagccacaaccatgcctgaccctgtgatgtacacttcaataaatttaagatggtaaattttatgttatgtgtttttaaaacaatgcttttaaagaaaaattgaaaaaaaatccagaattatacatctttctgaaaattaccttcagatcacaaaagtgtttctctcacaaaaggaaaaatatatattaatgattaaacacatggtgaaagtaagactatctccatgactactcacttagacaagataaaactcccattgaaattcagctaagaaaaaatatctaaaattggggtcatatttacagacaaacacacatacttatgtaatctgattgtgatagacatgcataatttatctcttaaacctcaaatggacttaaagtgtacaaacagaattgcaaattgtctaaatatttatagataaacacacatacatatgtaatctgactgtgatagagatgcataatttatctcttagctaaacctcaa

SEQ ID NO: 19320 - DNA, 554 bp, Homo sapiens
ctcaaacctttgggctacaggaatcctcctgtcttggcctcccaaagtcctgggattacagacgacagccacaaccatgcctgaccctgtgatgtacacttyaataaatttaagatggtaaattttatgttatgtgtttttaaaacaatgcttttaaagaaaaattgaaaaaaaatccagaattatacatctttctgaaaattaccttcagatcacaaaagtgtttctctcacaaaaggaaaaatatatattaatgattaaacacatggtgaaagtaagactatctccatgactactcacttagacaagataaaactcccattgaaattcagctaagaaaaaatatctaaaattggggtcatatttacagacaaacacacatacttatgtaatctgattgtgatagacatgcataatttatctcttaaacctcaaatggacttaaagtgtacaaacagaattgcaaattgtctaaatatttatagataaacacacatacatatgtaatctgactgtgatagagatgcataatttatctcttagctaaacctcaa

SEQ ID NO: 19321 - DNA, 554 bp, Homo sapiens
ctcaaacctttgggctacaggaatcctcctgtcttggcctcccaaagtcctgggattacagacgacagccacaaccatgcctgaccctgtgatgtacacttcaataaatttaagatggtaaattttatgttatgtgtttttaaaacaatgcttttaaagaaaaattgaaaaaaaatccagaattatacatctttctgaaaattaccttcagatcacaaaagtgtttctctcacaaaaggaaaaatatatattaatkattaaacacatggtgaaagtaagactatctccatgactactcacttagacaagataaaactcccattgaaattcagctaagaaaaaatatctaaaattggggtcatatttacagacaaacacacatacttatgtaatctgattgtgatagacatgcataatttatctcttaaacctcaaatggacttaaagtgtacaaacagaattgcaaattgtctaaatatttatagataaacacacatacatatgtaatctgactgtgatagagatgcataatttatctcttagctaaacctcaa

SEQ ID NO: 19322 - DNA, 554 bp, Homo sapiens
ctcaaacctttgggctacaggaatcctcctgtcttggcctcccaaagtcctgggattacagacgacagccacaaccatgcctgaccctgtgatgtacacttcaataaatttaagatggtaaattttatgttatgtgtttttaaaacaatgcttttaaagaaaaattgaaaaaaaatccagaattatacatctttctgaaaattaccttcagatcacaaaagtgtttctctcacaaaaggaaaaatatatattaatgattaaacacatggtgaaagtaagactatctccatgactactcacttagacaagataaaactcccattgaaattcagctaagaaaaaatatctaaaattggggtcatatttacagacaaacacacatacttatgtaatctgattgtgatagacatgcayaatttatctcttaaacctcaaatggacttaaagtgtacaaacagaattgcaaattgtctaaatatttatagataaacacacatacatatgtaatctgactgtgatagagatgcataatttatctcttagctaaacctcaa

SEQ ID NO: 19323 - DNA, 697 bp, Homo sapiens
tgcatctcctgatccctggccctcctctggcccccaccctacaggctgccagcagtgggtgaggaggaagaagtgctcccgaaggagaagtatccacctggaccagaccctaaggaacagggtgccacaggaccggcaggttagttttcactaaggggttcccagtcaaagcactgccatcccccaccatggggcagacacaggaggctgtgagaggggcagtgccaaattccacctagcttgggactgagaccagtacacacaagacctcagcataccagcaatgctgatcacctgcacagttgagcctggcacttcacaatttcccagatcctgacacatccacccttcccttcaacaaatacttattgagcactcctctgtgccaggcacggttctaggtacttgggacagagcagcgaacgagatcaacaagatcatgtggaactactattccacactatctctactattcgtgtggagagcaagcaacctgcgaagtcagaacacagaggccagggggatggaggagccataggcggtgagaggagcaggtcgggggccrgaacagccccagctctgaacacattaaatctggggtgccgcctgggtgtccacatggagacacagggatggcaggcagacaggcaagtctgagttccggggaagatccagatgggcatagaaatttgggagt

SEQ ID NO: 19324 - DNA, 970 bp, Homo sapiens
attagtggcttttagctgaaccgctgagacaggtttttatctactagttacctgattttyttattttgtatgcatttagatggatttaaaagagcattatttttctcccttttttccagtatcctttccttggtcctgtacctaccagaatgggtggattctttaattctggctgttctcagtgccagataagctctttttatcttgtcaatgatatttatgagctggataccagtggtttaggtaagtgtacactgtgtgtttatagggtctttgtcatagaaaatgtagtacacgtaataaaatgtctataacctcacatctggaaaattttagagtacatggaagctggaagctgttctgcaaatgtgtggtgtagtgtatgagagggtacagtcgtaggttacaaagtaatgttttagaagcttaagtccattccatatttaaaatcacttgttaggtccaaaagttgaagaaattcttcatttgttgaaaggctgttggattttaaaaatgaagcagtaggctgggcgcagtggctcacgcctgtaatcccagcactttgggtggccaaggcaggcggatcacctgaggtcaggagttcgagaccagcctggccaacatggcaaaagcccgtgtctactaaaaatacagaaattagcgaggcaaggtggcgggcgcctgtagtcttatctactccagaggttgaggcaggagaatcgcttgaaccagggaagcagaggttgcagtgagccgagatggcaccactgcactccagcctggatgatagagcgagactttgtctcaaaaaaaaaaaaaaataaaaataagaagcactaaactttgtagagaagagatttcttttgtaagctcctagtgaaaatcacaaatactccatagaccttttccttttatttatttattttttaaatcataaggttagtagatcctaccattcagagtgtttgaa

SEQ ID NO: 19325 - DNA, 555 bp, Homo sapiens
aaaataacatttaaagatttctarggccaggcacggtggagtacgcctgtaatcccagcactttgggaggccaaggtgggtggatcacctgaggtcaggaacttgagactagcctgaccaacatggtgaaatcctctctctactaaatacaaataaatacatagccaggcatggtggtgggtgcctgtaatgccagctattcaggaggctgaggcaggagaattgcttgaacccaggaggtggaggttgcagtgagccaagatcgcaccattgcactccagcctgggcaacaagagcgaaactccatttcaaaaaaaaaaaaaaaagatttctagtaataacagttaccaattatgaagtgcttttgaattgtatcttagtaaaattactgccaataaaatgaagtttggaacaaaagcaaggaaggaaatgcccagtgctagaattcacggtgtaatgattaatggatgtttctgtctgactaaaaaggataatactcacaatataaagtataaaacaaacattgtaagaaggaactgaagataaagattgtaa

SEQ ID NO: 19326 - DNA, 555 bp, Homo sapiens
aaaataacatttaaagatttctaaggccaggcacggtggagtacgcctgtaatcccagcactttgggaggccaaggtgggtggatcacctgaggtcaggaacttgagactagcctgaccaacatggtgaaatcctctctctactaaatacaaataaatacatagccaggcatggtggtgggtgcctgtaatgccagctattcaggaggctgaggcaggagaattgcttgaacccaggaggyggaggttgcagtgagccaagatcgcaccattgcactccagcctgggcaacaagagcgaaactccatttcaaaaaaaaaaaaaaaagatttctagtaataacagttaccaattatgaagtgcttttgaattgtatcttagtaaaattactgccaataaaatgaagtttggaacaaaagcaaggaaggaaatgcccagtgctagaattcacggtgtaatgattaatggatgtttctgtctgactaaaaaggataatactcacaatataaagtataaaacaaacattgtaagaaggaactgaagataaagattgtaa

SEQ ID NO: 19327 - DNA, 839 bp, Homo sapiens
aggggctcctgatgatgcagctgggacctccccaagccctcagctctgcctccctccatgatggctccatggtcagccaggctccccttggcatcttcatctgcgtccaacaggggtgggctcctccaaggcaaagcaaaagccattactggagagagggaggcagctggtgcagaaaccagtgcccctggtggatgggagggtggggcttttcctgagatggaaaaggcagactgaggggcacaggctgctgtggcccagactaaagccatcaccgtctggtctgcctggtctgtggggaccctcctcggcctcagcgccccgtctgcagtgcccacccaccagggcccactgatccccattcccaggggtgcagggctcctctgctggaagagggttctgggccagtttgtctctggggcactgaggagggcagatgctgctccaccaaccccgcttccccgcggagatgccctggagctcagctcaggtgagtttccgccccacgaatgaggggtcaggttctccatggagacggcgcggggggatgccgcacagctgctgaaacagaggcccaggagggttattttattttcatgaagaaccgtttacaaaacaccatgyagtgagaaagtcaggcttaagaataacctgaacggggtggttacattttttgttaacaaagaaaaacatatcacttgtctgtatttgtgcaactcgggaaaacgttggccatggatggggactttgtttttttttttacgtctctacagtctctaaatttcctgcaatgatgagttgtgcttagaataggaaaatatcgggaaagttaattttaa

SEQ ID NO: 19328 - DNA, 839 bp, Homo sapiens
aggggctcctgatgatgcagctgggacctccccaagccctcagctctgcctccctccatgatggctccatggtcagccaggctccccttggcatcttcatctgcgtccaacaggggtgggctcctccaaggcaaagcaaaagccattactggagagagggaggcagctggtgcagaaaccagtgcccctggtggatgggagggtggggcttttcctgagatggaaaaggcagactgaggggcacaggctgctgtggcccagactaaagccatcaccgtctggtctgcctggtctgtggggaccctcctcggcctcagcgccccgtctgcagtgcccacccaccagggcccactgatccccattcccaggggtgcagggctcctctgctggaagagggttctgggccagtttgtctctggggcactgaggagggcagatgctgctccaccaaccccgcttccccgcggagatgccctggagctcagctcaggtgagtttccgccccacgaatgaggggtcaggttctccatggagacggcgcggggggatgccgcacagctgctgaaacagaggcccaggagggttattttattttcatgaagaaccgtttacaaaacaccatgtagtgagaaagtcaggcttaagaataacctgracggggtggttacattttttgttaacaaagaaaaacatatcacttgtctgtatttgtgcaactcgggaaaacgttggccatggatggggactttgtttttttttttacgtctctacagtctctaaatttcctgcaatgatgagttgtgcttagaataggaaaatatcgggaaagttaattttaa

SEQ ID NO: 19329 - DNA, 839 bp, Homo sapiens
aggggctcctgatgatgcagctgggacctccccaagccctcagctctgcctccctccatgatggctccatggtcagccaggctccccttggcatcttcatctgcgtccaacaggggtgggctcctccaaggcaaagcaaaagccattactggagagagggaggcagctggtgcagaaaccagtgcccctggtggatgggagggtggggcttttcctgagatggaaaaggcagactgaggggcacaggctgctgtggcccagactaaagccatcaccgtctggtctgcctggtctgtggggaccctcctcggcctcagcgccccgtctgcagtgcccacccaccagggcccactgatccccattcccaggggtgcagggctcctctgctggaagagggttctgggccagtttgtctctggggcactgaggagggcagatgctgctccaccaaccccgcttccccgcggagatgccctggagctcagctcaggtgagtttccgccccacgaatgaggggtcaggttctccatggagacggcgcggggggatgccgcacagctgctgaaacagaggcccaggagggttattttattttcatgaagaaccgtttacaaaacaccatgtagtgagaaagtcaggcttaagaataacctgaacggggtggttacattttttgttaacaaagaaaaacatatcacytgtctgtatttgtgcaactcgggaaaacgttggccatggatggggactttgtttttttttttacgtctctacagtctctaaatttcctgcaatgatgagttgtgcttagaataggaaaatatcgggaaagttaattttaa

SEQ ID NO: 19330 - DNA, 578 bp, Homo sapiens
ctctgggcttcctcctgtcagcgccagcacaattccagtgcctgggagggacagcggcacagcccacccgacagcaagccccacccatatgtccgtggtgaggagcgctggcttgaggtgaccgtgggactaaataattaaagaagacgcagacgtcggccacctggagggccctggggtctttcccrgcaggaaggcacaattacagcccagagtctcccaggccggcccatctcttctcaggacctggatctgcatcgcacccccgggcagggccacggggccggtagacaggctcagtgctcctgaagtgagcccctcataagcaggggggaagccaggcctggcagagccgcacaggtgcccctgctccatgaccccagagagcaccacaggctcccagggaaatcggccacgcaggcttggcgttggtgacctggggaaactcagccactttgaacattaagggggctcctgggtgtggcttccgcgggcccagggcgtctttggcagagtggagaggattctttgagcagagaatgttcccctgacaacccgatcgggtgggttgagcttgg

SEQ ID NO: 19331 - DNA, 578 bp, Homo sapiens
ctctgggcttcctcctgtcagcgccagcacaattccagtgcctgggagggacagcggcacagcccacccgacagcaagccccacccatatgtccgtggtgaggagcgctggcttgaggtgaccgtgggactaaataattaaagaagacgcagacgtcggccacctggagggccctggggtctttcccggcaggaaggcacaattacagcccagagtctcccaggccggcccatctcttctcaggacctggatctgcatcgcacccccgggcagggccacggggccggtagacaggctcagtgcycctgaagtgagcccctcataagcaggggggaagccaggcctggcagagccgcacaggtgcccctgctccatgaccccagagagcaccacaggctcccagggaaatcggccacgcaggcttggcgttggtgacctggggaaactcagccactttgaacattaagggggctcctgggtgtggcttccgcgggcccagggcgtctttggcagagtggagaggattctttgagcagagaatgttcccctgacaacccgatcgggtgggttgagcttgg

SEQ ID NO: 19332 - DNA, 575 bp, Homo sapiens
gtagatcagtaacgcacactcgtgcacacatgcagaataatcgggcccgaaatctcagtaataccaagctgagaaactctgagattataagtaatttttaaagtgtaaatatttataaagtacttattattttgaaggtttaaaaatggaaatatcttaacatttgatttatgtaaatatacagctaaaaaacttaaattcgttcagaaaatcatcagagtggaaaggctgctaagaggctatcccttctattacccctaactccaagcgaaaaatgacctaaatgaattcagacagacagatgggcctctgacggcttatacagaatgacggtcaactaaagataaaaacaagactcacacaacatgatcccagcatttacacaaagagattgtctcgtattttaaattttaaccccagcttcttcagatgtgttagtcattygatgacctctaagattaaacggtatttcagtctgggctagtctttctttttgaatcaaggcggttctggtgtgatgaaaatgtgcttagggaggagagagatctcattacagatgattgagattgagtatt

SEQ ID NO: 19333 - DNA, 488 bp, Homo sapiens
actcattatttttcattayaaaacttgttctaatgtgcacgttttttaaaattttgaaacaccatataaaatgtgccaaatttagcataactgccaaatgtaatcaaagaaatataaactgcagtgtctagacactgactactgttgcacagcagcatcactcctattccttagaatgccgattctttcaagtataagacaggtgtcttccagattatttttttatataaaacaccaaactccatctgaggatttatgaggtggaaaaaaagtctaataagtagtaatcagtaagttcttaagtgttgtgtatgtttcatttaagtgaaattaagatgacgttgatagcgccatctcttggatgatatcagcagtataacaggtccttcctaggggcacacaatatataagcaaacattagctgctagttacagcacacctgtatacattctactaatcactgtgtgtccctaatacgacatactttc

SEQ ID NO: 19334 - DNA, 488 bp, Homo sapiens
actcattatttttcattataaaacttgttctaatgtgcacgttttttaaaattttgaaacaccatataaaatgtgccaaatttagcataactgccaaatgtaatcaaagaaatataaactgcagtgtctagacactgactactgttgcacagcagcatcactcctattccttagaatgccgattctttcaagtrtaagacaggtgtcttccagattatttttttatataaaacaccaaactccatctgaggatttatgaggtggaaaaaaagtctaataagtagtaatcagtaagttcttaagtgttgtgtatgtttcatttaagtgaaattaagatgacgttgatagcgccatctcttggatgatatcagcagtataacaggtccttcctaggggcacacaatatataagcaaacattagctgctagttacagcacacctgtatacattctactaatcactgtgtgtccctaatacgacatactttc

SEQ ID NO: 19335 - DNA, 952 bp, Homo sapiens
tagaagatgagctcacttctgtccatgatttatattgcatttcagtttatgttgtcattggagactcagtttgtgaaggtaagccaatctttgccttgaggaagatatacatctttaggggaagatgggtcttactagatgaaaagataataaatgaaaagagggagaagggaatgcatggtggccccgacaaaccagagaagacaattacatgaacatggacgtcaaccaccaaatgttgtacaggtcaaaaaggaaaagcaaaggactggagaccaagcagaaggggctcacacccctaccagctactcaggaagatgaggccggaggatcttttgagcccaacagtttgagaccaacctgggcaacagagtgagacccctgtctcaaaaaaaaaaaaaagagagagagagagactgggaagtagaagctgagatgatatgagggtcacctgtggcttggacaggattaatgcagggaccattggagatcagagacaaactggagaaggtgcactgaagaagcagagatcatgaatgcagaaagcttgagaagtttttccaatcaggaaagccaagacatgggtctgtcactacaggtcaaaacggagcttgcagggagtcatgcaaaagtatttgtctcttttgaagtttgctgtgacatgagggattcaaagagagttgacagaggaggggaagcttttaaactccagatgatgaaagagctcagaaaggaatcttaactttcttccaaaggggatgagatggacagagtttaaatttctctttcaaaaaatgatgccttcgagggaacagtaagaggagagcaggctaagaggccagccaggtggacgaaaagcatgtttttttcacttaaatttrtgcagtcctgcaaatgtaacacagccagataattccagagctcctgggtcaccgttccctctatcttctca

SEQ ID NO: 19336 - DNA, 558 bp, Homo sapiens
gtcactggtatggggtgactaagcccgccgggaatcaaggctgacagcttcaggcgccagcagagggtcggccggggacattgccttcagaggccactgctcagttggagctgacagggagcccagccatccgtggcctggtggggacacggcggtggtgcccgtgtgggctgagagagcctgtctccctggcctgccctcggatggatcgggagcacccgaccagcggcaggctccaggccttgctttctcatccgagctgacctccgtgtcctgtcttcctgcctgtgaaatgggcatcattacagggctggcgtcccagggtcagtgggtcaaatgctgatacccccttcggcagaggctgggcccagggaaagcttcctgcacccaaggtcattgtcataattaygtgctcatggcaccccccgacactccactggcaacccctggggcctcctcccagggctcagtttccccagactcctcaccagggtcctaccccacccctcatctcccaccagcttcctctccttcccctggcaggggcctctgggccat

SEQ ID NO: 19337 - DNA, 526 bp, Homo sapiens
gtttttttgtttgttctgagacgcagtctcactctgttgcccaggttggagagcaatagcatgatctcggctcactgcaacctctgcctcccaggttcaagtgattctcctgcctcagcttcccgagtagctgggattacaggcatgcaccaytgcacccagctaatttttttttttttttttgtaaattcaatagagatggggtttcataaaatcttgatgctcagatctgagcagttaaaccgagtactggctagaaccaaagctctgacttcatccaacctcaaatagagagtaattaaggtttggcagaatggtgctgttgccattgttgaattaatacataataaatcactgggccatagtttggatatctctgaaaaacagacagatggtgcctatgatattctccctgatattctctgatcttggaaaagttacacatcacactgtacctaccaaaaattaagtctatagaatgtatggagggagcaccatgaagatcaagatctctccagctgtgatg

SEQ ID NO: 19338 - DNA, 552 bp, Homo sapiens
acagttaatttccaaaaaggacagattaaaaaaaaattacaaaagaagaaagccgcatcaacatcttaatgcaagtaagaatatgtttgtagatcattaactgctcaagggtatgaaaagagggaaattaaagctaagtgttaggaaccactgtctattgaagctcattcagcaacaaggatraaatattctgaaattataatgaaagtcaacaagaaaagttaattttaaatcaaaggacaattttccaaccatgctttactaggaaataggttttgcatagtacagcacccttttattaaaaacaaaagtcaacgggtgactatgattcattgtgctatgacatctttctttttagaatttataagtatagttaatcttatccccattaacattaacagtaaggttgtgatttaaaatactatgttggctaaaggcaatggagtattctggatttgatcctgaaacacataaagggccttagtgaaaaactcgatgaaatctgaataaagtctgtagtaatatgccaatgtcagtttcttaattttgaca

SEQ ID NO: 19339 - DNA, 546 bp, Homo sapiens
taaaatattatttcaacatgtaatcaatagacatggaatattaataaactttttgtactatatctttgaaatctgctgtgcattttctacttaggctgtacctcaattcttgccaaccacatttaaacgttcaataggtacatgtggctactagtttggacagagcaaatttagggttctttctccagaaattctgtcaacagaggcatgaagatcaaagctaagacatgaacatyagttcgacataatttttttaaagacatgctgttgttttgtcactcaggctacagcaccgtggcatgatcatagctcaatgtagcctcaaactcgtgggctcaacaatcctcctgccctaacctcccaggtatctaggtctacagacatccttccacacctggcttcaacataaaattcaactgtaattagtaaaactgagtgacgagggtaggattttaaaagtaatattcatgaagaaaaataattgatttaatttttaaagagcaccagaaaaaaaggaataataaacatcaagattgtaacatttca

SEQ ID NO: 19340 - DNA, 469 bp, Homo sapiens
tatgtgctgtcactttctacttgtatttcaagatctcactgtaatagacataattattacgacayttggaatattattcattttaatatttattgagtgcttgttatgttcaagggattgtgttaagctttttaaaaataattttttaagttgagcaaagttaggaactgacatctatttagataaagttttatatttagaagttgacattttaatttaaataccaaacatgataacatatcatgaaaaagtttacactggcaaaaggaaaatgaaacaaattttacatgtgttagctatttgaaaattttggatgtaaatagttgaaagtcattattgctgaatttattgtttttaatggtattagatgtaactgctcaaaatgtctttattttcttgtttcaacaaagactggcaatgtattttgatatatgagatctagtgtgcaagcttcaacttcgattaaata

SEQ ID NO: 19341 - DNA, 541 bp, Homo sapiens
aaaaaaaaamaaaaaaacaaaaaaaaaactatttttccacattattgttttctgttttactggtggcacagtgccttttcttcactttcatttataaccacaaaatttatcctgctaaaagcaggaccactctattttaaacaagcataccttggatatcagctagcaaactaccaagaactctgtccaatatctggatagataaagaggataatgtttgttccctatagattgcattttatgtatttgtttattcatccactcatttgcttatttagttttcagtgtaacaagtattttcagcttttactctgtgccagactcttggttaggtactgagtattgaaagacgaataaaatgctatactttctccaaggagattaaatattccaatcccagtcactcctcacacaaagggctatgccaaatgccaaatgaaaaagttaccactgttccaattatccataaagaacaacacattgctattcccacaatgtgtctagcttaatcagcactgacgtcttaaacctgacaggcaat

SEQ ID NO: 19342 - DNA, 631 bp, Homo sapiens
gcctctccgggtccaatttcaaagaattctaaagccaaagtgcaagagtcagtgctacctcaaaagaaasggaaggttacttggtgtcctggtaccagatgcagtgaaaaaggtgtaccccatggccaggaaactcaggtcagcgtcctggaagggatggttcacactgagggctggagtcaaagcagaatccactggcctgtcaaacaaatgcccagcactcgtttctgggctcatttaactcccactagcacacttctgttttcatgtgcttctagaagtgtcattggacaggatgattttggcccagatgagtgctcccgtttgagacaagaactctgcatggttaaagctactcatagattctcactgatctcattgccttgaaataactaaagatacgtttaattcaatacattttttaatactgagtatctcatgtgccaaatgctactcatggtattatagaagattctaggcccggcgcggtggctcacgcctgtaatcccagcactttgggaggccaaggcggtggatcacctgaggtcaagagttcaagacaagcctggccaagatggtgaaaccctgtctctactaaaaatacaaaaattagccaggcatggtggcaggc

SEQ ID NO: 19343 - DNA, 631 bp, Homo sapiens
gcctctccgggtccaatttcaaagaattctaaagccaaagtgcaagagtcagtgctacctcaaaagaaagggaaggttacttggtgtcctggtaccagatgcagtgaaaaaggtgtaccccatggccaggaaactcaggtcagcgtcctggaagggatggttcacactgagggctggagtcaaagcagaatccactggcctgtcaaacaaatgcccagcactcgtttctgggctcatttaactcycactagcacacttctgttttcatgtgcttctagaagtgtcattggacaggatgattttggcccagatgagtgctcccgtttgagacaagaactctgcatggttaaagctactcatagattctcactgatctcattgccttgaaataactaaagatacgtttaattcaatacattttttaatactgagtatctcatgtgccaaatgctactcatggtattatagaagattctaggcccggcgcggtggctcacgcctgtaatcccagcactttgggaggccaaggcggtggatcacctgaggtcaagagttcaagacaagcctggccaagatggtgaaaccctgtctctactaaaaatacaaaaattagccaggcatggtggcaggc

SEQ ID NO: 19344 - DNA, 529 bp, Homo sapiens
gatctcattctttgctcagagtgtgtaaaataatagtarctaccagttactgggcatcttccatgtaccaagcatcatagttggtattttgtatgttatctcagtttagtcctaacaaccactctttgatggaagttttttcattgcgtacgttttaaaaatgacaaaacagactcaaaaatgttaaatgaattgcttgagtcacacagcaaataagtggcagagtaagattcagcatggcattataaatcatttatcagagcttgaatcccaacttaacctcctactagttgtgtatccttagctaagttacttaacctctttaaatttggcttttctcatccattaatagtggataataccaacctttgcagcgttaaaaggattagaaatactataaaatgcctagcacatactaagcacttagtagatggcagatattggcaatattttccaaatcttatctgtcagacaccaaagtccacattcttcctagtagaccacacttcctccctttaaaataatgcag

SEQ ID NO: 19345 - DNA, 537 bp, Homo sapiens
gtagtcccaggtactcgggaggctgggatgctgaggctggagaatcgcttgaaccctggaggtggaggttgcagtgagctgagattacgtcattgcactccagcctggctgacaagcgcgaaactccgtctcaaaacaaacaaacaaacaaacaactttctccataacttttatgtataaacactggctgatgtacagtcagtcttaacaggacccatttcccatcctggttgttttgagtgagacaagctatgttgtggagcaagagtgccctaatgtgatcaaaaaatgataaaacgaaggaaagtttgtctctccccaaccccctagagaaaccattcayaaagatcctattttaccctgccctagaattcaacaaaaacccttaccttaaatttgtagcagtagctcttattctgagaacatcactgcacctcctagccaagggggaaagcagcttcaataaggcagaactttgcctaaaacaggaagttcgttgatttcaggagaaacttatctgttgcatccagcaggggc

SEQ ID NO: 19346 - DNA, 537 bp, Homo sapiens
gtagtcccaggtactcgggaggctgggatgctgaggctggagaatcgcttgaaccctggaggtggaggttgcagtgagctgagattacgtcattgcactccagcctggctgacaagcgcgaaactccgtctcaaaacaaacaaacaaacaaacaactttctccataacttttatgtataaacactggctgatgtacagtcagtcttaacaggacccatttcccatcctggttgttttgagtgagacaagctatgttgtggagcaagagtgccctaatgtgatcaaaaaatgataaaacgaaggaaagtttgtctctccccaaccccctagagaaaccattcacaaagatcctattttaccctgccctagaattcaacaaaaacccttaccttaaatttgtagcagtagctcttattctgagaacatcactgcacctcctagccaagggggaaagcagcttcaataaggcagaactttgcctaaaacaggaagttsgttgatttcaggagaaacttatctgttgcatccagcaggggc

SEQ ID NO: 19347 - DNA, 521 bp, Homo sapiens
gaacatttttttgggagttaaaactcttggtctgtgacaaaaagatcaataaattgatcaataaattgatctgctatttctctgtagaaagatcacatgatttttttaaacaaaatgatgtcccctcagaaggggagatgttgggaggggaaagggagatgcaaaattacttgttgggtacaatgtacactacttgggtgatgggtgcactaaaatccttgaactcaccactatagaattcatctatgtaaccaaaaaccacgtttacccctaaagctrtgaaatagaaaaaaattttaaaaatgaggccagggtcataccattatttttttctctgagagagaaacagccaaaattatttcatttggaactcattagtacatttactcagcaaatgtttattttgtattatgatgtgataggcaatgatgtaatggaggaagtaccttattctccaatatagataagttttctgcacaaacgcaggttttattcttctgtgggcagacaacacaaacaaa

SEQ ID NO: 19348 - DNA, 521 bp, Homo sapiens
gaacatttttttgggagttaaaactcttggtctgtgacaaaaagatcaataaattgatcaataaattgatctgctatttctctgtagaaagatcacatgatttttttaaacaaaatgatgtcccctcagaaggggagatgttgggaggggaaagggagatgcaaaattacttgttgggtacaatgtacactacttgggtgatgggtgcactaaaatccttgaactcaccactatagaattcatctatgtaaccaaaaaccacgtttacccctaaagctatgaaatagaaaaaaattttaaaaatgaggccagggtcataccattatttttttctctgagagagaaacagccaaaattatttcatttggaactcattagtacatttactcagcaaatgtttattttgtattatgatgtgataggcaatgatgtaatggaggaagtaccttattctccaatatagataagttttctgcacaaacgsaggttttattcttctgtgggcagacaacacaaacaaa

SEQ ID NO: 19349 - DNA, 499 bp, Homo sapiens
ttccattctagtgggaatgggaaggcaggcccccgttgtgctcctctcctggggatgaatgttcactgaggttctgcagtacctctatgccatggctctcctttagtcctggaaacagcattcagactccagtccgtcatagcagtcactcaggatcttacagccagctcagcaacaaacaaaaacatagtctggggctcatagcatcccttccaaagactagattttctgatttcaggtacaagattcttgtggcaaatgacaaaaacaatttgtcaattcttccgaacagaaggtccagcaacccgaacctcccagggtggaccagagagatgctgttgtatatgactatgctctgagagggatgagagtgacaaatgaggctgctaccktgtgatagccctatgacaaaaatgaaaaggatggcagccttggaagccagttgaaggaaagatacataaaacacactagcaagaacagaatgcttactctttctttt

SEQ ID NO: 19350 - DNA, 635 bp, Homo sapiens
agaccagcctggccaacatggcaaaaaccccatctctactaaaaatacacaaattagctgggggtggcagtgggcacctgtaatcccagctactctggaggctgaggcaggagaattgcttgaacctgggaggcggaggttgcagtgagccaagatcatgccattgtactccagcctgggcaacaagagcaaaactccatctcaaaaaaaaaaaaaaaagaaaagaataattttcaaactggaaatgaagaaatgaaaaattatgacagataaaaagatactaagagagaacttagatgctttgaaaatgatcaattcttctgggtcttttaaactaatccccaacatacaaaaagaatttgcaggcatggttggcaaggcattgggagaattttttgaaaacctatcaggaatgaaggaaatccccaactcaggaacacagaaatagtggatygatacccagcaaaattctagagcagattattaacagataatgtgtgggctcttagaaaataatgcagtgatcagtaccaagccagaatgagctcactaaagacatttttaaaacaagtcctaaattcaaaggacttccgtggacttcaaacgtgtcaaatatttgcaagatatttaataat

SEQ ID NO: 19351 - DNA, 535 bp, Homo sapiens
acatttataaaattatatattcaaagagaatgagaaaacagatacatatgcattaacaatggtgcatatatttatacacatagggtatataaatgatataatacaatatagttggatgacttccttttctcaaatagaaatatatcayagatttttatccaagaaagtgcatattagattgatctgctacattttatatggtttcatataattttgtagaacagatgtgatggtaaatttggggtacaaacaaggctagtgtatgataccccattgtttagtgaaacatctatctagatgtccctatgaagatctatcttataagtaattagccactaaatcagtagacattgtgtaaagtagattattttccataatgtgcatgggtgttatctaatcagttgacgaccttaagagaaaagactgaggtctccaggaaagaattctacctccagactaccttaaaactcaagactgcagcatcaactcctgtggtaatttctagttggcctggcttgtagatattagacttgcc

SEQ ID NO: 19352 - DNA, 611 bp, Homo sapiens
gggctgttgttcagcaagagaagtcattgcacaggttatgagagttgggacatgtgtctgcatgaggtgttagagggacagagaacaggaatcccacatccccatcacagacatggatggacacactccatctgcgtttgctccctgaagcagtaatacttccaggctgacactctgatgaccatgtcttctaggatgctcattggtarctcgtgcaaaggatcacattcttcttcttgctctggtttatttgctcttaccaaaacataattccagcttttctgtttatgagtgtgttctttcagagactctgagcaatttgagagatggctcatatgtcacttacctctccaaaaacagaaactggcagaatttgggcactcaagaaatgttggatggatagatgaataggcaaatgcatggatggacagatagttgaatgaatgaatgaatgagccagcagatggacagatggacaaattgatggatagatagaaggatgaatggaaatgaatggatggataggcaggtagatggatagatagttgaatgaatggatagatggatggatgaatgatagagggatggatggatagatggatggatagaca

SEQ ID NO: 19353 - DNA, 540 bp, Homo sapiens
atccattatttcaatcaactggtgagaaagttaccccccccmgcttttttttttttgagacaagatctcactgtgtcacccaggctggagtgcagtggtgcgatcttggctcactgcaacttctgcctcccggactcaagcaattctcctgcctcagcttcccaagtagctaggactacagatgcacaccttgctaatatttgtatttttttgtagagacacatttttgccgtgttgcccagtctggtcccaaactcctaagctcaggtgatctgcccacttccgcctcccagaatgataggattacagacgtgagccaccgtgcctggctgaaagttacacatatttctaatactactgcaatttcttttctatatttatgatagaagaaaatgctatgtttgagttaggagtttgtaaaaataaagatggagtttgtaaaaataaagatgtattttgtcccagccaagttcacaacaaccctaaccaaggacccctcaaagtgtccaacaaaaggacccttgagataaagaagagcta

SEQ ID NO: 19354 - DNA, 540 bp, Homo sapiens
atccattatttcaatcaactggtgagaaagttacccccccccscttttttttttttgagacaagatctcactgtgtcacccaggctggagtgcagtggtgcgatcttggctcactgcaacttctgcctcccggactcaagcaattctcctgcctcagcttcccaagtagctaggactacagatgcacaccttgctaatatttgtatttttttgtagagacacatttttgccgtgttgcccagtctggtcccaaactcctaagctcaggtgatctgcccacttccgcctcccagaatgataggattacagacgtgagccaccgtgcctggctgaaagttacacatatttctaatactactgcaatttcttttctatatttatgatagaagaaaatgctatgtttgagttaggagtttgtaaaaataaagatggagtttgtaaaaataaagatgtattttgtcccagccaagttcacaacaaccctaaccaaggacccctcaaagtgtccaacaaaaggacccttgagataaagaagagcta

SEQ ID NO: 19355 - DNA, 540 bp, Homo sapiens
atccattatttcaatcaactggtgagaaagttacccccccccgcttttttttttttgagacaagatctcactgtgtcacccaggctggagtgcagtggtgcgatcttggctcactgcaacttctgcctcccggactcaagcaattctcctgcctcagcttcccaagtagctaggactacagatgcacaccttgctaatatttgtatttttttrtagagacacatttttgccgtgttgcccagtctggtcccaaactcctaagctcaggtgatctgcccacttccgcctcccagaatgataggattacagacgtgagccaccgtgcctggctgaaagttacacatatttctaatactactgcaatttcttttctatatttatgatagaagaaaatgctatgtttgagttaggagtttgtaaaaataaagatggagtttgtaaaaataaagatgtattttgtcccagccaagttcacaacaaccctaaccaaggacccctcaaagtgtccaacaaaaggacccttgagataaagaagagcta

SEQ ID NO: 19356 - DNA, 540 bp, Homo sapiens
atccattatttcaatcaactggtgagaaagttacccccccccgcttttttttttttgagacaagatctcactgtgtcacccaggctggagtgcagtggtgcgatcttggctcactgcaacttctgcctcccggactcaagcaattctcctgcctcagcttcccaagtagctaggactacagatgcacaccttgctaatatttgtatttttttgtagagacacatttttgcygtgttgcccagtctggtcccaaactcctaagctcaggtgatctgcccacttccgcctcccagaatgataggattacagacgtgagccaccgtgcctggctgaaagttacacatatttctaatactactgcaatttcttttctatatttatgatagaagaaaatgctatgtttgagttaggagtttgtaaaaataaagatggagtttgtaaaaataaagatgtattttgtcccagccaagttcacaacaaccctaaccaaggacccctcaaagtgtccaacaaaaggacccttgagataaagaagagcta

SEQ ID NO: 19357 - DNA, 549 bp, Homo sapiens
ccacatgcagcaagaacctctggggcagcggctccccaaagaacacaatgtcgggcttcacaacgccggtgcagaccgggcagcggggaaccctgtctgccatcacgtcagcctggaaaacagagaaaacaggcctgaggaagatgcctgcaacaccctgtaaaaggaaaaggcaacaagttcttattaaagtctcaaacattctcccccaaaaaaggtgagagagggatcatgaacccccatgtacccagcttcaggaattaccrgttttcatagctaattgtttcacagccctccggaatctgggaggaggtattggagcctttaaaagcaaatcttggacatcatatgtttcacccataattacttcggcaggcatctagcgtatctaacaccatgctctatccctgggatggcagccagagacatccaggcgctaaggaaacacctggtagaccacaccagtcctcaaacagtagtctgcaggcatttggcctacaccgaacactattcagtcagaaaggtgaaactgtctctggtttgagcttc

SEQ ID NO: 19358 - DNA, 545 bp, Homo sapiens
cccaggcccacaggcgtccagtgtctgagatctttgggaagggagactagggcaggtggagacagcgcagaacccccgtgctgggtgggaagcatgaccacatggtgggtgagcagcccccatgcactgacggtaaattcccctgtrgactcatttctgttggtttctattacacctggccaggcgtggtacaatacaggtcggtgctcacaatctttccagcattccactttcacagggcaggatggtggcccccggttccccagtgaggaaagtgagtctcagggggcagcctgactgcagaaagtgctgcgacaggggccctgatggacaggacccgcggcggacagtcctcgaatcctggagttttctctgctcaaccctgctgggctgctgagactccagtctgagtggggaggtggggggagactctggattcagccccatcactgcccaggggaaatcccctactataatccactttctaactccatttcttcatttcacaaaacacaaaaacccctgtcctcctagagctgacattc

SEQ ID NO: 19359 - DNA, 738 bp, Homo sapiens
agggacaggcaacaggattctggagcccctcctaaccttcccctctcctccctcctgcagcctggattctctgcttctgctgtatcctctattttccctcatcacactgcacttaaaatgtctatgtgtccatttccaaactagactcttttagtttttttattaaaaaatatcagggcatttgtgccttgtaagatatgctttgggccttattctgatggctyatttaatcttcacgataacccaaagatgtagggaccactactgtccccattgtatatttgagggtaagagttactttattccctctgttgtcctcagaacccaggacaatgtttgacacagaacaagctctggggacacagagatgaatgaatgagtgaatgcagggatgaactgtgtgccctggggaaggggatactctgtggacacccagcccaaggaaccagagccttctctccagcctttgctactttctttgttcttgtcatcagttctctgcctcttacctttatttctcccagtccttcctctaccacctcaaagacacagatttaagccagctgatgtacagtatccattaaaaaacagtctcttaatttgctaaaattacattttctgttggttttctgaggtttggggaaagaaccagatgggtgttatcgtatgtttggaaagtgccctttgagaacagagacagttaatgactgtttccacatgagtccaatagacagtgct

SEQ ID NO: 19360 - DNA, 738 bp, Homo sapiens
agggacaggcaacaggattctggagcccctcctaaccttcccctctcctccctcctgcagcctggattctctgcttctgctgtatcctctattttccctcatcacactgcacttaaaatgtctatgtgtccatttccaaactagactcttttagtttttttattaaaaaatatcagggcatttgtgccttgtaagatatgctttgggccttattctgatggcttatttaatcttcacgataacccaaagatgtagggaccactactgtccccattgtatatttgagggtaagrgttactttattccctctgttgtcctcagaacccaggacaatgtttgacacagaacaagctctggggacacagagatgaatgaatgagtgaatgcagggatgaactgtgtgccctggggaaggggatactctgtggacacccagcccaaggaaccagagccttctctccagcctttgctactttctttgttcttgtcatcagttctctgcctcttacctttatttctcccagtccttcctctaccacctcaaagacacagatttaagccagctgatgtacagtatccattaaaaaacagtctcttaatttgctaaaattacattttctgttggttttctgaggtttggggaaagaaccagatgggtgttatcgtatgtttggaaagtgccctttgagaacagagacagttaatgactgtttccacatgagtccaatagacagtgct

SEQ ID NO: 19361 - DNA, 548 bp, Homo sapiens
gggattctcctcacctgagatccaaggygcaccacttgtgtttatctgagctcagaggtccatcaggcagccccagagagattagagtgttgtaaattaggtcctttctgctctctccaactcatggaagggaacttaggaccaggccactgtttgctccaaatcatatagcatcaggaatgtggtgagataaagcaagtaaaaacaacacaaattttaccaccattctgattgtggctcttccttgatggggtgtttgcttggttgccttagatgtttggcagatttccagagttcatttactgttaatttagacagtctctaaatgttcatgtaatatttctctggggaaatgagggcctggagcttcctagtctgccttcctgctgacatcactccactagacactgtttattatgttgagttagcatatgattaaaaaatcacttttaaaacatggaaaattacatatttacccattcattcaactttaatttcttgaatacttggaaagttccaggtactgctctagataatagagacccagt

SEQ ID NO: 19362 - DNA, 548 bp, Homo sapiens
gggattctcctcacctgagatccaaggcgcaccacttgtgtttatctgagctcagaggtccatcaggcagccccagagagattagagtgttgtaaattaggtcctttctgctctctccaactcatggaagggaacttaggaccaggccactgtttgctccaaatcatatagcatcaggaatgtggtgagataaagcaagtaaaaacaacacaaattttaccaccattctgattgtggctcttccttgatggggtgtttgcttggttgccttagatgtttggcagatttccagagttcatttactgttaatttrgacagtctctaaatgttcatgtaatatttctctggggaaatgagggcctggagcttcctagtctgccttcctgctgacatcactccactagacactgtttattatgttgagttagcatatgattaaaaaatcacttttaaaacatggaaaattacatatttacccattcattcaactttaatttcttgaatacttggaaagttccaggtactgctctagataatagagacccagt

SEQ ID NO: 19363 - DNA, 548 bp, Homo sapiens
gggattctcctcacctgagatccaaggcgcaccacttgtgtttatctgagctcagaggtccatcaggcagccccagagagattagagtgttgtaaattaggtcctttctgctctctccaactcatggaagggaacttaggaccaggccactgtttgctccaaatcatatagcatcaggaatgtggtgagataaagcaagtaaaaacaacacaaattttaccaccattctgattgtggctcttccttgatggggtgtttgcttggttgccttagatgtttggcagatttccagagttcatttactgttaatttagacagtctctaaatgttcatgtaatatttctctggggaaatgagggcctggagcttcctagtctgccttcctgctgacatcactccactagacactgtttattatrttgagttagcatatgattaaaaaatcacttttaaaacatggaaaattacatatttacccattcattcaactttaatttcttgaatacttggaaagttccaggtactgctctagataatagagacccagt

SEQ ID NO: 19364 - DNA, 548 bp, Homo sapiens
gggattctcctcacctgagatccaaggcgcaccacttgtgtttatctgagctcagaggtccatcaggcagccccagagagattagagtgttgtaaattaggtcctttctgctctctccaactcatggaagggaacttaggaccaggccactgtttgctccaaatcatatagcatcaggaatgtggtgagataaagcaagtaaaaacaacacaaattttaccaccattctgattgtggctcttccttgatggggtgtttgcttggttgccttagatgtttggcagatttccagagttcatttactgttaatttagacagtctctaaatgttcatgtaatatttctctggggaaatgagggcctggagcttcctagtctgccttcctgctgacatcactccactagacactgtttattatgttgagttagcatatgrttaaaaaatcacttttaaaacatggaaaattacatatttacccattcattcaactttaatttcttgaatacttggaaagttccaggtactgctctagataatagagacccagt

SEQ ID NO: 19365 - DNA, 597 bp, Homo sapiens
agccgaggtcacaccattgcgctccagcctgggcgacagagcgaaactctgtctcaaataaataaataagcaataataaaaaatgtaaacagaatttggtccacactccaaaaagcaaccaagagagtggatcagaaactcacttgccgagtttttctgggctagggaggcctgtgcgtggcttctctcagcccccaggcctcccaggggccaccccstgccaggaaaccctttctatgagtgagagaagagcgtggggcatagtggggcagggattcacctctccctcttcctttggggcccagcagcccccagccctgtccccacccatcagagccgctccttggccaccagagggcactcagactctgcaaaccagcctggctctgggtggccagctggggggcgtctcctctcccagctgcctgcctgctcgcatgaccaccccacactcccagcaaacccaccttcctgcagctgcgcccggccctgcctgggcctcagttccccatctgtgcccggaggcactgtggccctgaccccatgggtaactccatgcccctgtggcaggaggcaccagccacattcacattgtca

SEQ ID NO: 19366 - DNA, 599 bp, Homo sapiens
ctcgtggtgccgctccctttggggcgtccccggcctctgccagttcctggagctttgggagatttgggcttcttaggtggtttctgctctcgccgggaggggctccctctcccagttaccgtgaagtcaaaatcattagggtccagggatgtgtcgcctaccttttcgaagtacgcaatcaactccactttagagcgaaaggcttttccctggggactgtggggacaaacagaaagacacaaggaacaattagaggctctccatagcaatgtcagagatagggcagagcggatggtggtgacaacgctctgacaaacgttactaytgaacgagagtcacactgcctggctgcccctgaggacctgtcaccaaagccactcactcgtctgcctgccgctgacccccccaggcctctccaaagttcagcaaccaaagagtcaggcctggtacagaagggttgtcaggctgaggcccattctgctggttggtgcctgggcctgagtcaccatctagaacattcccaagtttgaactcaggtacggtgctcagtctctccaggaatcagtttcaacaagataatcctttgctcacccttctca

SEQ ID NO: 19367 - DNA, 563 bp, Homo sapiens
caggtttggagccagccaacctgcactgaaatcctttgccgctttccaaacatgaacccagcaaatgacctcagcattctgtgcttcagtttccttatcttgacaacaggtaaccccatctaggcatccttactgtgagcatcacaggagaaaaggcacaatggcactatataaatatcagctaactcaggccacaggaaactaccgcctagggtcctgggggtgataagacaagtggtcccaggtggcgtgagcctctaacacatgttccctgatgaggaatggcctcggccacagcagatgcggagggaagagcaaggaaaaaggtgtggtccaggcagagccatacatccccttcctgccggtgsagaagagcaccctacctattctagtgtgggaggcttccccgttcttttctggtgaccgaagcagctccttctctacacatcactttggcccggtggggtctcgtcagaaatggccaccgtgaggccccacaccccagcatcactatctggccatgatgctctagtactctgtcgagtatgccaccgtgaaacctc

SEQ ID NO: 19368 - DNA, 566 bp, Homo sapiens
tgaaagtcatattacaaaaattctttttctcccccaattttttttttatcgtggtaaaatccacagaacagaaactggacacacctgttagcgcacagccagtgggattaaatgcactcggggccttcccagttggccaaggggctggtgtgaggcaaaggcacctccgatcaggtcacagggaaccccacgggaggcccagcggatggcctggctcagggaccccacgcccacgccccaatgtctgcaggagtggcctgggcaactcctgccgtgtctgggcccatrggaaacgggtgcaaatctgcggtctccttcaaactgtccagtgggcgactgcgacctcgcttccgaggtggagggtggtatagacgaagggaaacggggggcagcctggcccgcagactgggtcctggccctccttccgagcaggaggtggcttcggaaccggccacccgcccgcggcaccgacgcctcccccggttcccgggagggacccctgcggggccgccagctccagcgcttccgcggacagcacgcgccctccccaccgagcctgcgaggaa

SEQ ID NO: 19369 - DNA, 600 bp, Homo sapiens
ctgccaggacccttgctgaaggtgtgccttggggatcagacggcctctggggactgtggaggatggaccagtcagctactgagggcgactggatacggagagcaggggtcctgctacaatctcagcagggattgccaaaactggatttcatgaggacgtgcacagatgggcctaggaggaggctcaggagcctgacggcagtttggccaaacagaatcctggccaggagtggctgtgggccaggcaggcagggcggcaggctgcgacacccagttacatctgaatctcaggcagctttgaagcgtgttctagaatgaggatgcccatattcagatcaactttcttcatgatctgaaactcagatgtaactgggcgcctgtacaccatctgtcaaccttgcccatgaagacggagtggggaagagaagccccaggcgggtggcaaggacctcctctgggctgtgggcccctgaccagctgccccaggagaccaccgccctgagaaggatgcgacctgctctccaggctgctgccctggtgagatagctgtgttggtttccccttgcctctgaggggaagacrgccctcactaggggcacag

SEQ ID NO: 19370 - DNA, 529 bp, Homo sapiens
tgggatcctagtaaataaagggggagacagacgatggaaactttagggcatawagggaacatttaggtccaagcagggtggaggaaagatatttttagggtgagggagacttgggtatcatggttgacagaagagaaagagcgagagtgcaggagagaccaaacatgtatagtgaaaatgctcaacctcttatggaatcttggctacacttctgctagcttggtgaccctggaaaagataataaacctctcagagcctcacattcttaatatatggaacttttagagatggcaagcctaagtcaaaagctagttttgtaatgttataccatcaatatagcaacaatcatgcatagtgtgcctctacttccataaatatggaacacatatatggtgcttactatgtgtcaggccttgttctccatatttaatgcatatgaactcactgaattgcatgcagttaacatctactaactcaattcttaaagcaaccctaggagcccaatttttaaatgatccctgtcttacaa

SEQ ID NO: 19371 - DNA, 529 bp, Homo sapiens
tgggatcctagtaaataaagggggagacagacgatggaaactttagggcatatagggaacatttaggtccaagcagggtggaggaaagatatttttagggtgagggagacttgggtatcatggttgacagaagrgaaagagcgagagtgcaggagagaccaaacatgtatagtgaaaatgctcaacctcttatggaatcttggctacacttctgctagcttggtgaccctggaaaagataataaacctctcagagcctcacattcttaatatatggaacttttagagatggcaagcctaagtcaaaagctagttttgtaatgttataccatcaatatagcaacaatcatgcatagtgtgcctctacttccataaatatggaacacatatatggtgcttactatgtgtcaggccttgttctccatatttaatgcatatgaactcactgaattgcatgcagttaacatctactaactcaattcttaaagcaaccctaggagcccaatttttaaatgatccctgtcttacaa

SEQ ID NO: 19372 - DNA, 1222 bp, Homo sapiens
catttctctcaacagcaaaagccttattttttcatcctttaaatatgttactttcatagtaggataagatggtaccttgtctgagaggctaagacccccaggccacttgagaatttgagagcttttagaacttgatgagcatagctgactggatacttcgtgtcagcactgcttgtggtaattacaggatctgtggatcacaaggctcacaacttgtatcacaagttctacaagaaaattggctaacacatatttggctctgttaatcatttgctgagtttatatcttgtcccaccaaatgtattttttgaaatgccattacatgaaaaagtttcactattccaattatctgtgtttaccaacttgtggagtaagagtggctgactgaatatgttgctttttaactacactattatatacattggccaagctttctatattttcttagaatttaagattttaaagtctttacttttttaaatcatttatttgtaaagggacatatttctcaagtgtgctagttttccttgattttaatggattaaaatgtgtcgtaggtgagccattttcttccaaatgacgaagagtttttgttcctttgaaagtctggcccaggattttgtttgtttttgtttttttaaagttcttattttacttacagagttaagaaagttgaataactatacaaccagtctctaaatagaagttctaataaatcctaagatgttgcagggcactgaaagaggacaaaatttgatccctaaagccctctccaatctcatactcggtgaaaataacaaacaaaaggcttcagtgttagtggaaaactgagttcttaaaaagcaggtaaaggtcctgtttggtccttctccagagctgaggagaaagggttttcagattataaataacagaggtgcccttgtatggcacagaattgcgataagactttacttcttaggggcttaaataatgaagtcagtaaaagaggactgaaaacgaacataaagaagagctttagctttgacgcaaagaattacatcagtgcttgacaaaaccgaggatccttaatttctaaaaacgctttctttaagcacttcctaacctttcattatctgagacaacatatcaagtgagcagcagtacaaaggatgcatgtgatttcgaaatgccacaattgagccaactgcagwtgcacgcgtacgtagtatgagaggtgtgatca

SEQ ID NO: 19373 - DNA, 502 bp, Homo sapiens
aggctgctgggatctttcctggacttgtatatcagggagaaagarctaatttaaaataaagcaaaatatgcatctactctttactaggtgtactttaaaaaatagacaagtaattgcaaagtttgcaatacgtatgcattacttgtgtattttgcaactatttacttgcaaaaatagacaagtaatgcatgtgtctgtagttgcacctgagttccagtgcaacaggagtgttgctctccaagctgttgggaatggaagtgttagcttcaagtctcacagaggtttcgggctttgtttgaagccttttaatattacaggaagattttgttctgtcagtttctctcatgcaatgtaattggacttctctaattcctcttttctccttggttatttctcctaataagagaaattagctttatgccccttcaatattgtggttatatgccaacttgcaatggaataatctcatttgctgcattttggtttgatattgtgcatgaaa

SEQ ID NO: 19374 - DNA, 531 bp, Homo sapiens
aggaatcacttgtgtggacacctcaagcctcccttttaccagccatctcttatatcactgattactaccagaaatcagagaaaggcagactggaggactggaagaacaaggctaacaaaataaacatcataaattgaacctaatgaaataaacaccagaagtcatttaccatgtagctaataaaagttcttagcaaccaagtggtcatttaataratgtttaaaaaaaaaaaactaagaaaaaaatgtgaagaagttcttaccaacactaaaagaagaacaaagcatttgaacgcctggcctaggcttttcagtgaacttcaggggacgtgggctttaaaagaagaagatgctgctttaaaatagattattttaccacattaacacagcttaaaatattagttttaatctagcatatttaaatattataattttttaagagacagggtctcgccatgttgcccacactagacacaaactcttgggctcaagggaccctccagcctcagcctccctagtggctggggaccac

SEQ ID NO: 19375 - DNA, 608 bp, Homo sapiens
acttgtggcagccttatattaatagaacacagctataaacaagggaaaccaactgtaatttgataacatgtactagaaggtcaagttcttcctttaaaatcaaaactagattagcaatgtgatcttattatcacacagtatttgatgtatggttagaattaagtagtacaggccaggagcggtggctcacacctgtaataccagcactttgtgaggccaaggcggacagatcacctgaggtcaggagtttgaaaccagcctggctaacacggcgaaaccccgtttctactaaaaatacaaaaaattagttgggtgtggggatgcacgcctgtaatcccagccgctcaggaggctgaggcaggataatcgcttgaacccgggaggtggaggatgcagtgagccaagatmccaccactgcactccagcttgggcaacaagagcgaaattccgtctcaaaaaaaaaaaaaaaaaaaggaattaagaagtacaagaagtacaagttaaaaaaataaactgtgattataaatttcttaacttaggaataagtagtttataacttaagaatttgataaatatcaaatataaacatcaaatacttaagtgatatc

SEQ ID NO: 19376 - DNA, 608 bp, Homo sapiens
acttgtggcagccttatattaatagaacacagctataaacaagggaaaccaactgtaatttgataacatgtactagaaggtcaagttcttcctttaaaatcaaaactagattagcaatgtgatcttattatcacacagtatttgatgtatggttagaattaagtagtacaggccaggagcggtggctcacacctgtaataccagcactttgtgaggccaaggcggacagatcacctgaggtcaggagtttgaaaccagcctggctaacacggcgaaaccccgtttctactaaaaatacaaaaaattagttgggtgtggggatgcacgcctgtaatcccagccgctcaggaggctgaggcaggataatcgcttgaacccgggaggtggaggatgcagtgagccaagatcccaccactgcactccagcttgggcaacaagagcgaaattccgtctcaaaaaaaaaaaaaaaaaaaggaattaagaagtacaagaagtacaagttaaaaaaataaactgtgattataaatttcttaacttaggaataagtagtttataacttaagaatttgataaatatcaamtataaacatcaaatacttaagtgatatc

SEQ ID NO: 19377 - DNA, 558 bp, Homo sapiens
gctttaagcctccctaagacagcaagttggattcacagtatgggggctgtggagtcaggtcaagaagagtagacagtaaagtcaaatgcctgtgagaaagtgttttcatagagccaccaatttagctaaatcctccacaagaatgaagggacctgcttgctgacatgtagttcctccagtttggggggattaatcctgcctgtgatctgtttgtacaggtagaaaggagaaatcttcccttgtttcctctccatgggtgaaaacccatcctaactagcttaamtataatagacaacgcaggtgtttttgttctgttccatttcaatattttgttaaaaagaaaaagaaaattctttacatttttcttagaagaactacatttcagtcctgtggttctaaaataaagcttattttttcttagttgatacttctgcaaaatattgtgtggaataattatctcattttgttttataataaaagtaaacaaccaccatttctatccaatgcaattctattcacattttgatgcatttcagtctatttatctaaagtaaagtg

SEQ ID NO: 19378 - DNA, 558 bp, Homo sapiens
gctttaagcctccctaagacagcaagttggattcacagtatgggggctgtggagtcaggtcaagaagagtagacagtaaagtcaaatgcctgtgagaaagtgttttcatagagccaccaatttagctaaatcctccacaagaatgaagggacctgcttgctgacatgtagttcctccagtttggggggattaatcctgcctgtgatctgtttgtacaggtagaaaggagaaatcttcccttgtttcctctccatgggtgaaaacccatcctaactagcttaactataatagacaacgcaggtgtttttgttctgttccatttcaatattttgttaaaaagaaaaagaaaattctytacatttttcttagaagaactacatttcagtcctgtggttctaaaataaagcttattttttcttagttgatacttctgcaaaatattgtgtggaataattatctcattttgttttataataaaagtaaacaaccaccatttctatccaatgcaattctattcacattttgatgcatttcagtctatttatctaaagtaaagtg

SEQ ID NO: 19379 - DNA, 558 bp, Homo sapiens
gctttaagcctccctaagacagcaagttggattcacagtatgggggctgtggagtcaggtcaagaagagtagacagtaaagtcaaatgcctgtgagaaagtgttttcatagagccaccaatttagctaaatcctccacaagaatgaagggacctgcttgctgacatgtagttcctccagtttggggggattaatcctgcctgtgatctgtttgtacaggtagaaaggagaaatcttcccttgtttcctctccatgggtgaaaacccatcctaactagcttaactataatagacaacgcaggtgtttttgttctgttccatttcaatattttgttaaaaagaaaaagaaaattctttacatttttcttagaagaactacatttcagtcctgtggttctaaaataaagcttattttttcttagttgatacttctgcaaaatattgtgtggaataattatctcattttgttttataataaaagtaaacaaccaccatttctatccaatgcarttctattcacattttgatgcatttcagtctatttatctaaagtaaagtg

SEQ ID NO: 19380 - DNA, 545 bp, Homo sapiens
ctctgttttgatgggtcttcaaaaatacctaagtcctgggcttggttcgggttggcagggccaggactctagagtggggcagtgaggcactggcctgtggggcagaattttaaaggggtgccaaaacactcagtaactcagatcgatactattttaatgcagcgtgttttttaaaattaattttaaaaaaacatgttgggacaaaatatcmaagttttaaatcaagacagagtctgactttgtactgcacacttggcctcatttgccttaccctagtcctggacacgtcagctcctgcctttatttaaaatgttgatagatattttgttcatcagggattggagtacaaaccagtctgatatgggggtcacttggatttccctgtgaaaatcatgaatgactgtggctaccatgtaaaaccatccctgattctttggtgttcctcaaattggaggtctccaagccacagagcaaggggttgtagagagaggagtactggacagggaggcaggtgggccaggttctagtcccagctctgcctgtaa

SEQ ID NO: 19381 - DNA, 545 bp, Homo sapiens
ctctgttttgatgggtcttcaaaaatacctaagtcctgggcttggttcgggttggcagggccaggactctagagtggggcagtgaggcactggcctgtggggcagaattttaaaggggtgccaaaacactcagtaactcagatcgatactattttaatgcagcgtgttttttaaaattaattttaaaaaaacatgttgggacaaaatatccaagttttaaatcaagacagagtctgactttgtactgcacacttggcctcatttgccttaccstagtcctggacacgtcagctcctgcctttatttaaaatgttgatagatattttgttcatcagggattggagtacaaaccagtctgatatgggggtcacttggatttccctgtgaaaatcatgaatgactgtggctaccatgtaaaaccatccctgattctttggtgttcctcaaattggaggtctccaagccacagagcaaggggttgtagagagaggagtactggacagggaggcaggtgggccaggttctagtcccagctctgcctgtaa

SEQ ID NO: 19382 - DNA, 545 bp, Homo sapiens
ctctgttttgatgggtcttcaaaaatacctaagtcctgggcttggttcgggttggcagggccaggactctagagtggggcagtgaggcactggcctgtggggcagaattttaaaggggtgccaaaacactcagtaactcagatcgatactattttaatgcagcgtgttttttaaaattaattttaaaaaaacatgttgggacaaaatatccaagttttaaatcaagacagagtctgactttgtactgcacacttggcctcatttgccttaccctagtcctggacacgtcagctcctgcctttatttaaaatgttgatagatattttgttcatcagggattggagtacaaaccagtctgatrtgggggtcacttggatttccctgtgaaaatcatgaatgactgtggctaccatgtaaaaccatccctgattctttggtgttcctcaaattggaggtctccaagccacagagcaaggggttgtagagagaggagtactggacagggaggcaggtgggccaggttctagtcccagctctgcctgtaa

SEQ ID NO: 19383 - DNA, 461 bp, Homo sapiens
tggctgctctccatctcttgtaccagcccaggcaatagttgaggaggggagcaaggctgctaagtggaagacagagatggcagagccatccaccctgaggagtgaygggcaaggggccaggaaggggacaggattgtctgctgcctccaagtcatgggagaagaggggtataggacaaggggtggaagggcaggagctcacaccgcaccgggctggcctgacacaatggtagctctgaagggaggggaagagagaggcctgggtgtgacctgacacctgccgctgcttgagtggacagcagctggactgggtgggccccacagtggtcagcgattcctgccaagtagggtttagccgggccccatggtcacagacccctgggggaggcttccagctcagtcccacagccccttgcttctaagggatccagagacctgctccagatcctctttccccactga

SEQ ID NO: 19384 - DNA, 550 bp, Homo sapiens
aagcccggcgcattcttccttattctaaataacttcttcctgctgcacggggtcgtctcctttaaccacggctaccgcagttggtagtgctggatcccatttcagggtgatgggatgctggatcccatttcagggtgataggaccgaccgcaaggcgaacgattcaggcccgtccgtctgcgtcccgggaccccgggaggtctccactgacgccctgccagcagcaggctccctccgccttcctagtctcctgtccttgctgaaaatgcgaaatgggaaaaaagagaaggaaaagggggctcgtccgggatttgaacccgggacctctcgcacccaaagcgagaatcatacccctagaccaacgagccgccgcttcccctytgttttgttgttgttgttgttgttttttgacacgtccttccgcccctgacgcagagcgagactctctccatcgccccaatagctcagtccttagcgcgcgcacctgcgaatctgggcttttgggttcgcggccaccctcagatttgcgaggcaggctttactgctgctg

SEQ ID NO: 19385 - DNA, 559 bp, Homo sapiens
ttagccagactccaggcytggtttggcatcacccaggatcccagatcgggagtcccaatccctgcacctccttcttccgcctcaggtcattactcttccccagccgcaggctatgcagtgaatgagcttcttagatccaatttgtctaggactctgacacccatcagctcttttcaggttcctttttatgctctcccgatttgtgcttccaggagctaaattcttgaccatggtcacttcttacctagacccttcctaccctattgagcgctctggtctaaatgatcctgcagttcccagggtcctggatccaccccagacctgacatcaatgtctgaaggagactttttcctgcagaaaagcttttaaagagtggagacactgtaaacattgtggaataaatgaaagattgaattaatgaattgtagaccacgttggatacattaaaaatttgtgtttttttattttaatgttttaaaaattcatccctatcacatgtcagactacacatgcagtatgaggtagctgaaaaaaatacagtttctcagataaaagtttt

SEQ ID NO: 19386 - DNA, 579 bp, Homo sapiens
gcctcttcattaggaacagttggtggctgcacaatcggggagtcgtggattctgcctgctttmtggccactcctcccactttgtattcccgtttcttccagttctggttgctcagtgttctcaaggtgcctgagtccatacagacaagaagtagctgacttcacattcagctgcattttcaatcatagtcttcaggaggagaattggagttttccatgttttctgaaattaatgaacagggctgaatgtcaacagccagcattttaaaatactaaaactcagcatcctctcctgaaatcctagatctgacagcctcccatgagcctcaaatggttttgtgttcaagtccaagtttcaaaagcaaatgaagataaaccgaccaatgcccagaaaatctgtccaagaaaaaagcagcaaccacatgggaaatttgaacaaggagactgtcctgtcactaaattcaggatatgtagccaacagggacaacaaccagcccccagagagcctctaggatgaaccttcagggcaaggactttaacaaacaggcatcgcctccactgtcagtccctcactaagttg

SEQ ID NO: 19387 - DNA, 601 bp, Homo sapiens
aggagagagtcagctttcttccccaggcgacctgcctcagccggagggtctgggccctgccaggccaaaaagaggcagtgtctggagaaatgaggagaaacagaaagcacgaaggcacaaattgctcacagcaatgccttcacagtctccaccaggacaccctccagcccgcagctgactccttgctctgcaccaagacaccctccagcccgcggccagctccttgctctgcaccaagacatcytcaagcctgcagccagctccttgctctggaaaaaaagcaccacttaatgagactgactcctgccactggagtgccctaacatgacagggttggagctcagaggatgaaatacttccaacgtggccagatgattggctcaaagcatctagtcatgtggccatccttggattcttttagagcaaatgcccacacagcaccttgttttctgagctgactgaaatgtcgatgtccccattggtggcttttgcacatgaagacacagaaacagatagtatctccagctcatctgctccactttatgccatgcagccaccttcaataacacagataagacctggtttgggggtttagatccca

SEQ ID NO: 19388 - DNA, 541 bp, Homo sapiens
agaatattggccttatggggacatgggggcaggacaaacttcacatttgggagagcacactaatcaacaatattgtggaagtctgaactgaggataggtaagagatcatccaagagaaactgaagaatattttctttgagtctctcttcaacatatttattaacatatgtttatatggccatagcaagaggaagaagaatcayggtgttgcgtttattaattctccaataatctccagaatagcgtagaaaccctattcaccaaagtatttgggagaggagttgattggttaatcaaaaactgatttctttaaatataaaaatatatatttattcattagttatttatctttttttgaacccattaatttgtacccattgagtcttatttcttttcaataaaaaacacatccaaaatgtactatctatatgttttaatttgggctttaaaaggctgaatagctacatatttcaaccttctttctggcacacttgatcatatgtgcagagaattatcaggtgattgtttaagttatcatcat

SEQ ID NO: 19389 - DNA, 541 bp, Homo sapiens
agaatattggccttatggggacatgggggcaggacaaacttcacatttgggagagcacactaatcaacaatattgtggaagtctgaactgaggataggtaagagatcatccaagagaaactgaagaatattttctttgagtctctcttcaacatatttattaacatatgtttatatggccatagcaagaggaagaagaatcatggtgttgcgtttattaattctccaataatctccagaatagcgtagaaaccctattcaccaaagtatttgggagaggagttgattggttaatcaaaaactgatttctttaaatataaaaatatatatttattcattagttatttatctttttttgaacccattaatttgtacccattgagtcttatttcttttcaataaaaaacacatccaaaatgtaytatctatatgttttaatttgggctttaaaaggctgaatagctacatatttcaaccttctttctggcacacttgatcatatgtgcagagaattatcaggtgattgtttaagttatcatcat

SEQ ID NO: 19390 - DNA, 597 bp, Homo sapiens
agccaccgtcttgggcccagggctctacctgtagcttttcatccacacttctcaggttgcttcttacacagcgccatagtagttaaaatacggtctggggatagtcgtctcttcatcagtctccccctataaaatggaggactcatagtataagttgcctagaacatattagtaaggactcaataaatgtttgagtaggatgagctgggtggctcatgcctgtagtccctgcacttygggaagccgaggcgggtggatggcttgagcccaggagtttgagaccagcctgggcaacatggcgaaactccatctctataaaaaatacaaaaaaactagctggactcccagctgcttggtggctgaggtggaaggatcgcctgagccctggaggtggaagctgcagtgagccgagaatcgcaccactgcactccagcctgggcgacagagtgagatcctgtctcaataaataaataaataatcagttgagtgcatactgtgtgcccaactacctttaagaactttacatatgatcccggcagccctaaaaggtaagcatatctatctccattacacagattaactaatgaggaaaagcta

SEQ ID NO: 19391 - DNA, 573 bp, Homo sapiens
tctaattgttactaagggaaggaaatgcctaaagtcatacaactctagtgtttgagagacataaaagaacttaaggcccacttgattaaagcattgtatcacgtatgacatgtctactgtgtgccagatactgttacaaatatttgcatggaagctatctcagcactttatgaatgtacttttgaaaaaattcatgtttgattctcactataaactgtgargaagatatggaaagtattagtacattaaaatgaccacaaccactaaggatctgagaggttgaatgactgaacccaactggtaattggaagagctgggagcgacatcaagagttttggctcttgtcctgtgatcttctcattgtgtggtcatgtttttctgaggacaagtttggatatggtgaaggaggaggggagtgagagagcacagggctccactgcaggcatggggaggaggagctggcagagggagtgatggctgaagatgcatctgcttcttcccagggtttctagggccagctgtagctcatttggctgttgttgatttactcccctagctttcttctggaggaca

SEQ ID NO: 19392 - DNA, 573 bp, Homo sapiens
tctaattgttactaagggaaggaaatgcctaaagtcatacaactctagtgtttgagagacataaaagaacttaaggcccacttgattaaagcattgtatcacgtatgacatgtctactgtgtgccagatactgttacaaatatttgcatggaagctatctcagcactttatgaatgtacttttgaaaaaattcatgtttgattctcactataaactgtgaggaagatatggaaagtattagtacattaaaatgaccacaaccactaaggatctgagaggttgaatgactgaacccaactggtaattggaagagctgggagcgacatcaagagttttggctcttgtcctgtgatcttctcattgtgtggtcatgtttttctgaggacaagtttggatatggtgaaggaggaggggagtgagagagcacagggctccactgcaggcatggggaggaggagctggcaragggagtgatggctgaagatgcatctgcttcttcccagggtttctagggccagctgtagctcatttggctgttgttgatttactcccctagctttcttctggaggaca

SEQ ID NO: 19393 - DNA, 520 bp, Homo sapiens
atgatatattaagttggtacaaaaataatttcggcttttgccattacttttgcaccaaccgaatagcttgcagctcatgccttgtrttcaatatattcagtgtcactatcactattctctccatctcccctactcctgttgcttctatgatcagttagtctattacatttatcatatcagtattttatgcttttgttgtgtctcaactataggaagtattaaaagggaagaaagaagttgaagaactacatagtaggaaatatcccaaatccaccatctcttctctctgggaggtggtcttagtttctggaaacgttaatactaagtcatcagcaacccttatgcataatagtaaatgagacagtcactattcttattaggatgctatcttagttggattgggctgctatgacaaatgaccttaaactgggtggcttataaacaacaggtatttcccacagttctagaggctgggaagtccaagatgaagacactgacagattcattgtctgctgggggg

SEQ ID NO: 19394 - DNA, 551 bp, Homo sapiens
gcctggccaacatggtgaaaccccgtctctactaaaaatgcaaaaattagccgggcctggtggtgggcgcctgtaatcccagctacttgggaggcaggagaatcacttgaacctgggaggcagaggttgcagtgagccgagatcgtgccactgcactccagcctgggcgacagagcgagactccctctcaaaaaaaaaaaaaaaagggaagcctagagtaaagcttgttttggaattgtggttatttaggtagggactggtttaaaatttgttttttgttatttatgtaaaaagatttaagtaatataaagtagatttcatggacaatatttaagtcaagaacaaactattcataaaccagttgctctgcttttctccttatcctttataacttctgtattctagactctcatcatcagytatctggactgttttctgtggtctctgcagtgtcctggacttcctctaatcttaccctcttcaaactcgtcttccacctgacttctaaaatgatcttccttaaatgagaatctctaagaactctttttttc

SEQ ID NO: 19395 - DNA, 565 bp, Homo sapiens
tgaagcccttgctacagttataggacagagaaaatcaaagtcggtgaagtcagggccaatttaaggtaacggtaagaataagagcatatttttatcattttcacttgctgactttatactacagcaagagacttagtggctaccaaaagaagttctagcttctcaaaatgacagtgaagttggggctttataaaccaaaacttagaaggatgctcccaaactgggtcaaagttgagctccaaatagtttgctcctataatggtctaccagtaggtggcgctgtggcagtaagaactttctctactattactagaggcttttgtttaaaaatacgaggattttaagacaattcaaataaagaaactaaaaccataattgagwtatcacaaagtataacataatatatgggaaaacatgatatttgaaggtaaagttgcagtagttgcaaaagagaatggatatttattattaaggcttttagactagaatttataaactggactttcagattatgggaggcagggagggaacaaattttttttcaaattttggtgaggttgatgaa

SEQ ID NO: 19396 - DNA, 565 bp, Homo sapiens
tgaagcccttgctacagttataggacagagaaaatcaaagtcggtgaagtcagggccaatttaaggtaacggtaagaataagagcatatttttatcattttcacttgctgactttatactacagcaagagacttagtggctaccaaaagaagttctagcttctcaaaatgacagtgaagttggggctttataaaccaaaacttagaaggatgctcccaaactgggtcaaagttgagctccaaatagtttgctcctataatggtctaccagtaggtggcgctgtggcagtaagaactttctctactattactagaggcttttgtttaaaaatacgaggattttaagacaattcaaataaagaaactaaaaccataattgagttatcacaaagtataacataatatatgggaaaacatgatatttgaargtaaagttgcagtagttgcaaaagagaatggatatttattattaaggcttttagactagaatttataaactggactttcagattatgggaggcagggagggaacaaattttttttcaaattttggtgaggttgatgaa

SEQ ID NO: 19397 - DNA, 648 bp, Homo sapiens
tgaagcagtgcagggatggagtagagggcacaggagatgctggctgtctgccttggggcagaaatggaaacctagttcttgatggcaccttgttgccagtgtctgtgcagctgtgttctggcctgcagggtggaggagaccttagaggaaaccgaggccgagggcaggtgctgggccccatttctgcaccttctacccagccctgacctggcaccctttgtttctgttctgcagtcaactgccaggatgcaagatggtcctgcccccttggggtttagagctggaaagtgggagagcggagaatcctctggggagaatcctcttcatggctgcaggaaasagagactagtccagaagggaccttgaggggtcatctggcactagtgcccctccaggaaggaaggccctggtggccacactgacttcactcttactatgtgcaggcactgttccaggtactttccaagtattaactaatttaatcctcttgacagccatacagggcaaataacattgttattctttacagctgaggaaagagaggcacagagaggttagggaacttgcccaagggcacacagctagtaagaagggacagagctaggattcacactcaggtgatctggctccaaaaccgccactcttaac

SEQ ID NO: 19398 - DNA, 554 bp, Homo sapiens
tgcaaggactctgtgcacacagactggatgatctggatatacacccatttagaagcggggggtccatgtggaaatgtgttctaacagtargtcatcaaattttcttttttaaaaaagaagcagtctttcctttgctcatcttttaaaatgatcaatggtcactttctttgaacagctctaaagtggggggagaaggcagcagataacactttaaactcttgtcacactttccagatcagtaaattatatactcatcacaagcatctagatgggatgcatcatgaatatatctaagaatatctaggccaggtgcagtggctcaagactgtaatcccagtgctttgggaggccaaggcgggtggatcacctgaggtcaggagttccacaccagcctggccaacatggagaaaccccgtctctactaaaaatacaaagagtagccaggcatagtggcacgcgcctgtagtcccagctactcaggaggctgaggcatgagaatggtttgaacctgggaagcggaggttgcagtgagccaagattgtgccactgcactc

SEQ ID NO: 19399 - DNA, 554 bp, Homo sapiens
tgcaaggactctgtgcacacagactggatgatctggatatacacccatttagaagcggggggtccatgtggaaatgtgttctaacagtaggtcatcaaattttcttttttaaaaaagaagcagtctttcctttgctcatcttttaaaatgatcaatggtcactttctttgaacagctctaaagtggggggagaaggcagcagataacactttaaactcttgtcacactttccagatcagtaaattatatactcatcacaagcatctagatgggatgcatcatgaatatatctaagaatatctaggccaggtgcagtggctcaagactgtaatcccagtgctttgggaggccaaggcrggtggatcacctgaggtcaggagttccacaccagcctggccaacatggagaaaccccgtctctactaaaaatacaaagagtagccaggcatagtggcacgcgcctgtagtcccagctactcaggaggctgaggcatgagaatggtttgaacctgggaagcggaggttgcagtgagccaagattgtgccactgcactc

SEQ ID NO: 19400 - DNA, 611 bp, Homo sapiens
tgctagatcatatgttatttatttatttattgagatggagttttgctctgtcacccaggctagactgcagtagtgcaatctcggttcactacaacctttgcctcccaggttctagcaatctgcctccctcagcctcctgagcagctgggattacagaagcccccaccatgcccrgctaatttttgtatttttagtagagacggggtttcaccatattggtaggctggtctagaactcttgacctcaggtgatccacctgcctcagcctcccaaaagtgctgggattacaggcgtgagccaccacgcctagccagttatatgtttactgtttaattttttttaaaaaaccaccatactgtcttccacggtggctgcaccatttggcattcccaccaacaaggttttccaacagcaatgcacaaggagtagggaggaattttgatctaggcaaattttttcagtaccagtcacagggttaatgtcaatttcattcatcatgctatagaaaaccagtccaactcctctgaatttctctcatttatctcgctcctaacacccagctgccacctccaatgagaatgctttacccttcaataatctttttcttacaa

SEQ ID NO: 19401 - DNA, 574 bp, Homo sapiens
taacatcgggtgctctgtagacatctgctctatctccccraataaagtgaagtccttgtcgtctgggatcatgtctttttttttttttttttttttttttttttttttgagaaagagtctcactctgtcacccaggctggagtgcagtggcgtgaacacagctaactacaatctctgccttccagattcaagcaattctcatgcctcatcctcccgagtagttgggattacaggcttgcaccaccatgagcagctaattttttgtatttttagtggagacagggtttccccatgttggtcaggttggtcttgaactcctgacctcaagtgatctgtctgccttggcctcccaaagtgctgggattacaggcgtgagctgccgtgcctggatgggatcatgtcttttaaatctcttataatccataaaattctccaagttccctgcctgtaactgagtgcccaggtgcaaccctgagggttatgtgtgggcaagaaggagaggctatgaagtagcaaaatgtgtgatggacaagttataaatttgtaatgcttatggatcaataaaaacacattt

SEQ ID NO: 19402 - DNA, 532 bp, Homo sapiens
caggtacagcgggccctgcctgcctgggggatgctggtctgggtcctggcctcacactttcctgactcctgagtgctggtgggctgggccgtatgtttgcagagcactgagagctgcctccagcctcccggggctgactctggcctggcccaccggggtcctcagccctccaggacctcctggctgccccgttggcctctgcgtgtcctggcataaggggcagaactctcagggcagagcggccttgaccccaggttgcctacttctggggtgcggctgcatgggcatccctgcccgtggtctcgtggggcccggcttctgacgcggacagtggtgtggcctctctctcctgagatgctaggttgttgctcctgagggtgccacagggctgycaggctgtcccccgcccccagctgggcgactacgcggacagtggtgtggcctctctctcctgagatgctaggttgttgctcctgagggtgccacagggctgccaggctgtcccccgcccccagctgggcgactacgcgga

SEQ ID NO: 19403 - DNA, 532 bp, Homo sapiens
caggtacagcgggccctgcctgcctgggggatgctggtctgggtcctggcctcacactttcctgactcctgagtgctggtgggctgggccgtatgtttgcagagcactgagagctgcctccagcctcccggggctgactctggcctggcccaccggggtcctcagccctccaggacctcctggctgccccgttggcctctgcgtgtcctggcataaggggcagaactctcagggcagagcggccttgaccccaggttgcctacttctggggtgcggctgcatgggcatccctgcccgtggtctcgtggggcccggcttctgacgcggacagtggtgtggcctctctctcctgagatgctaggttgttgctcctgagggtgccacagggctgtcaggctgtcccccgcccccagctgggcgactacgcggayagtggtgtggcctctctctcctgagatgctaggttgttgctcctgagggtgccacagggctgccaggctgtcccccgcccccagctgggcgactacgcgga

SEQ ID NO: 19404 - DNA, 524 bp, Homo sapiens
cagaactcacagaaaagccccatctactacccagacagattctccacscagcaacactgagtaattccccaaatagttttttcctttctgtgaaagcatttctgttcctcgaatacccttttcctgccttgtctgatctgcctggaagccctttaccttcaggcctttccagagagagtcaaacaccacagtttccgggacacatcgttgcgtattccagtggacacagcgctagttctcccaagaatttcaaggtagtaccaattctcttccagacaaagacgccagagaacaacagtcccaaccaagtgagatctttcatctcagtcccctcctttattctggaccagccagaggcagtggagtcagtgggcaggaggtgggaaggggcggaaagcagtacgttacctcccctaccactactgcagggagaaaatcttgacactgcaagggagttggagtgcttatatacatctgacttgttatgttaacacctggaaaggagattgctgtattgcttaaaa

SEQ ID NO: 19405 - DNA, 540 bp, Homo sapiens
taatccttccatctgttcctttctcctctatgggacttccttatcactacaccttcaccttcagttatttattctgttttctttacagcctgtggatcttgcacatacttatatcattggcttcatccttgcaaatggcaattgtttgctatattaaagtactttccaggactagtgtaacggtgtggctttttgcaggatggggtgggaagatcataaatagatgctccccaactctgaggatttttgaccatatttggttgtaacaaaataacaagagtagataaagtccccagacatattttgtggactttgtcttttctcatccactggatgtagactaacctattagatttggtaatacaggtatttttttwaaaaaaaattagatctttcagagactactagataaaatgaaaacatgagctaagttaaattaatgctttaataacacttttaattgagaaaatgtgacttttaaaaatcagtccagctcatgaattaaagatcctcattaaactatagaccatggaggacttg

SEQ ID NO: 19406 - DNA, 540 bp, Homo sapiens
taatccttccatctgttcctttctcctctatgggacttccttatcactacaccttcaccttcagttatttattctgttttctttacagcctgtggatcttgcacatacttatatcattggcttcatccttgcaaatggcaattgtttgctatattaaagtactttccaggactagtgtaacggtgtggctttttgcaggatggggtgggaagatcataaatagatgctccccaactctgaggatttttgaccatatttggttgtaacaaaataacaagagtagataaagtccccagacatattttgtggactttgtcttttctcatccactggatgtagactaacctattagatttggtaatacaggtatttttttawaaaaaaattagatctttcagagactactagataaaatgaaaacatgagctaagttaaattaatgctttaataacacttttaattgagaaaatgtgacttttaaaaatcagtccagctcatgaattaaagatcctcattaaactatagaccatggaggacttg

SEQ ID NO: 19407 - DNA, 517 bp, Homo sapiens
aggcagaagtccctgtggcttatygcagagcattgtgcccctggtttattgagactggagaatggcgatgacttttaccaagcatctgcttgtaaacattttgttaacaaggcacatcctgcacagccctagatcccttaaaccttgattccatacaacacatgtttttgtgagctcaaagttgtggcaaagtggctggggcaaagttacaaattaacagcatctcagcaaagcaattgttcaaggtacaggtcaaaatggaatttcttatgtcttccttttctacacagacacagtaacagtctgatctttctttcttttccctacatggggcagcagtgcgatggggtggttcccagcgcatgggagacaagggtgggttcgtggttcctggtgttccatgagaagtcagagatgcactgagcagagctgggggagaaagggggtttcgctcagcctcagatgtcctgcctgggaggcccagtcagtagtggagtcgctctgcgtgtggaggagg

SEQ ID NO: 19408 - DNA, 535 bp, Homo sapiens
tgtaagggcaggcagatgcagtcacagagggccttgtcacccccatcgcccatgtctcctccatttctgctgccacgtggtaggcaccttagtgctgtacctgctttgaatctcatctcccaccattcctctgagcaccctgccaagttaatcttgagatattagttttgtctctcctgacacagaaatgtggccrgtgtttcaccttcatctggcagccaaggccccttatcattggtccatagtaaccatccctgtgagctctgttcatatctccttgccttctccttgatggtgatctgagtccaggagcaccacccagcccttctttcttccccacatggcctatgggtgacacgtaccatcacgttgactccctgcaccatccttctgccacctttcttcacatcccctttgcagatccccttgaccacaccctcattctcagctggtgctcatgaaggacagaagagtcaatgtcagtacaatgtgagtgaagggctgaggtatgtcagtgctcccagtgggcacccgg

SEQ ID NO: 19409 - DNA, 654 bp, Homo sapiens
gagggtaggccagttagatcactggctgctcactgcatgagcagtgcctaagaaccatttggaaagcttgtttaaatttgaagttccttattttattctgaataggagtcctagggttggtgcaggtacctttttaaaaaaacaaacaacaacaacaaaaacagtggtcctgataattctgatataatacatttctctaatgtctggtcaactagttcaactcccatcttaaatgtctttaaataataattgtagtttttatttgaatggcacgtttatcttaaacctcataacctgacagttcaattctattcctaggttacctatgggcagatatactattcataagaccaacgctagtatcaaaataagtggtagaaaaagaacatttagaaagtaaaacctcctattgatgatttgcttagaatacaaattttaaaaaatcttagtgattaaatagtggctgagaggtcattctagagctattctgaattgaaaagtctggattagtagtgtacaaatgagcacaccagggaagaatgtgaactgtatttccaaattcaaaataaaatagttttcattaagtaaatgatgctacccattcactaatttgcatattaataktaaacaaaataaacataaattagtagaatc

SEQ ID NO: 19410 - DNA, 528 bp, Homo sapiens
gaatggcgtgaacccaggaagcggagcttgcagtgagccgagattgcgccattgcagtccgcagtccggcctgggcaacagagcgagactccgtctcaaaaaaaaaaaaaaaaaaaaaaagccattaaaaagggagtcatgtctcttgttggtcattatttcatggcaggggaactacatattcttaaagacacaaccatttcctcttaatcctcattagctgtgctggcaattaaaaaaccaaaagtttttactttcaagaagatttaaataacttctgagggtgtacatatgtgcttaatattctgtctcacagtaatttaaaagtgaagttttgaaaagctgcatcctgcgcttgtcagaaccatgtctgatgagatatcccctttaaagggctctcggtgcaatggggcaaatcaagggggtttgtgcaagtgggagtgagacaggagatggggtgcttcttccagcactccctataggctgactgrgtgacaaagatcattttactgacacctccaatggccc

SEQ ID NO: 19411 - DNA, 535 bp, Homo sapiens
aaggacaccagtcatatttgatgaggttccaccctactccagtatgacctcatcttcactaactacatctgcaatgaccctatatccaaataaagtcacattctgagtgtctggggattagaacttcaacagagcttgttgaagggggcacaattcaatgcataacaggatggaaactagaaacrggtatgtttttatcagtgtagaaagatttagcttaatttttcaaagtgtaataaaaaccccaggaaaactcatactccctcctaagaagagcaaaagatggagaaacccgatggttaccttcaaacaaaaggaaaggaggaataagatgaaaaggaattaatccaaagcaaagagagtggcttatatggaatgttggtgcaactttctctgacacatctgtgcactcatcagctggggcatcatctccctggggtacatttggtcactgtgtgcctcatggtaataaactccagaagcctcattgacttgctagagatgagctcatccttcttgcttgcttaatggcaaa

SEQ ID NO: 19412 - DNA, 564 bp, Homo sapiens
ttctgagaaacagaaattaaaattctcaggtgagtgggaaggttccatttcttaaatccattttccatttttcttaaattttacttatgattgatttcaattcaaatgtaggaagacccagttaaaagtatagtagctaaatgaatttacagatagtctaagacaaaaatatgagtttgaataaagtttatttgawtactatattaagatagaaatgttagctgctctaacaaacacctgtctctcagttttaatgaaataacattttatttcttgctcataggaagtccaaaggtattgggcagatttcttagatgtctctccttcaaagcataactcaggaatctaagttcctttcattatatggttctgccatttgggagcctttcacttccacacacacacagaacacaaatgaaaaacctcatgagagatgttaggtactaagcctgggtttgactttcagttcttgtctcaactaggcacgtggccctaactcaactgcaaagaattctaagaaatgtattcatcctgagtgcactgaaaaagacaacaggtttctca

SEQ ID NO: 19413 - DNA, 618 bp, Homo sapiens
gaccaggaagaggaggaggagcaagagcttataaataaggcagataaggaatggttctgaaatgaatgggcttataaaaagtaaaagagaaaagagttttaggaatagaataattaaagctattgaatgctgcctacacagattagaaagttgattgaaaaatactgatttgaattatctacaaaaaagtcactgagatttttttttagaacaacttcagtggagtgatggggcagaatcctgactacagttaagttgttacataaataggaggttaaaaaagagaaaataattataggtaactcggaaggagccggactgagaaaggaaggggagagaatataggctggaacaagacatgaagtaaagaaagttgcattctcccagggctcagtttaactgctctatttattattcataaattttctttttggtatctgttctagaccatagggctaycactagtcatttggacttgtgggtgaggagagtgacctttctcccattatgtaatgaagaaatgtaatcctaaatattagtcatggctctaaacagattctcaatgaaatggtggcgacaaataataactggacctatgaggggcagtagactgaagca

SEQ ID NO: 19414 - DNA, 556 bp, Homo sapiens
catgattttcatccttttgggaaggaaaagatatctcagaatgtgatgtgaactatgaaacttcttccagaaaaatgcacaaacagaatcttatatacattaatatggaagaatttytcaaaacagtgaaaaaagaaagtgatccaggtggctactagcataaagcaagtctttcaaactcaagactaatggtagagatcttccaaaatatttgaaatcctggtatgttctaactcttacagtatactaatgagaaacattttaggagctcgcttccagattacatgcaccagctactttggaggaagttcataagaattgcaattagtgagaagcgaagcactgatgggaaccaagcaagaaaacagaagagtaatgaaatgaagagagctttaatgaacaagaaaaacaggcaggagcaggcaagtcaggccctgaaaatgaatggtgggagaggcactgttttccctcagattaatgtcacactcaaggctgccttatttgactactgaatgagtcatgtctaaggtatttcagccagatagaagcaaaacct

SEQ ID NO: 19415 - DNA, 533 bp, Homo sapiens
tgatgtacttttagaataaagaaaatgtgctaacataaaattctatttactcttccaaaaacattactcagagatgaggactttccattgttattctacagcttctaagttctctatccattttcttcatttttatccttcagaagttaatttatttagggaacaatgaggcaaagtttttgagaatggtgaaagaataagataaatttggttttccaatcctgctggggagatccatrtactctcagtgaattaatgacaggagatgtttccttgttactaatttagaagtcagccttagtaaaccttcataccttgcaatggtcatccacaaagtctggttgaagcattcaaacatggatgatatcaagacaagagagcttcattttagcacctggctgccccttttccccaaatataaatctatttgtgttagaattggccaaaggctttgtctcattaaattgtattcaaccaaaagtattttattagtgataaaaaataaatgttatgtcaaagttacttagaaggtg

SEQ ID NO: 19416 - DNA, 548 bp, Homo sapiens
aaacccattccaattttttgataaatggaggcaagtagttagccaagatttttcrcacacacaagaaattctaaaatattcgtggatatttcaaaagtagagccttcaaaaatattaaaataaaaaaaaatactggcactaataataaaggtcatctcaggtttgctgtcccaagatgttagttctttgctttgagcaggcgggtggtgtttttcatgggagaagacagcagaactagtattcctggtaaacatgtcagcagaggatttgggaatctgtttctagcaactaaatagtccagaagagagggaaacgtttttatatcttgcaaagtttagagatgaaagaaccaatctcaaggttgatgaagaaagacatcactcagcaggtggtgagcagctgtgatgtaataacattcgccatacagttttaccagtagcaagagtcagaagcccaaaatcattttaataccagggaatgtctatttgagtctatgtactctccctgaaataatcagtggcttgttttgttgttttgttttctggtta

SEQ ID NO: 19417 - DNA, 2086 bp, Homo sapiens
tatttgtggtcttgcttctaagagtgcctgtggcagagagtagaaccctaaccataccacacttgactattgagatttatgggatattcatgaggaagccaacaataattcaaaatgtgatgagcaaagagtttggggcatttaaaaattaaccttttttcaatacggttagttcaatagggcggctctccttaaaatgtagtagtcctgagcaaaataaaaattcagagatagttcaagagagtgctaggtgtaaragataagttatgatgtgttgacataaagaagactttagttgtcactagaaatgttcctgtcacagatttgcaaagaaaagacaaatgatttgaaacaatggattgatctattgatctagtatcagacagacttttgttcaaatcctggttctgtcttttaataactgaccaactttggccaagttacttgacctctatctttccattttctcattttaaaaatgagacaaaagtactacccaacttgtagagttattttgaggattaaaaatgacacaaccctcaggagagtgtggggcacgtagtaaatgttaaataaatggtagcttattagaggtttttattgatcaacttctctgtgagagatatacaagaacaagcttctccaactcagttttaatctttttagtgaagcaatatacagatatagtttaagcccttgtatttgccctctggctagagggaggcgtagctataaattaaagtaaatatgctagtgagcatgccacagctgaaatcaactaaggggagactgcaatggggagatgtaaagagggtgatgtaccaaggaggaaggaggtgtttgcagttgattaattacaccttgatgtgacgtctcctctggttgtatgagttaggggtaactgtgctaaagtggagtcttgtaagttaatgttcttgaatttatgtagatagcaatttatgtgggaacaccagcttcttcacatcaagagtctgagagttacctcctgcttaatgctgcttattcgttcaatgaatatgcattgcttccttattacaggtaaggcattgtgtcaagcaccatgatgaaaacaagcatgatcctctgtcctcatggagcttccatttaagtctcttttctgggtccttcattatgactgatactcatttccagggagttctcttccatgattcctataactattttgtaattatttatttcccaaagaatactacatgtttttcatatataggtagttgggtactggctgtatttgtattgtcaaacattaaatacaatggaacaactatcatttccatcggagctgcttgtatctggtctccattatccctcagccgccttcctaataacctggaaaatggcatggcccttttgtgatgcagattttgatatcacctcttgctgtcaacgcttccaaacaccacgtgacacttgccacttatcttcagtggtttctgctactgagcttactagtgactacatcaaagcttatcacttccaaaatgcttttttttcgtatctgctctcaactccaccagaagttcctagctatatatcatcacaatttttttcttttattcttttttcaaaaagagatatattcagcatatttccaaaataacatattcaaaggaggcactgcagagacaaatcaagagactggagatttttatggcaaatttgaaatgctaaaaatattattttgaattggtagcacagtctccaaattactaacaatgtaatagaatttatacgcaaaaaaattgccgtggggaagacggaaactatactgtcatttctattttgaaaataagaaattgacacatcccagttacaatcatataataaatcagtagtggtgtcaagaagagaatctagtgaggatttctagtcaaatgtgccatctacttcatcataatgaaattgaaatatatgaatataataatcttgtcaattcaatgaatcacttacttcattatctggttctacctcccgtgacctatgtaggctattaagtcacgactaaataatgagtcaccctctgaactttagaataacttatgta

SEQ ID NO: 19418 - DNA, 559 bp, Homo sapiens
ttatcttacaaaacttgttaaggcttttgaaaaagatctaaagaaaattttctgtgggagccaggtggagctggggtcttctatctggatatcagatagaaatttgattttttattcttgattaaattgtctaatatctgtagtttcaatatactactaaggtagaaagtaaaattatttatttactttagtcattgtcaggcaatcaaggatacttatyaaatttgtctatcttatttattagatatgataattgatatcttggtttcttcttccagtatcatatggatgtaaaactgatctcataggcaaacagaaggtccttggagtttgccgactttgttaatgaccttgtaagttgcaaaaccagtaagttagtcaaaggtgtatttgatcaattatctttctgctttgcaatttgaatgtgataggatgttaatgacaaaatgtggggtttggcacatagcagaatctcaacattattttttctttgtatgtcatcatatttgctatctttcttgtcctctgcaataaataatagcaaaacctctagagggac

SEQ ID NO: 19419 - DNA, 559 bp, Homo sapiens
ttatcttacaaaacttgttaaggcttttgaaaaagatctaaagaaaattttctgtgggagccaggtggagctggggtcttctatctggatatcagatagaaatttgattttttattcttgattaaattgtctaatatctgtagtttcaatatactactaaggtagaaagtaaaattatttatttactttagtcattgtcaggcaatcaaggatacttatcaaatttgtctatcttatttattagatatgataattgatatcttggtttcttcttccagtatcatatggatgtaaaactgatctcataggcaaacagaaggtccttggagtttgccgactttgttaatgaccttgtaagttgcaaaacyagtaagttagtcaaaggtgtatttgatcaattatctttctgctttgcaatttgaatgtgataggatgttaatgacaaaatgtggggtttggcacatagcagaatctcaacattattttttctttgtatgtcatcatatttgctatctttcttgtcctctgcaataaataatagcaaaacctctagagggac

SEQ ID NO: 19420 - DNA, 665 bp, Homo sapiens
atacaggaggagaaagaggggttagtggttagtgacttgcagagagcataaattacaggtggagggtggtagtgcgcttctagggaactgacaatatcttgtgggtggtaataacatgtgtatgtcattttgtgaaagctcaaccagctgtacacttaggattcacatacttttcagtttgtaggttatacttgaatacatgcatttgtttaaaaaggaaatatttaccagtgaacgaacacagtcctacccttaggagctttcagcccagagagagatgtagacaaggcaagagtgaaataaattctgatgaaagtttcagtacaaatgcaatagaaatactcgcagcctgtgctggggtgtagggaggattagaagaataaaattccccgaaaaagttaatgacaaaaatctaagacttgaaaaatgagtagaaacagagaagtgaacaatgtgttctatcagagcaaacagcatgcmcaagactaaggaaaaaaataaaaagtaaaaagtaagagaaagcatgacccatttaaggaacaaaaagttgttccatttggctgactctcagagtggaaggtgtgaagtgtgaaaagagaaagcgggagaaatggacaacagctagtaaatggggagctttgaaagaaagaagctggaaagcattg

SEQ ID NO: 19421 - DNA, 558 bp, Homo sapiens
gcattgagaactgagtggactagacaggccatgggtgaattaggatatttcctaatccaaattttttatagttatttaataatatgcttttaatttttttgtccccctgagggaacaggcagataactcaccggattggtatggctgtttcatcatgtttatgttacatttctagagtagaaatgaaagaaggacatgcaatattgagactttctctcttgaggaagcagtttataatgcatttccagggcatttcaaatcaattcagttcaatgtacaagcgtttattgtacaccaaatctgtatagyttaccatgccagatgttaggcataaagttcaggacaacaggtatctctgtccttaagaagctcgtggcctcgtgttgtggttcttgatcatggctgtgtggtagaattacctgggaagctcttttaaaaatatatttttgcttgggcttccctgcagaccacttattatgtaatcagagttaagaacaatgtttggcggaataggtatacatacacatagaatgtgatgaatgctgtaatgtatagcta

SEQ ID NO: 19422 - DNA, 519 bp, Homo sapiens
gggttccgcagatgcagaggttgaggtggctgcgggactggaagtcatcgggcagaggtctcacagcagccagtaagtgaacagctggactygggctgcctgggcggcagggagaagcgggcaggggaagggtcagcagaggagcgaggccccagaggagccctggggtggagcacagccaagggctctgttccctttcctggactcggcttccacaggccctgacctgcctcccccaccctccggtcctgcccctgtgcctggcagcagccccacctgtgtgacatcccagcacaccccccctctccttgcaaaggagaagggagcggcctaggggaggccaggggcccacctgggctggggctgtggagagggagtggctgggacgggaggaaaaagagagacggagattagatggaagaagagggatttcaagacaaattgccagagatgcagtcagagagactgactgagagacacaaagatagaaggaattagagaaagggccacacagagcca

SEQ ID NO: 19423 - DNA, 509 bp, Homo sapiens
gtcatcggtcatgataagcatctgttatttacataataatccatgtgctgaagagttagcagtgaagtttatactttatgccagtatagtcaatataccatagtaactgaaagttgaaatgtgttatgggaagcaggtattatttcactaaacagtggaaacgagtttcatgcattttagaactgyaaaattgaggactgtttttattattggttatggatattggtcattttattatatgtggacaaatgtaaaactacatatttttttaacagagatacattttttatatgcttactattttaaatatagacttgctatattttataactgcataaaaatttcaataaatggtcctatttacactgcacaaacttgtatacataacagatatctgctgaatgagcagaaaaaacaagctggctgtttcagatccaccaaggctgttttgtgcaagaaagtgtctgcagctttgtaggtccagaaacactgttacatcaggacactca

SEQ ID NO: 19424 - DNA, 530 bp, Homo sapiens
ggagggacaaatacccaaaccatatcatgctgtaattagatgtctgaatcccccgctacacataatcccctcctamactgtatacttcatgagtgcagaaacattgtctgtctggttcactaatatgccatcagcacttggcatgtgtgttcttaaaaatctgatgaatgagtgaacacctctattgagctcccagtgttttttcttattgattttcgcaaattctttatgtgttaactatattaacgcattgccattgcctgggaatattttcgccaagttatttgccttttaattttggcttttttttttttttttttttttttttggcaggaaggagcataaagcagctttacatttgaatgcggacagatctattgatctttttctgttaagatctcttcaaaatgtttccaagtttagaaagtctttcccttgctagatgtgtaataagtgttcacttctattttttatgcacacagctgtccatttaatcttcccaaagcagggctctgatcatttctctcctc

SEQ ID NO: 19425 - DNA, 1836 bp, Homo sapiens
tcaggcaaaacttaggactggctgggcatggtggcttatgcctgtaatcccagcactttgcgaggccaaggcgggtggatcaccttaggtcaggagttcaaggctagcctagccaacataaggaagccccatctgcactaaaaatacaaaaaaaaaaattagctgaatgtggtggctcatgcctgtagtcccagctagttgggaggcaggaggattgcttgaacccgggaggcagaagttttggtgagccgagatcaatccactgcactccagctgggcgacagagcaaaactccatctcaaaaaaagaaaaaactcagccttatttttatcaaaatctagattgtaaatgacatttctaggtgtcccctttcaataaaaatccaaaccaaaacaaacaaaaagcttctaggtaattcatatgaatattaataactgttaaattgggtacttttatttttaagagagggattgtttatatggatgtgttgatgtatcaaacatgtacagttaaaattgtacctttttttgacagagcctcactctgtccctctggaaggagtgcagtggtgcaatcacagctcactgcagccttgacctcccagactccagtgatcctcccaagtcagcctctcaaatagctgtgactagaagtgtgcaccactatgcccaactaacttttaaaaaattgttgtagagatgaggtctcactctcttgccccagtgaggccttgttatgttgcctaggctggtctcaaactcctgagctctggcttccaaagtgatgaggttacgaatgtgagccaccatgcccagccaagattagacctttcaatgagtgcacatcttacctcaaaaaaaaaaaaaagaaaagaaacttattaaaagataaagtctgagttaaaartgggttcacactaatgatttttagtttggtacttctattgttaaaagagggattgcttatatgggtgtgtttatgtgtaaaaagctagttaaggtcgaacctttatttattttttttttgagacagagtctcactctgtcacccaggctgatgtgcagtggcacaatcacaactcactgtagcctcaaactcgtagaatcaagggatcctgctatgtcaacataccaagtagctggaactacaggcatgcaccaccgcgcctgattaattaaaaaaaaaatttaataaagatgtggtctcactatgctgcccaggctgctctcaaactcctgacctcaaatgatcctcctgccttgtcattccaaagtgatgggattacacaggcttaagccattgtgctcagccaagattttaccttcaatgagcacacattttataccacaaaaaataataataaataacaaagtctgtgtgagaaatgagttgaagtatagataacacaaaattggcatgttattagttgttgttgagcctgggtaacaggcctattgtactgtttcttttattttgtgtatgttttaaattttctgtaataaaacatgtataataatacaaagttgatctacactgttagctcttaagatcttagtgactttgggggagcaaaagagagaaagtggttaccaggacatctgtgaagctggttctatttctaggttacacacgtgtgttcactttgtaataattcattgaactttacatgatttctttgtatacgtctttctgcatgaatgttatacatatataaaaatttaaatattacctatttgcacaaaattttaacttcatatctcagaataatagcactgttttgtactgttttaaagtgggacatgttttctcggggcatcatcagatggatattaatat

SEQ ID NO: 19426 - DNA, 1836 bp, Homo sapiens
tcaggcaaaacttaggactggctgggcatggtggcttatgcctgtaatcccagcactttgcgaggccaaggcgggtggatcaccttaggtcaggagttcaaggctagcctagccaacataaggaagccccatctgcactaaaaatacaaaaaaaaaaattagctgaatgtggtggctcatgcctgtagtcccagctagttgggaggcaggaggattgcttgaacccgggaggcagaagttttggtgagccgagatcaatccactgcactccagctgggcgacagagcaaaactccatctcaaaaaaagaaaaaactcagccttatttttatcaaaatctagattgtaaatgacatttctaggtgtcccctttcaataaaaatccaaaccaaaacaaacaaaaagcttctaggtaattcatatgaatattaataactgttaaattgggtacttttatttttaagagagggattgtttatatggatgtgttgatgtatcaaacatgtacagttaaaattgtacctttttttgacagagcctcactctgtccctctggaaggagtgcagtggtgcaatcacagctcactgcagccttgacctcccagactccagtgatcctcccaagtcagcctctcaaatagctgtgactagaagtgtgcaccactatgcccaactaacttttaaaaaattgttgtagagatgaggtctcactctcttgccccagtgaggccttgttatgttgcctaggctggtctcaaactcctgagctctggcttccaaagtgatgaggttacgaatgtgagccaccatgcccagccaagattagacctttcaatgagtgcacatcttacctcaaaaaaaaaaaaaagaaaagaaacttattaaaagataaagtctgagttaaaagtgggttcacactaatgatttttagtttggtacttctattgttaaaagagggattgcttatatgggtgtgtttatgtgtaaaaagctagttaaggtcgaacctttatttattttttttttgagacagagtctcactctgtcacccaggctgatgtgcagtggcacaatcacaactcactgtagcctcaaactcgtagaatcaagggatcctgctatgtcaacataccaagtagctggaactacaggcatgcaccaccgcgcctgattaattaaaaaaaaaatttaataaagatgtggtctcactatgctgcccaggctgctctcaaactcctgacctcaaatgatcctcctgccttgtcattccaaagtgatgggattacacaggcttaagccattgtgctcagccaagattttaccttcaatgagcacacattttataccacaaaaaataataataaataacaaagtctgtgtgagaaatgagttgaagtatagataacacaaaattggcatgttattagttgttgttgagcctgggtaacaggcctattgtactgtttcttttattttgtgtatgttttaaattttctgtaataaaacatgtataataatacaaagttgatctacactgttagctcttaagatcttagtgactttgggggagcaaaagagagaaagtggttaccaggacatctgtgaagctggttctatttctaggttacacacgtgtgttcactttgtaataattcattgaactttacatgatttctttgtataygtctttctgcatgaatgttatacatatataaaaatttaaatattacctatttgcacaaaattttaacttcatatctcagaataatagcactgttttgtactgttttaaagtgggacatgttttctcggggcatcatcagatggatattaatat

SEQ ID NO: 19427 - DNA, 516 bp, Homo sapiens
gtctcagcctcccaggcagctgggattacaggcatgagccaccgagcctggcctccaatgatatttttttaatggatattgaaattttcctttttttttgagacaaggtctccccatcatccagtctggaatgcaatggcacgatcatggctcactgtagcctcaacctcctgggctcacaggcacaccacaccacacccggctaattttcagattttttgtagagatggggttttgccacgttgcccaggctggtcttgaattcctgggctctggtgatctgcccacctcggcctcccaaagtgctggttttacagcaatgagccaccacacccagccgtgaaattttaatttcatgtgtcacaaagtatttttttccattgaaaaaccattcttagtccaggcatggttggcrccaaccccatgagcccactggacccctccagtacagagcacctgtccatccttgtcagtggccagtctccattagacctggactccagggcagaggccagc

SEQ ID NO: 19428 - DNA, 1264 bp, Homo sapiens
tcgaggctcttaacaaagctgtatcaaactccttttcttctgagtaatatattatgtacgtaaagtcctaggagatgccctaagtctactataagtgaatttactttttgttttctgctttgcttcattcatcctgctttgctttttttctcatcccaaatataaacatctgttttgttatcaagttaaagttaaggagatataaaaccctctcagattaatgtacagcccattattgaattctggatcttagtgatatccaatatattatcatgaattttatagaatatactgaacttttaattcttatctgatttatcttcttaatgatgcttagatttccattcaaaaatcctgtctcttctcaccctttccacactgtgtctgtttttgtgcccttttctagagttttacatttctctttaggattatctctctctttctctcgctcacctacatacacacaccacacactcsatgtccaaattcacagtctaagcattttggtgatatgccattcctcttctacctttgttagaagttcctctttcccatggaatcaattctaccggaaaaaagtgaaaaggaaccttagagagcaatcattaaaggtgcaaagggaaaggtccccatgtctgggagtgtctctaaccagctgtgtgatacgtgccatgtaatatctggctttggttttctcatctctaaaactggagggtaaaacaagactatgtcttgaaacctttctaattctgaaatgttcactattatcagttaacatttattgtgcttttctgcatggcaggcctcaggctaacggctggctataactagcactatccatgctcacaacaactccataaggaaggtgccacggttatcctcattatgtcactgagaaaactgaggttctgagaggtaaagtcatttcacacctgatgggatatggatgtaagactggaactcagacggcatgactctcaggttacagattctgcatcacatgctcatatcaactgatctgtatttttatacaacttcaaaaatgaaaacactgggcatgtgacctataaataatgaaatcatatacaaaaataaagaaacaccccacattgttgaaaaattatttcctttccaaaaattacttgaaagggcatcagtaagccctggcatatttgttcaaaatacagtcttactgaataggggtgtgtgtgtgtgtgtgtgtttgtgtgtgtgtgtgtgtggtgtgtatatacacacatatata

SEQ ID NO: 19429 - DNA, 613 bp, Homo sapiens
gatgattttggatgtggagggaacactccaagcacacttcttatgaagacctataatcagaggtcttaacaaacacaagtgattaatatttgttgacttcatgacacatttattttctttagagcacttaccacagcttactctaactttattaaactttttagtatatttttgggttttttttgttgttggtggtatcctcaataaactatgagttctgtgggggaaggaaccatgattccctgtccattgttgtacatccactacacagcacagagtagatgaagctcaacaaatgttggatgaataaatatgcatatagtatgatggatggatggttgagtggataaatggacggaaagaggccagctagtcacccatacaagcttctgggttakgaacctaaataataacacaagttcaacagcaacaaaaataatcccattccattataggctggatgaaaggcttacccactgtcttacaccattagcgctgctctaacaaaatacctgacaatgggtgatttataaagaacagaaaattatttctcacagatctgggaaatccaagatcaaggtcctagcatcttgtttctgatgagggtagtctt

SEQ ID NO: 19430 - DNA, 544 bp, Homo sapiens
gattcgctgcctatgtccgagagctttgaatctcaattcctcacacctggtgccattttactcataatatgtaaaaggaagagctgctagaaaaacttacgtcacctgtgttaagtttatagatatacacttgaattaacaatatttttggccaagattcataaatacactttatgttttmtgaagcccaattcagttagaacttgaggtcaagcaaagaaatcaagtgtaagagctgacataaaaacaggtttccttttcaatacactttcagctatcttagaaattaactgttcggagtgtttttctattcatactccagaacctctcgcccaataaaattatctcctcccagggctttcactagtgtcaattcactaaagatgcccgtgtcaacatttcaaggtcgcgcctcctcaagagtttaaatattcatctagatatccaccttgaattcaaaaaccccacaacagaattccttctcttgttcccgcaaaaatctgtacctcttcctgaatctgcattctggctgcactatgtacct

SEQ ID NO: 19431 - DNA, 521 bp, Homo sapiens
tttctgaattggggacatgggaggagggagtccagcagtaccctggggaggaggccctcccctctcccatgaaccactggcactggaggcactgtgagcttgcccctagagggtatgccaacagctgacttgaatyactgcaaaggaagggcagaggattcctgcacttgtgtgatgtggaatactctggggactgtcagaaataacccaggaaactgtaaggtagggccaaggtcctgctgtcatgtaggaggggcctgtgagctggtgagatttctgtatctacagatgaaggagttggaaaattccagttacataatgtttttcccatctaggaatattacggtatgtcattccatttagccaagtctttatttaaatccttcagtaattgtattcatataactcctgtatttttcttgtttagtaaattcctaggtagttctgtttaattttttaaaatgttaatatttatttatattttcattataattaatttttctagttatatttttggttct

SEQ ID NO: 19432 - DNA, 527 bp, Homo sapiens
gcctcccagacccatctcttctctctcacactagcaagcataagaccctcagaaataactaagaaagaaagaactgaagaataaagggtccaaatgccttgtgaacagtgcaatttaaaacaagtagtagactcagccaggraagcagagctagatctctggtcagcccttattagatcttcagatactgtctacaacatttgcagctcaaggagtccttctatgactacaactctagggcagaccctgtctgttaccatctcataccagctttcattttccttcataagacttccattatttgtattcagatatataattgtctgtcttcctcagttgagtgtaggctctttgaagataggaaccaagttttgtagacctagcaaaatgctggaaaatacagtcagtatttattcaataaatagatgttaaatgatgtaatggaggccaggtcaccagatttctgccctcagtggtgctacttggagtaaagagaagatcatttagattattggtggggtctttgc

SEQ ID NO: 19433 - DNA, 527 bp, Homo sapiens
gcctcccagacccatctcttctctctcacactagcaagcataagaccctcagaaataactaagaaagaaagaactgaagaataaagggtccaaatgccttgtgaacagtgcaatttaaaacaagtagtagactcagccaggaaagcagagctagatctctggtcagcccttattagatcttcagatactgtytacaacatttgcagctcaaggagtccttctatgactacaactctagggcagaccctgtctgttaccatctcataccagctttcattttccttcataagacttccattatttgtattcagatatataattgtctgtcttcctcagttgagtgtaggctctttgaagataggaaccaagttttgtagacctagcaaaatgctggaaaatacagtcagtatttattcaataaatagatgttaaatgatgtaatggaggccaggtcaccagatttctgccctcagtggtgctacttggagtaaagagaagatcatttagattattggtggggtctttgc

SEQ ID NO: 19434 - DNA, 582 bp, Homo sapiens
cacccagcttattcattttatttaacgtaagagatttttcctttttttttttttttttttttttttttgagacaaggtctcactctgttacccgggccggaatggagtggctcaatcatagctcactgaagcttcaaattcctgggctcaaacgatactcctgcctcagcctcccaagtagctgggactacaggcatgagccaccatgcgtggctaatttatgtatttatttatttttaagaaatggggtttcactatgctgcccaggctgatcttgaactcctggcctcaagcaatcctcccgcctcagcctcccaaagtgttgggatgacagatgtgagccaccacactcacaattctttttttttaaattatttcytgtatctgtccctttcttttccacccccattgctacttcttcagttgagacctcacaaatgtcacctggatcactgtaaaacattaaacttgatcacttgatcactagttcccactttagaataagtgatcagggaaggcctctctaagaaaataacacgtgtggccgggtgtggtggctcatgcctgtaatcccagcacttc

SEQ ID NO: 19435 - DNA, 604 bp, Homo sapiens
gtggcaatgttagatgaaaatagttcattttccctaaaaatagaatctttattttagtcacaaggtctcaatctgcttgtctgccctggttcctctttcctggtcaaagtggccattagaacacaatgaagatcattttcaacatcaaagttgttgccagctttttttaatgttgataaaaatgagaaatgatgttcactacatgtttacttgtgttcagaggatcaaggagatyatttactcccaaaaaccttgaaagcccacttgattaagttgtcttagactcaagcttgagctcccaaaacacctctgagagatctggcaaagactgaacatgtgagaaagggtttccttatggagtttcaaatgtgcttttcagacaaaatatcagaaaaatatggatttcttaaattcattttgcagacatattagaagaaactgctttttactttttttctccttaagagcaagaccaccaaatctaaacactaaaaagaaacgtttagcactaatataatgtatttttagataaatgtgggctataatttcctgatgtaagcaatgctgagaaacaagatggatatttatttcttgaagtttcaca

SEQ ID NO: 19436 - DNA, 523 bp, Homo sapiens
acggagtctgactcttgtctcaaaaacaggctggagtgcggtagtgtgatctcagctcactgcaacctccacctcccagattcaagtgattctcctgcctcagcctcctgagtagctgggactacaggcctgtgccaccacacctggctaatttttgtatttttttttttagaggcagaatttcaccctgttggccaagctgatttcaaactcctgacctcaagtgatctgcctcggcctcccaaaatgttgggattacaggcgtgtgccattgcgcctgacctcattctttgactagagtgataagtgtgtctagtattatgtcctatagcatgtagagtctgtaccacacaattttacatttacatgctgctttgkattatttattttggtttgcgtgcatgtgtgtatgttaaattatcatgtcatctatttcttatatctcttccagtgcctagcacacaggaaagatttgacacaggattaattggtttgttctttccatggaaggatgtataaataa

SEQ ID NO: 19437 - DNA, 517 bp, Homo sapiens
cttacagtgattggtatgctcgatgtattacaatttgtcctcactttgttagaatcaactttgttatcttaaacagccaatcatatagccaaataacaacatcaacaacaaaaagaagtgttccaaaaccactagcctggtagcaattctaatgcaggtggtaaagaggtatttgatcatgtttattctttggtttcatttattttaatgcagtctgtctcagacattttctgttgctataacataatacaattgactgggcaaattataaagaaaagaaatttatatctcacagttctggaggttagaaagttcaagagcagagcacggtactggcacccagcgagggccttcttgctgcattgtaacatgctggagggcatcacatgtcaacagggcaagagcacgtgtgtcagctcaagtctgtttccctcytctcataaaactaccagtgtcatcatggaggctccacactgatgaccttatctcatcctaacgacctcccaaagaccccacc

SEQ ID NO: 19438 - DNA, 517 bp, Homo sapiens
cttacagtgattggtatgctcgatgtattacaatttgtcctcactttgttagaatcaactttgttatcttaaacagccaatcatatagccaaataacaacatcaacaacaaaaagaagtgttccaaaaccactagcctggtagcaattctaatgcaggtggtaaagaggtatttgatcatgtttattctttggtttcatttattttaatgcagtctgtctcagacattttctgttgctataacataatacaattgactgggcaaattataaagaaaagaaatttatatctcacagttctggaggttagaaagttcaagagcagagcacggtactggcacccagcgagggccttcttgctgcattgtaacatgctggagggcatcacatgtcaacagggcaagagcacgtgtgtcagctcaagtctgtttccctcctctcataaaactaccagtgtcatcatggaggcyccacactgatgaccttatctcatcctaacgacctcccaaagaccccacc

SEQ ID NO: 19439 - DNA, 523 bp, Homo sapiens
cagggacttcagaggatccagtgaataagagactctgtaacagtgttaaatgcttaatcttcctgaagacattgatgtcacacgtactaaaatctatagaagtagtggtagagggcagcaaataagtttcttcattgaaaaggtggcatggaagctcactgggttacagagagtaaaacggatgccggtgtacgggagcccgagaagcaagtgttacaagctgttagcactgtaatgacccagaagctaacagcccacaaagaagaagcatgcagagatctcaatgtcttgggtgatagcaagagtcagagataaactctgaaactgtgtggtagcagcaaagactgtaatcctsttaggaagaaatctaggcacctattcaacctagagtgcaaaaacatggcagccagaagagctacatttgggaacacataaaagccctttggaaaagccatggcatgggcagtgtttgatccaggtagcgctttccgtgagtctggtagcatgaacacggcatggtgtg

SEQ ID NO: 19440 - DNA, 536 bp, Homo sapiens
ttttataaggctgaaagaagataatggctgggagagttttgtaaatcataaagaactacacatgtaacaaatattgttcattctgccactgggtctgtggacatgcctaagttgttgttctctgacttcaattatacatttctgggcagatcagatctattatctattaattatctatctatcaatcaatcatcaatctatccattatctatctatccattatctatctatctatctatctatctatctatctatctatctatctatcatctagattatgattctaaccaatttagtcattagcagtgggctgtatctactattccaacataactatatcacacacctgcccgttttcattgccaataccagatagaatatttatgccattattattttggaacccataaagtatagagtgaaaagtatgtttatttttattttcctactattgttatctaaaaacatacacagtgtttcaagaaaacaagctactgtgaagcatcaaataaraaatactctggttgggggctgag

SEQ ID NO: 19441 - DNA, 587 bp, Homo sapiens
ggttgtttcatttcaatatatttatgaaatttatatattttgttattaatttttaatttaattctggctagataacatattttgcatgttttaaaatcttttacatttattgagatrtgcttcatgagtcataatatgctctgttttggtgaatgttagaagagtattctaaaagaatgtgtcttttgttttatttttcttatttggaaatttgattttgatcttttttcccccatgtctctccttattatgattgttttcatttattttcctggacataatgagcctatttataatgactgctttaattttcatgtctattatttctgtcatgtctgtcattcctgtgtctgttggtactgattgatttttcccgtttttgtcttatgcctattttttaattgaaattttatatgtgacattctagagtatttgcattctttttagtagttttgaactttattctgtaaaacagtaagttgcttgaaaagaagccaatcctttctaggtgtgcttgaagcaatgcccttctgaggactctattcaatgccccatgaaatagggagcttttcacactgcatgtgcta

SEQ ID NO: 19442 - DNA, 587 bp, Homo sapiens
ggttgtttcatttcaatatatttatgaaatttatatattttgttattaatttttaatttaattctggctagataacatattttgcatgttttaaaatcttttacatttattgagatatgcttcatgagtcataatatgctctgttttggtgaatgttagaagagtattctaaaaraatgtgtcttttgttttatttttcttatttggaaatttgattttgatcttttttcccccatgtctctccttattatgattgttttcatttattttcctggacataatgagcctatttataatgactgctttaattttcatgtctattatttctgtcatgtctgtcattcctgtgtctgttggtactgattgatttttcccgtttttgtcttatgcctattttttaattgaaattttatatgtgacattctagagtatttgcattctttttagtagttttgaactttattctgtaaaacagtaagttgcttgaaaagaagccaatcctttctaggtgtgcttgaagcaatgcccttctgaggactctattcaatgccccatgaaatagggagcttttcacactgcatgtgcta

SEQ ID NO: 19443 - DNA, 561 bp, Homo sapiens
agaaaaccaaatatcacatgttcccactcatctgtgggagctaaactctttggatgcaaaggcataagaatkatacattggactttggggacttgggggaaagggtggggggtgacaagggataaaagactacacattgataaagtgtacactgctcaggtgatgggtgcaccaaaatcccagaaatcaccactgaagaaattattcatgtaaccaaacaccacctgttcccccaaaacctattaaaataagtaaataataaatcaatcaataaataaaataaataaaattatgtttgttttagatgtgctttttggaagcagcaaaggttttttaagcagttgttttttaaccatatttggagaactctgttttaactgggtagtataactcatttaaatttattatcaggactgatatcatttgtgttgttatgctatctgcgggtattgtttcttttttctttcttgctgttttctttctatttttcaggtttctatgccacttcctctgttttctgtcatttgctctttgggttgattttatcttctgcagctttgg

SEQ ID NO: 19444 - DNA, 561 bp, Homo sapiens
agaaaaccaaatatcacatgttcccactcatctgtgggagctaaactctttggatgcaaaggcataagaatgatacattggactttggggacttgggggaaagggtggggggtgacaagggataaaagactacacattgataaagtgtacactgctcaggtgatgggtgcaccaaaatcccagaaatcaccactgaagaaatyattcatgtaaccaaacaccacctgttcccccaaaacctattaaaataagtaaataataaatcaatcaataaataaaataaataaaattatgtttgttttagatgtgctttttggaagcagcaaaggttttttaagcagttgttttttaaccatatttggagaactctgttttaactgggtagtataactcatttaaatttattatcaggactgatatcatttgtgttgttatgctatctgcgggtattgtttcttttttctttcttgctgttttctttctatttttcaggtttctatgccacttcctctgttttctgtcatttgctctttgggttgattttatcttctgcagctttgg

SEQ ID NO: 19445 - DNA, 603 bp, Homo sapiens
gctagctagctatactttctatttctttttccatggtgtgaaaatcttcctagaaacctcactactgggaaaagagatgcagagattagtcccatcttctcccctggaaatttactatcgcccttttggcttcaaggtccttcctcaaaagcaaagaattgaacaagggaaagtgaggggaagggctgggggaacagggaggtagaaggggttttccctggtcttttctaatcctttagttccagacgcttagttggtatttcaacattttagaaataaaacctgcttttataattaatgcaaatattacttagtgattcatcctttccaaatgattcttggtttcttttgacatttcatttttaaattgtgaattaacattgacatcaccatagcgttactgttacctcagctctttacagtgaactgtattgcaaaggctataaaagttcaaattttaactatcacccacgtgagccttggactgctgttaggcttttraaactgtgatcctttggcaagaattggtgtataaatcatggggaggatattgaaggggaagatcatgtttaatttggcagttgggtgcctgcaattgacaga

SEQ ID NO: 19446 - DNA, 1430 bp, Homo sapiens
ggctacattatagctgcttacgaaattgtagttacgatgtaaaagagaaaaacactggaaaaggaggatatgggccattttattccaccttcaccaccttttagctttgtgaccttgggcaaattatgcttcattccgtgcttcattttccttgtctataaaagggtgtaagtacagaaccattgaggggtggtcattattaacctacctcaaatggtgtctgtaagttaatatatattgtgcttttcctatgtacaatatctagcacataattacaaatcaaatccatcccatgtgcaatatctagcacataggaaaagcacaataactagttattactcttgttgtagtaattgctacgctgtaggagtttgaattgtaaggcagtggagagtcactgacctttacgagaaagtgtagcagaacatttgagtagatagtaatggggaatattacataaatggatagatattaggggcagatattactattaaaatattacagcatggatatttattaaggccaaactggttaattagttgcatctctcaggttcctaatgttgcttaattttttaacctcccattttgtgctgccctttgtacgaatatttaatgctcccaacacctcttcagtagcacatgtactgtgagtttgttttgttattacttgtgtgtattagcattcctttgtgaaccaaaagcatggaattagctgttgcctctaggctacctagttttgtagtttggattgaagccttcacctcagtaacacctattctgtctactatcttacagaaaacttgtaaattaagacagatcattaatatagcagaaagagacaaagggcagagaacattgagatactggatattggaaccacccaatagtgttgatttatttatgattatcagtttttgtctctgcctagcctcatgccactaaagtctctgaggcaacaaagaataagcaattttgctcaccttatacaaataaaacacagaaaaaggaatcactagagaaatggtactgcagcctttctgcagggattactgcttatttttaaattacttaaaaggtattgaaattattgttcataatgagaaacctgcctaataaaacagaaaattaaacttaacacttccctataatgtaaacagctcggttaggaacacaacattacagaaaccacttaagaattgattgtacttgttcttggagcagaactagaagctcaccgtttagaagctgtgcacatttccctatcaaacagtacataaagtttccatattcctcagaatcggcttcatttgtgccatgtgtttgcttggaactatgccacagaaagcagttctccccctcaagctgggctcctttcatgcckcagtgcaagtgtgtgatatactggcaccatgtgctaatgtagaccca

SEQ ID NO: 19447 - DNA, 564 bp, Homo sapiens
acaaacgatcctctgattgctcagatgtcctctttgacttggaaagcacccacgtgaatgttgaaccatttggccctcagttctccgtcctgcagcaaactgcattgactcctgttttctacacagtggtcttcagctacaccttaccaagcaccccttacccagcaaacgtggcttctcttccccaggcagagcagttcgttacttagactaggaaatggctccgagaagctcacccatcaccatttgctctactgcaaaacaggactcattagcaggagctcataaaatgaaactggcagtgagctcatatggaagargcatcacgggcaactcggcttggctcaccagcccctgagctgcccccgagtgaccgctccagccttctttccttccacctctccctcttggccaacttcatgcttcagccaaagtgaactgagctcaccaggctgagtcatctgtgccagctgtgccctctccccgaggctgcctgccatgctcgtgctttcttgtctattggcaaaaggctctccatccttcaaaatccagctcttggcctca

SEQ ID NO: 19448 - DNA, 694 bp, Homo sapiens
gggacacagccggtgctgtgctscactctgggtaactgttttggattattttctctattccaactgaaataaaaaaaaattaattaaatgtggctaggttatcttgacagcagaatccattcccagttaattattattttaatacttgatggtgtctgtcaaattgtcgacatgtgacggtcctttcaaatttaaaggaatagctgatggtcactggccacccaagctgatactgattttatatgttgatgtttctcattttatttgctctttccttgaatatttattcaggacattctctaccagacatattgagtaagggcaacagaaacaatacataagtatcttataaatgtggaaaacaatgtatatgtgttttttatctctcaatgattggtgggtaccatatccccaaagtagaatgagcatttgagaaaacaggaaatatcctcttttaggcaccatctctgtcaaggctgatgctgggctttttatatattttctctaattcttgtggctgtcaaacaaggtgggcattatcattccctttataggggacacagctgtggctcagaggggtttattcactttcctgagggccacacacataatgagaggcagacacaggtgacgaagtgagttttccctgtcacgccatcttatctgtcacatacctctctgacatgctaaaatt

SEQ ID NO: 19449 - DNA, 694 bp, Homo sapiens
gggacacagccggtgctgtgctccactctgggtaactgttttggattattttctctattccaactgaaataaaaaaaaattaattaaatgtggctaggttatcttgacagcagaatccattsccagttaattattattttaatacttgatggtgtctgtcaaattgtcgacatgtgacggtcctttcaaatttaaaggaatagctgatggtcactggccacccaagctgatactgattttatatgttgatgtttctcattttatttgctctttccttgaatatttattcaggacattctctaccagacatattgagtaagggcaacagaaacaatacataagtatcttataaatgtggaaaacaatgtatatgtgttttttatctctcaatgattggtgggtaccatatccccaaagtagaatgagcatttgagaaaacaggaaatatcctcttttaggcaccatctctgtcaaggctgatgctgggctttttatatattttctctaattcttgtggctgtcaaacaaggtgggcattatcattccctttataggggacacagctgtggctcagaggggtttattcactttcctgagggccacacacataatgagaggcagacacaggtgacgaagtgagttttccctgtcacgccatcttatctgtcacatacctctctgacatgctaaaatt

SEQ ID NO: 19450 - DNA, 646 bp, Homo sapiens
tggtgctgccagcctgtaatcccagctacttgggaggctgcagggggacatcacttgaaccagggaggtagaggttgcagtgagtcgagattgtgccactgcactgcagcctgagcgacaacgtgaaattgtgtctcaaaataaataaataaatacaataaaataaaaatgaaatgaaagcaccaacatataaaggtattgattgcatcattgtttttggtagcaagtgagcatgtttatatacttgcaagtatatacatttgcaaatgtttaattaagagaaagatgtggaaaaaaggaagaaggaaaagggaggggaggtaaataatatctaaaaataaaatttttcatgaaatttaaaaaaatcatgtgactatgatcatatttaaataataccatatagataggtctatataaacacagaaatgttaggagatggttaccgaaatgttcatgggtttccaagaggtgcaaccttaggtaaatttttttctttttctcacgtttttgttttttgtttttttttttacaatcagcacattatttttacatcagaagaacagagaaaggtatgtttttgattagctaaaaattttaacataaaattctaatattgtgtctataacatgttttayatggattagta

SEQ ID NO: 19451 - DNA, 668 bp, Homo sapiens
caactagttaaaccccataaactggggaggactacctcttggagactgagatggttaatactgagtgtcaacttgattggattgaaggatacaaagtgttgatcctgggcgtgtctgtgagggtgttgccaaaggagattaacatttgagtcagtgtactgggaaaggcagacccacccttaatctgggtaggcacaatctaatcagctgccagcatggcagaaaaatgtgaaaagagagactggcctagcctcccagcctacatctttttcccgtgctggctgctccctgtcctcctacatcggacttgaagttcttcagttttggaactcaggctggctctctttgctcctcagcctgtagatggcctattgtgggacattttgatcatgcgggttaatacttaataaacacccctttatatctatctatctatctatctatctatctatctatctrtctatcccattcgttctgtccctctagagaaccctgactaatacagagacgttgcctagagatattgccataggctgggtcactgatcccggttgtgtcctaaaaattcttttcaatgcagttctctagggaaccatggatcatcatcacagttggcactcaagatgtcattgagaatctagagattttaagctacttcctgccttttc

SEQ ID NO: 19452 - DNA, 549 bp, Homo sapiens
taatcttaacattcatatttaacatactttggcatattccaacccaaagagaatccacagagcagatagatttgggagtagcttatcctcactattcccactcatcctcccctaccctttgaacgtaccagctttacaataattctgtatgtgtctgaatattcatgtgtctgactctctcactaggttgtaggtactttgctaagctttgtatctttgctacataatatgatgccaattatatagcaggatttccatgaataaatggaacggtaagatggagcttgaaaagttttccaccacatctccaactggttgcttaatgttcctgtgaatatattgcttagccattcagacaccacatatctaaaataaaattcatccgttctttaaaactttcttcccttaaggggttagtagtggtttttaayaatgtggttcatcagaaaggtggaaaaatcctaaggtccagatgtgttatggatccacgtgactattgaaaacatttaggaagagatgtggagataaaaacagtagaagtaaatattt

SEQ ID NO: 19453 - DNA, 889 bp, Homo sapiens
caggctctttttaacattcagctcttatggacactaatagagctggaactcactcactcygagggaaggcattcatctcttcataagggatccacttccaggactcaaacacctcccacattggggatcagatttcaacatgagatttggaggggacaaatgctgaaactgtagcagttaatgtcactagcctacaagcagagtggtgaagcagcttccccaggatcacacagagagcccgtggagaaaactggactcagaaaagctctgttaatgccaggcctgcactctgatcccatctcccctccacaggaccgtgctctggggtacctgactgatgtggcaccagcgagatcagcccttctctgactcagtccacaggatactagctaggcctgttctgtggctgccaccccatcactgcgtgtccttgggcgggtcattcccctctcagctgtgtccccttgggaagggagcatgagttttcctgggctctgccccctggaaatttccctgcagttctatctaacattgctccttgtacccacaggtctgtcattttgtcagctacagaaacagcagatcttactgagtggctacattaacagcacagacacctcctacctccctcagtgtcaggattcaggggactacgcgcctgttcagtgtgatgtgcagcaggtccagtgctggtgtgtggacgcagaggggatggaggtgtatgggacccgccagctggggaggccaaagcgatgtgagtttcactgagcgcctgcacccctagagctggggaggggctgaagctttcctcactgcgatccaacacatttagggtttcctgccgaagtgggcagagaaccaggccctcattagggaaaatgaaagcttc

SEQ ID NO: 19454 - DNA, 889 bp, Homo sapiens
caggctctttttaacattcagctcttatggacactaatagagctggaactcactcactccgagggaaggcattcatctcttcataagggatccacttccaggactcaaacacctcccacattggggatcagatttcaacatgagatttggaggggacaaatgctgaaactgtrgcagttaatgtcactagcctacaagcagagtggtgaagcagcttccccaggatcacacagagagcccgtggagaaaactggactcagaaaagctctgttaatgccaggcctgcactctgatcccatctcccctccacaggaccgtgctctggggtacctgactgatgtggcaccagcgagatcagcccttctctgactcagtccacaggatactagctaggcctgttctgtggctgccaccccatcactgcgtgtccttgggcgggtcattcccctctcagctgtgtccccttgggaagggagcatgagttttcctgggctctgccccctggaaatttccctgcagttctatctaacattgctccttgtacccacaggtctgtcattttgtcagctacagaaacagcagatcttactgagtggctacattaacagcacagacacctcctacctccctcagtgtcaggattcaggggactacgcgcctgttcagtgtgatgtgcagcaggtccagtgctggtgtgtggacgcagaggggatggaggtgtatgggacccgccagctggggaggccaaagcgatgtgagtttcactgagcgcctgcacccctagagctggggaggggctgaagctttcctcactgcgatccaacacatttagggtttcctgccgaagtgggcagagaaccaggccctcattagggaaaatgaaagcttc

SEQ ID NO: 19455 - DNA, 506 bp, Homo sapiens
tttcctgtgatttctatgcttggacaagtgacaatgttgcctgcatgacttctgaccaggtgaggtggggcagccacgwgtggttctgctcctcatccgctgtggatcagatgtgctctgaggagcgggcagcaggctggccaggcgatggaatgaggttgtcgagagctgatcctctgttacctccatttcttcaaagcaatgggactttggcaaattgaagctgtgatagtccagagacagacccaagatgaagctggagtaaggggcgtctgcttgagccttgtggcttcctgacgagtcagtcaggagagaaccacctgccccatcaggcagtgtgggcaagatgtgagggggccctaaacaccactgccccttggggtcccagacccgaatatgcctttccattgtagaaataaaacataatcgtggttggagggcacggtggctcccatctgtaatcctagcactttgggaggcctaggcgggtggatcacttaaggtca

SEQ ID NO: 19456 - DNA, 506 bp, Homo sapiens
tttcctgtgatttctatgcttggacaagtgacaatgttgcctgcatgacttctgaccaggtgaggtggggcagccacgagtggttctgctcctcatccgctgtggatcagatgtgctctgaggagcgggcagcaggctggccaggcgatggaatgaggttgtcgagagctgatcctctgttacctccatttcttcaaagcaatgggactttggcaaattgaagctgygatagtccagagacagacccaagatgaagctggagtaaggggcgtctgcttgagccttgtggcttcctgacgagtcagtcaggagagaaccacctgccccatcaggcagtgtgggcaagatgtgagggggccctaaacaccactgccccttggggtcccagacccgaatatgcctttccattgtagaaataaaacataatcgtggttggagggcacggtggctcccatctgtaatcctagcactttgggaggcctaggcgggtggatcacttaaggtca

SEQ ID NO: 19457 - DNA, 506 bp, Homo sapiens
tttcctgtgatttctatgcttggacaagtgacaatgttgcctgcatgacttctgaccaggtgaggtggggcagccacgagtggttctgctcctcatccgctgtggatcagatgtgctctgaggagcgggcagcaggctggccaggcgatggaatgaggttgtcgagagctgatcctctgttacctccatttcttcaaagcaatgggactttggcaaattgaagctgtgatagtccagagacagacccaagatgaagctggagtaaggggcgtctgcttgagccttgtggcttcctgacgagtcagtcaggagagaaccacctgccccatcaggcagtgtgggcaagatgtgagggggccctaaacaccactgccccttggggtcccagacccgaayatgcctttccattgtagaaataaaacataatcgtggttggagggcacggtggctcccatctgtaatcctagcactttgggaggcctaggcgggtggatcacttaaggtca

SEQ ID NO: 19458 - DNA, 512 bp, Homo sapiens
ttttttttttttttttccacactctgttgcccaggctggagtgcagtgacggaatctcggctcactgcaagctccgccycccgggttcacgtcattctcctgcctcggcctcctgagtagctgcgactacaggcgcccgccaccatgcccggctaatttttttcatatttttagtagagacggggtttcaccatgttagccaggatggtcttgatctcctgacctcgcgatccgcctgcgtcggcctcctaaagtgctaggattacaggcgtgagccaccgcgcccggccggtactgtcccttttttatttaaatcatgtatttctagatttttctctggccccaagtgcaccaccagtgttgtctcagtttcactgttataaatcatttacatcagggatgttgaatccagaaaataaaatggcaaacaaaaatgacttatatgttttaaaaactatgaaaaaggaaatgatatatgtttgggattccattcaaaacgatcctgcagagtt

SEQ ID NO: 19459 - DNA, 512 bp, Homo sapiens
ttttttttttttttttccacactctgttgcccaggctggagtgcagtgacggaatctcggctcactgcaagctccgccccccgggttcacgtcattctcctgcctcrgcctcctgagtagctgcgactacaggcgcccgccaccatgcccggctaatttttttcatatttttagtagagacggggtttcaccatgttagccaggatggtcttgatctcctgacctcgcgatccgcctgcgtcggcctcctaaagtgctaggattacaggcgtgagccaccgcgcccggccggtactgtcccttttttatttaaatcatgtatttctagatttttctctggccccaagtgcaccaccagtgttgtctcagtttcactgttataaatcatttacatcagggatgttgaatccagaaaataaaatggcaaacaaaaatgacttatatgttttaaaaactatgaaaaaggaaatgatatatgtttgggattccattcaaaacgatcctgcagagtt

SEQ ID NO: 19460 - DNA, 512 bp, Homo sapiens
ttttttttttttttttccacactctgttgcccaggctggagtgcagtgacggaatctcggctcactgcaagctccgccccccgggttcacgtcattctcctgcctcggcctcctgagtagctgcgactacaggcgcccgccaccatgcccrgctaatttttttcatatttttagtagagacggggtttcaccatgttagccaggatggtcttgatctcctgacctcgcgatccgcctgcgtcggcctcctaaagtgctaggattacaggcgtgagccaccgcgcccggccggtactgtcccttttttatttaaatcatgtatttctagatttttctctggccccaagtgcaccaccagtgttgtctcagtttcactgttataaatcatttacatcagggatgttgaatccagaaaataaaatggcaaacaaaaatgacttatatgttttaaaaactatgaaaaaggaaatgatatatgtttgggattccattcaaaacgatcctgcagagtt

SEQ ID NO: 19461 - DNA, 512 bp, Homo sapiens
ttttttttttttttttccacactctgttgcccaggctggagtgcagtgacggaatctcggctcactgcaagctccgccccccgggttcacgtcattctcctgcctcggcctcctgagtagctgcgactacaggcgcccgccaccatgcccggctaatttttttcatatttttagtagagacggggtttcaccatgttagccaggatggtcttgatctcctgacctcgcgatccgcctgcgtcggcctcctaaagtgctaggattacaggcgtgagccaccgcgccyggccggtactgtcccttttttatttaaatcatgtatttctagatttttctctggccccaagtgcaccaccagtgttgtctcagtttcactgttataaatcatttacatcagggatgttgaatccagaaaataaaatggcaaacaaaaatgacttatatgttttaaaaactatgaaaaaggaaatgatatatgtttgggattccattcaaaacgatcctgcagagtt

SEQ ID NO: 19462 - DNA, 585 bp, Homo sapiens
atttccttttgggataggttgctatttctgttttcgcaggtggtttacctgtcttcccagccagtcacagtggtccttgtccccatggtgggtccggggcaagaragggccctgggttgggggtggggttcagttgaagatggggtgagttttgaggggagcactacttgagtcccagaggcataggaaacagcagagggaggtgggattcccttatcctcaatgaggatgggcatggagggtttggggcgtggcgctgggaacggcagccctccccagcccacagccgcgcatgctccctgggctcccgcctcagtgcgcatgttcactgggcgtcttctgcccggccccttcgcccacgtgaagaacgccagggagctgtgaggcagtgctgtgtggttcctgccgtccggactctttttcctctactgagattcatctggtaggtgtgcaggccagtcatcccgggggctgaagtgtgagtgagggtggagagggcctcgggtgggtcaggcgggtcccgcttcctggtctgtggcctccgagggagaagggccacgaggtcgtcctccttcccttcacagg

SEQ ID NO: 19463 - DNA, 550 bp, Homo sapiens
aggaagagggtaatatttggaacaccttgttttcctgttttctgctaacggactcctgaaataatgttcctgggattcttatcaacacatttattattacgttagctaaagcttttatataataataccgagagcatgaatatcattttcttattcatattttatgttttactgcttaaattgatacgtattttttatttttaagggccgaagcctgaagctsatagccaggaacagggtcacccacagactgggtgtgagtgtgaagatggtcctgatgggcaggagatggacccgccaaatccagaggaggtgaaaacgcctgaagaaggtaggcaatccattaggcatgcacattgtagggtgtctgtttccacagtatcatattgtaagtcttactatgtttttgagacggagtctcgctctgaagaccaggctggagtgcagtggtgccatctcggctcactggaaattctgtctccagggttcaagtgattctcctgcctgagcctctggcggagccggggttacaggcgtgctccgccgtgcc

SEQ ID NO: 19464 - DNA, 550 bp, Homo sapiens
aggaagagggtaatatttggaacaccttgttttcctgttttctgctaacggactcctgaaataatgttcctgggattcttatcaacacatttattattacgttagctaaagcttttatataataataccgagagcatgaatatcattttcttattcatattttatgttttactgcttaaattgatacgtattttttatttttaagggccgaagcctgaagctgatagccaggaacagggtcacccacagactgggtgtgagtgtgaagatggtcctgatgggcaggagatggacccgccaaatccagaggaggtgaaaacgcctgaagaaggtaggcaatccattaggcatgcacattgtagggtgtctgtttccacagtatcataytgtaagtcttactatgtttttgagacggagtctcgctctgaagaccaggctggagtgcagtggtgccatctcggctcactggaaattctgtctccagggttcaagtgattctcctgcctgagcctctggcggagccggggttacaggcgtgctccgccgtgcc

SEQ ID NO: 19465 - DNA, 557 bp, Homo sapiens
ttttaccatcttaaagtcaaccagcttattggagatggcttgatcagacacttttggaagaccctgcttgagataaatcaaatataagcaaagtagtagtagatgttgaagcagagacagctaaagggacattagagctgcaatttagggcctttcagkgttcccccagatgattaaaactaaccagaggccataacaatcatcttttctaagactatagagagaataaaagcagaaggaaagggagaaaaaaaccataactattttttaaacctttcctaaacccttagcatattttgtagtccttactctatcacctgaactagtctattttataaagcggcctggataacctttaaagtcctctatgtgggtctctatcagcatttgccagtcataactaatggactgagatagaagacacagaagctgtgcctgtagaagaacataagacaatgacaagagaccaaaagcaggtccattttgtacagctgcctgggggtgtacatttaggaggactgcaaaagttagaagacataccttacttattaaaagtg

SEQ ID NO: 19466 - DNA, 589 bp, Homo sapiens
aacatattttatttcttcttcatattcccagcacctagcacacaatctactatataatatgcacaataatatttattaaatagatgagtaacaataaaactattctaagttacatatattgatactgtgcatattgattttgattaatttagaagtcatctaaaagttatgttatttcccttactctgagaaacaaacatcatttcaaataaaatagtgttgtactgatcttgagaagaaagtccatgactaaataaatagatgtggtaattggtttcttaaaacatatattttgtcaaaattcaaagtcaagtgaatgagaaatctgaagtttacaatatatgtgtgtcttataaatacataactcaataatcaaaataaytcattaggggattgctacatttgaactggtggcacaaggctattattctcctaatgattctatgaagtttagtagaaaaattgaatttccttaattatatttatgatctccatcttacatgttaattttatcattacaatagcaaacattcctttcaattttagccagagtaattttaacccgaatcaactatgccctattagattt

SEQ ID NO: 19467 - DNA, 535 bp, Homo sapiens
tatttgtgtgtgagtgtgtgtaggtgaggtgagatctcagttattccaaacacgtcacaagatgaagtaaagagatatacagtcactttttttttttttttttttgagatggagtctcgctctgtagcccaggctggagygcagtggcgtgctcgactcactgcaagctctgactcccaggttcacaccattcctctgcctcagcctcctgagtagctgggactacaggtgcccgccaccacgcctagctgattttttctatttttagtaaagatggggtttcaccgtgttagccaggatggtctcgatctcctgacctcggcctcccaaagtgctgggattacaggcgtgagccaccacgtccggccatatcttattgtttgtggttgttatgctctataaagtcaccatgaacactgaattagtgaatactgaatcattgttcccaaggaaaatacaagtttggggtcctgggagcctctggtcacatttcatcaactgatcagtacgtaacctcttttacaaatttctttgt

SEQ ID NO: 19468 - DNA, 683 bp, Homo sapiens
tccctgtctcacactctctgctccttccctcctgcttcctaagttcacctctaaaataaactacctctactcaagtccttgtcttggactctgctttctggaaaaacagaccaagacactaggacagttttgcagagacccaaattygggcatcagatgttgagcaccacatcacccacacagtgatactcagactctcagacccactgttgcttaataaaaggttccttgtttcttcttagattccacaaagtccacagctaacagttattccttttggaaaagtaaactgtatttctttcttcatatactgggacccataatggccagcctcttctctcatttgtgatatttgtcttccaataccccttccctacacccaaacccacactggcaagcagaagctggatgaatgcaaaaatccactttcgttctagaggaaaggaattccactggggccttattaggcttccactgcctgctaatcatgctttcattcaaacattccagcatctgctgttattattactggaacacctcaaccagatcgagcaaatttcatgggtgggagtaataggacagggagaagatagcaagggctgaatcaattttttaatttggcggagggaaatcaagatcaccaccatgttagtcatctattgctgcataacaaattcccacaa

SEQ ID NO: 19469 - DNA, 683 bp, Homo sapiens
tccctgtctcacactctctgctccttccctcctgcttcctaagttcacctctaaaataaactacctctactcaagtccttgtcttggactctgctttctggaaaaacagaccaagacactaggacagttttgcagagacccaaattcgggcatcagatgttgagcaccacatcacccacacagtgatactcagactctcagacccactgttgcttaataaaaggttccttgtttcttcttagattccacaaagtccacagctaacagttattccttttggaaaagtaaactgtatttctttcttcatatactgggacccataatggccagcctcttctctcatttgtgatatttgtcttccaataccccttccctayacccaaacccacactggcaagcagaagctggatgaatgcaaaaatccactttcgttctagaggaaaggaattccactggggccttattaggcttccactgcctgctaatcatgctttcattcaaacattccagcatctgctgttattattactggaacacctcaaccagatcgagcaaatttcatgggtgggagtaataggacagggagaagatagcaagggctgaatcaattttttaatttggcggagggaaatcaagatcaccaccatgttagtcatctattgctgcataacaaattcccacaa

SEQ ID NO: 19470 - DNA, 581 bp, Homo sapiens
cagccccacgtgtgccagttcaatatccatgctttgacgattagcaggcatctcagagagaaccaattaacccatgaaaaattaaaccatgatcttccattcccctaaatctgctttcccccttggtgatttcattgctcaaggcagaagttcagtcttcttttcctgccatatgccacatcacattccccaggaattaaaccttggctcttccttcagaatacattccaaactggaccaactcttactctattcaagtagcatttcttacctggaagacttcaataaccttcaaaaaagtcttcatttgtttcccttcacctctttcagtctattcttaacaatatggaaaaatgatccttaaaaaataaagataaataagataaactgacttgaaaycatagtgtcaagataaaattccaatacaacagaatagatatgatctcacccagatcctatgactttgagaagatgtctggataagatctccacacactgaaagccataaccatttattggattctgtagtcagatatcaaaagtgttagcatcagcttatatttttcaaaaagcagaaacat

SEQ ID NO: 19471 - DNA, 517 bp, Homo sapiens
ttagggtactcctatgacctattatatatttctgtttcacagaggtaggataagaaatatatackatatatattatataaatatatcagaaatgtattatatatatttaatatatatttcttgatataatatatctataatgtatctagaaatatatattaaatatatctaattattatatatttagatatatttatatattatataaattatatttctatatgtaatattttaaaatatattaaatatatatttcttatatataaacaatatgtttctacataatatatctataatatatcagaatacatttaatatttctataatttaatatatgttttatgtttatgatatagaaatttcatacattatatatctgtgatgtagatatatataatagatatagaaatatacattaaataggccgagcacggtggctcacgcctgtaatcccagcactttgagatgctgaggtgggaggatcacaaggtcaggagatcaagaccttcttggccaa

SEQ ID NO: 19472 - DNA, 552 bp, Homo sapiens
tactattagcatcatttaataaaattaaatcactttaacactgaaaactaaaatctttaatgaaaatctctcatcatttttctgttgctttttgtcttgagatagaatgatgtgtggaagagtacatatatactatattgatctcttcactatttagtagttcatttgattttttttttttttttttgagacagagtcttgctctgtcacccaggttggaatgcagcagcgccatctcagctcagcacaacctccgactccccaggatcaagcgatcstcctacctcagcatcctgagcagctgggaccacaggcacacaccaccatgcctgactaacttttgatttttgtagggacgggttttaccatattgcccagggtggtctcaagctcctgggctcaagagatcctcctgccttggcctcccaaagtgttgagattacaggcatgagccacgatgctcggtcctagttcattcaactcttaagttacttaaatctttacatcagaatttcccactgtttatattttgctttgtgttttggtctttcc

SEQ ID NO: 19473 - DNA, 613 bp, Homo sapiens
gtccaatcagagaaggcctagagattttctctcacccaatcagaacatgtagtccagaaaccatgcgcgtaaccccatgtgcatgccgagcaggcctcacgccagtttagggtctctggtatctcccgctgagctgctctgttcccggcttagaggaccaggagaagggggagttggaggctggagcctgtaacaccgtggctcgtctcgctctggatggtggtggcaacagagatggcagcgcagctggagtgttaggagggcggcctgagcggtaggagtggggctggagcagtaagatggcggccggagcagtaagatggcggctggagtggtaagatggcggctggagtggtaggagtacagcctgagtggtaggagggtggctggcagctggagctgctcttgacyggctagagatctaggagaaggtggggactgtgcccaacgctggaggctgcagccttggccaccgcggctcgcctggctacggttggtagtggtgacggagactgcatctctgttagagtagtagaaaggtggcagggtaggtgtgctctctgcggctgcactgcctgcttgcggggtggtgggggagcgggtttggtgtgct

SEQ ID NO: 19474 - DNA, 616 bp, Homo sapiens
ttacaactagaaattaatatagatgaatatagaattagtatattaagtaatgtgtttgtgtatgaatatgtagcttctgtctttaatgttcttccacataagacattttccagtaatcaaaaaaaagcccttatgtgatttgaatagtctgtttatgcttaagaagcatcttagtctaattgatattaacgtttcttaattttgtctcttgtctgattttgtaatttcaaaatatatttagcattcaaagaaaatgtttatgttacactgcaaagcatttcttagttggtattttccttgtttkgttctttgcagtgagcatatattgagcattaattaggtatccagcattatcattggcattaggaatagaaaattaaagaagacctgcttatggtcttaagtagatatagccacaaataattgcaaaactatacgattaaatttaatgtggttacatttagattaaataccctacagtgtttttattgatacctctttctgattagatgacaattcaatgtgaataacttcaaatgtctgaaaggttcatgatgcaaatcctttcaaatgattttactgtgtagtcagaaaaaatttaaattcttatacaaca

SEQ ID NO: 19475 - DNA, 616 bp, Homo sapiens
ttacaactagaaattaatatagatgaatatagaattagtatattaagtaatgtgtttgtgtatgaatatgtagcttctgtctttaatgttcttccacataagacattttccagtaatcaaaaaaaagcccttatgtgatttgaatagtctgtttatgcttaagaagcatcttagtctaattgatattaacgtttcttaattttgtctcttgtctgattttgtaatttcaaaatatatttagcattcaaagaaaatgtttatgttacactgcaaagcatttcttagttggtattttccttgtttggttctttgcagtgagcatatattgagcattaattaggtatccagcattatcattggcattaggaatagaaaattaaagaagacctgcttatggtcttaagtagatatagccacaaataattgcaaaactatacgattaaatttaatgtggttacatttagattaaataccctacagtgtttttattgatacctctttytgattagatgacaattcaatgtgaataacttcaaatgtctgaaaggttcatgatgcaaatcctttcaaatgattttactgtgtagtcagaaaaaatttaaattcttatacaaca

SEQ ID NO: 19476 - DNA, 600 bp, Homo sapiens
cagctgtgaactgtctgggactgggccaggagacagtcctgggatagggaaagaaaagaggggcttccgggggtggggagcggggctgggcggctgctggctgagccaagtggactgggaggtgtggacagggaaccctggcggggccggccaatggtggcgtgatgcagcctggcttgggaaatgcccatggaggtgacaagtgacagccgggaacagacccactgccagggctgcctctctctttagatatgtcctggcatctgactttggtttcctggtgtttaaaggctaattgggatcggtcgtggtgcctcaggcctgtcaatccagtacaytgggaggccaaagtgggaggattgcttgagcctaggagttcgagaccagcctgggcaacatagcaagaccccatctctaaaaaaaaaaattaaaatattaatactagctgggtgtgctggcacatacctgtggtcccaaactactcgggaggctgaggtaggagcatcacttgagcccaggagttcaaggttgcagcaagctatgatcttgccactgcactccagcctgagtgacagaacgagaccctgtgtctaaaaaaaa

SEQ ID NO: 19477 - DNA, 534 bp, Homo sapiens
ggggtggccgggacatgccaggccacccacctggcaaagggcagcgccgagggcgccccgcgcctgccagcgcccggccgggcccgccctgcccacctcccatcccccatccgggcgtgacacttgaccgcgtctgccggcccctccccttgtccgtcccctccgcgccgctggcgcgcgccttctgaatgccaagcattgccataaactccggggacaaaagcctgggtcacaaaagccccctctagaagttcacaccctgaggcttccctggcaaggctgggggccgtttggcccttccatgtggactgcaaaaacagtgttggaatgcaggactctgggtatgttctcgaaagttgttacaaccccaacccagggttgacctcaaacacaggaggaagggggaggctggagccagccaagmgagccagccgtccccccaccaaggcacgcaaggaggccattcatcttcactgcctctgccgaaaatatacgtctacgggagagccaggaatctctctccaagggtgaccg

SEQ ID NO: 19478 - DNA, 624 bp, Homo sapiens
cacacagtcctgccgtggcagagggagttggatcccagggtggaaagcaaggcaatatgaaataacgtttggccctattttcttagggaaaaagagtaaggttttgcttcactctagtttaagttacagcacaccctttcctctttattttttgttacttctcttctaccgtccaataattcttccaaccctgcctctgttcccaattggtactgtaaggtactggcattttccacaggagattcttgactataatccttcaatcaacttgctgagttaagcatacgctttcatcaaaaactgtataaaacctgtgtggcaaagactgataccttttgttctttggttggaatcaaagtgtatactttaaaccatcttttatgraaccagaacttttatttctccttatcattctcttcagtaggactgctataaattagacatagcagctcttgtttttattaaacagcacattactgagacaatttattcaaaatgcaagatttcataagctgtaccagtagcttcaaaagggtgaatacaggttttagaatttggtacccttacacaacacaaatctataatgttttcatgtaactatatagaagtgcatttttgttaata

SEQ ID NO: 19479 - DNA, 872 bp, Homo sapiens
ggaattttttttctgtcctgactcacagctgcataagagaattagaaacagtcaatgacatggatattttatgtgcatgttatcaaataaaattatattttttaaaaatagcacatttgatatcacatatacatatattaagccaggataactttaagaaaatgataccagttatcattactctttatctcatttatctgaagaaaatgcacttgaagcataggaatctctcctccctattacaggggatgcaagcaagaaacacattttgttcttgtgaaagacttaatgggaggaaaaaacagaggctggaaagccctaatctgaccttcaaacaaaaaagtcctttgaaaataatgaagtaagtaatttcctcccctctattggcaatgccatctcaatctctaagaatttcctattcactccttgacctttccaatgaggtcatcaccaaaggaaatgtcttacttcaagagtaagagcagactttaaagatcttaaacaatttcagagtatagaccttgttagatcctgttctcttgaagggaaagagtaagcaagagtttttwgccaaagaaataacttctcaatgaatttcaaagcacttgtgtgtgttcggaaagtaaaaagctggactccatataaattctaacatttcaatacattttacattgcctacatcttgaaataatactttagctactgaggattgtcatttattgataaggctacatctgatttaggaacttatactattaaaaaaaacagaagaaatgttgagctgaaaaaagtataaacttttctcaaataaaatatgtccttttgactacatggtttcaccttattcaaagggcaattattttctataaatc

SEQ ID NO: 19480 - DNA, 872 bp, Homo sapiens
ggaattttttttctgtcctgactcacagctgcataagagaattagaaacagtcaatgacatggatattttatgtgcatgttatcaaataaaattatattttttaaaaatagcacatttgatatcacatatacatatattaagccaggataactttaagaaaatgataccagttatcattactctttatctcatttatctgaagaaaatgcacttgaagcataggaatctctcctccctattacaggggatgcaagcaagaaacacattttgttcttgtgaaagacttaatgggaggaaaaaacagaggctggaaagccctaatctgaccttcaaacaaaaaagtcctttgaaaataatgaagtaagtaatttcctcccctctattggcaatgccatctcaatctctaagaatttcctattcactccttgacctttccaatgaggtcatcaccaaaggaaatgtcttacttcaagagtaagagcagactttaaagatcttaaacaatttcagagtatagaccttgttagatcctgttctcttgaagggaaagagtaagcaagagttttttgccaaagaaataacttctcaatgaatttcaaagcacttgtgtgtgttcggaaagtaaaaagctggactccatataaattctaacatttcaatacattttacattgcctrcatcttgaaataatactttagctactgaggattgtcatttattgataaggctacatctgatttaggaacttatactattaaaaaaaacagaagaaatgttgagctgaaaaaagtataaacttttctcaaataaaatatgtccttttgactacatggtttcaccttattcaaagggcaattattttctataaatc

SEQ ID NO: 19481 - DNA, 663 bp, Homo sapiens
tatcactaagtgaaaaagccagtctgaaaggattacatacagtatggtttcaattctggaaaaggcaaaattatggatatagtaaaaagacaatgatatgctcccttcagaagcatgtacactaaaatgggartgacacagagaaaattagcagggcctttgcacaaggatgacatgcaaattcataaagcattccaccttttataaaaagagcaaaccctcatgtaaactataaactttggcaggtgagctgctgctgctgcatcaaggtaagctcatcagttttaacaaatgtaccactctcatgggggatgttgataatggggaaggctgtgcatgtgtttgggcaggaagtatttggaaaatcttggtcccttcagctcaattttgctttgaaactaaaactgttctagcaaaaagtccagtagaaataataattttttaaaaaaactaccctctactgtgaaacacagtcccagacctggggggcatggataaagatttctttaagcaaattctgcgtgcattacactaacattatagtaaaactcaattacttgaactcctttgcctatgtgcttatttctacatttcttcttttattggtgtttctaaacttacattcaacagctggaatgtgaagaggacaaaaagaaagagggg

SEQ ID NO: 19482 - DNA, 560 bp, Homo sapiens
attatttattgaatttttaaagatgtatttattacttcattaaaaataacaagatacccattatattttaatataaataataatgttattaaaataaccatattttccaaaacaaaaaacagtgagaactatgactgtgttgtttttgatttttgcatctaaaacacctgttaaactaaggtctggttcaacagaagacaatgaaatcatctaatccgccttcactgtcaatctgataccatacattgtttgaagtatatgaaaaatatctagcctcacacagatacrtggttggaagcagttgtatcttgccaagcctctgaaaaggttttgactacctccacaaatccatcaaccaaattttaaaatggccactgtctgagtccatatttacattgcaatatataatcatggctttcttttatacatgctgatttctctagcaagctactgctccacagcaatcttggatttctctcctgaaaattcgctttccttctctatcacacggccaggctgtgcattttccaaatttttatgctctgcttctctttcagtca

SEQ ID NO: 19483 - DNA, 526 bp, Homo sapiens
ctgctacacagtcttaacactatccatattacatacattataaaatccacttagaaaaaacatgtaaagtgaatttcatattttttaaaaagccgtggagctaaaacttcgtttaaaaaaaaaaaagcaagcaaacaaacaaataacaaaactcagaaaggctgttgtcaatgtaaaacttgactcctaagcaaggattcccttgttgaatacaaagtaaagaagcagcactgggtgtagtggctcatgcctgtaatcccagcaccttaggaggcsgaggtgggcggatcacctgaggtcaggagtttgagaccagcctggccaacatggcaaaacgctgtctctactaagaatataaaaattagtcgggtttggtggcacaggcctgtaatcccagctactcaggagactgagacaggagaatcacttgaacccaggaggcagaggtggcagtgagccaggattgcgccacggcactccagcctgggtgaccgagcaatactccgtctcaaaaaaaaaaaaaaaa

SEQ ID NO: 19484 - DNA, 526 bp, Homo sapiens
ctgctacacagtcttaacactatccatattacatacattataaaatccacttagaaaaaacatgtaaagtgaatttcatattttttaaaaagccgtggagctaaaacttcgtttaaaaaaaaaaaagcaagcaaacaaacaaataacaaaactcagaaaggctgttgtcaatgtaaaacttgactcctaagcaaggattcccttgttgaatacaaagtaaagaagcagcactgggtgtagtggctcatgcctgtaatcccagcaccttaggaggccgaggtgggcggatcacctgaggtcaggagtttgagaccagcctggccaacatggcaaaacgctgtctctactaagaatataaaaattagtcgggtttggtggcacaggcctgtaatcccagctactcaggagrctgagacaggagaatcacttgaacccaggaggcagaggtggcagtgagccaggattgcgccacggcactccagcctgggtgaccgagcaatactccgtctcaaaaaaaaaaaaaaaa

SEQ ID NO: 19485 - DNA, 491 bp, Homo sapiens
aataatgggtagctcgtactccaattagagcagtwttcaaataattttatatttgcatatttgaactgaccgtcttcaggaaggagaggccaggccaagcagctctccaattatttagagcaattagaagagatgatcagacacttctgaggtctcattagcaggcatgttgcctgctctgacatctccaagatcacagccgcgactgggtgctggcggcccacattcttctctttcggaagagttctgcagacagtgactcacttcgagttcaacaatggtagctattttcacagctgatttctgctttccattggaaaagtcatacattactgctttttctctaaaatatacattataaacaccaatgtctttttctatttaatagctctctcatttttgctttagatctaaatccatcatcatcttgttacttaatatcaggccacagtgatttcccagaaatacaactttgtacctaggaaactgac

SEQ ID NO: 19486 - DNA, 491 bp, Homo sapiens
aataatgggtagctcgtactccaattagagcagtattcaaataattttatatttgcatatttgaactgaccgtcttcaggaaggagaggccaggccaagcagctctccaattatttagagcaattagaagagatgatcagacacttctgaggtctcattagcaggcatgttgcctsctctgacatctccaagatcacagccgcgactgggtgctggcggcccacattcttctctttcggaagagttctgcagacagtgactcacttcgagttcaacaatggtagctattttcacagctgatttctgctttccattggaaaagtcatacattactgctttttctctaaaatatacattataaacaccaatgtctttttctatttaatagctctctcatttttgctttagatctaaatccatcatcatcttgttacttaatatcaggccacagtgatttcccagaaatacaactttgtacctaggaaactgac

SEQ ID NO: 19487 - DNA, 515 bp, Homo sapiens
tcataagctggaccagtakcttcaaaagggtgaatacaggctttagaatttggtacccttacacaacacaaatctataatgttttcatgtaactatatagaagtgcgtttttgttaatatcatttcttcattttggttagtgtttcttcttcacttccttatgaattatgcataagtgagaaaacaagccttttttcatgtacaatgatcctattttcctgaacagaaccctggctgaacagtattaaaattcaggttccaaaatgagccagtggtagagaagaaatagagtggaaatttaacacatccatttattatacactttaaaatgcaacagggacagatgcctcatgatgtttctcctcagctgtgatcactttctctacaatgttgaactagtggctctcgctctagggactatctggacaattacctgcagcttggagtcattacggagatgatcgtcaaggaactggctcatgggttacactcactgctctgttcctaacttcctg

SEQ ID NO: 19488 - DNA, 515 bp, Homo sapiens
tcataagctggaccagtagcttcaaaagggtgaatacaggctttagaatttggtacccttacacaacacaaatctataatgttttcatgtaactatatagaagtgcgtttttgttaatatcatttcttcattttggttagtgtttcttcttcacttccttatgaattatgcataagtgagaaaacaagccttttttcatgtacaatgatcctattttcctgaacagaaccctggctgaacagtattaaaattcaggttccaaaatgagccagtggtagagaagaaatagagtggaaatttaacacatccatttattatacactktaaaatgcaacagggacagatgcctcatgatgtttctcctcagctgtgatcactttctctacaatgttgaactagtggctctcgctctagggactatctggacaattacctgcagcttggagtcattacggagatgatcgtcaaggaactggctcatgggttacactcactgctctgttcctaacttcctg

SEQ ID NO: 19489 - DNA, 515 bp, Homo sapiens
tcataagctggaccagtagcttcaaaagggtgaatacaggctttagaatttggtacccttacacaacacaaatctataatgttttcatgtaactatatagaagtgcgtttttgttaatatcatttcttcattttggttagtgtttcttcttcacttccttatgaattatgcataagtgagaaaacaagccttttttcatgtacaatgatcctattttcctgaacagaaccctggctgaacagtattaaaattcaggttccaaaatgagccagtggtagagaagaaatagagtggaaatttaacacatccatttattatacactttaaaatgcaacagggacagatgcctcatgatgtttctcctcagctgtgatcactttctctacaatgttgaactagtggctctygctctagggactatctggacaattacctgcagcttggagtcattacggagatgatcgtcaaggaactggctcatgggttacactcactgctctgttcctaacttcctg

SEQ ID NO: 19490 - DNA, 515 bp, Homo sapiens
tcataagctggaccagtagcttcaaaagggtgaatacaggctttagaatttggtacccttacacaacacaaatctataatgttttcatgtaactatatagaagtgcgtttttgttaatatcatttcttcattttggttagtgtttcttcttcacttccttatgaattatgcataagtgagaaaacaagccttttttcatgtacaatgatcctattttcctgaacagaaccctggctgaacagtattaaaattcaggttccaaaatgagccagtggtagagaagaaatagagtggaaatttaacacatccatttattatacactttaaaatgcaacagggacagatgcctcatgatgtttctcctcagctgtgatcactttctctacaatgttgaactagtggctctcgctctagggactatctggacaattacctgcagcttggagtcattacggagatgatcgtcaaggaactggctcaygggttacactcactgctctgttcctaacttcctg

SEQ ID NO: 19491 - DNA, 1327 bp, Homo sapiens
acactaccaaaagtggtgtgattattacaaagtgcccccacatatttttgtgtgaccctacatgaacaacaacaacaaaatttggaatgctctcctttcaattttaagcagaggaattagttcaactaagcaaatagtcaaggataataagattcctgagagagtagagaaaaacagggacaatcgtatttatcttttgtaaaatcaagtttataagaatatgtctcagggccacagttaataaaatatctatttgttttcttgagaaccacaacgaagatatttgtgtaaaaggtcatccatagatgccctacggagttaacagcacaattgaggtcttgctgcttctgttacaagagtgcttcaaacgtaccattcaactgatagaatctattggaccttgttagagtccctcaccccattcttgcaacagttcccagaaaagaagaggaatgtgcttttcagagacttatgtctctactggagcccccttgatggcagggtaaggtgggagagcatggaggaagcctctcaagaagtgagacacatgcactttctagattattgttattactattatttttgatggagtcttgctctgttgcccaggctggactgcagctggttgatctttcagctcactgcaacctccacctcttgggttcaagcgattctcctgcctcagcctcccgagtagctgggactacaggcatctgtcatcatgcccagctaatttttgtatttttttggagacaggttttcaccacgttggccaggctggtcttgaacttctgacctcaggtgatctgcccatctcagcctcccaaagtgctggggttataggcgtgagccaccacacccggccgacacatacaatttctagattgttatttatttatttgtttgtttgtttttgagacagagtctggctctgtcgcccaggctggrgtgcagtggcgcaatcttggctcactgcaacctctgccgcctgggttcaagtaattctcccacctcagccactttctagatcttgtaggacaagaagttgccacatggtgagaaggaaaaaggacagattatgagcaggaactgagtaatttttacctatgaccctgggactcatttaacctctaatcaaacagagaaaactacagtaaccataattattcttaagacagattatgcatgaatatatcattgattttattgcctaattcagcagaggaattactaatagatattttgctagttctacaggaagatagtgtagaaacataagctaatcaatgcctcatttctgatatttcttacctagtatggtgattag

SEQ ID NO: 19492 - DNA, 1327 bp, Homo sapiens
acactaccaaaagtggtgtgattattacaaagtgcccccacatatttttgtgtgaccctacatgaacaacaacaacaaaatttggaatgctctcctttcaattttaagcagaggaattagttcaactaagcaaatagtcaaggataataagattcctgagagagtagagaaaaacagggacaatcgtatttatcttttgtaaaatcaagtttataagaatatgtctcagggccacagttaataaaatatctatttgttttcttgagaaccacaacgaagatatttgtgtaaaaggtcatccatagatgccctacggagttaacagcacaattgaggtcttgctgcttctgttacaagagtgcttcaaacgtaccattcaactgatagaatctattggaccttgttagagtccctcaccccattcttgcaacagttcccagaaaagaagaggaatgtgcttttcagagacttatgtctctactggagcccccttgatggcagggtaaggtgggagagcatggaggaagcctctcaagaagtgagacacatgcactttctagattattgttattactattatttttgatggagtcttgctctgttgcccaggctggactgcagctggttgatctttcagctcactgcaacctccacctcttgggttcaagcgattctcctgcctcagcctcccgagtagctgggactacaggcatctgtcatcatgcccagctaatttttgtatttttttggagacaggttttcaccacgttggccaggctggtcttgaacttctgacctcaggtgatctgcccatctcagcctcccaaagtgctggggttataggcgtgagccaccacacccggccgacacatacaatttctagattgttatttatttatttgtttgtttgtttttgagacagagtctggctctgtcgcccaggctggagtgcagtggcgcaatcttggctcactgcaacctctgccgcctgggttcaagtaattctcccacctcagccactttctagatcttgtaggacaagaagttgccacatggtgagaaggaaaaaggacagattatgagcaggaactgagtaatttttacctatgaccctgggactcatttaamctctaatcaaacagagaaaactacagtaaccataattattcttaagacagattatgcatgaatatatcattgattttattgcctaattcagcagaggaattactaatagatattttgctagttctacaggaagatagtgtagaaacataagctaatcaatgcctcatttctgatatttcttacctagtatggtgattag

SEQ ID NO: 19493 - DNA, 543 bp, Homo sapiens
cctgtactgcaacagcctcctactgccccctaccccaacaatttccccaccctacactgttctgcccaatgttcacattaatttttgcctaaaacatctccatttcccacactgctttagtatctttccacaatcattgcattygccatttactgcgtgaatgaatcttccacttctagtcccatcttactgttgtccttctaagtacaccatcctcattctgaagctacccttgcagaaattataagtgagaaaatgatgacagtgacagagatctgatctaactgactccatcttgcccgggctggagtttagtggtgtaatcttggctcactgcaacctccgcctcctgggttcaagcaattctcatgccccagcctcccaagtagctgggattacaggcatgtgccatcacgcctggctaatttttgtatttttagtagagatttatttattatagagatttatttattattagtcgagatttatttattattagtttcaccatgttggccaggctggtctggaactcttgacctcaag

SEQ ID NO: 19494 - DNA, 543 bp, Homo sapiens
cctgtactgcaacagcctcctactgccccctaccccaacaatttccccaccctacactgttctgcccaatgttcacattaatttttgcctaaaacatctccatttcccacactgctttagtatctttccacaatcattgcatttgccatttactgygtgaatgaatcttccacttctagtcccatcttactgttgtccttctaagtacaccatcctcattctgaagctacccttgcagaaattataagtgagaaaatgatgacagtgacagagatctgatctaactgactccatcttgcccgggctggagtttagtggtgtaatcttggctcactgcaacctccgcctcctgggttcaagcaattctcatgccccagcctcccaagtagctgggattacaggcatgtgccatcacgcctggctaatttttgtatttttagtagagatttatttattatagagatttatttattattagtcgagatttatttattattagtttcaccatgttggccaggctggtctggaactcttgacctcaag

SEQ ID NO: 19495 - DNA, 575 bp, Homo sapiens
aatgggtgagtgacagtggcaacaagcccatgccagcagggaggtcccactgccatgaagcagcgtcctcatcaacgtcacagtgggaacaagaaagccagtagctttggaatccgaaggagcaatttcagcataattcgtcggccaccatgaaattccatttttaaaatgtcctttattcatttatcacaaaaagggtggaaaatacaaacaggaataatgaaaattgaraatactcatagtgccaccacccagagaaatgcagaatattttggaactgtgtctctctttttttccccataaattcacttttaccacgaagccaagctgccctgagcagctgtttgcatgttttcgttgctgtgtgggactccatagcgcaggcaccgaaaccgccaaagcatcttacacgttgacggctacacagggaatcaagatattttggctgaaatccctggttctttcctggggtgactcatatgtttcttagccagttttcttccttcttttgtgaattacctgctcagggtgccacacccttgaaacatccttgaatggagtatttacctttttgt

SEQ ID NO: 19496 - DNA, 1293 bp, Homo sapiens
ttatatagacatagaaacctatcttatgtttatgtataaatgttcatatatacatatcttatttaataccctcatcagacagatgaggcagatgccattaccactctcatttttctgatgaggaaactgaggcagagaggttaagtaactggctccagatcatggagctgatagaggcagagccaagatgcaaacccaggcttcttgttgcagaaaccctgctcctaacccaacgttgtgctacttgtgaattggcagagtyctgtgctcatggaagacgctagggaacacactgtgttatggagtgctctccacgggtcagcactgtgttcagccaggactatcccacgtccctgtctgtagctgattgaacaatgatagctgtcactttgttgctttcttggcatttttgctagaggtgacacatgctccctctgaagcttgggtcacctcctcgcagagggttgctgtccaggcctaacagggaaagcagggacttgaatcaaagcttctaatgttgggccacctagaaccaggcccaagagaggggacttgtttacagggaaagttaagtcttgttataaagtgcagaagatgaaactggatgatacttacacagatgattccttgtcacaaaatacctgaagacctggtacaatggagatgtcccctctctcctctctaggaccctcttcaaattgtggtggcttcttattctatgccagtgggacattctccagcccatcctaccctgcatactaccccaacaatgctaagtgtgtttgggaaatagaagtgaattctggttatcgcataaacctgggcttcagtaatctgaagtaagtaatgcctggtcatctggtgaggggtgagttcctctgcagcacacccactggtttagactgtgtcctgggctgggatgcttttcactctcatgtgccatggacaagcttttggtggctttgattcctaccataaagcatcagggaacactgatgtcctttgacttaattgaggaagagctagaagaaaaacctgtattcaatggcatccctcgtaaagtgcaaactatttataaaatggaggggcaataggaatttcaatgttgacttgaatacattttctccatacagattggaggcacaccataactgcagttttgattatgttgaaatctttgatggatcattgaatagcagtctcctgctggggaaaatctgtaatgataccaggcaaatatttacatcttcttacaaccgaatgaccattcactttcgaagtgacatcagtttc

SEQ ID NO: 19497 - DNA, 2358 bp, Homo sapiens
tgcattcactgttacggtctaggcaccagggtaggctggatatatagtcctgagtcagaagggaaaaggagttgaaggaatgatgaggacaaaatctactcctcaattataatcttgcatgttttaccactttgtagttccaggagctccctaccacactcccctgccttggattgttctctgatcctacacagtatcctaggactgaaggataattttgggccacaggttgaagttttctgtcttttccctacaaaacgcaaaaagtagaaatacaagcctacctcaaatttgagcttcggtgctggctttgccttattacatgtgtggcagttgaaaaaaattaacagctgctaagcaggaattggaaccaatgccccagagaagacagagcccagtaatgtctgaagcagcatgcacagcagaacagcatggaggtacagagtgtgagcttgtggtgaaccctggccaagcctgctaagtgcggccctctgcagccttgtgggtaacctatcctgtgtgaccacaaattggtcatcagcacacactgtcaatgcagcggtgtgtgtgtgatgcctgatcatgctataaaactgtggacagtgtagcacattggaaccccaatgttacttccaggtgacttggcttgaagaagtcagcttttagcagccacatcaggtacctaaactggagttttaagtaatgcaggtgccaagtataagaggcttgatagggccaggcacggtggctcatgcctgtagtcccagcactttgggatgtcaaggcgggtggatcatttgaggtcaggagttcaagaccaggctggccaacatggtgaaaccctgtatctactagaaatacaaaaattagccgggcggtagtggcgcatgcctgtaatcccagctactcgagaggctgaggcaggagaattgcttgagcctgggaagcagaggttgcggtgagccgagatcgtgccactgcactccagccttggcaacagagtgagatgctgtctcaaaaacaaaaaacaaaacaatttaaaaaaagaggcttgataaaccatcactaaggctccccatgaggaactgggatgactcaaacagcgtcactcacccagtaccccccgggcccagtattcctaatgtacttctctgaaaacgcattatctacatttatcacactgataggtgccttctctaagatttatgattcataatgctcatattctccaagactcccattatgtcctttacggtacctggatttgtatcccagttctgccacttattagctatgtgaccttgtggaagttatttaacttctctgtgcctcagtttcttcatgtggtaaataaagataatgatagtacctacaagatagagctgttttgagaattaaataagttaatacctggaaaactcttgaaacattgcctggcatgtagtaagggcccaataaacgttaactgtcatcctcatcgttacatttcacttcttgagactttagaagttaaacccaagaaacattctttaaaggggttcactctctgctgggtttccccatttcactgagatggaaagttctttagtcacagtttttctagtggggtatgtcctagcaacagaaaaattaaagcttgaagtaggaatgaaaggctatgatgcctgatttgggttctcacacaaggccttccaaacacccgtgtcctcctgagctgggaaggtaaaatgagctcttccaatcgcctgagcttctcttaggtcagggacggcacagacacaagtgcacatacacagcgcagcctctcaatccttcattttttctgagttccaatcctcagcccctggtatgtgaggatcacagtacatctccttgctgagcccagaagcacatgttttccagaactgcctatttctattcgatgtttccagcatggcaacatccaacttcagagtccaagaaggcagtactcaggtctctaggcaggcaaggtcaatgaagacactcactgtggcaaggtgtgaataatttgcatgaaacctgtggtcattgaaacaaagcccctttttgagayatgaggacacaggcctggccaaggtgggtctgaccactgtgcagcatgtgccagggagagtacagaactcaaagtgcaatgtgctaacggagtgtagacagactgaaaagagtgaatttcatttttttaaacatcatgaatgagataggaaaaaagccagtaattatacagcagagaaatcaggcaataccttgaccagatgatcaaaattagcatgtccaataaaggacagatggatatcatgtgcctacagatgtgatagcctgagaagaacgtaccatcac

SEQ ID NO: 19498 - DNA, 1291 bp, Homo sapiens
ctctatccttcctcctttgtggacactgtaattcataatcccactccaaactccatcaaagactttggtgtccaatggtgagtgggccttttcaatgaggagaycagatgggtcttcacttggccccaccctattgtgccagtgtcctttccaccgagaatgaaaccagaccaattttacaataagccagatgcccatagaacttaaccttgagaaacttatatttaaacaatgagacacacctgctgcctgttgcccaactcctcttccttgcccctcttgctttcctccccaactacataaactcctaacttcagtcggggaaagagacggatttgaggcttgtctctggtctctccagctgatgttacctgtaataaagccttcttccctggcaatactcattgcctcagtgattggctttctgtgcagcaagcaacatgacctaggctaaacccctggcattcagtaacaagaacagagcattcccctctcggtagatagggaatttaatggtgatctgtcaccctgatgcccagagaccaggatatcttcatgcagagaggcattgtttgggagagtttctcaaacatctgtggctaatactctttaagagcctcctgttccccaagagtcaagaaagaaaaaaacaacaacaaaaagaaaaagctgatatgtccttaagcatcacttttacaacaaatactaagtcttcaatacaggaaaacactgtttaggagaaaaggtgttaggatggcaagaaacagatacttaatgttattgtacttaatcgataattgagggacattgtgcccaatgcgatagagaaggcaagcaaacaacatttgtgtgacacacaggaggtcagcatggtgggctagctccagtcaccccactgaggggtgtccctggggtaccttacatgaggacaggttttcacatccactgggacttcttcctggttcttcttgctgaagccagaatgtcagggctgcctttctcccaactttgagaatccttgagcaggtacattttcctcttttgccaactcaaccccttctaaccttctttggaatagcttggcctttctgggtgtctgtcctgctctgcagctcacacacacaaaaactggcttgaaaatcatctggcctgcctcagctcgttttgctatgctcttctggttaatatatctctctgctgaggaggtggcttccttcctgctctcaaccacagtcaggacttctacctacaactgaggcatagtgtgagtttaactctctagtttcacaac

SEQ ID NO: 19499 - DNA, 1291 bp, Homo sapiens
ctctatccttcctcctttgtggacactgtaattcataatcccactccaaactccatcaaagactttggtgtccaatggtgagtgggccttttcaatgaggagaccagatgggtcttcacttggccccaccctattgtgccagtgtcctttccaccgagaatgaaaccagaccaattttacaataagccagatgcccatagaacttaaccttgagaaacttatatttaaacaatgagacacacctgctgcctgttgcccaactcctcttccttgcccctcttgctttcctccccaactacataaactcctaacttcagtcggggaaagagacggatttgaggcttgtctctggtctctccagctgatgttacctgtaataaagccttcttccctggcaatactcattgcctcagtgattggctttctgtgcagcaagcaacaygacctaggctaaacccctggcattcagtaacaagaacagagcattcccctctcggtagatagggaatttaatggtgatctgtcaccctgatgcccagagaccaggatatcttcatgcagagaggcattgtttgggagagtttctcaaacatctgtggctaatactctttaagagcctcctgttccccaagagtcaagaaagaaaaaaacaacaacaaaaagaaaaagctgatatgtccttaagcatcacttttacaacaaatactaagtcttcaatacaggaaaacactgtttaggagaaaaggtgttaggatggcaagaaacagatacttaatgttattgtacttaatcgataattgagggacattgtgcccaatgcgatagagaaggcaagcaaacaacatttgtgtgacacacaggaggtcagcatggtgggctagctccagtcaccccactgaggggtgtccctggggtaccttacatgaggacaggttttcacatccactgggacttcttcctggttcttcttgctgaagccagaatgtcagggctgcctttctcccaactttgagaatccttgagcaggtacattttcctcttttgccaactcaaccccttctaaccttctttggaatagcttggcctttctgggtgtctgtcctgctctgcagctcacacacacaaaaactggcttgaaaatcatctggcctgcctcagctcgttttgctatgctcttctggttaatatatctctctgctgaggaggtggcttccttcctgctctcaaccacagtcaggacttctacctacaactgaggcatagtgtgagtttaactctctagtttcacaac

SEQ ID NO: 19500 - DNA, 445 bp, Homo sapiens
tgcagtgagaagctgctggagagttggctgagggtcaggaaatcaagggaccttcattcttcaatgaaagccaggctccacatcaccctccaagaggccgccagatggcagtgttgactcatccagcctctgtgagaaccacagttttctaatgctcagaaaactgctaccacagttttccagtgcacagactttactgagtgactaggaaggggccttgagcctaatcattaatcctgttttataacctggaaggaggtacaccttgttgctgtcctaaatctcagctattcctcagatcaaagcggaaaggacagaaggagataaacccagcaaaattggtagtaacctrtgctggaggtgtgcaaaattggtagtaacctatgctggaggtgtcctaggtgtatgcaggggttgggaggtgggtgggtgggggagagggaaa

SEQ ID NO: 19501 - DNA, 551 bp, Homo sapiens
ctcttgtacgctccagctgcctggcctgttccctacccatgggggctcagatccctgatggccttaaaaggagagggcttgagaaaaatgccaccctgagtcagggtgtgggctgcacaggccagcagcttgtctctgagagtgatgccaagggagtggtttgcaggagagagagagggttctccaagatatcagcctcaaaatagcctggccatcctgaacttcccttaatagcctgccacagatcaatcacccacaatctagggaaagcctttgtaagcctatttggacattatgcttgtgctgccttgaagagcaattgaattccacctattattctgaggcataagatatttttccgtcctattttcctaaaactaaagctatctctaagttttgagagtatcctcttgcctctgtggcctgggaatggtggaatgtgatgagagtgacagggtggcagctgcacccaggatgctgactyggtgtcactgtcggcttcagttgatgtggccaccacacgttaaccacgtgacatcagtttctgggca

SEQ ID NO: 19502 - DNA, 533 bp, Homo sapiens
atccagtgtgatgaatcgaactgaatagatcccctcttttggacagtttgaactagattcaaggagaattttagtctgcacccagagaaatcaaagaaagagacaaaaggagtggcccccgtcagggcactcaagaaggcagccaagaatatctgcctctggggttgaaaccatgagaagagctgtggtgtcaccgagcgtggtgtcactggcctcttggccagtcctctgaagtgactggtcttccttaatgccagcccagtcctctctgtctgtatggaatttgtatgcacaytctgtgttccttacacattcacatagcctagtcagcctaccagtctgcagatttggatttgaatattagttcaaccaagttactcggagcagaaatacacttttattactttagagggtattggctaactgtatggatgcacagggaaatgagtaagaaacaaaaagcatcaccctccaccatcctcttaggatggaagtgcaaccagaacgtcctcgttcatgatttgggacccatc

SEQ ID NO: 19503 - DNA, 581 bp, Homo sapiens
tttaataattttatgaaatggcaaaggtttagccaagaggaaattttggcatgaatacaggcttgggattcttttttctcctgtggtggataaatctgccttaaaaatcaatgtaacttgggggctgggggcttgttctgggtgccaagcgcatctctttatggacagctaaaatgtgattattttccaagctcagttggacctccagacccatcactgaccatttgccttacctgtcttagtctgaaatgtaataggaaagataacgggaagatgccagttgactgaaaattcaaagcctttcaatttgaagtgacctaggtgggaggtgataaaatttgttccctttatagttayggaagtggcttaggtgaattgagtagagggttcattccaattcctactgtataggtgtctgtgtctcaaaatttattgtaatcattggtaccattggtggcctcaacagaggccaaggagttctgtgagccctggcagcaaaaaacaccttggggggtgaagctgtcaatgccaccagttggacctccatacattctgagctaacccagaatctttagtcggca

SEQ ID NO: 19504 - DNA, 581 bp, Homo sapiens
tttaataattttatgaaatggcaaaggtttagccaagaggaaattttggcatgaatacaggcttgggattcttttttctcctgtggtggataaatctgccttaaaaatcaatgtaacttgggggctgggggcttgttctgggtgccaagcgcatctctttatggacagctaaaatgtgattattttccaagctcagttggacctccagacccatcactgaccatttgccttacctgtcttagtctgaaatgtaataggaaagataacgggaagatgccagttgactgaaaattcaaagcctttcaatttgaagtgacctaggtgggaggtgataaaatttgttccctttatagttatggargtggcttaggtgaattgagtagagggttcattccaattcctactgtataggtgtctgtgtctcaaaatttattgtaatcattggtaccattggtggcctcaacagaggccaaggagttctgtgagccctggcagcaaaaaacaccttggggggtgaagctgtcaatgccaccagttggacctccatacattctgagctaacccagaatctttagtcggca

SEQ ID NO: 19505 - DNA, 548 bp, Homo sapiens
ctagcctccaagtactgttcattctccctcctagagagcccttggatctgtacatctctctgtcagtcatctcaagccaagttgctactgaggccccctcattgggtctcccagcttctactccttcccatctatgatcaacatcacagccagaaacattatttcaaatcacatatatgatcacattaggtccctaacaccctccatggctcccactgtccctgggatgaagtcaaaactccttggcatggtccacaaggtcctgcatgacctgactcytgctgacctctccagcttcatctctggaaatcttccccttcttacccccacttccttgagctgcatcattctttccatttccaaaagatgtactgctgattcttgcctctgggccttagcatgtgtgattccctctgcatcctccccttcctcatgatcacctaactaacttcagctcttcctccgtggagcttcagtttaggactcaccagaagccttctggggctgccatcaggatggtgcgtactacatggtaagataattgtctg

SEQ ID NO: 19506 - DNA, 498 bp, Homo sapiens
aaatggaggggtgaggggtttgcttggagacactcctgagtccccggatgttggagtgggcagggcccctagagatttacagtagcacccccccttacccacaagggacacattccaagacccccagtggatgcctgaagccacaaatagcactgaaccctatatttactatgtttttttcctatacctgcatacctggataaagtttaatttataaatcaggcattgtaagagatgagtagcaaccaataataaaatagaacaatcacgcyaggcgcggtggctcatgcctataatcccagcactttgggaggccgaggcaggcggatcacaaagtcaggagatcgagaccatcttggccaacatggtgaaaccctatctctactaaaatacaaaaaaattagccgggcgtggtggcgggcgcctgtagtcccagctgctcaggaggttgaggcaagggaattgcctgaacctgggagacggaggttgcagtgagcc

SEQ ID NO: 19507 - DNA, 498 bp, Homo sapiens
aaatggaggggtgaggggtttgcttggagacactcctgagtccccggatgttggagtgggcagggcccctagagatttacagtagcacccccccttacccacaagggacacattccaagacccccagtggatgcctgaagccacaaatagcactgaaccctatatttactatgtttttttcctatacctgcatacctggataaagtttaatttataaatcaggcattgtaagagatgagtagcaaccaataataaaatagaacaatcacgccaggcgcggtggctcatgcctataatcccagcactttgggaggccgaggcaggcggatcacaaagtcaggagatcgrgaccatcttggccaacatggtgaaaccctatctctactaaaatacaaaaaaattagccgggcgtggtggcgggcgcctgtagtcccagctgctcaggaggttgaggcaagggaattgcctgaacctgggagacggaggttgcagtgagcc

SEQ ID NO: 19508 - DNA, 558 bp, Homo sapiens
gaatccacactgaaggcatcctgcccctctccgtggcacctctccgtggcacctttctgtagcccctctctgtggccccctccgtggcacctctctgtagcccctctccatggcacctctccgtggcacctctctgtagcccctctctgtggcccctctccgtggcacctctgacatttctgacatttcagcttcaggccatgtggtgctgggactccgtcctcaggaaggcctgkaggagcctttggttccctcctgagctggggccacgccaaaaccaccatgtcaaggcgaccgacgcccaggccgagggtggatggtgggtgggatggtgccggcagcttgcagcggctctgccactgggggactcccgtggttctcccaggcctccttcctccgccttaccactgtctggggtggccctcatcaagatgtggcatgaccacctctcctccgtccaatcagacccacggcctccccctggccctgaaggcacccagcagggtgggtgggtggagagtcagggtgaggggcagcttggtgcacatcacagagccc

SEQ ID NO: 19509 - DNA, 558 bp, Homo sapiens
gaatccacactgaaggcatcctgcccctctccgtggcacctctccgtggcacctttctgtagcccctctctgtggccccctccgtggcacctctctgtagcccctctccatggcacctctccgtggcacctctctgtagcccctctctgtggcccctctccgtggcacctctgacatttctgacatttcagcttcaggccatgtggtgctgggactccgtcctcaggaaggcctggaggagcctttggttccctcctgagctggggccacgccaaaaccaccaygtcaaggcgaccgacgcccaggccgagggtggatggtgggtgggatggtgccggcagcttgcagcggctctgccactgggggactcccgtggttctcccaggcctccttcctccgccttaccactgtctggggtggccctcatcaagatgtggcatgaccacctctcctccgtccaatcagacccacggcctccccctggccctgaaggcacccagcagggtgggtgggtggagagtcagggtgaggggcagcttggtgcacatcacagagccc

SEQ ID NO: 19510 - DNA, 570 bp, Homo sapiens
ctagggtctagacatccagatgaacagccagaaaactggaaataaacacaacacttacaaaggcttacgaagtgctgcagggtctagaggagggggcgtgtctcccctcttaatccacacctacccggggccttgtccacgtctctcctcttaatccacacctgctcggagccctgtgcatgtctttcctttaayccacgcctacccaggaccctgtcagcttctctgacctccctgcttcactctgaggtctggaagccactgaccagggtctgcagtcaggacaggtgagtgcaagctgtgcagaaagatggccaaggcagctagggaggccaggggaacacgtggctggggcccaatgtcacacctcatccttgaagctcgaagaggtgaagacaaggaaacacttgaccacaatcatctgtctcccatgagctgggtaggaggcgagatgccacacaattgcagcccacgggcgatttctcgagatgctctggggtgaagggggtaaccagcccttcctctatgcatattactgtttttgcaaatacaatgtatgtttatgataaa

SEQ ID NO: 19511 - DNA, 606 bp, Homo sapiens
tttttttttttttttttgtattcctctcattgcttagcaaggtcctacccataaaggacaaggtccaaacacctcacaatggtccctaaagacccttagactgcaaatgacttcatctcctgccaaacatggtatccctcactgttactctaacatgccaaccttctttcatgtatctttgtctttgctcctgtaggtccttctgcacagcaacttctggtcaaatgcctccatggtactcagtaattarccacagatctactctagcactctacattcattcacagcccagggaaaccatcaattccagtgtgaagacttcccccacctcccaggcatttgtcattcatttctttctccgtacatttctttttttttttttttttccacattccttttaaagcatttatcacacaccagtttgcttgagttcaagtttatcctagttctctggggatagtttgaacacttattcatctttatgtcacctatacccagcatagcactggacttcagaacagtggaaagaatatagcctggctgtctaattgaggagctttggttgagcatctcaatccaagtctcaaactcggatatgctttaact

SEQ ID NO: 19512 - DNA, 573 bp, Homo sapiens
atccccaatccagactgtaagtttctttttatttcaaatagcaaaatagaattcagcacacacaactgacagcaatggatgggtagatgtctgtgttagtctcattagcatgcacttctgtgagactgaagragcagtttgcagagccccttttcacagggagcctgggcagccttcagacatggaaccagaactcgtcttggagcaagaaagacctgtcctccaatcctggctctgcccttgccactcaacactcttgacaaagtttcctaactgcttgaaaagtcattaaaacaaggataaagttttccttacagataacaggaatggaagttcaaggcacacagtggaggctgaattccaggttgttccttaaccccaaccacccaaagattaattgatcagaaagaagttttaatgactccctactttcccagccaatctgctttctaattcacttttctcaacgctgtcctctctctgccattaatctgtcctcttgtttgttctacaccctcacccacagagtgtataattatcctcccagttttcggaagaaatggcaccacaata

SEQ ID NO: 19513 - DNA, 526 bp, Homo sapiens
tgggccagacacagctggtctttctgaccattaagccccttgccagctcgccactccgcaaccccccagtgggcagtgagggtgacctcgcccaagagttgacacccaggagcagggagcagggagccggccccaagaaaacccactgggctgaggctggkgcagggtgcagcccgggagaaggattttccagacccagggtggggaactggatccagccccatgagcctggagggactctcagggcccttgactgggagcttctcacctgcagaggattccacacggctcagtgaaggctcagcccccagcacactgacaggaggcctcagtgccctttacagactgggaaggagccgcacaagggcgggcaaaggagggagaggggcgggggcagtttccagtcctgctggaggagcaccattggacacctgccctgttgcagacagggactgtgcctgaggtcacagggacaggacaagaagaggggacgggtggggacagcaggcatggcagaattctgcct

SEQ ID NO: 19514 - DNA, 575 bp, Homo sapiens
atttggtcatgaatcttcagttgccttcttattaaattacatatttgtaattttttattatagaaacagtacaacatggaagaattgtttaagaaaggggagggtgtttgtgtgaggaagccaaaccagaatcycaggttcctaaatggaaaacttgctgtttttgtgagcataggttttgcatccagtatatcatcatttatgatctttgtgactttggactagtgcttagcatgtctaagtctcaattttctcatctggaatataaaaacaaaacaaccttatttcccagagattctatgaatattaaacagggcaatatatgtgtgaatcagagtagaaatagcttagcctgaaaaaagaggaccagcaaattttcaaatactgattgcaatttttatattccatgtcagccatgttttatgtacattttcaatcaacaatgttttctaagcatattttttgctgccatcttcagacagactatttataatagtttggcaacaatctgtagtgtgcatggattatacttcacctaagcctcttcctattgttaagtacttgggctgcttccc

SEQ ID NO: 19515 - DNA, 588 bp, Homo sapiens
caggaacatggatgaagcaggaggccattattcctatcaaaccartgcaggaacagaaaacctaatactgcatgttctcacttgtaagtgggagctaaatgataacacatggacagaaagaagggagcaacagaaactggggcctaaaagaggatggagggtggaaggaagtagaggagcagaaaaaataactattggttactaggcttagtactggggtgacaaaataatctgtacaacaaaccccgatgatgcaagtttaaaacaaacttgcacatgtacccttgaaccttaaataaaagtataaaaaagagaacaaaacaataggaatacagtcttcaataataaagttcagggacatagactgaatgtggcattttattaatactggcaatcttataagcaacagcctacccaagggaatcaaagggaagaagacatttctcatgatatgttacaactagtttatcctacatagttgcctatctgtcattatattctacatgtttgaaggagaaaaagccacttatgacactgtgtgttgttccttcctgataacatataatatgctcatttaacactaaaact

SEQ ID NO: 19516 - DNA, 588 bp, Homo sapiens
caggaacatggatgaagcaggaggccattattcctatcaaaccagtgcaggaacagaaaacctaatactgcatgttctcacttgtaagtgggagctaaatgataacacatggacagaaagaagggagcaacagaaactggggcctaaaagaggatggagggtggaaggaagtagaggagcrgaaaaaataactattggttactaggcttagtactggggtgacaaaataatctgtacaacaaaccccgatgatgcaagtttaaaacaaacttgcacatgtacccttgaaccttaaataaaagtataaaaaagagaacaaaacaataggaatacagtcttcaataataaagttcagggacatagactgaatgtggcattttattaatactggcaatcttataagcaacagcctacccaagggaatcaaagggaagaagacatttctcatgatatgttacaactagtttatcctacatagttgcctatctgtcattatattctacatgtttgaaggagaaaaagccacttatgacactgtgtgttgttccttcctgataacatataatatgctcatttaacactaaaact

SEQ ID NO: 19517 - DNA, 589 bp, Homo sapiens
ggaagttagaaagagaaatttggatgatgatgaaataatcatgatagaatgtattttttaacctgaaaaggtttatggctataatttaaattatgtttatattagtctcagcaaaacacatgtagaaatcattattatctccttagcacattgtcttccctaaaataagccagattcaagcaatagatgataaatcacatgtgggatttaggcatgctttattccccaagaatacatccaaaatggtttattttattaacagatcacccacactctgctagctaaagaaatactttaaatttaagatatcataatatgcatggccttttcatggtaaataaggatgtttttagttaagctaaagcaaaatgtaatgataagcaatataaattagaatattttcagtacmtaatggctctgtcagaaatagaaaattttaaaaatggcccataaatttaatatggaaattttaaaaatttcaatttccatttgccttaacctacatttgtctgacttccatgtcttcaagaatactattaatttactaataaggcaaaggaaacttgcagaaagaaaaatgaaaagaaaa

SEQ ID NO: 19518 - DNA, 740 bp, Homo sapiens
actcctttaaactaggaacagcctgaaaataaaactgcaggccccataagataagaaagagtctgcattcttggatggaaatgcctactctttgaacccagatgaacaaattccactcctgttttggacacatttccctctccttggcttacccctctgtctcgtttcacacacttcctcccaactggtccttatctttcacttattttacatatacctatatttctgtgtttggtcatgggccgaacattagtttgcataaagtgtaacattcctccagcccctgattggttgtaggctgagcctttacctctgccttcaattggttctttccactaacatgtctctttctgattggtgcttcctccaagttggcccgcagaccaatcagtgcattcctcctccttccaagtgtataaaaaccctkaacttagcctcacagccagaaaccctatctcagatcccttctccttggtgagagcttctctgctgcttaataaatccaactctgcattactcactctctggtgtgcatgtggcttattattcttggttgtgggacaagaacctggagcttgccagtggtgggagtaaacgagctgtaacactttctctcactagctgaaaacctagagtgaaaaagctgtgatggggagaaaaaactatggaaaaaactatgatggggagagggctggtgggaaaggaagagattggtcaatggttacaaagatacagttaaa

SEQ ID NO: 19519 - DNA, 564 bp, Homo sapiens
tccctcagaagcatgtgatctttgttagacccttattagtagttctgctttttgccctttgaagcatgtgatctttgtacctactccctgttcttacacccccaccccttttgaaacccttaataaaaacttgctggtctgagactcaggcgggcatcayggtcctatcgatatgtgatatcacccccggcggcccagctgtaaaattcctctctttgtactgtctctctttatttctcagccagctgacacttacggaaaatagaaagaacctatgttgaaatactgggggtgggttcccccaatagaaactttgaataattaatgcttctaattgaattcaatattatagcttttatttaaatggccctataaattccaattaataaagtgtttctcccacaaattaaagaaaattataagcaatattgttagaatatttataataattgaaatatctatatatatttacattattaaatttggcttttaagtacttatgccaagttgaactagttctgaaatatattttgtgaaatgtataagtggagtaccttataatca

SEQ ID NO: 19520 - DNA, 581 bp, Homo sapiens
tgacaggactcaaaaattttgatttgtggccgggcacagtggctcacacctgtaaatcccagcgctttgtgagcctgaggcaggagggtcacttgatcccaggaattcaagaccagcccrgggaacacaacaaggccccatctctacaaaagtaaaaaaattagccaggcatggtggcctgtgcctatggtcccagatactcaggaggctgaggtgggaagatcgcttgggcccaggaggttaaggctgcagggagcagtgatcgcaccaccgcactccagcttgggtgacagagagagaggcggtctcaaaaacacataaaaatttggatttcttagaaagaccacttgggcacgggtgataggaggctgtctggaaacaatgccagtaaggagtccacctttgaggaccaagcgagtggggcagaggcctggctgctggtgagaagggaacgtggacagggtagcgggaggtgagcccaaagctgaagcaaggggagcactgcagtgggcgcagggcagggtgggggaggcaagtggcatctctgcccagagagaatacacaagcaggaagttcaacac

SEQ ID NO: 19521 - DNA, 519 bp, Homo sapiens
actttaacttccaccatttgttaatcaattctgaaatattttcatttttacagcctaaaattatgcatgtgttggcatttttttaaatggatgatattacagttttcattcaagcattggtatagagcctaascttttgttatggatgagatgtttagattgttaatctggaaaatctattttcctgttattgaagtcacatatatacatatatgtatatatacttttatatatgtgtctatatatagtaaaaatgtgtatatttattttaaaaagtattttggttcatgtttttgttcttaatgttgtcctactaaaattacttaatcataaatctttctactaacagtaaggcagaaacagagtaacaagggattttttttttctattaaactgaagacagagaagtttggtatttatttttacctaatatagcaaacttcaaaaaacaatctatttcaataaaaatattttccccagctacagaaataaacaagggataatatataatctaaaaat

SEQ ID NO: 19522 - DNA, 519 bp, Homo sapiens
actttaacttccaccatttgttaatcaattctgaaatattttcatttttacagcctaaaattatgcatgtgttggcatttttttaaatggatgatattacagttttcattcaagcattggtatagagcctaaccttttgttatggatgagatgtttagattsttaatctggaaaatctattttcctgttattgaagtcacatatatacatatatgtatatatacttttatatatgtgtctatatatagtaaaaatgtgtatatttattttaaaaagtattttggttcatgtttttgttcttaatgttgtcctactaaaattacttaatcataaatctttctactaacagtaaggcagaaacagagtaacaagggattttttttttctattaaactgaagacagagaagtttggtatttatttttacctaatatagcaaacttcaaaaaacaatctatttcaataaaaatattttccccagctacagaaataaacaagggataatatataatctaaaaat

SEQ ID NO: 19523 - DNA, 740 bp, Homo sapiens
tgtattgaacactacagctgtagacaatacgaaataaatataaagcagtctcmactttggaaaaacagaagactcttactgcctcataatatagatgaaaaatgaaatactaagataagtaaaacgttctttaaagaacaaaaacaaaagaaaacctaatgaaagctataaaagtccattggataataatgctaccagtactaaggaagtacagcccctaagagtgacttgcagtcacaaatataaaaatgactattcaagtgaactcctaaggtgaaaatttcttattcaccatgctccaaaatggtctgtaatattcttcagagatggcatggtgggggaggcaagtggcatctctgcccagagagaatacacaagcagaaagttcaacaccgcttacctggtgaaaccctacaagcgtttccactccatacgcgctctgaataatgggattgtgatgtcttacaccaattctcaaactgggcggccagctgcagctgaatcaactccaggtgcccgtagttgcgataccaagagtagtagctgttcacacggatcacatccacatacagagcctaggaccagagcagcagagcccgttcagcaaccacaagaccgcatgactcagtactcacatgctgtgggggctcctctgacagagaaggtaagaaggggatgtaatcccagcactctgggaggctgaggcaggagggtggcttgtggccaggagttcgagacca

SEQ ID NO: 19524 - DNA, 740 bp, Homo sapiens
tgtattgaacactacagctgtagacaatacgaaataaatataaagcagtctcaactttggaaaaacagaagactcttactgcctcataatatagatgaaaaatgaaatactaagataagtaaaacgttctttaaagaacaaaaacaaaagaaaacctaatgaaagctataaaagtccattggataataatgctaccagtactaaggaagtacagcccctaagagtgacttgcagtcacaaatataaaaatgactattcaastgaactcctaaggtgaaaatttcttattcaccatgctccaaaatggtctgtaatattcttcagagatggcatggtgggggaggcaagtggcatctctgcccagagagaatacacaagcagaaagttcaacaccgcttacctggtgaaaccctacaagcgtttccactccatacgcgctctgaataatgggattgtgatgtcttacaccaattctcaaactgggcggccagctgcagctgaatcaactccaggtgcccgtagttgcgataccaagagtagtagctgttcacacggatcacatccacatacagagcctaggaccagagcagcagagcccgttcagcaaccacaagaccgcatgactcagtactcacatgctgtgggggctcctctgacagagaaggtaagaaggggatgtaatcccagcactctgggaggctgaggcaggagggtggcttgtggccaggagttcgagacca

SEQ ID NO: 19525 - DNA, 740 bp, Homo sapiens
tgtattgaacactacagctgtagacaatacgaaataaatataaagcagtctcaactttggaaaaacagaagactcttactgcctcataatatagatgaaaaatgaaatactaagataagtaaaacgttctttaaagaacaaaaacaaaagaaaacctaatgaaagctataaaagtccattggataataatgctaccagtactaaggaagtacagcccctaagagtgacttgcagtcacaaatataaaaatgactattcaagtgaactcctaaggtgaaaatttcttattcaccatgctccaaaatggtctgtaatattcttcagagatggcatggtgggggaggcaagtggcatctctgcccagagagaatacacaagcagaaagttcaacaccgcttacctggtgaarccctacaagcgtttccactccatacgcgctctgaataatgggattgtgatgtcttacaccaattctcaaactgggcggccagctgcagctgaatcaactccaggtgcccgtagttgcgataccaagagtagtagctgttcacacggatcacatccacatacagagcctaggaccagagcagcagagcccgttcagcaaccacaagaccgcatgactcagtactcacatgctgtgggggctcctctgacagagaaggtaagaaggggatgtaatcccagcactctgggaggctgaggcaggagggtggcttgtggccaggagttcgagacca

SEQ ID NO: 19526 - DNA, 740 bp, Homo sapiens
tgtattgaacactacagctgtagacaatacgaaataaatataaagcagtctcaactttggaaaaacagaagactcttactgcctcataatatagatgaaaaatgaaatactaagataagtaaaacgttctttaaagaacaaaaacaaaagaaaacctaatgaaagctataaaagtccattggataataatgctaccagtactaaggaagtacagcccctaagagtgacttgcagtcacaaatataaaaatgactattcaagtgaactcctaaggtgaaaatttcttattcaccatgctccaaaatggtctgtaatattcttcagagatggcatggtgggggaggcaagtggcatctctgcccagagagaatacacaagcagaaagttcaacaccgcttacctggtgaaaccctacaagcgtttccactccatacgcgctctgaataatgggattgtgatgtcttacaccaattctcaaactgggcggccagctgcagcygaatcaactccaggtgcccgtagttgcgataccaagagtagtagctgttcacacggatcacatccacatacagagcctaggaccagagcagcagagcccgttcagcaaccacaagaccgcatgactcagtactcacatgctgtgggggctcctctgacagagaaggtaagaaggggatgtaatcccagcactctgggaggctgaggcaggagggtggcttgtggccaggagttcgagacca

SEQ ID NO: 19527 - DNA, 539 bp, Homo sapiens
gtgggctttatttcttcaagctggattgtaagttcctttttagcagggtctatgtcttttttttttttttttttgctcatatcctaaaagcttctggtataattcgaggtatatagcagatgctaaggattttattgagtgattactacatttttagagtgtcattacaatgtattatcacctggtttatgccgtggtgctttatgtaacatgtgcctatttacagaacattgatataacatgttggtctgcaaccaggttgttatcagcaataggaaaagcattacagagttcatatggaagtagaggagaaacaggtctaatttgggtgtgatgccctgtattagtctgttttcatgctgytaataaagacatacccaagcctaggtaatttataaagaaaaagaggtttaatggactcacagttccacgtggctggggaggcttcacaatcatggtggaaggcaaaaggcatgtcttacatggcagcaggcaagagaaaatgagaggcaatcaaaaggggaaacctcttataaaac

SEQ ID NO: 19528 - DNA, 548 bp, Homo sapiens
gactgtttatggtttcactgaccatgtctaatactatgtatattttaaaaatttatttatgcttttctattatttccctccttcagctttatttacttttaaaatgttttcctagtatttcttaactgaatgcttatctcattaattttgaatttttttgtttctaaaagaattacattaaagagctgcaattctctttaaatgttagtttagctgtatccctcaattatatatataataacttcactttcattaaattctaaatattttctttattatatcatttccttttcttttcttgtaatttatgatgtttgtcaggccctgcaaagttaatgatgttttaacctttcaattctttcatggctcttcatcaattgattcatgtctgctcycttagcctatgtgttccccaatggcaggaattatcttcatttaatcccctgcctaaggccctggtatagtactgggcataccacataggcatagataaatagttgtcaatttcttacacccattcatacattgattcattcataaatgcagtc

SEQ ID NO: 19529 - DNA, 966 bp, Homo sapiens
ctcacatgcatttgtaggaaaacctctttttctttcttcagtcatttgtcatcaaatcagtttcttacctccaattttaattactaatatatgtaatgccactcaaaagaaaaagagagacagacagatttatcaaagcaaaacagcagctcccttctgatctcacatcatttctaaggaatcaggagtcaatatggggtaagggaccctgtactaacagagtaaaacatgttcaaaacttcaccaacaacctctgagagaagatggagtttggtcaggagctgctaatggttgagatggcttagcatgtattacttgatggagagagtactggagagctttcaattaagctgctgcaaagctccctttctgctcaggctctttgacaggtcattgaatggggttttcaaggacaaagaatgagcgggcatgtccccatggaagccagtgcccctctcagaagtgttaattccagtgatttctcctggaaaaggaaatggagaagtcagggatggataagcctgctgactaatctataaaaccaatgccccaggactggcagaagttgaaatcatttacttataattagaggtgcaacagactgtgggacttgaaattttacgattcaacattcttggtgaaaatgctcaataataattaagaaaacaatcaaaakcttgggcaagaaatatgtgaattaatatcagatatcctcttctcaagcaagaccagcataggtcttctgataagtcaccactttgaaaactgaagttaaacataatcaaaatcttcccttcagcaccccaccatcactagggctgggattatgtaggacaaggggattttaggctatgaggggacatagaaaagaaggtcagatttctcaagacttcctgtcagggttgacctttaatgaatatgccccctgggattctagagtctggaaaagaatgtaatgactttatt

SEQ ID NO: 19530 - DNA, 736 bp, Homo sapiens
tgcctggcaatactactaaaattatttttttcaaatgatttgtgtttaattagaaaagtttactgaatccaaaaacattgctgctcacccrtctccactaaagagaaatggaaattagccatatgcaaacctgagtgctggttagtgaccagaattctacggagtttaagaatttcacatgtgcctttgtcgatctttttccttttccgtcacattttcttttgcaattaactccagagacaacacctgtcagggtgtagggggtgaggggaggacgagcattaggataaatacctaacgcatgcggggcttaaaacctagatgacgggttgataggtgcaacaagccaccatggcacatgtatatggagcaaacccgcatggtctgcgcaggtatcccagaacttaaagtaatttaaaaaaaaaaaagagtcaaaactagctttctaatttttccatccagttaattatatacttatggtcagaatgatgatgaatagttatatggcagatataactattaataccaccagcattaattcaccataatgcagaattttaacccctatgcaagatctcagtgagggttggctgccagtgcattcacctcacaggctactcctttctgggaaataaacttgtattttaaattttgaggacagtcagcttataacaaagaaatcagccttactccacagtcattttatttttgatcaaactaatgcccaaatatgtgt

SEQ ID NO: 19531 - DNA, 736 bp, Homo sapiens
tgcctggcaatactactaaaattatttttttcaaatgatttgtgtttaattagaaaagtttactgaatccaaaaacattgctgctcacccgtctccactaaagagaaatggaaattagccatatgcaaacctgagtgctggttagtgaccagaattctacggagtttaagaatttcacatgtgcctttgtcgatctttttccttttccgtcacattttcttttgcaattaactccagagacaacacctgtcagggtgtagggggygaggggaggacgagcattaggataaatacctaacgcatgcggggcttaaaacctagatgacgggttgataggtgcaacaagccaccatggcacatgtatatggagcaaacccgcatggtctgcgcaggtatcccagaacttaaagtaatttaaaaaaaaaaaagagtcaaaactagctttctaatttttccatccagttaattatatacttatggtcagaatgatgatgaatagttatatggcagatataactattaataccaccagcattaattcaccataatgcagaattttaacccctatgcaagatctcagtgagggttggctgccagtgcattcacctcacaggctactcctttctgggaaataaacttgtattttaaattttgaggacagtcagcttataacaaagaaatcagccttactccacagtcattttatttttgatcaaactaatgcccaaatatgtgt

SEQ ID NO: 19532 - DNA, 736 bp, Homo sapiens
tgcctggcaatactactaaaattatttttttcaaatgatttgtgtttaattagaaaagtttactgaatccaaaaacattgctgctcacccgtctccactaaagagaaatggaaattagccatatgcaaacctgagtgctggttagtgaccagaattctacggagtttaagaatttcacatgtgcctttgtcgatctttttccttttccgtcacattttcttttgcaattaactccagagacaacacctgtcagggtgtagggggtgaggggaggamgagcattaggataaatacctaacgcatgcggggcttaaaacctagatgacgggttgataggtgcaacaagccaccatggcacatgtatatggagcaaacccgcatggtctgcgcaggtatcccagaacttaaagtaatttaaaaaaaaaaaagagtcaaaactagctttctaatttttccatccagttaattatatacttatggtcagaatgatgatgaatagttatatggcagatataactattaataccaccagcattaattcaccataatgcagaattttaacccctatgcaagatctcagtgagggttggctgccagtgcattcacctcacaggctactcctttctgggaaataaacttgtattttaaattttgaggacagtcagcttataacaaagaaatcagccttactccacagtcattttatttttgatcaaactaatgcccaaatatgtgt

SEQ ID NO: 19533 - DNA, 608 bp, Homo sapiens
tagaggatggtctttagcaaaaaaagtaaaggaaaaggatttaataaaggtccartagcagaccttctagggcaggcagccttctatagtagcccatgcatgtgaaagttaatctaattagttgatctataaagttaaataaccaaactctcctttgcttaacccattgctagaaaggccagtgttgttaatttcattttttaaacaaacaagcaaaaaaaattctagaggatgagtttttcataagtagggtatgtgctactttattggaaaatgaagaaatatatctttcaactctgcttccttcattgctttcccgtgttcctaatatttagtcacattttaggttagaactttcaggaagtgagtttttacacagaaattagtgctataaacagcccttaaaatgggaatttaatcgtacttatttaaaatatatatgtatataatcttaccaacccagaaagacatgttctctggcattttataaactaagatgctactggaaggaaaaagctaaatctgaaatacacaaacaacatatttacactgtgatatggtttagatctgtatgccaaagctgaatctcatgtcagattgtaatctcc

SEQ ID NO: 19534 - DNA, 530 bp, Homo sapiens
atgggattatgacctgcataatgccttgaacatgccatcatttgctgggaatgcttgcagccaccagaaattgttcatctgggacctctggaacaactgggagttttctgctggcaaaagatgaagtttgaaaacaataaagtttatatttgagagtcataaataataacgctttgatataatgaatttacaaagaacaaaaatctggttrccatggttggaatgccattcagaagtcaactaaccaaatatcttcgttttgcattcaggaaaacggaagcccagagtggggaaggcacctgccccaggttacacagctcgtgcaaatccaagtcttttgactgcacctgcggtgtttctttcaggaggtcagaggctgcggagagaggcagttattggctgggcaaccagcatcagaaaacaaagaagaattgaagtgtgtgagacagaactaggcgctaaaacaagagctatcaatagagccgagggctcccaggatacagaataggcggacagctgtgcaggttgca

SEQ ID NO: 19535 - DNA, 530 bp, Homo sapiens
atgggattatgacctgcataatgccttgaacatgccatcatttgctgggaatgcttgcagccaccagaaattgttcatctgggacctctggaacaactgggagttttctgctggcaaaagatgaagtttgaaaacaataaagtttatatttgagagtcataaataataacgctttgatataatgaatttacaaagaacaaaaatctggttaccatggttggaatgccattcagaagtcaactaaccaaatatcttcgttttgcattcaggaaaacggaagcccagagtggggaaggcamctgccccaggttacacagctcgtgcaaatccaagtcttttgactgcacctgcggtgtttctttcaggaggtcagaggctgcggagagaggcagttattggctgggcaaccagcatcagaaaacaaagaagaattgaagtgtgtgagacagaactaggcgctaaaacaagagctatcaatagagccgagggctcccaggatacagaataggcggacagctgtgcaggttgca

SEQ ID NO: 19536 - DNA, 524 bp, Homo sapiens
tattgagttatgtttgattatttttcctcctttttgtttatccattagycttctattttttttagacagaacacattttagctttcaaaaatggctttataagatgctttagtcttttttttctaagtatcctacaacatccacagtctctgtctcaatatgtcctaatttgtttgttgaaattataacaaaaacttttcaattttaggaaaatataagttaatttctagttttccttcctctagaaaatacactggctactttttaatcatgtgtgtttatttttccataggcaatcaaaaaagcagccacaacagctggtggcactcaggcacagcttgtggtttattgtttctaaaggacattcttttttttaactcgtagtttcattttattctccgtctgaaatgtgcctgaaagattaatctgtatagcctttgaggactgactcaggaccaatatgtagggttatagagaggcaggttttggctcaacccaagaaaattgttcttacagtacgagct

SEQ ID NO: 19537 - DNA, 524 bp, Homo sapiens
tattgagttatgtttgattatttttcctcctttttgtttatccattagccttctattttttttagacagaacacattttagctttcaaaaatggctttataagatgctttagtcttttttttctaagtatcctacaamatccacagtctctgtctcaatatgtcctaatttgtttgttgaaattataacaaaaacttttcaattttaggaaaatataagttaatttctagttttccttcctctagaaaatacactggctactttttaatcatgtgtgtttatttttccataggcaatcaaaaaagcagccacaacagctggtggcactcaggcacagcttgtggtttattgtttctaaaggacattcttttttttaactcgtagtttcattttattctccgtctgaaatgtgcctgaaagattaatctgtatagcctttgaggactgactcaggaccaatatgtagggttatagagaggcaggttttggctcaacccaagaaaattgttcttacagtacgagct

SEQ ID NO: 19538 - DNA, 594 bp, Homo sapiens
agatatttatgcaaagtaaaaagaaatgcaaacaaccttgtctagcagaaggaagaagcagcagagctttcaaacttctctacttcgttaatttttactcaagaaagctgagaaaatacaccactgaattcttgaatccatctctggacatgggcctaacttcagtaaatttggctttctgagctatacaatacaagagttagatctttacaattccttataaaaactgttgggcatctgagagtagccaaggtaaagagtatacactgtggatgagagtgccctctgatctttgttagtaaggmttcgtgtcaggtgaaaaagtaagaggaaaccccagagagcagcttatttttctttctaatgtaaatgcccaaaggttggcagtacaggattggtgtggatgctctgttttccaagttccatagggatccagctccctccctgctttacgctctaccattctaccgtgcagccctggccttcatgatctaagatgagctatgactgtcacatgtctgtaacaggaggaaggcagaataaggaagggaagaaggtcagatggtacaagccaactctcaaagttctccaaaa

SEQ ID NO: 19539 - DNA, 517 bp, Homo sapiens
gaaccaagcctctaattttagtgtcccagccttgacaccttctcaaaatagctccctgttttctcttgtgtccctggcccttccttggagaaggtgaaccccctgcatccccgtgatctgagttggtgagcacaggyccaaggccttgtatgggtttgggtgtagggatccacgcccctgccatgtgttttgtgtggcaggacccagagaactcacctctgggagggcagctcacagcacccaccatggcaggggtcctgcgagagcccactcccaactcctccctgggggtctgccatgctcaggcgtggcacaaacgaaagtgactcaaatccaggtccccaacccctggaaatcaaggcttcatagccgcagctccacctgtaggaatcgtgggtgagctgacacctgcgccccgggagctcctctcttcctttggcaggttccatgctgttcaggtaccaatcctaacaatggcctttcctgaacatttcaatggtgccaagtgcatctcttg

SEQ ID NO: 19540 - DNA, 517 bp, Homo sapiens
gaaccaagcctctaattttagtgtcccagccttgacaccttctcaaaatagctccctgttttctcttgtgtccctggcccttccttggagaaggtgaaccccctgcatccccgtgatctgagttggtgagcacaggtccaaggccttgtatgggtttgggtgtagggatccacgcccctgccatgtgttttgtgtggcaggacccagagaactcacctctgggagggcagctcacagcacccaccatggcaggggtcctgcgagagcccactcccawctcctccctgggggtctgccatgctcaggcgtggcacaaacgaaagtgactcaaatccaggtccccaacccctggaaatcaaggcttcatagccgcagctccacctgtaggaatcgtgggtgagctgacacctgcgccccgggagctcctctcttcctttggcaggttccatgctgttcaggtaccaatcctaacaatggcctttcctgaacatttcaatggtgccaagtgcatctcttg

SEQ ID NO: 19541 - DNA, 535 bp, Homo sapiens
tattaaagcatgcatgcatgttttaatacttgcatgcattgtttttcagtgacagataaaaytgaaaggcaaaaacaaaagttggaagtgagaaaaaatagatcttctatacattcttatgtttcataatgaaacaacaattatcaataaaataagtgagaatttttatattgcacatctgtgaaaagtaagaacactttataagttcaatagaatgatattttgtctgtgattataataatagaaaaatgacatatatagtttttatgccttcatttctctcaataacattctaataatttatttgtattgtattttataaaagtataggcagtaaatacatttaaaatcatagacagtttgagacgaactgctctatatctgtgattttcagactttaagctgcatataaatcatcttggaatcttgttaaaatgcagattttgattcaccatatcttggtgtatccagagattctgcatttgtaacaggtgctgtgtgacaaagatgttgatggtctgaggactgtacatta

SEQ ID NO: 19542 - DNA, 535 bp, Homo sapiens
tattaaagcatgcatgcatgttttaatacttgcatgcattgtttttcagtgacagataaaattgaaaggcaaaaacaaaagttggaagtgagaaaaaatagatcttctatacattcttatgtttcataatgaaacaacaattatcaataaaataagtgagaatttttatattgcacatctgtgaaaagtaagaacactttataagttcratagaatgatattttgtctgtgattataataatagaaaaatgacatatatagtttttatgccttcatttctctcaataacattctaataatttatttgtattgtattttataaaagtataggcagtaaatacatttaaaatcatagacagtttgagacgaactgctctatatctgtgattttcagactttaagctgcatataaatcatcttggaatcttgttaaaatgcagattttgattcaccatatcttggtgtatccagagattctgcatttgtaacaggtgctgtgtgacaaagatgttgatggtctgaggactgtacatta

SEQ ID NO: 19543 - DNA, 535 bp, Homo sapiens
tattaaagcatgcatgcatgttttaatacttgcatgcattgtttttcagtgacagataaaattgaaaggcaaaaacaaaagttggaagtgagaaaaaatagatcttctatacattcttatgtttcataatgaaacaacaattatcaataaaataagtgagaatttttatattgcacatctgtgaaaagtaagaacactttataagttcaatagaatgatattttgtctgtgattataataatagaaaaatgacatatatagtttttatgccttcatttctctcaataacrttctaataatttatttgtattgtattttataaaagtataggcagtaaatacatttaaaatcatagacagtttgagacgaactgctctatatctgtgattttcagactttaagctgcatataaatcatcttggaatcttgttaaaatgcagattttgattcaccatatcttggtgtatccagagattctgcatttgtaacaggtgctgtgtgacaaagatgttgatggtctgaggactgtacatta

SEQ ID NO: 19544 - DNA, 1263 bp, Homo sapiens
cttttatattttattttccaagttatacatgttaatttattttttgcataaattaraaaattagtcccaccccattttttattaccttcccctaggttttctattcataggaatagttggttgggttgggaagagtgtttaggaagagagacaagtatttggtttttgtttttccatagttgcttatcttcttgttccaaaatatctcttggtagtaggctgttggtttattctattgctctgttgcttcctatcaagcaagtcttctcagaagagctcatgtttttaagtctgactttaaggtaaattttaagtttccagtgaggcctaatttatgtgaaaaatttttctttcttgtggattagcacccacttctactcacaggcttctagaaatgtacccataaacatccattaagagagcagtgagagccaggagggaccacctttctccttagccctgatcagccatcacatcaaaccctctcgtttgatttgatggaatgcaggagacctgaactatttaataccagtttatactttggaaaagggaggctgaaattgttgattatcacatcaaagagcccaggccttttgttttagcactgcagcaaagtcaaggatgaatttgcttgttctttattaagctattctgatgcttttcaatatggttttgacattgataataaacagttttctaagggctttaccaaataaatacatcaaagctgaacaccgaatagagggaggaaaatgacaatgaaatactgtttaaagaagggctttgtacaagttctcctactttgatttctcaactgacacccgacaccatgtttgtcttgtgtgactttttcagacccatcacattagagatgtctgagagttggtgagtgatgggaatgcacttttctgggctcaaagtaactggcttagaagggaaggcagagactggggaagagcagagttggtgctggcacctgcctttgggcacaagaaacaaaaggacgctttgtactttgggaaagcttatcttctacgccacatgacaggcttagcccactctggcctgataggggttgctcccagctcctgctgcaggatctttatgcccatttccggcctaaccggagtgtcagctttccagtgttctgagtctaaataaaaggggcttggaaagcggtgaagagaggcgagccttttctgtgtgtccagtagcccctgccattttatttatctgcttcagtagtgttgcttgttattgtta

SEQ ID NO: 19545 - DNA, 1650 bp, Homo sapiens
agttcctgggctcactgtggctctctgagactcagtttctctatccgtaaagtggggatgatattaatacttaactcatagaccttcgtggagtgttaactaagggtgatgtttagcttggtgctagatgtcctgttacagaggatcttcccactagaacatgggatgtgttgaatagatgattctggagctatttggtccctggttgtttagtatttgtctcttttgctagactaacagctccatgaggctctggccatggctgtcttgttactgctggactctgagaacctgattcagggagggtactcaataaatatctgtgttagtgagaaaataaggcaggtgacgtgggcataagcaagaggcccaggcagggctggggcagctctgggggtttttagtggtaggaattaggctaaggtgtccagctacagctatgctgtcagtcctgggagggagctggagcgaaaccctgggaaaaggttagaggggcagttatatatacatgtgtagaggggtgatcttgggcagctttctcgcctctagcacactgagtcaggcatgtgggcggcagacccaggccagctcagcatgagaagctgtttggctgggccaaggtgttcacatgactggacaccactgtgggcagctggacagatctgtggcaggcaggacatagcagccataggatgctatgatgataccaactaagatgaccagcgagggcttctgggaacttgtgctagctttgggatcatacaaacatggatacagatcccattctcacttttgctctaggaaaattatttaacttctctaaagtttggtctcctcatctgtaaaaagggatcctctctgctctctccttttcggggatcattgaaaaggaagtaacttattttttttttgttccatttgaaagaaacaaagtrctttgctgacatctttatttaggagtggtgagtgattgacccatgaattcactgtgggaattcagtgattatttttgaatacgtggagtttttaggttcctgcagcttcctcgacttgaaagtaaagctggcaccagcttctgacagtccctgtaattacctcgcactgaattgagctgaggtttgcctttgtgcctgaggttggcgtgggcttcgctgccctcaccctccacacccacatttgaatgtagttgctaattatgatttatggtgctgtctggttgaagctggctggcttgcttgaggttgggtggtacaggcactccctttctttgtcaaacagtgtcgaggagatccaaaggtggcctggtaccccaagatggagaagcccagcatgttattattaaaaataaagtctagagatatgcaccagtgcttggctactgacagcctataattcctgtggcagtggcgagatatattttgtttttagagttttgttaagaagtgactattggccgggtgcggtggctcatgcctgtaatcccagcactttgggagaccggggtgggcagatcatgaggtcaggagattgagaccatcctgggcaacatggtgaaaccccgtctctactgaaatacaaaaaattagccgagcatggtggtgtgcacctgtagtcccagctgctcgggaggctgaggcaggggaattgctt

SEQ ID NO: 19546 - DNA, 525 bp, Homo sapiens
tgacagagckagactccatctcaaaacaaaaaaagagcgaaagagtgaaagaaaaaagaggagggagggagggactgccaggccattaagtcctctttccccaagggctactacagtttgttctcatcctcatcctcatgttctccagagttttattcagtttagcttgagatgtcttaagcgatggatttcccagaggaagagcactggattacagagcttgccattagaaagcactcccaaaccaagacttagctgtcctttgaaatttagcctcagaaatgctctatgtgcaaatcaccacttattcagttagaacacaagtttcgagagggctttttagcattgagatcctggatttgtaaactagtgctctgcagttgagaagctaataaagacatcatacttcctggaaggacaacgctctctggagagttgatgacacagccagggccctttgcaatatgaatgtgttggggtatttctcttgactattgagggaaatattgggctttatgctattgg

SEQ ID NO: 19547 - DNA, 524 bp, Homo sapiens
ggataagaagagacccaaagtcatcaacaagccttctcatgaactttcagtcattaaccttcctatatagtaaggacagaaatgatgatttaagccatcttaggcaaggcagtgctaacaatatgcttttgtaaagtcaccatccggtgtaaggmataggcaccagcttagtgatgtttgcaaataagccagtggtgggtgtggataaattagagagagtaccaaatgcagtttgaaaagtgttaagttttgtctctagtaaattgcatgtagttttaccaaatagtgcttcagtgttctctttgtgtttcctctttctggtacttaaaaaaaaaaaaaagtaaagtcagttcatgtagctgtgagataaatcttgagaaaaagagtattgaatagggtactgagtttattggttaacacttaggaaagatacgatgcttgataggagatcctttttattaaacacaaagaatagcattttattctatgccttagaattttgtgatagaattggcaacaattca

SEQ ID NO: 19548 - DNA, 598 bp, Homo sapiens
aaaactaggggattgctcgtgcttggggattctcaatgacacgtgactccaaaaatagaacatggtggccatctctccagggctgactgaggtgacaacatagtcgcccagctggagttgctgctgagaggtacccgcccagatttgtggtagtgcagcttgtcccctagatctgcctgcaggctttgtggatatgcccccaacctctcgcatgctcagtactcccccgggagcagtgaaacacagaacctctagtcattttttgctagcaatctaatggaaagtggcatttaagtttactgtgtttcactcgtacctcatgattacaagcccactctgagcataaccttagcagcatagcagaaggtatacctactcctggctctacccccaaaatgagaaaatctgtctttaattagacaggtacagtctaagtggttcataaataaacctctggcatcatattgggatcaacaccctgttcctgccctcactcctcctacctccaccaaatcaggctggtacttttccaacaaatgattgccatcayacaatacttcattaacccgatgttcttaacctgaggaagcagtaagac

SEQ ID NO: 19549 - DNA, 513 bp, Homo sapiens
atctgtactgtttttcataaatttggaaaccagtttgggttaataattcccattaatcattttaatgtgacatctgtaggactttaatgctttgaacacacagaatgtaaagtgaagacaagtattaaaccttttattttttatttttttgtagtttttataacttcatttgatgtatttgatgatcagcagttagttcccatccacactgactgtagatttgtgaaagtggtaacaagtatataaccaaagtatagagcttatttggtgaatttctaacctcattatgttttctggaccatccactgcacatggacacagtatggacattccttactactttggcccagacagctttgttgagcctggtatcaatrcacatatctggagttttctatctccttcattgcaaatttccggtctctttaagagcctgaggggcacacttcttgaagcccactccatggatacacttgtgaatattaatggtgtactcttgggtcaccacctagt

SEQ ID NO: 19550 - DNA, 535 bp, Homo sapiens
tacttttttggtactgtaatatttactgtattatttatttttctattttatgggcataaccatccacagaagggtcagtaagagagaaatatcactgctttcctcttctatccattatttttgttgtttcgtttcatggctactactaaaaataatgttgtcacagagaagcaaggtgataaaaggattctctctgggggtcaatccatgaagaaagctggagaaayatctgctgaacagagttcatggcttcatgttctatctgagcaagtctcatcctgcagtcagctctcttgaggctgagccaggtctttgcacacctttcctctggctgatgcttttaaattccctctgtcttcgtctctgctattgagttcggtctcctccgtgagtcccccacggggcctggtgaggacaggctctgtgggagcagctttctgttttgagcctgtgatgtctggccaaggagcgcctgtcagctgcttgggctccatctcagcccagagacgtcgtgctgtgtggtcttaaagcaggt

SEQ ID NO: 19551 - DNA, 535 bp, Homo sapiens
tacttttttggtactgtaatatttactgtattatttatttttctattttatgggcataaccatccacagaagggtcagtaagagagaaatatcactgctttcctcttctatccattatttttgttgtttcgtttcatggctactactaaaaataatgttgtcacagagaagcaaggtgataaaaggattctctctgggggtcaatccatgaagaaagctggagaaatatctgctgaacagagttcatggcttcatgttctatctgagcaagtctcatcctgcagtcagctctcttgaggctgagccaggtctttgcacacctttcctctggctgatgcttttaaattccctctgtcttcgtctctgctattgagttcggtctcckccgtgagtcccccacggggcctggtgaggacaggctctgtgggagcagctttctgttttgagcctgtgatgtctggccaaggagcgcctgtcagctgcttgggctccatctcagcccagagacgtcgtgctgtgtggtcttaaagcaggt

SEQ ID NO: 19552 - DNA, 532 bp, Homo sapiens
acagaccttccagaaaaggttgcatattatccaaggaaatatcattgcctggagagtcctaggctgacttgctctcttgggagctgatgtttagggaatgggagaagcagctggtttaaagcatcaaacaatgaaatgaacttcagaatctgccaaatcctaaacatttcttgctaagcaccattttttctgtattgtgaacccatctgtgcttcaaaagcaattttgtttaaatggcttcttccccttactcctaatccttgggaagctgtaatacacaggtggtaaaggggactccccaagagatgctcactaggactgctgtgagccagatactgggctaacactgcatagcaccgagggtgtgggagatcagaagtcaggagcctgcattctcaggggagggactggatccctgcaaggaaacaaagtgtggtgtgtgtggcttcatgawccactggcctaggtctaatagcggatctttttgcaaatttatttatttttcttttcttttcttttcttttcttttttc

SEQ ID NO: 19553 - DNA, 532 bp, Homo sapiens
acagaccttccagaaaaggttgcatattatccaaggaaatatcattgcctggagagtcctaggctgacttgctctcttgggagctgatgtttagggaatgggagaagcagctggtttaaagcatcaaacaatgaaatgaacttcagaatctgccaaatcctaaacatttcttgctaagcaccattttttctgtattgtgaacccatctgtgcttcaaaagcaattttgtttaaatggcttcttccccttactcctaatccttgggaagctgtaatacacaggtggtaaaggggactccccaagagatgctcactaggactgctgtgagccagatactgggctaacactgcatagcaccgagggtgtgggagatcagaagtcaggagcctgcattctcaggggagggactggatccctgcaaggaaacaaagtgtggtgtgtgtggcttcatgatccactggcctaggtctaatagcggatctttttgcaaatttatttmtttttcttttcttttcttttcttttcttttttc

SEQ ID NO: 19554 - DNA, 2651 bp, Homo sapiens
tgccattccacagacaccattatagcactaagatacaatgaggaacaaaaaatccaggctttctgagctcacactggggtgggggcatggtgggaagacacaggcatcaatgtaataaacagaaaccacgacagggctaagtgttctggaggagaggcgcatggtgtactgaggcccctgacgtagaccccaggtgcacctttgagctttgcttgcatggtttgggtttgtgggctcacctgcatgtgtccatgcatgccccatctgcrtgcccgtgcatggctgcatcaccccatgcacacgtgcactgcccctgggcttgcccacatgtgctgctccccagggcgccaggctatcagcctacaaggcattgtgggtctgggcccagcctgccaccccctacagaggcctgagcctgccttcccaggaggcccaggactctcacccagggcccttccctgcagctggagcaggctctgtggctgcaatctggtgagctggagacgcaagagcccagggggctggtactccagagcgtggagttgcggaggcagctgcaggaggagcaggcctcctagtggcgcaagctgcaggcctacctggagggccagcagcggcaggcccagcttgtgcagcggctgcagggcaaggtcagggccacccattcctgctctttccctcccacgtgttcactttgccctgcccccacccctggggctcaccatcagctcccaatccccagattctccagtacaagaagaggttctcggagctggagcagctgttggagagatccggagagctggagcagcagcagctgagggtgggtgccagggtggggcagaggcaggccctgccctccacctgcccagcctgatgctttaacctctctgccacccaggacgcagagcacagccaagacctggagagtgccctcatctggctggaggaggagcagcagggagggccagggctggcagcatggccccctgggcgagcgcctactgatcccctgtgccccattcaggagtgccagcctggcccaggtgaatgccatgctctgagaacagctggaccaggcaggtttggccaaccaggctctgagtgaggagatacgaaaggtgaccagtgactggactcgcagctgcaaggagctggagcagtgggaggcggcatggaggcgcgaggaggaggtgggcatgggggtgcagggaggccggcgatataagaggaagataatgcacaattatgctagtgagactctcttttccaataatgtttgcacttctcaatactacatttaaaaaggaaataggagcacttgaacggttaagtaagaagatgaacaaaattgaacagaggaaaaataactgtctgaagacatgttgaaaatacatttaaagacagtctgtctgagacaggagctgagctggccaatccatcttttaaatcattgaacatcattcaggtgtcaagtatttgacctggagcctggaaggggaggagagagtccaaaaaaaagtcaaaatataaagaaaaaaaattaaagaacttgtcccacaaatcaggcaaccaaggtctaaacttataccctctgcctgggtaaattgttgttgcttctttctgtgactcttaaaagatgtaccatatacctcatttaatgactttgctttattcatgaaaactctatccccatgggaaaagctgttaaatgaaaaaagatttcttttaagtagaaaaattatgaaaggattccttccaaccctccatacccaaaatatctcaaatgaattatgtatctatcaattatcaatatatatcaaaatataccaattaaaaatatcagttaaacaatacgtcaattgaactatgaaagcaagcttatttaagtagcaaagaataacgtgaaggttagtaagtatagcttatacttaaaatacaatgaattgaaagctcatggcacttcatagagtaggaagaagaaacttaatagaaagtggtagttgggcgagaaggactgcaagggagttatttggaaaatgcattttttatttctgcatcattttgttcacaaattattcctaatcttttgtgaatttgtggatttcttgaactcaaaccagacttaaaaatacagttatagcacagaaaaaaatctttaatggcaaaataaaagctaagcaagagagcctttcaaaacacatgaaaataacacacacatacaaaaaaaaaagaataaagagatgtacaagtgacacctcctcaaccttctcacttggtgtacatatgcacagtaaattattttgggctcagccaagcatgggagcaattcaaatagatccatatgatattctctgattagaaactcttgtggagtaagttggtgagtgtatctttgcctaaaacagtcatgtcaaaatatagcttcctatagcatatttatttagtatcattttggtgaaaaagtggttatacagaatagaaaagagttgtccaaaactaagtggttgacctttccagagccattacctgcagaattgttatgtaagtctgttccatactcataaaggaatactcagctgacccaactgattttctcgtgttttttccttcaagggctagtagaagtctatatgttgtggtggaaaaca

SEQ ID NO: 19555 - DNA, 2651 bp, Homo sapiens
tgccattccacagacaccattatagcactaagatacaatgaggaacaaaaaatccaggctttctgagctcacactggggtgggggcatggtgggaagacacaggcatcaatgtaataaacagaaaccacgacagggctaagtgttctggaggagaggcgcatggtgtactgaggcccctgacgtagaccccaggtgcacctttgagctttgcttgcatggtttgggtttgtgggctcacctgcatgtgtccatgcatgccccatctgcgtgcycgtgcatggctgcatcaccccatgcacacgtgcactgcccctgggcttgcccacatgtgctgctccccagggcgccaggctatcagcctacaaggcattgtgggtctgggcccagcctgccaccccctacagaggcctgagcctgccttcccaggaggcccaggactctcacccagggcccttccctgcagctggagcaggctctgtggctgcaatctggtgagctggagacgcaagagcccagggggctggtactccagagcgtggagttgcggaggcagctgcaggaggagcaggcctcctagtggcgcaagctgcaggcctacctggagggccagcagcggcaggcccagcttgtgcagcggctgcagggcaaggtcagggccacccattcctgctctttccctcccacgtgttcactttgccctgcccccacccctggggctcaccatcagctcccaatccccagattctccagtacaagaagaggttctcggagctggagcagctgttggagagatccggagagctggagcagcagcagctgagggtgggtgccagggtggggcagaggcaggccctgccctccacctgcccagcctgatgctttaacctctctgccacccaggacgcagagcacagccaagacctggagagtgccctcatctggctggaggaggagcagcagggagggccagggctggcagcatggccccctgggcgagcgcctactgatcccctgtgccccattcaggagtgccagcctggcccaggtgaatgccatgctctgagaacagctggaccaggcaggtttggccaaccaggctctgagtgaggagatacgaaaggtgaccagtgactggactcgcagctgcaaggagctggagcagtgggaggcggcatggaggcgcgaggaggaggtgggcatgggggtgcagggaggccggcgatataagaggaagataatgcacaattatgctagtgagactctcttttccaataatgtttgcacttctcaatactacatttaaaaaggaaataggagcacttgaacggttaagtaagaagatgaacaaaattgaacagaggaaaaataactgtctgaagacatgttgaaaatacatttaaagacagtctgtctgagacaggagctgagctggccaatccatcttttaaatcattgaacatcattcaggtgtcaagtatttgacctggagcctggaaggggaggagagagtccaaaaaaaagtcaaaatataaagaaaaaaaattaaagaacttgtcccacaaatcaggcaaccaaggtctaaacttataccctctgcctgggtaaattgttgttgcttctttctgtgactcttaaaagatgtaccatatacctcatttaatgactttgctttattcatgaaaactctatccccatgggaaaagctgttaaatgaaaaaagatttcttttaagtagaaaaattatgaaaggattccttccaaccctccatacccaaaatatctcaaatgaattatgtatctatcaattatcaatatatatcaaaatataccaattaaaaatatcagttaaacaatacgtcaattgaactatgaaagcaagcttatttaagtagcaaagaataacgtgaaggttagtaagtatagcttatacttaaaatacaatgaattgaaagctcatggcacttcatagagtaggaagaagaaacttaatagaaagtggtagttgggcgagaaggactgcaagggagttatttggaaaatgcattttttatttctgcatcattttgttcacaaattattcctaatcttttgtgaatttgtggatttcttgaactcaaaccagacttaaaaatacagttatagcacagaaaaaaatctttaatggcaaaataaaagctaagcaagagagcctttcaaaacacatgaaaataacacacacatacaaaaaaaaaagaataaagagatgtacaagtgacacctcctcaaccttctcacttggtgtacatatgcacagtaaattattttgggctcagccaagcatgggagcaattcaaatagatccatatgatattctctgattagaaactcttgtggagtaagttggtgagtgtatctttgcctaaaacagtcatgtcaaaatatagcttcctatagcatatttatttagtatcattttggtgaaaaagtggttatacagaatagaaaagagttgtccaaaactaagtggttgacctttccagagccattacctgcagaattgttatgtaagtctgttccatactcataaaggaatactcagctgacccaactgattttctcgtgttttttccttcaagggctagtagaagtctatatgttgtggtggaaaaca

SEQ ID NO: 19556 - DNA, 2651 bp, Homo sapiens
tgccattccacagacaccattatagcactaagatacaatgaggaacaaaaaatccaggctttctgagctcacactggggtgggggcatggtgggaagacacaggcatcaatgtaataaacagaaaccacgacagggctaagtgttctggaggagaggcgcatggtgtactgaggcccctgacgtagaccccaggtgcacctttgagctttgcttgcatggtttgggtttgtgggctcacctgcatgtgtccatgcatgccccatctgcgtgcccgtgcatggctgcatcaccccatgcacacgtgcactgcccctgggcttgcccacatgtgctgctccccagggcgccaggctatcagcctacaaggcattgtgggtctgggcccagcctgccaccccctacagaggcctgagcctgccttcccaggaggcccaggactctcacccagggcccttccctgcagctggagcaggctctgtggctgcaatctggtgagctggagacgcaagagcccagggggctggtactccagagcgtggagttgcggaggcagctgcaggaggagcaggcctcctagtggcgcaagctgcaggcctacctggagggccagcagcggcaggcccagcttgtgcagcggctgcagggcaaggtcagggccacccattcctgctctttccctcccacgtgttcactttgccctgcccccacccctggggctcaccatcagctcccaatccccagattctccagtacaagaagaggttctcggagctggagcagctgttggagagatccggagagctggagcagcagcagctgagggtgggtgccagggtggggcagaggcaggccctgccctccacctgcccagcctgatgctttaacctctctgccacccaggacgcagagcacagccaagacctggagagtgccctcatctggctggaggaggagcagcagggagggccagggctsgcagcatggccccctgggcgagcgcctactgatcccctgtgccccattcaggagtgccagcctggcccaggtgaatgccatgctctgagaacagctggaccaggcaggtttggccaaccaggctctgagtgaggagatacgaaaggtgaccagtgactggactcgcagctgcaaggagctggagcagtgggaggcggcatggaggcgcgaggaggaggtgggcatgggggtgcagggaggccggcgatataagaggaagataatgcacaattatgctagtgagactctcttttccaataatgtttgcacttctcaatactacatttaaaaaggaaataggagcacttgaacggttaagtaagaagatgaacaaaattgaacagaggaaaaataactgtctgaagacatgttgaaaatacatttaaagacagtctgtctgagacaggagctgagctggccaatccatcttttaaatcattgaacatcattcaggtgtcaagtatttgacctggagcctggaaggggaggagagagtccaaaaaaaagtcaaaatataaagaaaaaaaattaaagaacttgtcccacaaatcaggcaaccaaggtctaaacttataccctctgcctgggtaaattgttgttgcttctttctgtgactcttaaaagatgtaccatatacctcatttaatgactttgctttattcatgaaaactctatccccatgggaaaagctgttaaatgaaaaaagatttcttttaagtagaaaaattatgaaaggattccttccaaccctccatacccaaaatatctcaaatgaattatgtatctatcaattatcaatatatatcaaaatataccaattaaaaatatcagttaaacaatacgtcaattgaactatgaaagcaagcttatttaagtagcaaagaataacgtgaaggttagtaagtatagcttatacttaaaatacaatgaattgaaagctcatggcacttcatagagtaggaagaagaaacttaatagaaagtggtagttgggcgagaaggactgcaagggagttatttggaaaatgcattttttatttctgcatcattttgttcacaaattattcctaatcttttgtgaatttgtggatttcttgaactcaaaccagacttaaaaatacagttatagcacagaaaaaaatctttaatggcaaaataaaagctaagcaagagagcctttcaaaacacatgaaaataacacacacatacaaaaaaaaaagaataaagagatgtacaagtgacacctcctcaaccttctcacttggtgtacatatgcacagtaaattattttgggctcagccaagcatgggagcaattcaaatagatccatatgatattctctgattagaaactcttgtggagtaagttggtgagtgtatctttgcctaaaacagtcatgtcaaaatatagcttcctatagcatatttatttagtatcattttggtgaaaaagtggttatacagaatagaaaagagttgtccaaaactaagtggttgacctttccagagccattacctgcagaattgttatgtaagtctgttccatactcataaaggaatactcagctgacccaactgattttctcgtgttttttccttcaagggctagtagaagtctatatgttgtggtggaaaaca

SEQ ID NO: 19557 - DNA, 2651 bp, Homo sapiens
tgccattccacagacaccattatagcactaagatacaatgaggaacaaaaaatccaggctttctgagctcacactggggtgggggcatggtgggaagacacaggcatcaatgtaataaacagaaaccacgacagggctaagtgttctggaggagaggcgcatggtgtactgaggcccctgacgtagaccccaggtgcacctttgagctttgcttgcatggtttgggtttgtgggctcacctgcatgtgtccatgcatgccccatctgcgtgcccgtgcatggctgcatcaccccatgcacacgtgcactgcccctgggcttgcccacatgtgctgctccccagggcgccaggctatcagcctacaaggcattgtgggtctgggcccagcctgccaccccctacagaggcctgagcctgccttcccaggaggcccaggactctcacccagggcccttccctgcagctggagcaggctctgtggctgcaatctggtgagctggagacgcaagagcccagggggctggtactccagagcgtggagttgcggaggcagctgcaggaggagcaggcctcctagtggcgcaagctgcaggcctacctggagggccagcagcggcaggcccagcttgtgcagcggctgcagggcaaggtcagggccacccattcctgctctttccctcccacgtgttcactttgccctgcccccacccctggggctcaccatcagctcccaatccccagattctccagtacaagaagaggttctcggagctggagcagctgttggagagatccggagagctggagcagcagcagctgagggtgggtgccagggtggggcagaggcaggccctgccctccacctgcccagcctgatgctttaacctctctgccacccaggacgcagagcacagccaagacctggagagtgccctcatctggctggaggaggagcagcagggagggccagggctggcagcatggccccctgggcgagcgcctactgatcccctgtgccccattcaggagtgccagcctggcccaggtgaatgccatgctctgagaacagctggaccaggcaggtttggccaaccaggctctgagtgaggagatacgaaaggtgaccagtgactggactcgcagctgcaaggagctggagcrgtgggaggcggcatggaggcgcgaggaggaggtgggcatgggggtgcagggaggccggcgatataagaggaagataatgcacaattatgctagtgagactctcttttccaataatgtttgcacttctcaatactacatttaaaaaggaaataggagcacttgaacggttaagtaagaagatgaacaaaattgaacagaggaaaaataactgtctgaagacatgttgaaaatacatttaaagacagtctgtctgagacaggagctgagctggccaatccatcttttaaatcattgaacatcattcaggtgtcaagtatttgacctggagcctggaaggggaggagagagtccaaaaaaaagtcaaaatataaagaaaaaaaattaaagaacttgtcccacaaatcaggcaaccaaggtctaaacttataccctctgcctgggtaaattgttgttgcttctttctgtgactcttaaaagatgtaccatatacctcatttaatgactttgctttattcatgaaaactctatccccatgggaaaagctgttaaatgaaaaaagatttcttttaagtagaaaaattatgaaaggattccttccaaccctccatacccaaaatatctcaaatgaattatgtatctatcaattatcaatatatatcaaaatataccaattaaaaatatcagttaaacaatacgtcaattgaactatgaaagcaagcttatttaagtagcaaagaataacgtgaaggttagtaagtatagcttatacttaaaatacaatgaattgaaagctcatggcacttcatagagtaggaagaagaaacttaatagaaagtggtagttgggcgagaaggactgcaagggagttatttggaaaatgcattttttatttctgcatcattttgttcacaaattattcctaatcttttgtgaatttgtggatttcttgaactcaaaccagacttaaaaatacagttatagcacagaaaaaaatctttaatggcaaaataaaagctaagcaagagagcctttcaaaacacatgaaaataacacacacatacaaaaaaaaaagaataaagagatgtacaagtgacacctcctcaaccttctcacttggtgtacatatgcacagtaaattattttgggctcagccaagcatgggagcaattcaaatagatccatatgatattctctgattagaaactcttgtggagtaagttggtgagtgtatctttgcctaaaacagtcatgtcaaaatatagcttcctatagcatatttatttagtatcattttggtgaaaaagtggttatacagaatagaaaagagttgtccaaaactaagtggttgacctttccagagccattacctgcagaattgttatgtaagtctgttccatactcataaaggaatactcagctgacccaactgattttctcgtgttttttccttcaagggctagtagaagtctatatgttgtggtggaaaaca

SEQ ID NO: 19558 - DNA, 544 bp, Homo sapiens
catccagacgttagtaagctgccctaaggggtggagcagtcagattccggttttatttatttttcccctgcaaggagcaatcaattattaaccgaagtcaygatactttggttgctgttatcagcacatgaaaatatcagtcaaggctgggtttcagacccgcctggcactattcaaaggaaattttttagtaattcttattttattaagagcactagtatattcagatcaagtaaaacttcacatataacaggttcactcttctatatgaaatgtttgtgggaaatctatcatgcatcaggtgctctcaaaaggtggtgaggtgtaaatgtcagcctcaaaggctgcagtgtccaacatggcacacagcttgtgtggctcttagcacctgaagcatgcctcgtccacagtgagatgtgccgaaaatgtaatatacatccagattttgaagacttggtaaaatatctcaccagcaattttttatattgattacatgaggaagtgataatgttttgggttggttaagttaaacgtattattaaaa

SEQ ID NO: 19559 - DNA, 544 bp, Homo sapiens
catccagacgttagtaagctgccctaaggggtggagcagtcagattccggttttatttatttttcccctgcaaggagcaatcaattattaaccgaagtcacgatactttggttgctgttatcagcacatgaaaatatcagtcaaggctgggtttcagacccgcctggcactattcaaaggaaattttttagtaattcttattttattaagagcactagtatattcagatcaagtaaaacttcacatataacaggttcactcttctatatgaaatgtttgtgggaaatctatcatgcatcaggtgctctcaaaaggtggtgaggtgtaaatgtcagcctcaaaggctgcagtgtccaacatggcacacagcttgtgtggctcttagcacctgaagcatgcctcgtccacagtgagatgtgcygaaaatgtaatatacatccagattttgaagacttggtaaaatatctcaccagcaattttttatattgattacatgaggaagtgataatgttttgggttggttaagttaaacgtattattaaaa

SEQ ID NO: 19560 - DNA, 544 bp, Homo sapiens
catccagacgttagtaagctgccctaaggggtggagcagtcagattccggttttatttatttttcccctgcaaggagcaatcaattattaaccgaagtcacgatactttggttgctgttatcagcacatgaaaatatcagtcaaggctgggtttcagacccgcctggcactattcaaaggaaattttttagtaattcttattttattaagagcactagtatattcagatcaagtaaaacttcacatataacaggttcactcttctatatgaaatgtttgtgggaaatctatcatgcatcaggtgctctcaaaaggtggtgaggtgtaaatgtcagcctcaaaggctgcagtgtccaacatggcacacagcttgtgtggctcttagcacctgaagcatgcctcgtccacagtgagatgtgccgaaaatgtartatacatccagattttgaagacttggtaaaatatctcaccagcaattttttatattgattacatgaggaagtgataatgttttgggttggttaagttaaacgtattattaaaa

SEQ ID NO: 19561 - DNA, 544 bp, Homo sapiens
catccagacgttagtaagctgccctaaggggtggagcagtcagattccggttttatttatttttcccctgcaaggagcaatcaattattaaccgaagtcacgatactttggttgctgttatcagcacatgaaaatatcagtcaaggctgggtttcagacccgcctggcactattcaaaggaaattttttagtaattcttattttattaagagcactagtatattcagatcaagtaaaacttcacatataacaggttcactcttctatatgaaatgtttgtgggaaatctatcatgcatcaggtgctctcaaaaggtggtgaggtgtaaatgtcagcctcaaaggctgcagtgtccaacatggcacacagcttgtgtggctcttagcacctgaagcatgcctcgtccacagtgagatgtgccgaaaatgtaatatacatccagattttgaagacttggtaaaatatctcacyagcaattttttatattgattacatgaggaagtgataatgttttgggttggttaagttaaacgtattattaaaa

SEQ ID NO: 19562 - DNA, 537 bp, Homo sapiens
tgaccaacatggtaaaaccctgtctctactaaaaagaaaaattagccgggtgcgtagtggcgggcacctgtaatcccagctactccagaaactgaagcaggagaatggygtgaacctgggaggcggagcttgcagtgggccgagatcacgccactgcactccagcctggcgacagagcgagactccgtcttaaaaacaaaaaaatgcacagctcaacaggggacagaggcacagacatgcttactgaactactcagccactacagagtatgcagtttccaaatacctttgctcctaattcatcaaaaccaaccattaggtctcagacagcccctgaatgccattcttttcccaggatctggtcacgtcacacatccgactacagaaacaggctgctggtgagaggtacaacccatgattcacagagcgctttccaggcagccagaggaagcctccccgtgccgccgcctgcacccccacaaggtgccagagccatgctcgtgctcagccgcaaaggcttcgttatttgcaactgtgc

SEQ ID NO: 19563 - DNA, 536 bp, Homo sapiens
tttgaaaccaccctagtgctggaatagatgtggaacatggaggactccaacttaggcggccacccggggaacgcacccttgactttccagcagcaaaacaggttctcatggtggtccatgagtggctcacagtcaacagagcaagcggcgtccaacgaccccatgcaaactcccccaaaaccctcaacatcacagattcctgaccgctgtgacgccgatgacctcacccaccagccccggcccccttgggcgggctgtccacaaagcccacagctgtcccgccagtggacrccctgctgcctgaggccacaggagagtgctgggacagagaccctcactgggggcctgtctagggttgagaggggccggatgaaaggaaacagccacctggcttctgccggagggctcccatacttcacgctgactccaagtcctattctaattctgagtttgaaaataaggaaaaattcagtcttaacactcaagaggagaagagtcataggcctttctcagaaagcttgaggggaaggacttgt

SEQ ID NO: 19564 - DNA, 522 bp, Homo sapiens
tggagtgcagtggtgtgatctcggctcactgcaagctccgcctcctgggttcacgccattctcctgcctcagcctctccaagtagctgggactacaggcccccgccaccacgcccggctaatttttttgtatttttagtagagacggggtttcaccgtgatctcgatctcctgacctcatgatctgcccgcctcagcctcccaragtgctgggattacaagcgtgagccaccgcgcccggcagctcaataccattcttatcctgccaccaacgcccaggacctgggaagaagggctgcagggggaatgagctgagaagcccactactcccgagacagggaagcggaactggagctttcgcaagggaagagaacgtgaagactgtgagggaactgcagggatctgggggcaggagggcaggcaccaccccctgaccccccgcccagacctacctatgagcgggagctcgtccatggtgatgccctgagatttgaggtgcttcttgatgcaggccagccgctgc

SEQ ID NO: 19565 - DNA, 551 bp, Homo sapiens
gctcatcttgggaatgtacttctttttaaataggtatttccaaaaaaaaaaaaagataccatcactgaagggactctacatgggatccaagactccaggatgaggccatggctctgggagatgcttacttgccatgagactcgaggttactcaactgtatacagagcataatgtcttcagtcgaaacatttttatggctccaaacataggcaaaagcaagctgagtgactcacagtaaggtgatattattatgctcataggtataaaatcatactgtcattctttccataggtgacagcatatcttctttcccaaataggaaagtaactagattggttggtgaccagaatctgggagacaggggatgaaaatgcaaaatgaactcaatggttagaataagctgaacctttggtctttgttaaggaacaaggagggatgacgcaatgacctcctagatgsatggccagtctttccttcagcaaccctccctcctcctcctggattacagctctcaagaactagtgcaaacaagcacccaggtgtgcctatct

SEQ ID NO: 19566 - DNA, 517 bp, Homo sapiens
caaagatagtgtcagaggcctcaaggattgctccacaactgtggacccttctctggtgctgacctagacctaaaagccttctgcaggactcgtggccatgccacactgctaactcacagccaactagtcacccacccctgctccaggggactttttttcatattaaatgtttattaaatcaaatctaccccattatatgtgtatttttagttatccttttttttttttttttttttttttgagacggagtttcactcttgttgcccagtctggagtgtaatggtgccatctcagctcactgcaacctctgcctcccgggttcaagtgattctacagcttcagcctctcgagtagatgggattacaggtgactgccaccacacatggctaatttttgtgtttttagtggagacrggagtttcaccatgttggccaggctggtctcggagctcctgacctcaggtgatccacccacctgggcctctcaaagtgctgggattacaggcatgagtcactgc

SEQ ID NO: 19567 - DNA, 1610 bp, Homo sapiens
tcatattttacctgcctacagccccgagtgttctttcaactacctgccacccatccaacaactcccctcggacctcagtatgggctggaacctgacacttggcatgacagtggtaagtaccatatacatgttggctaatagtataattcactggtctttctttttttaaataagagtaggcctggtggttctgttcttgaccttttmttttctctatccacagtcttccccagaactatctttaatcactcgcaaggttttaacttctatttctaggctgtagactcctgatccctatcctgagctgcctcccagacggtcctatatggaaatcttgcaaacaaatccaattcaatatgccccaaatcaaagtgattttcttgcttcctaatctactccttcctcagtatggtattatctagaaacaacagcaccagccatcaggtttcgtcagagtcatcactttgtaatggatgatttctgtattttaggagggaaaagtaagatattctgaaagagagcctatcccagaagccatgagacctgggcctgatctaagagggaagggaaacctgagattcctgtgaaccagctgggactagattttaaactagaagtgagtgactgcaaaattatttgactggactcggatgtcagtaagtccctctttactcagtggaatggagaggctagaaaatgtaaggctgggctgggcgcagtggctcacgcctgtaatcccaacactttgggaggctgaggtgggcacatcatgaggtcaagagatcgagaccatcctggccaacatggtgaaaccccgtctctactaaaaatacaaaaattagctgggcgtgatggcatgcgcctatagtctcagctacttgggaggctgaggcaggagaatcgcttgaacccggaaggcggaggttgcaatgagccaagatcgcaccactgcacctgcactccagcctggcaacagagcaagactctgcctcaaaaaaaaaaaaaaaaagaaaaagaaaagaaaagaaatgtaaggctggtagaggttacaaagggaaaaacaattccaagtccgtgtcttcctgaacctctattcctcagtccaactctctacagttcaaaggatggtagggaatagaaggaaattaggaaactgagagaagccattgattgtcacaaatcaaaagtaccagaaaatacttcctcctaataagctgccacaagagatctggggtactcctacatgagctaataataccaaaataagtgagcctaaatctaatctagtctttagatccaaataccagtgtacaggtgaaatataggagcaaattacattaaaggctttcaaactttgttacatattagaatcactggggagcttttaaaacatcctaatgccttgggtacaatcaagatcaatcagcctgggtgcagtggctcacacctgtaatcccagcactttgggaggctgaggcagatttcctggggtcaggagttcaagaacagcctggcccatatgacgaaaccctgtctctactgaaaatacaaaaattagctgggtgtggtggtacacacctgtaatcccagctacttgggaggctgttgca

SEQ ID NO: 19568 - DNA, 1610 bp, Homo sapiens
tcatattttacctgcctacagccccgagtgttctttcaactacctgccacccatccaacaactcccctcggacctcagtatgggctggaacctgacacttggcatgacagtggtaagtaccatatacatgttggctaatagtataattcactggtctttctttttttaaataagagtaggcctggtggttctgttcttgaccttttcttttctctatccacagtcttccccagaactatctttaatcactcgcaaggttttaacttctatttctaggctgtagactcctgatccctatcctgagctgcctcccagacggtcctatatggaaatcttgcaaacaaatccaattcaatatgccccaaatcaaagtgattttcttgcttcctaatctactccttcctcagtatggtattatctagaaacaacagcaccagccatcaggtttcgtcagagtcatcactttgtaatggatgatttctgtattttaggagggaaaagtaagatattctgaaagagagcctatcccagaagccatgagacctgggcctgatctaagagggaagggaaacctgagattcctgtgaaccagctgggactagattttaaactagaagtgagtgactgcaaaattatttgactggactcggatgtcagtaagtccctctttactcagtggaatggagaggctagaaaatgtaaggctgggctgggcgcagtggctcacgcctgtaatcccaacactttgggaggctgaggtgggcacatcatgaggtcaagagatcgagaccatcctggccaacatggtgaaaccccgtctctactaaaaatacaaaaattagctgggcgtgatggcatgcgcctatagtctcagctacttgggaggctgaggcaggagaatcgcttgaacccggaaggcggaggttgcaatgagccaagatcgcaccactgcacctgcactccagcctggcaacagagcaagactctgcctcaaaaaaaaaaaaaaaaagaaaaagaaaagaaaagaaatgtaaggctggtagaggttacaaagggaaaaacaattccaagtccgtrtcttcctgaacctctattcctcagtccaactctctacagttcaaaggatggtagggaatagaaggaaattaggaaactgagagaagccattgattgtcacaaatcaaaagtaccagaaaatacttcctcctaataagctgccacaagagatctggggtactcctacatgagctaataataccaaaataagtgagcctaaatctaatctagtctttagatccaaataccagtgtacaggtgaaatataggagcaaattacattaaaggctttcaaactttgttacatattagaatcactggggagcttttaaaacatcctaatgccttgggtacaatcaagatcaatcagcctgggtgcagtggctcacacctgtaatcccagcactttgggaggctgaggcagatttcctggggtcaggagttcaagaacagcctggcccatatgacgaaaccctgtctctactgaaaatacaaaaattagctgggtgtggtggtacacacctgtaatcccagctacttgggaggctgttgca

SEQ ID NO: 19569 - DNA, 1610 bp, Homo sapiens
tcatattttacctgcctacagccccgagtgttctttcaactacctgccacccatccaacaactcccctcggacctcagtatgggctggaacctgacacttggcatgacagtggtaagtaccatatacatgttggctaatagtataattcactggtctttctttttttaaataagagtaggcctggtggttctgttcttgaccttttcttttctctatccacagtcttccccagaactatctttaatcactcgcaaggttttaacttctatttctaggctgtagactcctgatccctatcctgagctgcctcccagacggtcctatatggaaatcttgcaaacaaatccaattcaatatgccccaaatcaaagtgattttcttgcttcctaatctactccttcctcagtatggtattatctagaaacaacagcaccagccatcaggtttcgtcagagtcatcactttgtaatggatgatttctgtattttaggagggaaaagtaagatattctgaaagagagcctatcccagaagccatgagacctgggcctgatctaagagggaagggaaacctgagattcctgtgaaccagctgggactagattttaaactagaagtgagtgactgcaaaattatttgactggactcggatgtcagtaagtccctctttactcagtggaatggagaggctagaaaatgtaaggctgggctgggcgcagtggctcacgcctgtaatcccaacactttgggaggctgaggtgggcacatcatgaggtcaagagatcgagaccatcctggccaacatggtgaaaccccgtctctactaaaaatacaaaaattagctgggcgtgatggcatgcgcctatagtctcagctacttgggaggctgaggcaggagaatcgcttgaacccggaaggcggaggttgcaatgagccaagatcgcaccactgcacctgcactccagcctggcaacagagcaagactctgcctcaaaaaaaaaaaaaaaaagaaaaagaaaagaaaagaaatgtaaggctggtagaggttacaaagggaaaaacaattccaagtccgtgtcttcctgaacctctattcctcagtccaactctctacagttcaaaggatggtagggaatagaaggaaattaggaaactgagagaagccattgattgtcacaaatcaaaagtaccagaaaatacttcctcctaataagctgccacaagagatctggggtactcctacatgagctaataataccaaaataagtgagcctaaatctaatctagtctttagatccaaataccagtgtacaggtgaaatataggagcaaattacattaaaggctttcaaactttgttacatattagaatcactggggagcttttaaaacatcctaatgccttgggtacaatcaagatcaatcagcctgggtgcagtggctmacacctgtaatcccagcactttgggaggctgaggcagatttcctggggtcaggagttcaagaacagcctggcccatatgacgaaaccctgtctctactgaaaatacaaaaattagctgggtgtggtggtacacacctgtaatcccagctacttgggaggctgttgca

SEQ ID NO: 19570 - DNA, 622 bp, Homo sapiens
tgtaggcaccaacatgcacacatctatcctagtggttgcagaagacaaaataatgtattctcagcctccagtcacatttcttttacggagtctcacttgttcctgagtttctcaatgaaccaggccaacattcagggactctcacagcctcttttcctctygactcctcttttttagtgttgttctttttaatttagggatggttcattgaattttaagttttaaaattattctttaatcaacatataataattgtacatttatagggtacagtgtaatattccaatccatgtatgcagcatgtaatgatcaaataagggtaatgccctctttatcagactcacaatttagaacatacacagaaccagccaagcaagaggctggcttatgatgctaaagtttaccgctgttactaataaaccaactacgtaactcatgtcaagggatcattaggtgtttacatgcctctgtggatccaggagaactcactccccaaagagactttcttcctatccctccttcgtcaccagtgtgtccccaagtgaggcagaggctttcctgggagacagagaaaatgagaattctctagggcactggggctcataacaaagaacttggtgag

SEQ ID NO: 19571 - DNA, 610 bp, Homo sapiens
ttggagtctccagtgtctatttttctcatcattatgttcctgtgtacccaatgtttagcttgcacttataagtacaataccttattttcatttggccttcttcacccaaaagcttccaattcctctcattttacagatatggaagctaaatgataataatgcaagaataaaaatctatcatttatatagtattatataatttaaagatactaacttgtaaatagattgtgttattaatatgagaagaatataagcctctattgtgctcctaaaatgttgctaaatattaaaaaaactgcacaaaaagtacaattttcaaggaactaagaatctgtttggaaagtatactttcatgtgtaaacagacagataataataagcagtatcatggggtatctattcattgatttacttgagaagtttttattaaacaactgttatsttccagacagtattctaggtgatagacagtatcctgtgaactctctagggagcttgcattctaatagggaaagtaaacaggcaatgatgagcaaaagaatgatcaacacgccatcagctaatgagaaatactgtgaagaaaataaaggtatgcaacagaaaacagttgg

SEQ ID NO: 19572 - DNA, 1217 bp, Homo sapiens
tttttcatttctcttaaattcagatttaactggacatcttgtattttattagatatctaaactcaaagtggattttaattgtttgtagaccagaagaaaattttaattatgagtatattatagtaatccaattatgaggtgatgaaaacatgaaggaaaggtggccactatagagaaatgctctgaaggacaaatccatgcgtacaacggaagaagaatcaaaatgtggtgattgcttrcttttgaaggggcttttgaacaatgttgttgaaagagatcccgtgtctcttgaatagaagtcctaggttatgtgttacacagcaaaagtcactataaaagactaaggacagaaactcagcaactttggttccgttttttggagcaagcaggttacataaaataatcagactagagaataacttgagtcttgaatgtcaaataaggcttaggggattaaacacaccttaaatgttattttaggtcattacacagaaatcacaaggccagttagttttctattgaatatctaacaaccagagataccatactaaagagaaactgttagtcttttgacattgtatcatcatactcctatataaataaagaatatttcttatatttaacaattcagttaagataattgtacaatcaagcatgataatttacaatcaaaactaaaaattgcaaaatgctatacacatactctgttctggaaaaagagaaaagttatgaacacttaatatctattttatgatgccacaaaatatttgaagcataaaggataatctaatttcatttccaattgggatatgagtttccacctccctcaggagatgattcctcaaagagtagatgacaactagtggctaaattaggaaatacaagttagatttatagaactggttataatgtgaaatcttattttctcttctagccagaatgcctattagctattttgatttatttaattttagttggatttcaaaaattaataaatcattgttcatattgcaaggtgaatacttaatcagatacctcttgcaagattctgatgctgagagttagaatacagtgtaaaaaaagcattttaaatgtaaagaaagtgttgtagagcatccacagtaagaaaagggcagggttaccgtgggaaccataatcctgaatttcatgacttgtcttgtgtgattacaaatttaatgctgtaggaaggattgtgt

SEQ ID NO: 19573 - DNA, 862 bp, Homo sapiens
tctgataaataacagcagcagacaggcaaagtgtgtggtagtcaatatatgagttgtcttgttattaggaaagatctggagtcaaatatgagtatgagactgcatttgtacacaaaagtgtgtcaagctgattatacatcagcctgctatgtatgtctgcacatcatgcaatttaatggaaagggaaggatgcaatcaattaataagatgtttttactatggttctgagcatacagatttctctaaagagttgaatttttgacatattttttatattgattagcttatttttctttggatattgccagaggcaataaattttgagactatgccagttttggcaacagacattccaaataacattttctgtgttcagtgrgtactaaacaattgatatggcataaaagaccatgcatacatggacacaaaagtttagatcatatttaggtcagggtccttttgtgtccttttggagaaaaatttaatataggtggtgctgcctaaacaaatttagctgaacttaatacactggttattagtatttgtgctaatagctgaacttaatacactgattattagtatttgtgctaatatctatgctaatatgaatatcatctggtttcattctattttccgcttaaaatgtaatattgctaaagtcaatcagtgtaagcaccagaggcctggaaatgcagcatgtgctctacagaaaaagagatattgctatagatgataaatagtgatgaaaatagtgaatcgaatacagttttagaataacaaagatataaatgaatgaatgaatgaaatgaggaaatgaaatatgcacttcaagtcatggaataccaagcccattatcagaaaa

SEQ ID NO: 19574 - DNA, 526 bp, Homo sapiens
aaagttcacaccttcccacacaaatatatatatcaacataagcaagtatataccaatggtatgtacacatttatgtgcatataygtatttatacatatcagtggtttgtactgtaaaatccggtatgattcaggtcaactcagctgacaaagcagacctcattattggatactcatgtttcgttttcttgtattgctctctcctaatgtaagatagtaaaaataatatgttactagtcgtcatatatttttagaaattgtcctaagcttcttgattatcaaataatgtagcaaacttttaacacatttaaaatatcaaatctgggtacttgcttcagtggtagcacatatactaaaattcgaacaattcaaagaagattagcatggtgtttttttttatcaattaattaattaatttttttttttgagacggagtcttactctgtcatccaggctggagtgcagtggccctatcttgactcactgcagcctccgcctcctgggttcaagctactcagcctccccag

SEQ ID NO: 19575 - DNA, 526 bp, Homo sapiens
aaagttcacaccttcccacacaaatatatatatcaacataagcaagtatataccaatggtatgtacacatttatgtgcatatatgtatttatacatatcagtggtttgtactgtaaaatccggtatgattcaggtcaactcagctgacaaagcagacctcattattggatactcatgtttcgttttcttgtattgcyctctcctaatgtaagatagtaaaaataatatgttactagtcgtcatatatttttagaaattgtcctaagcttcttgattatcaaataatgtagcaaacttttaacacatttaaaatatcaaatctgggtacttgcttcagtggtagcacatatactaaaattcgaacaattcaaagaagattagcatggtgtttttttttatcaattaattaattaatttttttttttgagacggagtcttactctgtcatccaggctggagtgcagtggccctatcttgactcactgcagcctccgcctcctgggttcaagctactcagcctccccag

SEQ ID NO: 19576 - DNA, 541 bp, Homo sapiens
aaatgtaataacatamaaactattgagccctcataaatggtctttattatagtttaaaaattaagaagccattatgtctcaaacaaatatgccaagcattcaaaattcactaaaggttatacttgcaaagaagcataatgtcttaatgtcacacaagatctgatttctagtctggtgctacaggcatgctgcaagcttccctcattattaatatttgaacttagagctacagaggccccaggaaagtagaagagcagacacagccgaatatgtgtgccattcatccctgctggtatacactcagagatggaaaaattaggcaaatgatttttttcctgattcttattcttacgtgagccatagccaattttctgataggtagaagcataatttaccacactggtgtttagttcaacccaggccaatttcgagcacaggattgttttctcttggagtaagtttgcacagcaatggagttaggcccacgtctttcaaggtgagttgttacttgcttagagctcaagctgacctagctttctat

SEQ ID NO: 19577 - DNA, 592 bp, Homo sapiens
ctgcctcccaggttcaagctgggattacaggcgtatgtcaccacgcctggctaattttgtatttttattagaggcggggttttaccatgttggccaggctggtctcaaactcctgacctcaggtgatccgcctgtctcagcctcccaaagtgctgggattacaggcgtgagccaccgcacccggcccatccatctcccttgaatgctgaaagcaagtcgtgagcacacacttgtgcctaggcctgtgggagggcggcsctgtgggtcctgcctgccgtcagttttctctctcctgggggtcagggagacttggagctctgtcccttcttggcttagtcatgaacctctctaagcctcagtgtcctgtgtgaacaaacagctcagtgagatggtgggagggcggagtgtcctgtcagcaggcatgaggaattaaaaattaagaacacccagggcattatggtaagaaaataatgagttgaagcataaaggtaatggttagtgccaacttcctcccagcgtgccaggccctgttcaaagtacatgaaggagttccttatttcgtcttcccaatagcccagggcggggctctcag

SEQ ID NO: 19578 - DNA, 592 bp, Homo sapiens
ctgcctcccaggttcaagctgggattacaggcgtatgtcaccacgcctggctaattttgtatttttattagaggcggggttttaccatgttggccaggctggtctcaaactcctgacctcaggtgatccgcctgtctcagcctcccaaagtgctgggattacaggcgtgagccaccgcacccggcccatccatctcccttgaatgctgaaagcaagtcgtgagcacacacttgtgcctaggcctgtgggagggcggcgctgtgggtcctgcctgccgtcagttttctctctcctgggggtcagggagacttggagctctgtcccttcttggcttagtcatgaacctctctaagcctcagtgtcctgtgtgaacaaacagctcagtgagatggtgggagggcggagtgtcctgtcagcaggcatgrggaattaaaaattaagaacacccagggcattatggtaagaaaataatgagttgaagcataaaggtaatggttagtgccaacttcctcccagcgtgccaggccctgttcaaagtacatgaaggagttccttatttcgtcttcccaatagcccagggcggggctctcag

SEQ ID NO: 19579 - DNA, 540 bp, Homo sapiens
tgataargacatacctgagaccgggcaatttacaaaagaaagaggtttaatggacttacagttccacatgggtggggaggcctcacaatcatggtggaggacaaagaggagcaagtcacatcttacatggatagcagcaggcaaagagacagcttgtgcagggaaactcccattttaaaaatgatcagatctcatgagacttactcactaacacaagaacagcacaggaaagacccatcctcatgattcagttatctcccactgggcacctcccacaacatgtgggaattatgggagctacaagatgagattgggtgtggacacagccaaaccatatcaattgtcatcactcaaggcagatgagtatatagaaagctatcagttgtaaggaattggactaagtttaagagaataataattaagatagaacaaatgtttggtcctgcttaagggctaggatagatgaggcacaatagaatcatgtggggagctgtaaaaatgcccaggccctactctgtgtcaattaaatcagaatccaga

SEQ ID NO: 19580 - DNA, 540 bp, Homo sapiens
tgataaggacatacctgagaccgggcaatttacaaaagaaagaggtttaatggacttacagttccacatgggtggggaggcctcacaatcatggtggaggacaaagaggagcaagtcacatcttacatggatrgcagcaggcaaagagacagcttgtgcagggaaactcccattttaaaaatgatcagatctcatgagacttactcactaacacaagaacagcacaggaaagacccatcctcatgattcagttatctcccactgggcacctcccacaacatgtgggaattatgggagctacaagatgagattgggtgtggacacagccaaaccatatcaattgtcatcactcaaggcagatgagtatatagaaagctatcagttgtaaggaattggactaagtttaagagaataataattaagatagaacaaatgtttggtcctgcttaagggctaggatagatgaggcacaatagaatcatgtggggagctgtaaaaatgcccaggccctactctgtgtcaattaaatcagaatccaga

SEQ ID NO: 19581 - DNA, 540 bp, Homo sapiens
tgataaggacatacctgagaccgggcaatttacaaaagaaagaggtttaatggacttacagttccacatgggtggggaggcctcacaatcatggtggaggacaaagaggagcaagtcacatcttacatggatagcagcaggcaaagagacagcttgtgcagggaaactcccattttaaaaatgatcagatctcatgagacttactcactaacmcaagaacagcacaggaaagacccatcctcatgattcagttatctcccactgggcacctcccacaacatgtgggaattatgggagctacaagatgagattgggtgtggacacagccaaaccatatcaattgtcatcactcaaggcagatgagtatatagaaagctatcagttgtaaggaattggactaagtttaagagaataataattaagatagaacaaatgtttggtcctgcttaagggctaggatagatgaggcacaatagaatcatgtggggagctgtaaaaatgcccaggccctactctgtgtcaattaaatcagaatccaga

SEQ ID NO: 19582 - DNA, 540 bp, Homo sapiens
tgataaggacatacctgagaccgggcaatttacaaaagaaagaggtttaatggacttacagttccacatgggtggggaggcctcacaatcatggtggaggacaaagaggagcaagtcacatcttacatggatagcagcaggcaaagagacagcttgtgcagggaaactcccattttaaaaatgatcagatctcatgagacttactcactaacacaagaacagcacaggaaagacccatcctcatgattcagttatctcccactgggcmcctcccacaacatgtgggaattatgggagctacaagatgagattgggtgtggacacagccaaaccatatcaattgtcatcactcaaggcagatgagtatatagaaagctatcagttgtaaggaattggactaagtttaagagaataataattaagatagaacaaatgtttggtcctgcttaagggctaggatagatgaggcacaatagaatcatgtggggagctgtaaaaatgcccaggccctactctgtgtcaattaaatcagaatccaga

SEQ ID NO: 19583 - DNA, 517 bp, Homo sapiens
aaamaaaaaaaaaaacacaactctctttaaatcacacatccgagtgtgtcccttgtttcccaccagagccaagactgaattgagatgatttcttaaggtcaggttgatgtcctaatccagttgtgctgctataacaaaataccacagagtgagtaacttataaacaacaaaaatttattgctcacagttatggaggatggtcagtccaagatcaagttgccagcaggttcagtgtctagtgaaggcccattcctctgtcatccaggctgaagtgcagtgttgcaagcttgggtcactgcaaccttcacctcccaggctcaagtaatcctcccacctcagcctcctgagtagctgggaccacaggtgctcaccaccatgcctggctaattttttttttttttttttttttttttgtagagatggggtttcaccatgtttcccaggctggtctcaaactcctggactcaggcaatctgccagcctcctgagggagtgctgggattacaggcatgagcca

SEQ ID NO: 19584 - DNA, 517 bp, Homo sapiens
aaacaaaaaaaaaaacacaactctctttaaatcacacatccgagtgtgycccttgtttcccaccagagccaagactgaattgagatgatttcttaaggtcaggttgatgtcctaatccagttgtgctgctataacaaaataccacagagtgagtaacttataaacaacaaaaatttattgctcacagttatggaggatggtcagtccaagatcaagttgccagcaggttcagtgtctagtgaaggcccattcctctgtcatccaggctgaagtgcagtgttgcaagcttgggtcactgcaaccttcacctcccaggctcaagtaatcctcccacctcagcctcctgagtagctgggaccacaggtgctcaccaccatgcctggctaattttttttttttttttttttttttttgtagagatggggtttcaccatgtttcccaggctggtctcaaactcctggactcaggcaatctgccagcctcctgagggagtgctgggattacaggcatgagcca

SEQ ID NO: 19585 - DNA, 561 bp, Homo sapiens
taagtaagataaagctaaaaaatattaattggattaagtgtcaagaagatcattggcaatctttttgacagtttctttagagtttgsggttagatcagctcagtgtgctttgataagtgttacagatggagagagaataaaactactctttgaagtggaggaaaaagcaaaagattacagtagataaatagcgctatggagtcgagagggattttcttattttagaagaaaaattggacttcagtgaatctaaatgttgagagaagagaattaggagcaggaaactggagaagtaagctccttcttaggaaagagaggctgggatctgaagtgaaagtagaggaagtaaaagtcagttacttatcccctccactgatgggatggaaagtatataggtttaagatatttcataaatataagatcagaatttgaggtgactcctatctaatgacaacccttgcatccagtcagcagtattcaaggtagcaagactttacccacacttggcccagaagctcaatattgtaacagtctgttgagactactcatcaaaatgcccac

SEQ ID NO: 19586 - DNA, 601 bp, Homo sapiens
accatgttggccaggctgttcttgaactgctgacttcaagtgatctgaccaccttggcctcccaaagtgctgggattacaggcgtgggccactgcacctggctcacgtctaactgttttattagcaaagtaaaagcctccctagaagtctttcccatttccccttaagttcttaaatattttttaaatcagaattgggtcacatggccacttttagctgcaaaggaagctgagaaagcaagtctctggcttactagttttaaggagggaagctgccagagagcttgcatctgcactgttgacgccaatatcatgttctttccactttactggtgattttccctgttcagattaaacacataaaaacccsaagagttattactgtatccacgtaacccttgtactgttgttttatttttaaattttcccttttcttttcttcttcttttttttttttctggagacggagtctctctgtcacccaggctggagtgctatggcatgatcttggctcactgcaacctctgcctccccagttcaagtgattctcctgcttcaccctcccgagtagctgagactacaggcatgcgtcaccacgccca

SEQ ID NO: 19587 - DNA, 536 bp, Homo sapiens
agagcaaacatcaggcaaccccgatgcaggtgggggtcagggaaggcttccaggaggaggtgacattggagccaagcccggaagggcaagttggggttcccaccacagacaagagggaatggcattctgggcaggaagaatggccacacaggagctctgagcattggcctcctgcttccccaaggggcttcctctcctctacctccccaggtagacgagcccagaggagcctggctgtggagcccagtttcttctcctgtgaaaygggggtgacctttgtgcctgccgcccccttcctcaggtgtgaggagcaaatggaccatgcacgacaagagcaggtgcaatgcctggctcatggggcacaacgagccatgagatccacttcccacgcccacccacccatccaggatggagaagtgagtaccctgggatgaggtccaatggaagatctcagggaaggcctcccacagcccacccgcaaatatctccctaactcactgcctgcgtgcctgaagtctctctcacaaactcattcc

SEQ ID NO: 19588 - DNA, 536 bp, Homo sapiens
agagcaaacatcaggcaaccccgatgcaggtgggggtcagggaaggcttccaggaggaggtgacattggagccaagcccggaagggcaagttggggttcccaccacagacaagagggaatggcattctgggcaggaagaatggccacacaggagctctgagcattggcctcctgcttccccaaggggcttcctctcctctacctccccaggtagacgagcccagaggagcctggctgtggagcccagtttcttctcctgtgaaacgggggtgacctttgtgcctgccgcccccttcctcaggtgtgaggagcaaatggaccatgcaygacaagagcaggtgcaatgcctggctcatggggcacaacgagccatgagatccacttcccacgcccacccacccatccaggatggagaagtgagtaccctgggatgaggtccaatggaagatctcagggaaggcctcccacagcccacccgcaaatatctccctaactcactgcctgcgtgcctgaagtctctctcacaaactcattcc

SEQ ID NO: 19589 - DNA, 536 bp, Homo sapiens
agagcaaacatcaggcaaccccgatgcaggtgggggtcagggaaggcttccaggaggaggtgacattggagccaagcccggaagggcaagttggggttcccaccacagacaagagggaatggcattctgggcaggaagaatggccacacaggagctctgagcattggcctcctgcttccccaaggggcttcctctcctctacctccccaggtagacgagcccagaggagcctggctgtggagcccagtttcttctcctgtgaaacgggggtgacctttgtgcctgccgcccccttcctcaggtgtgaggagcaaatggaccatgcacgacaagagcaggtgcaatgcctggctcatggggcacaacgagccatgagatccacttcccacgcccacccacccatccaggatggagaagtgagtaccctgggatgaggtccaatggaagatctcagggaaggcctcccacagcccacccgcaartatctccctaactcactgcctgcgtgcctgaagtctctctcacaaactcattcc

SEQ ID NO: 19590 - DNA, 510 bp, Homo sapiens
gaagccttcccaggcacccctcccctgcggggtcaggaagatcaccctcctccccctttcyctcccccccgctgtgttcccagaccctgtccagggtgttccaatgcttgtcttatgtgcccatctcccatactagatcattgccttccattaggtgacaccactgctaggaaatgcttcagatagtgcctccctccatgttaggcctcacagttataactcgggccaggtctttgtcatctttgcgtgccactgttgaatcgtgatgatgacactcacatttctgagcacttggtgcaccaggcactgcactatggacttcactcaaagtatctcccttaatccctccaaccccataggtggtaggacctgttattatccccttttttagatgaggaaactgaggtcaaagagggtggccaagaggcattaaaaccaggcaggccagatccaggggccaccacattgccacctctctgagtgtgcctatgctgttccactgcctgcaac

SEQ ID NO: 19591 - DNA, 557 bp, Homo sapiens
accacccagccaagccagtcccaaattcctgatcctcacacmttgtgtgcaagaagaaatgctgattgttttaagccactacgttttggagtaccttgttatggagcaaaattgaatccaacactttctaagtagttgttgtataaagaggtggagagatggatgctgaatgagaataacaatgattctcactccctgagccctctctgtgtgctaggcatagtgctaagtactttacatgtgaaaccgtcacacagccttatgagaaggctgctaccctctacccattttatagatggagaaataggaacagtgaggttaaattactcacccaacatcccaccagcagtcctggggctttgcaccctggcagattgggaccagaggcttcactgccacatggcactgtctgggtgtctcttgactcttcccagaccccctctcaggctcactgggggcctggaagagctcactgtcacagtccgcgtggcatgcatgccctgcagagctaggaatgcatggctcatggcctggtgccagtgcctcttgtcccactg

SEQ ID NO: 19592 - DNA, 557 bp, Homo sapiens
accacccagccaagccagtcccaaattcctgatcctcacaccttgtgtgcaagaagaaatgctgattgttttaagccactacgttttggagtaccttgttatggagmaaaattgaatccaacactttctaagtagttgttgtataaagaggtggagagatggatgctgaatgagaataacaatgattctcactccctgagccctctctgtgtgctaggcatagtgctaagtactttacatgtgaaaccgtcacacagccttatgagaaggctgctaccctctacccattttatagatggagaaataggaacagtgaggttaaattactcacccaacatcccaccagcagtcctggggctttgcaccctggcagattgggaccagaggcttcactgccacatggcactgtctgggtgtctcttgactcttcccagaccccctctcaggctcactgggggcctggaagagctcactgtcacagtccgcgtggcatgcatgccctgcagagctaggaatgcatggctcatggcctggtgccagtgcctcttgtcccactg

SEQ ID NO: 19593 - DNA, 557 bp, Homo sapiens
accacccagccaagccagtcccaaattcctgatcctcacaccttgtgtgcaagaagaaatgctgattgttttaagccactacgttttggagtaccttgttatggagcaaaattgaatccaacactttctaagtagttgttgtataaagaggtggagagatggatgctgaatgagaataacaatgattstcactccctgagccctctctgtgtgctaggcatagtgctaagtactttacatgtgaaaccgtcacacagccttatgagaaggctgctaccctctacccattttatagatggagaaataggaacagtgaggttaaattactcacccaacatcccaccagcagtcctggggctttgcaccctggcagattgggaccagaggcttcactgccacatggcactgtctgggtgtctcttgactcttcccagaccccctctcaggctcactgggggcctggaagagctcactgtcacagtccgcgtggcatgcatgccctgcagagctaggaatgcatggctcatggcctggtgccagtgcctcttgtcccactg

SEQ ID NO: 19594 - DNA, 557 bp, Homo sapiens
accacccagccaagccagtcccaaattcctgatcctcacaccttgtgtgcaagaagaaatgctgattgttttaagccactacgttttggagtaccttgttatggagcaaaattgaatccaacactttctaagtagttgttgtataaagaggtggagagatggatgctgaatgagaataacaatgattctcactccctgagccctctctgtgtgctaggcatagtgctaagtactttacatgtgaaaccgtcacacagccttatgagaaggctgctaccctctacccattttatagayggagaaataggaacagtgaggttaaattactcacccaacatcccaccagcagtcctggggctttgcaccctggcagattgggaccagaggcttcactgccacatggcactgtctgggtgtctcttgactcttcccagaccccctctcaggctcactgggggcctggaagagctcactgtcacagtccgcgtggcatgcatgccctgcagagctaggaatgcatggctcatggcctggtgccagtgcctcttgtcccactg

SEQ ID NO: 19595 - DNA, 452 bp, Homo sapiens
ccttggaatgtattttatgtctgatgtaaacataatcataaacgaagtcaacataactcagtagataaggaagatgtagttttatgtattcactcgacaaacatactgtgattgccaactataagcaaatgcacttctaggtactaagaataaagcaacaaatgaaacagatttaaaaaaaaacaccgccctcatgcaactgacattctagttggaagaagcagacataaacagcgcaaataagtaacaatataatattcagatgctgagacgtgcaatggggaaataaaacagcgcaggaggacggagagaacatggaacaggagctgggggcagatgaagaggcatcgcaattttaaactccttgttcagggaagaccttgcagagattcgagcaaaacctggataatagagttgtgtgttctcttgytcatgtctccaaattccatttt

SEQ ID NO: 19596 - DNA, 631 bp, Homo sapiens
agtcaggctccagaacacacacagccttgcagcaaaatttggaggcaacttaagaacagtgggaaggaagccactgagaggtgttaagcagaggattgtgtgatgggtctgagcttcaattttcaaaactcactttgactgctgggtggagaatgaatggtagggaaagaccaggcagaaagctggactcatctcagtgaggcagactggtggtttggacttgagtggaccctatgggtacagggagaagcaacaggttcaaggtctattttgaagttaaagtctatagacttgctgatagataaaatgtggggaaatgggagaaaatagattcaaggacgtctcccaggttactgcttgagtgactggctggatcagatggtacctttgccgcaatagggaaggctttagagagtaaacaagatcagttgtaagsctcttgcaacactaacgttgaatggaaaatccctattgtcagcaacacagtgcatagggcatgtggatgcatcttgtttgctgatacattttagagagatgcatgtagatagttttaggtatagctacacccacttccatacagacactacttctttcacatcatcttattttatttccttcaagccactcacca

SEQ ID NO: 19597 - DNA, 561 bp, Homo sapiens
attaatatatctaagtgaacctttctagattcacataggaccctgtatgtcttgtagcacaactcttaacacatgtattctaatttttggttgatttttttgttttctcaagtaaactgaaaaatctatgaatatgagaactacttatgatttctccaaaatagttctggttgtagagtttattagtcagagttctctggagaaacagaactaatgggaggataccctaaatcatctctctcaagttcaaagttccatagatccctagagcagggacacaatacctccaacctctttgctgatgcataacaacagtgaactttgctccagttcccaataagttcctcatctccatctgagacctcmttaacctagactacatagaccatattactatcagcattttggtaacaacaatttaacaagtctctaggaagttccaagctttccctcatctttctgtcttcttctgagcccttcccttcttttccaacctctccccattacccagttccaaagtcacttacacattttcgggtatctttatagaaatgcccctct

SEQ ID NO: 19598 - DNA, 540 bp, Homo sapiens
ttcatcatcatcaccaccatcatccacaccaccaccatcatcttcatcactatttacatcatcattattattttcatctaataaagagaaaactcaatgcttgtcatggctttaatgagcttcatggcatagtgaaaacatgactttgaattcaggtagccttccactctgtgccactcataagctatgtgacctcatacaagtcattatatttctctaaatctgttttctcatttgtaaaatgagcacagctttcaagaggatgttgaagaagtaatgaggaatgttgattatgcctggcatggaacaagtcatttaaccaatgttgacyccccatctcccatatccagtcctgtatcctcaacagactgcttagttggtggtatatctcaggcaagtacagaatataaaatagtctctgggtttctaatcaccagatgtctttaagaggcatcctgttggcttttcagtactgcctcctataaggccagtgttccattgtcatggctttagttgctggggagtatttatgtcatcata

SEQ ID NO: 19599 - DNA, 1354 bp, Homo sapiens
gtctttcctaaacaatgtctatatattgggccagatcctgcaggtacaaaggtgtctaaaacagtctctgtccaccagatgccctagactggtgctgatataaagcaaagcagaatgaacagaatgttaaagatacaaatagtgtggtatgtgagtccgaagaargagtcattagttaggatgcatttacagaaggcttcaaagaggaaggggtttctaaaactaggccttgaataatgaggagaaattgcgatagatttggataagcacatttcagagatggaagcagtcctgggagatgaagctggaaaggaagtttagtgcctaataatagaatatcttcaatgctttgcttaattaatttgtcaaatatttattgagtgcttactatgtggcaggcactattttaggtactggggatatagcagagaacaaaccagatagcaagtaagatccttactctcgttctagtagcagactgtctagaatatctagacggccataagttctgtggctaaaaatcaggctaaggagaagatggcctacctgtatttctggaaaaatatttctgtgtttctggaagaataacttgagaggctgtgtgataggaagataggggatggggtagagggagattatttaggaggctgtaatgaaggtccagatgagagaagataaggcagtgctgatagaagtttaaaggagggaatagatgtgttaggcactggtcagattagacagcagtgggagatgaaaaaggtgcagaaattgagaatgtgaatttggaagtatcttagataaatggtgtcatataccagcattaaagaatttaacaataggtttgagagagaaggaacagttaacagtgaatttgtgatgagctagctgcttgacagctgagaagcaattggaaatttctcttgcgctcaggtgagaagtgagaacttgaagccatgtatttgggacttaggataaaggcattaggatgtagatagtctaaattcatctttctttcctgagtctgtgcagcttttgtgtgaatttcttaggctttgtaccttaggccatttgcacttttaagtgtgattgaggctttggcttttccctgatctcgcttaagagagaaaaaaaatgatgaacactgatgtgaaaatgtaatagattggatgtgccttatgacaaaatatgctaattcatacatttctgtggtgctttaaagcaatcgtcctcacctttcctaatagccaatgatgtagacagttggaaattgagttacaagtaaatgaaacgtcatgcaggttccgcacgctgttgaatcaccggcagatctcagcagtcattgtagtactcaatg

SEQ ID NO: 19600 - DNA, 158 bp, Homo sapiens
ctgggcaaggcactgtatttgtttttctaggctttagtcttgaatcttctcagtgaaaggtttgagtgggtgatcttcatgttccaatacagctgcaaggctctgtggcctagcagcagagtggagtagtgaaagactagtcacctgamaggcagagc

SEQ ID NO: 19601 - DNA, 567 bp, Homo sapiens
gtttctgttgttaaaaaaaaaaagaaacacaaataaaaacagttttatatcttttcttccttttttgtctttcagaataaaaacgttttgataccaatgttgtctaggatataagcaaaagggtactttcatacaatttttatggatatataaattgatgggaacattgtgaatggcaattctccacttgcatcaaaacttctaaatgcatgtaatttactataaggatatattttcaaagtttgccaagatgaacakacatgcataatacatacacacaatgatattgcagtattatttgcaataggaaaaaaagcaggacatacatcaatgaggaactagttgaattatgtcacttctatgaaacggaaggaggtgggtctgtatgtgcagatatagaaagatctataagatatatcattaaatgagaaaagcaagttgctgaatggtgtatatagtatcattcttttagtgcaaattcaagaacagaatttcatacacatttatttggaagagatcagaaaaacaatgattatctttggggagagggatggttagaactgagtg

SEQ ID NO: 19602 - DNA, 1027 bp, Homo sapiens
catctattataattccacttttctagtatggttccccaaagtcttagatgttcctttccctgcctgcctgtttgtgctttggaacttaattgtatcattctgttcaaaaagccttaggttcattttttccctaccatttttcttcaaatatttgctgaatggccttgatctccccctcagttatgtgtaggtttttactctaaactcctcttacttgttctcggtagtttatattcattcctttaggaaacattcttggatgcgttctagattmgagaactttattaggtattttgacatagagctaaagttttatggtataaagagcttatttcccactaatatatttattcagttgcctgcctatattttatacagttgtgtcttagattgtcaactctagaaagtagagaccattttaaggtgttcttttcccttctttctatcattgttggatagtacccatatacagttaagcaggaagttttgtttttaatggctttattttggatcagctatattaaataatgttccaagttatttgggattaaaattatcttgaatatattgttttagaaaactcggtgagggtcagctaaaaaaacatgagattaggaatttagaagtcatagatatttatatctaattcttctcttttatacttcaggcaatttctgaggactattaccttttattttgtgataagtaaactcaagtcattcacgtgatcttaattattttaggatgcaagttaccatttagtaaattgcttcttatgtacttgtattattttggacaaattaatcacctcataatgataagcaatttacttttctctccagagattccttttctcatagcaggagacttagtctgggattgtttatctgacttaggtcctctcataaaaccttcagtataaaaaaatactttgtgagcattcacaatgtagaatgaattgactgcaggaagtaaacaagctgagttctcctttcaaatgatcagtggcacagttgagatgaaaaaa

SEQ ID NO: 19603 - DNA, 671 bp, Homo sapiens
atatgtttttatttagcttttaatttagactaatgttttacatattcaaaaacaaattgaaaaactcaacatcgaatgaaataaaaagtgtgaagtgaactatattcatagcaaacagataaccacaaaaaagaattaatgcaaataacttttgaacacagtatactgtacaaccttattggatatattctgaggacaaacattaygcaaccaaaattcttgaattttatgtaatagatttattattggtactggcatttaagtagcaatacctaaactattttatatgtatcgtaggactgagcaaattaatacatacatgaattttgctaggaaccacagttctatgggtgaagagagatacaaatacagaaaagagaaataagaggaagaactctggtactggattgaatgcgtggtatcaaaataaactgttcactaaaagagcctagatgaaatgatacccagcagtaacaagcacacctagatcttcatttctaaatgtccttcctcacaaaaggattaaaaggaagaaaggactcaagacctgattgggactgatatggtttggctgtgtctccatccaaatctcatcttgaatggtaactcccacaattcctgtgtgtcatgggaggaactcaatggaaagggattgaattatatgggagtgg

SEQ ID NO: 19604 - DNA, 671 bp, Homo sapiens
atatgtttttatttagcttttaatttagactaatgttttacatattcaaaaacaaattgaaaaactcaacatcgaatgaaataaaaagtgtgaagtgaactatattcatagcaaacagataaccacaaaaaagaattaatgcaaataacttttgaacacagtatactgtacaaccttattggatatattctgaggacaaacattacgcaaccaaaattcttgaattttatgtaatagatttattattggtactggcatttaagtagcaatacctaaactattttatatgtatcgtaggactgagcaaattaatacatacatgaattttgctaggaaccacagttctatgggtgaagagagatacaaatacagaaaagagaaataagaggaagaactctggtactggattgaatgcgtggtatcaaaataaactgttcactaaaagagcctagatgaaatgatacccagcagtaacaagcacacctagatcttcatttctaaatgtccttcctcacaaaaggattaaaaggaagaaaggactcaagacctgattgggactgatatggtttggctgtgtcyccatccaaatctcatcttgaatggtaactcccacaattcctgtgtgtcatgggaggaactcaatggaaagggattgaattatatgggagtgg

SEQ ID NO: 19605 - DNA, 1999 bp, Homo sapiens
atttctagatgttcaatttcactaagcgggaatgtaacgtgtggcaattttttgtttgtgtttacttttattttagtttcagggatacatgtgcaggtttgttatataggtgaattacatgtcccggggtttggtatacagattatttcgtcacctagttaataagcgtagtacccaataggtagtttttttatcctcatcctcctcccaccctccgtcctcaaggaggccccagtgtctattgttcccttctttgtgtccatgtgtactcaatgtttagctcccacttatgagtgggaacacgtagtatttggttttctgttcctgtgttttagttcacttaggataatgccctccagctacatccatgttgctgcaaaagacatgatcttactcttttttatggctgcatagtattccatggtatatatgtaccacgttttctttatccagtccaccattgatgggcatttaatttgattccatgtctttgctattgtgaataagtactgcaatgaacatatgggtacatgtgtccctatggtagaacagtttatattcttttgggtatatacccaataataggattgctgggccaaaaggtgattctgtttcaagttctttgagaaatcaccaaactgctttccacagtggctggactaatttacattcccaccagcaggatataagtgttcccttttttccataacttcatcagcatctgttattttttgacttcaataacagccattctgactggtgtgagatggtatttcattgtggtttcgatttgtatttctctaatgattagtgacattgaacatgtggcaatattgacctgcaagatctctatgaaacttctctttacccacacttggttgcaaagatataaatgaaggagggccagtggacagacaagtgtcatttcctgattctcaaaggtagaggcatcacctacggtagagtacctgaaaatactaaataaatcatcttgttatcctaagttttataggtggcacaagttatctcattttgacccattgcagccaggtggtactaaaaagacaatgaaaaactgcttggctggatgcaagtcatttgcgtaggagcatttcagtggacaaatgaagtaaagatgctgcagaaagagcaattcaacgtgtgttcaagtatcctcagaaaacgcagtgggagattcagtacctgctctgtcacacggtgaattctcaagctcccaactcaattttcctaggaagctggattcaaaagcccataaaagaaaagtctcttgcagataaatcctatcagagccaagtactatcagctacagacatcacaagtttcccgtgatacagcctaggcagagtagtccttgtgaaggargtgacacagaatttataccaagggaaatattagaagagtttgcccgtaactcgaaaaaatgacactgtacttggcctgaaggaaattggcaaaatgtgtaactgatgatatatttgtatgttgggttaagaatgaattcaaattttttatttctttgaattagcacataagcttccaaagatgttctattgcctggaacccacccaactctactgggataactgagccaacagggagttcctcacctctgactcccacttgctaacagtccagcagtctggctgcagggactgatcctgctttcagggcagtggtggccaatgtattgacagtcccaaggtcaaaactccttacatcctccatatgtctctgtaccacccatcatccccactcaccattgatgttcaggaaggggaaggtgtcctggatgggaacatggtgctgcgactgatccagctcatcttcctcatcttcttcatccacatcattatccttctcatcccagggagcagaccctgtggatcctacccaagatacacaagctcgcaggtgagccattcaggttgcactgccacccctgcagctgacccaccattcaagctagggactgctagcc

SEQ ID NO: 19606 - DNA, 504 bp, Homo sapiens
tgttcatagcaatggcatttgaagatatattttcttctaaatagttggcaaagaaggttaggtatttgaaacaatgataactacaagacaatcayttcacaaaggcccttaagaggttgatgtttcctttcaggccccagtcccaccctcagttcttaggcctgaagattctgtaggaaaatctccatatctgggtggctacagatccaaaatattcaatgatacagccttttttcaacatctacaaatacaataactaacatttgagtgcttgttatatcctagccacagtgctaggctctttccaaaaccagtctattgtgagtgtcatggaagagtgataggcacaggccaataagattctctttctgcaggctatacaagttctcatgatcttggactttaaggctacctagtatgcccataaaacaaaaagctgttaggtccctgcccccacacacactctttctctgagactgcttcccacctatagtcgttggtgaa

SEQ ID NO: 19607 - DNA, 696 bp, Homo sapiens
ggaatagtattgaagagagaactatagcccaggtcataggcagtaaaactccgcagtagtagatgagagtagtataaaacatgcttcgtaccctcaggtggtagaaatgggaagagctcagggataactatgagacggttatgcaagatcagatagggttatgcagatcagatacaaagaactcaggaatatctatgggacggttatttaagatcggatagggtaattggccccacatataccctcccaccttctccagctgtgggtcaggtagtagccacaatagcaacagtattgcccatgtctgaatgggaacaatacagcaatrctttaggtgtaggattgtcagaaaaaacatagaacacccagttaaatttgaattttagataagcaatgaacttttttcatataaatatatcctaaatactgcatgggacatacttatactaaataaagcatgttgtttgactgaaaattcaaatttaattagaactcctttatttaccaaatctagcaacccctgagagaaacagggggcatctatatccagaagaacggccactcgtgtatctcagccagcaatatgccctaccctccctaaatatagttacaatacacagtagcaacttccatatattcccttaagtagactgtgcaaaaagaggcaagactgtcaaacatttaagaaaacctcac

SEQ ID NO: 19608 - DNA, 510 bp, Homo sapiens
ctggcaggggctggaaaagtgcgatgggagggagaaaaaagtggggacgtcatcttccgtcagagaaagggtaaatctgatttgggagtgactgaggagggagaactcctcagggaataaaaagcagcactctgcacccaggggagcatttattggtttctctcttttttccagagcgcgtgagcctgcaaggcctgggtcaacacctggttgggacaggagaccaccagggcagtgcacagctgagatctcagtctctggtgtcagctcctgggttcgctggctccactgagggcaactagactctgcagycaggcgatctggattcaactccttgcctaggcctcaccagcatgttctctctttgtgcctcattttcctcatctatgacatggggaaactacgagcatttatttcttgtggttggatgaatgaaaagggttagtatatatggggtatttgcagctgtgccatattatttttgttattttgttattttattatattttg

SEQ ID NO: 19609 - DNA, 324 bp, Homo sapiens
gggcggggtcacaggcatccctcaggtccttctcagtggactttgtctctttttcctggaggtggaggagtctgtacttcatgagaagtcctctgaagaaagcaggagatacttaggagcggggaagtggagacaaaggggagggggcgaggcaagggggragcacgcaagaaatggggaggaggaggaccttatagtggtcagaaaagtcacacgcagaatttggctcttggtttttgtgtttcattaggatggacttagaaaaccagacagagtgcgagataaggagtctaccttgcaaaagacacgtcttagtgtcctcct

SEQ ID NO: 19610 - DNA, 632 bp, Homo sapiens
ttaacagctgtaacaccgtgagggtccgcggcttcattctttaagtcagtgagaccaagaacccaccaattccagacacaatattatgatttttctcagcactatattgttgctatcttcttgtcctccaaaaaaccccgcatgattttgaggaaaagwtggcaatagtttctttctttttatttttaggggtcatgttcacctgttctttctcgtgtttggtaggcactaggaaataggagcgttgattatccagggacgtcagggtagcacagggagacgttatgagggaggggttgagggaggggccatggtaccaatggttactggagaatgctcccattgcagcagagcagttgttggggaggtctgcacaaaacctgggttaatgagccgtgcctagcccagcaggtttaacttcctagaagggctgcctatgtccctgtgacctgtcactgctgtgagaacctcaacctctactgtctgggaaggatggctatcttcagctggacaggcttgcaaatcgtattctggcatacttcttcatttcagtatctttatcaacagaactacatgcagacactttaggggaattaatagatcagcccagagggggcaggcggataagaaat

SEQ ID NO: 19611 - DNA, 632 bp, Homo sapiens
ttaacagctgtaacaccgtgagggtccgcggcttcattctttaagtcagtgagaccaagaacccaccaattccagacacaatattatgatttttctcagcactatattgttgctatcttcttgtcctccaaaaaaccccgcatgattttgaggaaaagttggcaatagtttctttctttttatttttaggggtcatgttcacctgttctttctcgtgtttggtaggcactaggaaayaggagcgttgattatccagggacgtcagggtagcacagggagacgttatgagggaggggttgagggaggggccatggtaccaatggttactggagaatgctcccattgcagcagagcagttgttggggaggtctgcacaaaacctgggttaatgagccgtgcctagcccagcaggtttaacttcctagaagggctgcctatgtccctgtgacctgtcactgctgtgagaacctcaacctctactgtctgggaaggatggctatcttcagctggacaggcttgcaaatcgtattctggcatacttcttcatttcagtatctttatcaacagaactacatgcagacactttaggggaattaatagatcagcccagagggggcaggcggataagaaat

SEQ ID NO: 19612 - DNA, 502 bp, Homo sapiens
ccccttcccatgataggtcccctgggccaggcccagggcaggccctttctgtgggtgaatataaatatataaaacacacagcgcactcttagctgcaaaactaaaaataggaagcgcgggatccggctccccaggcttccccagccactggaccacacaggtgtggctgcggatgtcggggcgatgtggcccctcacccctcccagctctggagccctcatggggaggaatgaggggcattttggatttctgccaggaacagttcattctttcactctggcctccctcctgcccccgtcccatttgacagctcatttcatttacgaccccaaaatgaaccgacccactgaggtgtattctctactcacgtggccaggctgggttgtttggtgcagctgagagctgccctctgggccatgctggggggctgcatttatgcgggggtgcagtctggrgcagaggagaggccggggctgaggagggaggcagggctgggtctgca

SEQ ID NO: 19613 - DNA, 533 bp, Homo sapiens
aaggcgtataatatttctgataggtatgtgaggacatgcttttaagtgaaccagctataatttgttttgcctgattatatgcttggttaaaaatgaccgttctcataatcgaatgaataccgaatcgagtaaatgttgtgatgcaattttaagacatgaaaatgtctgtaataaaagaattatttaatttttttgaaaaaatatcgcaatgtgacaaaatgcattaaaatgtttgtcaagaactctcaatggactggaaagctagcaaatcctcctgacctagatgaggagacaagaaaaacacattaaaactcgaatggttaccaaactgcatgaacatacacctgaccaacagggagcaggagcagcaayagcagcaccagcagccttttcactgttttttgttttttgtttttttgagacggagtcttgctctgtcaccaggctggagtgcagtggcgctatctcggctcactgcaagctccacctccgggttcaagaaattctcctgccttagcctccctagcagctgg

SEQ ID NO: 19614 - DNA, 514 bp, Homo sapiens
ggcacaggaaaatctataagtctcatgcaaagttcctgaaaccttgtttgataagtatcagctggcccagaccaagggtcctcagtgtctagttctgcaagttttgacaaacacagttttgtaactaccatatagtagttacccccttaaaaattaccgccttcctatttgtagtcaacctctctcctccacccttagaccctgccaatcactgatttctttctttcttttttcttttatagagacggggtctcactatgttgcttagcctggccttgaactcctggccgcaaacagtcttcctgcctcagcctccggagtagctgggactataggtgcacaccactgtaccttgacctcttttctattcttctggttttgccttttctgaatgtatcgtaaataaagtcatgcagttttgttgtcgttttaatagtaatattttaatacagcataattaatgtgtagattttctgcaatacrttctgtaatgattagatattcttgcctgaaa

SEQ ID NO: 19615 - DNA, 575 bp, Homo sapiens
aaacttccttttatatcttttgtttgggcttttccctgtgaatgtaaatgtacttttttcttaccttgtgctgcccccaagtccacatagtggagtataacttttaaaaagaatctacatattatatgtcatcattgaagaamccagggagagtcccagtcctcaaattctcaaagcaaggatcacatggctcagtgtaaatcatgcacccatcccaggaataatctgtggccctagtgactgagtcatgctacaaaagtgctgctgtagtttaagatccatggattgagatcatgaggcaattcccagaaaatttgagatattttccttgaaacactttgtgaggtaggggagtttggggcaaaatgaaatattggcatcccgtgctttcaacttttcagatagtgaatgctaacatgttaaagttttaaacagagctatgaagataaaagagtgtatgaatggattcatgagaaaattaaatatgtatagcattgcactacattaaaatgctggctggacttatttggaaaagaggcaacacaacaaaaaagttaaatgttgactctggaaat

SEQ ID NO: 19616 - DNA, 542 bp, Homo sapiens
gaacttgatcttggactgcacggcctccagagctgtgagaaaataaatttctgttgtttaagctacccagtctatggtattttgttatggcatccctagtagatgaatacaactcattcagtatttaaatcattaacaaccacttaatttcataaagaggcagctcygtaaaagaacagtatgtccaaaaaatgaactgtgattaatattaacctttactcttctgaagtcacaatttatccctggcctatgggatcacattataaaatgaagtgaaaatccactgtagcctgtgaaatactggacactaacgagtcagtcccatccctgacctgctgacaccaagatattttaatgacactgtaacaatatatcagtaccatacaaaggagaaatccactatcaatctagactccatgtagaaatacacagtgatgctgtacaaaaaggaattaaaaatgaaaagcagggtactgtggtggatagaggacagtttctggcttcatatgaacttgggcccacccccagtcttgccacttaca

SEQ ID NO: 19617 - DNA, 1163 bp, Homo sapiens
ttataaaactttaatattctgcagtattattctagaatatttggggatcttattctagaaattatggaatcttattctagaatgttctgaaatattctggtatcttattctgggatattctggcgkcttattctagaatattatggggtcttgttctagaatattctggattattctgagatcttattctaagatagtctagaaaactaggactttagctgctttgacttgctgtcttgagttgggtttccttggaatcagacatggtgataaagatgtgagaggaagtagttcactggggagctgatcctagtaagcactaggaggcacatgggaaagtgagattgtgaataccagctgcgttaataagcgggtgactgctgggaaaaccgggattctgtccactggaaacctctgggcaatgtgttgagcatacctcagagtggtcctgttggaagggtgagggagctagggtacttatgcaccagctcccattcatcactggatgagagatgtgatgaggagcactaactatccccaacatcagctgccaccctttgagctggttgagttgactgattctcagagacttgtggtcagaagccagcagaaaatgtgggagcagttgactgctgaggggtaggagagggtagggcactggcagtgtttactgcacttccagaatgcccccaccttagaattttggagtccaagaaactttgatctaagaattctaatgttttggcttctttgatggatcaaacctagactatgaggtctttagtttggaaagacttaaaaaaaaaaaaaagacaactgaataattttcccatacctcttgagtccacttccctctaggcagttcagctttatccagaacaactctatatcgataaattgctgctgtaaagtgtaaggtatcaagcaggggctcccgaacgtggctttttagcagcaccagaataataacctggggaattctttaaaaatcagattccctatcctttcttctggagactctgaaaatctgggcatgggaacccttggtgaaggaccatttccaaatcttaaacctcagatctgcctcttctgaggggtgcttgagatgagccaggcttaagtttatactagacaacaagaattagcagagacaaaagaatgca

SEQ ID NO: 19618 - DNA, 625 bp, Homo sapiens
cctaacaggccacggaccagtactggattggggacccctgctctaactgatgcaacacctacagcccacctacaccaagtacaaggctccatttggtctgcatatagaatctctgggatgctagggtgtgcttcactcattctgagttgattcctaggttcttggactaaagtgggcaagtgttatgaagggaactaacagagcaaacagtggaaggaccacattcatgtggatcacgctttccacattaggaccaatttcactgcccattctacttgtttctagttttcctcttttaatttgagcagtgtcacaagcgcacatagctaacaatgttttttttctcttccaaattctaataataaaattgttattggcttttgatcttaatcattaaaataaaaataaaatgtgcaaggaaacttgcagyaagtttccttgttgtttcatgggtggattttttttcttaggaaatcctcatattttaggctataccctcaatttgtaatctggaggtcagattacaatttaattcttcttgaatttcattgatgataaaatcaccagtaaaaatgattgagccctagccttcttctcagcaccatgcatttatagagataaatga

SEQ ID NO: 19619 - DNA, 574 bp, Homo sapiens
tgcaggcttcctcarcacagggaaggtcactcatcacccacaggcccttgatcgttatccaccctttgatgctgtcagattccagaacacgctgcactagtctcttccttcatagggagagagggaaggtgttatgagaaaatctctcatcaatctgacctagctccccaaaaagatgtaacttttaaaatgtcagatggaaatatttaaaaagtgttacatgcctgtatagttttagtattttacttaaagggaatgtggctgtctttactggctacaaccagtttaattcaagaagggctgctggtcatcaggggaacaagcaaggtttggtgctgcccagagtctccagctaatacacaatatggacatacccttccagggcagcgagaagagagtgggtccttgtgcagtgcagctgacatccaccaactaaggcttctggaagcatgtggagactcacagggagtgggcagggtctcagcatctggctagcagtgaaagaccctgagaagaaggtgctttccgtgtggattggctcactgttcttgcccagtaatgttccaggcctttg

SEQ ID NO: 19620 - DNA, 574 bp, Homo sapiens
tgcaggcttcctcagcacagggaaggtcactcatcacccacaggcccttgatcgttatccaccytttgatgctgtcagattccagaacacgctgcactagtctcttccttcatagggagagagggaaggtgttatgagaaaatctctcatcaatctgacctagctccccaaaaagatgtaacttttaaaatgtcagatggaaatatttaaaaagtgttacatgcctgtatagttttagtattttacttaaagggaatgtggctgtctttactggctacaaccagtttaattcaagaagggctgctggtcatcaggggaacaagcaaggtttggtgctgcccagagtctccagctaatacacaatatggacatacccttccagggcagcgagaagagagtgggtccttgtgcagtgcagctgacatccaccaactaaggcttctggaagcatgtggagactcacagggagtgggcagggtctcagcatctggctagcagtgaaagaccctgagaagaaggtgctttccgtgtggattggctcactgttcttgcccagtaatgttccaggcctttg

SEQ ID NO: 19621 - DNA, 574 bp, Homo sapiens
tgcaggcttcctcagcacagggaaggtcactcatcacccacaggcccttgatcgttatccaccctttgatgctgtcagattccagaacacgctgcactagtctcttccttcatagggagagagggaaggtgttatgagaaaatctctcatcaatctgacctagctccccaaaaagatgtaacttttaaaatgtcagatggaaatatttaaaaagtgttacatrcctgtatagttttagtattttacttaaagggaatgtggctgtctttactggctacaaccagtttaattcaagaagggctgctggtcatcaggggaacaagcaaggtttggtgctgcccagagtctccagctaatacacaatatggacatacccttccagggcagcgagaagagagtgggtccttgtgcagtgcagctgacatccaccaactaaggcttctggaagcatgtggagactcacagggagtgggcagggtctcagcatctggctagcagtgaaagaccctgagaagaaggtgctttccgtgtggattggctcactgttcttgcccagtaatgttccaggcctttg

SEQ ID NO: 19622 - DNA, 574 bp, Homo sapiens
tgcaggcttcctcagcacagggaaggtcactcatcacccacaggcccttgatcgttatccaccctttgatgctgtcagattccagaacacgctgcactagtctcttccttcatagggagagagggaaggtgttatgagaaaatctctcatcaatctgacctagctccccaaaaagatgtaacttttaaaatgtcagatggaaatatttaaaaagtgttacatgcctgtatagttttagtattttacttaaagggaatgtggctgtctttactggctacaaccagtttaattcaagaagggctgctggtcatcaggggaacaagcaaggtttggtgctgcccagagtctccagctaatacacaatatggacatmcccttccagggcagcgagaagagagtgggtccttgtgcagtgcagctgacatccaccaactaaggcttctggaagcatgtggagactcacagggagtgggcagggtctcagcatctggctagcagtgaaagaccctgagaagaaggtgctttccgtgtggattggctcactgttcttgcccagtaatgttccaggcctttg

SEQ ID NO: 19623 - DNA, 574 bp, Homo sapiens
tgcaggcttcctcagcacagggaaggtcactcatcacccacaggcccttgatcgttatccaccctttgatgctgtcagattccagaacacgctgcactagtctcttccttcatagggagagagggaaggtgttatgagaaaatctctcatcaatctgacctagctccccaaaaagatgtaacttttaaaatgtcagatggaaatatttaaaaagtgttacatgcctgtatagttttagtattttacttaaagggaatgtggctgtctttactggctacaaccagtttaattcaagaagggctgctggtcatcaggggaacaagcaaggtttggtgctgcccagagtctccagctaatacacaatatggacatacccttccagggcagcgagaagagagtgggtccttgtgcagtgcagctgacatccaccaactaaggcttctggaagcatgtggagactcacagggagtgggcagggtctcagcatctggctagcrgtgaaagaccctgagaagaaggtgctttccgtgtggattggctcactgttcttgcccagtaatgttccaggcctttg

SEQ ID NO: 19624 - DNA, 522 bp, Homo sapiens
caaaamataaaagatgagctgggtgtggtgatgcataactgtggtcccagctacttgggaggctgagggggaagaatcctttgagctgggaggtcaaggctgcactgagctgagatcccaccactacactccaggctgggtgacagagcaagaccctgtcagaaagagtgagagagggagagagagaaagagagagagaatgagagaagggatgcagggaaagaagacaagaaagaaagaagggagagagagggggaaagaaagaaagaagggagggagagagggaaagaaggaaagaagaaagagagagaaagagaaagcaagcttaaataatgaaaagaaaacaaatagaacctgttctagggatgtcccatgaatgttcccaacaaacttatttgtaggaactgaaaatgtgggcatgtaggcttgtgacactcccattcccattgttttagaaccttgagtaatcagtaatttcccccaatggtaggaggggttcactttcaggttcctccacactca

SEQ ID NO: 19625 - DNA, 922 bp, Homo sapiens
gtccaacatggtaaaccccaactctactaaaaatactaaaattagctgggcatggtggtgggctcctgtaatcccagctacttgtgaggttgaggcaggagaatcatttgaacccaggaagcagaggttgcagtgaggtgacatcacaccactgcactctagcctgggcgacagagggagacttkgtctcaaaaaaaaaaacaaaaaaatgtggaagtgggtaggatccaaggggaaaacagagtgaagaaaagtcagagagagggacaagaagcagggaggggaggagctgctatccaggatgtggagtttaaattcagaaatgagttcttaaattctcagtctcacctctattttcccacaggaggtggaaacttcaagtgctggatttacaggatgtctgtgagaacttctggatggtttggtctgaagctatggcccgtgggtccttcctcaatgccaagaggaacaaaacaccagtgcaggactgtccaaggatgagaggacagcagcccttgactgtgttcgtagaactttggctcaagaacaggactctggatgaatacctcacctacctccttctatgggtcaagcagaggaaagatttactacacctgtgctgtaagaagctgaaaattttgggaatgcccttccgcaatatcagaagcatcctgaaaatggtgaacctagactgtatccaggaggtggaagtgaattgcaagtgggtactgcccatcctgacacagtttaccccatacctgggccacatgaggaatcttcagaagctcgttctctcccacatggatgtctctcgctacgtttccccagagcagaagaaggagattgttaccaagttcaccactcagttcctcaagctgcactgcctccaaaagctttatatgaactctgtttctttcctcga

SEQ ID NO: 19626 - DNA, 922 bp, Homo sapiens
gtccaacatggtaaaccccaactctactaaaaatactaaaattagctgggcatggtggtgggctcctgtaatcccagctacttgtgaggttgaggcaggagaatcatttgaacccaggaagcagaggttgcagtgaggtgacatcacaccactgcactctagcctgggcgacagagggagactttgtctcaaaaaaaaaaacaaaaaaatgtggaagtgggtaggatccaaggggaraacagagtgaagaaaagtcagagagagggacaagaagcagggaggggaggagctgctatccaggatgtggagtttaaattcagaaatgagttcttaaattctcagtctcacctctattttcccacaggaggtggaaacttcaagtgctggatttacaggatgtctgtgagaacttctggatggtttggtctgaagctatggcccgtgggtccttcctcaatgccaagaggaacaaaacaccagtgcaggactgtccaaggatgagaggacagcagcccttgactgtgttcgtagaactttggctcaagaacaggactctggatgaatacctcacctacctccttctatgggtcaagcagaggaaagatttactacacctgtgctgtaagaagctgaaaattttgggaatgcccttccgcaatatcagaagcatcctgaaaatggtgaacctagactgtatccaggaggtggaagtgaattgcaagtgggtactgcccatcctgacacagtttaccccatacctgggccacatgaggaatcttcagaagctcgttctctcccacatggatgtctctcgctacgtttccccagagcagaagaaggagattgttaccaagttcaccactcagttcctcaagctgcactgcctccaaaagctttatatgaactctgtttctttcctcga

SEQ ID NO: 19627 - DNA, 922 bp, Homo sapiens
gtccaacatggtaaaccccaactctactaaaaatactaaaattagctgggcatggtggtgggctcctgtaatcccagctacttgtgaggttgaggcaggagaatcatttgaacccaggaagcagaggttgcagtgaggtgacatcacaccactgcactctagcctgggcgacagagggagactttgtctcaaaaaaaaaaacaaaaaaatgtggaagtgggtaggatccaaggggaaaacagagtgaagaaaagtcagagagagggacaasaagcagggaggggaggagctgctatccaggatgtggagtttaaattcagaaatgagttcttaaattctcagtctcacctctattttcccacaggaggtggaaacttcaagtgctggatttacaggatgtctgtgagaacttctggatggtttggtctgaagctatggcccgtgggtccttcctcaatgccaagaggaacaaaacaccagtgcaggactgtccaaggatgagaggacagcagcccttgactgtgttcgtagaactttggctcaagaacaggactctggatgaatacctcacctacctccttctatgggtcaagcagaggaaagatttactacacctgtgctgtaagaagctgaaaattttgggaatgcccttccgcaatatcagaagcatcctgaaaatggtgaacctagactgtatccaggaggtggaagtgaattgcaagtgggtactgcccatcctgacacagtttaccccatacctgggccacatgaggaatcttcagaagctcgttctctcccacatggatgtctctcgctacgtttccccagagcagaagaaggagattgttaccaagttcaccactcagttcctcaagctgcactgcctccaaaagctttatatgaactctgtttctttcctcga

SEQ ID NO: 19628 - DNA, 922 bp, Homo sapiens
gtccaacatggtaaaccccaactctactaaaaatactaaaattagctgggcatggtggtgggctcctgtaatcccagctacttgtgaggttgaggcaggagaatcatttgaacccaggaagcagaggttgcagtgaggtgacatcacaccactgcactctagcctgggcgacagagggagactttgtctcaaaaaaaaaaacaaaaaaatgtggaagtgggtaggatccaaggggaaaacagagtgaagaaaagtcagagagagggacaagaagcagggaggggaggagctgctatccaggatgtggagtttaaattcagaaatgagttcttaaattctcagtctcacctctattttcccacaggaggtggaaacttcaagtgctggatttacaggatgtctgtgagaacttctggatggtttggtctgaagctatggcccgtgggtscttcctcaatgccaagaggaacaaaacaccagtgcaggactgtccaaggatgagaggacagcagcccttgactgtgttcgtagaactttggctcaagaacaggactctggatgaatacctcacctacctccttctatgggtcaagcagaggaaagatttactacacctgtgctgtaagaagctgaaaattttgggaatgcccttccgcaatatcagaagcatcctgaaaatggtgaacctagactgtatccaggaggtggaagtgaattgcaagtgggtactgcccatcctgacacagtttaccccatacctgggccacatgaggaatcttcagaagctcgttctctcccacatggatgtctctcgctacgtttccccagagcagaagaaggagattgttaccaagttcaccactcagttcctcaagctgcactgcctccaaaagctttatatgaactctgtttctttcctcga

SEQ ID NO: 19629 - DNA, 1235 bp, Homo sapiens
tctcctcatgcctaatgggggtcatgttgatatttattgacttcactaaatgaaacatgttcaattttcatttttcttgttgttgttactggtttggttacatatagtgccaagatcttagctctaatcaattatagctcctgcctattcattaatgatctctaaggaaaatccaaattcttaggttgtactattaattcataatgagtattgtctgaagtaagggtgcctttgattaggttaagctagaatcttttcttttataatccaagaagattttcattaaatgattgtttcagtgtgatatggtctgtgttattgctatcatatttggcttgaatgtgatttggctcacaagaccacaaatgttttccttttaaaaaagatttatttattttattttgaatgtgctctattttttgagcagtttcaggtttagaaaaaaattgtgcaggaagtatagagagtttccatatatcccctctgcttccaccctctagtttccagtattattaacattttgcattcctgtggtatatttgttataattgatgaaccaatattgacacattaatatcaactgagtatacagtttacattaggtttcactcttagtattgaacataattcaggtttggacaaatgcataaagtcaggtatctaccattacagtataatacagaacagttttgttgccctaaaattattctgcattccacctattcattccctactcccaacaccaagcctctggcaactactgaactttttactgtcttcatagtttatctttgtccagaatgtctcacaattcagatcataccagtatgtagccttttcagactgtcttctttcacttagcaatatgcatttaaggttcctcctcatcttttcatgtcttaatagctcatttcttttaagtctgaataatacacagctatattctatgggggtcatacaaagaattaataaggaacatctgaaaggggagaaaaccgcaaataggacttcaccattgtggtctcaaaactgaacacacaccaatgtgaaggtggacagagacacaaaatccccacaaccatagaaggagagtgaaatcgatgagcagacttagaaagtgcagagcaaaacaaaacagtgcagactgaaaaatagagaagccgtcaataggtcagaggctgagagatgctgagttaaagagatatgrcagactactgagatggagaaattctgct

SEQ ID NO: 19630 - DNA, 1106 bp, Homo sapiens
ctgccattgtctttatatactttggatgggcaaaaaaatgccactactggtggtgcaggaactaatgccttaaaaaagtgacaacataaggatatctagcatggcagtagagtgaagattggctctatgttctaactcaaggaagcttgagttacggtccatgggaatattgcttaacccctcmtgtttctcattgcttaacctcatgctcctcaagtgtgattggatgtcagctatatagttcataggattatcataagaattaaatgagatagtgcatgaatagtgccttgctcagtacttggcagaaagaataggagttcaatagaaactgctctgttttgatgatgattaagatgaaatgtgcctggctaactccatattccagagttactctgccattgattctgtatgagtaaatgattggtaatcattgttcataattttttctatgggatacttatttgtttgaataagggccatggaatttggaagctgaaatcaaaaccaatacacttaaaatgaaagaaaatcaaacaacgattgagtaatctatctaacccatcactgagttttgtttggtaacaatgataggacataaagagcatacttaaattgcatttcaagtcatggcaaataattcttggtgttttagagagcagatccccttcccaaagacttctgagcatgtggctgaaatttcttaaacattcctcaaatgaggtacaaattatggccatcctatttctcacctagtgactgtgttgtcctggcaagtctttagtctacattcgctatttcacttcatcaaataaaataaataatattgttagactctaatgaatgaagaatatacaatgtggcagctacttagtacacattcaatagcagtaaacttcacctttcctgtcacctcaaaataatatccaataacaaaaacgttttcttgggtggggtcaagatggccaactacaaacagtggtgatcagaggctccaactgaaaagaaccacagttagcatgtgaatccttcaccagcaaccagggtatccagattctctcatcagaactgactaggcagctggcgtgacccacggagaggaagga

SEQ ID NO: 19631 - DNA, 534 bp, Homo sapiens
tttcccaacagaatttgggccaccaaatattttcacgtacattatcccattgattctcacaacaacactgtcaaatagtaaagggattcttcttttcttctccatgaagaaactagactgagaaaggttacgtaactagctcaagatcataaagcaaagctgagtttgagacccaggtgggttcccaaaactaggactggagctctttcaaccaaataatgctcaataggaaaaggagtcaaggacaarctccaactggtaaaacaatctggatgagttaagagttcaaaagttgagaaacaatgttgttaaaggaaactaaacaggtttcttggataaaatgctaagttataagaagctctggctaaagagcaagaagatggatcagctgacttctcagaccactactattgttacttttctagaatatttttatttactctcctcttaaagtctcctttatttcctcctcctgatatgattttttttttaatgacaactccaaaagaaaggatgaataaaaaaaaaatttgg

SEQ ID NO: 19632 - DNA, 499 bp, Homo sapiens
atatgaagctagtcagtctccaagttttctactaccagagtatcacgtgggtaggaccactagttaaggtccaggatctttgtccttggggttaaaggcactcagaggtgagatcatctctgaaaataatctcacaacaaaatgtacatgccttataaaatatgtgaagttgttatactggtttttgggatttcaaatacaattatcttcctcttcaaatgtaaatggatagggtataactgtgcaagcacacatgcactagatcttatccaaaatgttatgtattgaattctcatagaagaaaaaagaatgagctcaggccggggggcagttaggaattggtgactaaaaaagaaagttagaatayaagcaacagtgtgaacaaaatatttatggaatatgccctcattttcattttggaagagaccaccaatctatctaacttagcagcactggagccaataattactatgatattaagaacacctcacaatcttta

SEQ ID NO: 19633 - DNA, 520 bp, Homo sapiens
ccagttttaaagatgagaaaactgagactcagataggtagaacaattaggccgaagccactcagcctgcaaatggaggagttgagattcaaagtgaagtctgatagactattmttctactacccaagctatctcttctctatgacctcatctcaagacctcagctatttgtcaaacacctgttatgtgagtaacctctgcccggctccacactgttccacagtcagtttttcaggtatttattttagtggtcaaaagtgacctcatctctgctgattgatctctgaagctgctggaatgaggcaagaatgtgtgatgtgtgcaattcctttggctgcttcttgtccctacagcatcttactctgctccctgagcgagggcttttgggttttgaaaggatctggaactttttttcagaaacaagtctctgctttgtcaggtagttccaaccccatctgtaggatcttcctgaaggctgagcacaccaacatccagctgttggaaacaacagcttcctcaat

SEQ ID NO: 19634 - DNA, 582 bp, Homo sapiens
agggctgatttcacagtgaccatctcatcatcataaagactccgtgaatgccctttaccctctgatgacctgttccatttaggcagcagactactctccaacctacataaaacaagaggccagagatacaattaccaccaagccccatacttaatcaggacatctcaaaacccattgagtgttgtgtttcccatctccctccagcctactctccactgccctggaggccagtgtgtttgatataggtgaaatcatttatgagcagccttgtaaaaccagcaaacaaatcactacagttcagcctgttgcctgagcagatgaatgaaacccagttccaggtggtgacgctggagaggtttatgagctgattggagtcatacccttctcccctcaattgggycttctggtttctcaaacttaccacctcattttcacaagacagagaccgtagatgaaagatgaagctctttagggagtttcactgttaacatctggcagcgatcacacctagagatcatttatcttattaaaacaataggcaagagtcatcaaagtggaaaaaaaggtatgcattgaaataac

SEQ ID NO: 19635 - DNA, 461 bp, Homo sapiens
ctatagatacacacctatgataactacacaactatgataaaggttaatttataaattaggcacagtaagagattaacaacaataactaaataaaacagaacaattataacaatatactataaaaaagttatatgaatgtggcctctctcaaaatatcttattgtactgtacttatctatttctggacagttgactgtgtgtaactgaaagcaaaactgtggataagaaaggacgtttgtatttcttgtcatttccttgctttttttccctaagaaagcaatttccttccactatgtgtagtttggaattgaattttttgttttgcttttttaaaaaattttaacaactgtttcaagcctttgtgcctcttgtttatgggtgtaagttctggaactggagggtaagaggcagagaacaacaaggctagtcttcmgtattctgacaaagacgacctggacaca

SEQ ID NO: 19636 - DNA, 506 bp, Homo sapiens
aatgttggcttttgcttgtcactgtgcctcatagtaccctatgtaagaatgctgttttctaggcaacatgatcacataatttcaaatccaatcctgcccaatagaactttctgcggtgatggaaacatttctgacaatccaacatggcagccatgaaccacacaggactatggaaagaattaaatttttatttatttaattttaattaatttatacttaaatttaaatatctgcatgtgactaccayaatgagaagctcagttctcacctttggtaataactttccaactttcaacagtatagagaaaatccaaggcatttttcagcataacttcctactttcctgtagcctgtggtgctaagtcttgaacagtttcacagaagtaggggtgaattttggtgaattaaatttgtttttccaaaattaaagaagatggctaacaatgatctacatctattatctctaaaacatatattatgttttcttcagaagcatatttaaaggt

SEQ ID NO: 19637 - DNA, 634 bp, Homo sapiens
tgcccaaatctcatgttgaaatgcaattcccaatgttggaggtgggtgctggtgcaggtatttaggccatgagtgtaaatccctaatgtcttggggctgtcctcataatactgagtgagttcttttaagatctggttgttttagtgtgttgccacccccaaccaccaccatccttgctctattgctcctgctcccaccatgtgaaatgcctgttcccctttcaccttccaccatgattgtgagcttctgagactgcccagaggcaaatgytggtcctgtgctttctgtatagcctgtagaactgtgagccaattaaagctcctttcttataaattacctagtctcaggtattcccttatagtgatgcaagaacagcctagtatagtttttaaaatgctattggaaattatttcttatccaactaaaacactattttatataaaatagatcatgatgatatggtttggctgtgtccccacccaaatctcatcttgaattgtagctcgcataactcccaagtgttatgggagggacccagtggaagataactgaaacatgggggtggtttcccccatactagtctcatggtagtgaataagtctcacgaaatctgattattttataaggggtttct

SEQ ID NO: 19638 - DNA, 634 bp, Homo sapiens
tgcccaaatctcatgttgaaatgcaattcccaatgttggaggtgggtgctggtgcaggtatttaggccatgagtgtaaatccctaatgtcttggggctgtcctcataatactgagtgagttcttttaagatctggttgttttagtgtgttgccacccccaaccaccaccatccttgctctattgctcctgctcccaccatgtgaaatgcctgttcccctttcaccttccaccatgattgtgagcttctgagactgcccagaggcaaatgttggtcctrtgctttctgtatagcctgtagaactgtgagccaattaaagctcctttcttataaattacctagtctcaggtattcccttatagtgatgcaagaacagcctagtatagtttttaaaatgctattggaaattatttcttatccaactaaaacactattttatataaaatagatcatgatgatatggtttggctgtgtccccacccaaatctcatcttgaattgtagctcgcataactcccaagtgttatgggagggacccagtggaagataactgaaacatgggggtggtttcccccatactagtctcatggtagtgaataagtctcacgaaatctgattattttataaggggtttct

SEQ ID NO: 19639 - DNA, 623 bp, Homo sapiens
tccaaactagctgacatccctaaagttgctaaaatggttacttggtctctaagacctctgggctttcctggtttgcaaaggcttatagagtgtgaagaaacatagcatgccctctgttgtgctgttcagcctccttttgttatcacagccatgcccccaaccctaccacacagccctcaccactgaagggttgctgccagcaaccccctgacctttttttttttagacaagttctcactgtgtcacctatgctggagtgtagtggtgtcatctcggctcaccayaatctctgcctcctgggttcaagcgatcctcatgcctcagcctcccaagtagctgggacaacaggcgtgcaccaataggcacggctgatttttgtatgtttttgtagagatgggatttcaccatgttggccaggctggtcttgaactcctgacctcaagtgatccacctgcctctgcctcccaaaatgcgtgaaccagtgtaagccaccacacccggcctgtaccctttccttgtaggtgcttttcccggcacctcccagcccagggacctcaaaagaaagcaattgtttcccctagaaatttgaggaaatgaaaatctcctgactatgtaagcagctt

SEQ ID NO: 19640 - DNA, 623 bp, Homo sapiens
tccaaactagctgacatccctaaagttgctaaaatggttacttggtctctaagacctctgggctttcctggtttgcaaaggcttatagagtgtgaagaaacatagcatgccctctgttgtgctgttcagcctccttttgttatcacagccatgcccccaaccctaccacacagccctcaccactgaagggttgctgccagcaaccccctgacctttttttttttagacaagttctcactgtgtcacctatgctggagtgtagtggtgtcatctcggctcaccacaatctctgcctccygggttcaagcgatcctcatgcctcagcctcccaagtagctgggacaacaggcgtgcaccaataggcacggctgatttttgtatgtttttgtagagatgggatttcaccatgttggccaggctggtcttgaactcctgacctcaagtgatccacctgcctctgcctcccaaaatgcgtgaaccagtgtaagccaccacacccggcctgtaccctttccttgtaggtgcttttcccggcacctcccagcccagggacctcaaaagaaagcaattgtttcccctagaaatttgaggaaatgaaaatctcctgactatgtaagcagctt

SEQ ID NO: 19641 - DNA, 1635 bp, Homo sapiens
tgtgtatattttctattacattatttcaaagacagacgtgtttttgaatcatggtgggaaaaaaactcctcacattcaacctctatgctagttttcttatcttaagggggggtggttagagaaatgtattatatatgtattaatatttgcctccctgttttttaattctaaataggtgacatatttaatataactatgcttgcttttgaaataatttgcctaccattctttaaaatgagtgaattttaaaagatgtatagtgatttttatgtgaagatgaattaaagagttaagtgacatagaccaccgtagcattttccctatggatctgtaaaaacagcccaaaagtcttgtgatttttttttttttttgagccgtagtcttcctcttgctctgttgcccaggctggagtgcagtggtgccatctcagctcactgcaacctctgcctcctaggatcaagtgattctcccacctcagcttcatgagtagctgggactacaggtgtgtgccaccatgcctggctaatttttgtatttttggtagagatggggtttcaccatgtcrgccaggctggtctcgaacttctgacctcaagtgatctacccacctcagcctctcaaagtgctggaaatacaggcatgagccatggttcccggcctcttgtgatatccttatattcagttaaccaaaccaaatcaagtcaaataacaaaccccaaaccttttatagaccttgagttatttgcagatctttggggttatttacctgtcttttgagctttaatcttttacctctttgaagatacaggaagggatctttatttcttctttgataaaataaccttcagagtgacttgagatacggaattgcttctttgtatatcattgtgtggtatttgagatcacatctcaaaatttaatgagacctgctcctcaggcagttttaagattaaggatcaaaaagggagccactggaaaggtgtgagtggctggtaatctatgttagaacagagactttggtgcagaggttggccatgttcatatgtggagtaagttttcatgaaacaggaggaagccttttcttatttgaaactaagaaactgcaaaataaaagtaataaaataccccgaagcaaatagactttaaaacaacatttggtcctaagttgtatatgaccaatttcttaaagtgattgttatattgccagttttgaaattatattatcttttaaaatttaaaatgtaaatattgtctcaggggtgggaggatgaatctccatcttatttagtgttaaaggctcctggacttaccctaaagcccagctttttcggtggggggctcataaataaaactgtgtgtgttctagtttactctgttacctcatctagttcctttaggtgattagaaaatgccgtattagcaaatataaaaaggtttacttttgtgtttttacatgtgaaatcaatggccagttctataatgttaacatatcagacccttaattatatattaactcccattttgatagtttgtatagaaaaatcagagttgacttgaattatttgaacttgcatacgctttttcaagatacgtaacgtgttgtaaattagaagagtgttggtgttttcggaacac

SEQ ID NO: 19642 - DNA, 563 bp, Homo sapiens
ctggttcagcagcacctctggccctagggttttggaaaagaggttgtgaaactctttgacatgtgtttacaggataaggttgatgaaactgactgataagaaatggaggcaagatctatggaagaaaagaacatttctggaaagactcaaaagttaatgatgacactgcctcattaacactgaagggaagtagaactttaggaggggtcagaaatattcattagataggcatgattcattgaaaaggatgcatcttgaatttttgaagtattgcttgtatgtgatcttggattgaattgtagaccagaaaaagggggcarttgcagaaatttgaaaaagacctatagattagttcatagatttgcatctatgtgaattgtctggttttcatcattgtactctggttatgtaagatggtaatatttgaggaagttggatgaagggaacatgagaactctgtgtactcttttcttttttttttaaccacttcttttataagtctaaaattatttcaagataaaactttgaaaaataagaaaaagaggtgtttgtcatatcaggga

SEQ ID NO: 19643 - DNA, 563 bp, Homo sapiens
ctggttcagcagcacctctggccctagggttttggaaaagaggttgtgaaactctttgacatgtgtttacaggataaggttgatgaaactgactgataagaaatggaggcaagatctatggaagaaaagaacatttctggaaagactcaaaagttaatgatgacactgcctcattaacactgaagggaagtagaactttaggaggggtcagaaatattcattagataggcatgattcattgaaaaggatgcatcttgaatttttgaagtattgcttgtatgtgatcttggattgaattgtagaccagaaaaagggggcaattgcagaaatttgaaaaagacctatagattagttcatagatttgcatctatgtgaattstctggttttcatcattgtactctggttatgtaagatggtaatatttgaggaagttggatgaagggaacatgagaactctgtgtactcttttcttttttttttaaccacttcttttataagtctaaaattatttcaagataaaactttgaaaaataagaaaaagaggtgtttgtcatatcaggga

SEQ ID NO: 19644 - DNA, 561 bp, Homo sapiens
attactgctgtcaacactagattgaataagaaagcgcataccctagacagatacttgcaacataaatggtctattgatttcacaagaactagaaaatgaggccaccgtgtaatctagcagaagaatggatctgtgaatagagtgggtcctgacattgcacaacagttttcaaaagcgcccccctattgatctttttagaagaatcttcagataaactgattttagcttctgattttcctcaccatcaagtgtttacagaaacttcaatgaagcctttgcacttgtgtgtgttcaatggtttgcttttcctacatagaatctagtttggaagttatattggctgttacagaccttgtttgctcctgagctatcatgatatttccacttagcttaatatgaatgttttagaagtttcccactatggaaagttstatttgacatatgaaagttcaacggtcaatttcatagtcagctccacggcaagaaataaataagacaatggattacagagtatagccttgggacatgggaaattttttagaagatggatgagtcatatta

SEQ ID NO: 19645 - DNA, 545 bp, Homo sapiens
ttattttctaaaagtttcatgtgctattattttttgtttcttcaattytattacaaaaatttatatgataaaattttatcaactcgcacacatactagacgtttgactgaagaatttaccaacaatactcagcaaaaatccagtatctattacacacaagctccagatttatactttttttacctgaaaaatataagaaaggctaaattccctaaactttcctcctctcttaaatgcttgtatgtggggctttaattatagtcaataccaaaggtaaagctaaaggagtgtcttgtttttttatacattgtgtattttcccctgtttctactgtttaaagaaaaactgcatttatatagtcttgcacaaagtttagtagcaaatgttttccttttggttcttatattaggatgcagttccctgtatgggaataatatttatgtgaatcatgtctatatacactatacacacatatacatatatctttatatatgaatctatatatacactactcatatcataattttctcctttgtcaaaggctt

SEQ ID NO: 19646 - DNA, 545 bp, Homo sapiens
ttattttctaaaagtttcatgtgctattattttttgtttcttcaattctattacaaaaatttatatgataaaattttatcaactcgcacacatactmgacgtttgactgaagaatttaccaacaatactcagcaaaaatccagtatctattacacacaagctccagatttatactttttttacctgaaaaatataagaaaggctaaattccctaaactttcctcctctcttaaatgcttgtatgtggggctttaattatagtcaataccaaaggtaaagctaaaggagtgtcttgtttttttatacattgtgtattttcccctgtttctactgtttaaagaaaaactgcatttatatagtcttgcacaaagtttagtagcaaatgttttccttttggttcttatattaggatgcagttccctgtatgggaataatatttatgtgaatcatgtctatatacactatacacacatatacatatatctttatatatgaatctatatatacactactcatatcataattttctcctttgtcaaaggctt

SEQ ID NO: 19647 - DNA, 545 bp, Homo sapiens
ttattttctaaaagtttcatgtgctattattttttgtttcttcaattctattacaaaaatttatatgataaaattttatcaactcgcacacatactagacgtttgactgaagaatttaccaacaatactcagcaaaaatccagtatctattacacacaagctccagatttatactttttttacctgaaaaatataagaaaggctaaattccctaaactttcctcctctcttaaatgcttgtatgtggggctttaattatagtcaataccaaaggtaaagctaaaggagtgtcttgtttttttatacattgtgtattttcccmtgtttctactgtttaaagaaaaactgcatttatatagtcttgcacaaagtttagtagcaaatgttttccttttggttcttatattaggatgcagttccctgtatgggaataatatttatgtgaatcatgtctatatacactatacacacatatacatatatctttatatatgaatctatatatacactactcatatcataattttctcctttgtcaaaggctt

SEQ ID NO: 19648 - DNA, 570 bp, Homo sapiens
ctcaatcgttcctaggttttggttcctatagtaaattaatgaatagtgtttgcattacacagcatttccatcataatgcacactgttggatatatatgtgctatatacataaaatatagtacaaaataaaaattatatacatatattcattgtataattcctaaaatcttaaaaaattgaaacattagttttgtctttaaggcygtcaccttatgtttattttttaaacaccttatgtttatttcatacactcttgcttggtggtccatatgacagccggaagcgttctgaagggagagttagtgaatatcgacttgactggattggtttcagtaagaacatctggcttttacagaatatcatttgagggaagggaaatctagggcagaggtaacaataaattgcatttgtatagggcttgaagcttctaaagcaacatctcattcattgattctcagtttctcacctagccttctgtgaagatggtgttccctccattttataggtgtggaagacggagggtcacactgggatgcattgttcgtggtgaaactttgattctgtctcctg

SEQ ID NO: 19649 - DNA, 529 bp, Homo sapiens
tgtgcctttaaacaaccaaatacctgacgtttattaatatcctgtggggctcttctatcagaagcacattctcttggcccggttmataagggaaatgtctgtgtatgcgcatctggcagctaagattaaggtttacagtggtataacctcaccttcacttttaagaaattaagtttaaaaaaaatgcagatctgtctttcatagcagtggagctcaacaacacatagagcatgagagtcacattttttgtgtgaatattttcgaatgagccttttttggtatgtggacgggtggctagttacattcagttcaatccttttaacatttaattatggaacaaaatcttttttcaaagtgtagagaaaagcatataagggcatttctgatgtagcagaggaatccaataaaaaatatgactttgtgtctctaaagtggtacagctttgaaattaacacatctgtataatttcaaaagtatgatctctttagatctttttctttaatttcatagtcttaatttttgcaaattt

SEQ ID NO: 19650 - DNA, 1283 bp, Homo sapiens
gggacatggatgaagctggaaaccatcattctcagcaaactatcacaaggacaaaaaaccaaacaccgcatgttctcactcayaggtgggaatttaacaatgagaacacttggacacaggaaggggaacatcacacactggggcctgttgtggggtgggggaggggggagggatagcattaggagatatacctaatgctaaatgacaagttaatgggtgcagcacaccaacacggcacatgtatacatatgtaacaaacctgcacgttgtgcacttgtaccctagaacttaaagtataatatatatatatatggacttgtcttggttgttatgcagtgagtagacctttgagagatgagggtttgccttccaccaggcataagatgatagtgttccatgttggtggtagcagtgtagggttaacactactgacaaaggccggctggtgaaaattaaatatgcaatgtctggaaagcacctggcacacagtagggtgtggtgaatgacaactattataatatagatccttttgcagggaaaaagatatcattttcacacttgttccaatcccaatgatctgtaggcagcctttattatgtgaaagacagaaacttctagaaaactggacatgtgttattcagattttctttgcacagcttcacatgcacagcttacatgagtaagaaaaacaaaaatacacaagactctctttctaaagaaaaatgtaaaataacacgatatgagcttccccttttagggagggagctggctttgattgattaattgctttgctatctggaattgtcttgctaagaataacaagtttcaaatcagattgaatttctacttcatgctcgtctttctaactccttaaacttctcgacatccaaggaggagaacagtaacaaccagacaaccaaacagtccgtttggccttggactttgtctttctctaagagagaattcacattaggacccctttgcttggtagtttcaggtttttgaaacattgttagataattatttaagtcataaacagtgacagtatgattataaatcttatcagcagtactaatcatgcttttttctatagaagcattttcttcagagccacaaaaagctcgttttacagtatccgcttctggaggagagtgatagttttactgatctccattcttactgtacagaattgtttaataaagtgatttctgttttcctgaaattaatcaaaataataagttcttggttttcttgatttttgacactgagaacttaatgaagtt

SEQ ID NO: 19651 - DNA, 573 bp, Homo sapiens
aattatttagataaaaatgctgagaatgaggtattcagaaggcatttctacttcacaaatatttctgctgattactgattcctagagtgtagtggggtttactaccaccgtgaatgtccaatccaaaatggaaaattcagcggggcgccatggctcacacctgtaatcccagcactttgggaggccragatgggcagatcatgaggtcaggagatcaagaccattctggccaacatggtgaaaccccatctccactaaaaatacaaaaattagctgggcttggcggcacgtgcctgtaatcccagctactcaggaggctgaggcaggagaatcacttgaacctgggaggcggaggttgcagtgagccaagatcgtgccactgcactccagcctggtgaaagagctagactccatgtcaaaaaaaaaaaaaaagaaaaaagaaaaagaaaaatggaaaattcggcggggcctggtggctcacgcctgtaatcccagcactttgggcagctgaggcaggcagatcacctgaggtcgggagttccggaccagcctgaccaacacggagaaacccca

SEQ ID NO: 19652 - DNA, 1325 bp, Homo sapiens
ataaagacatggtagctctgcctaacgtgatgcgactaacataatgtaactatcctgcgtacaactgaacatgcgcaaccctttttccagaattcagcttccaggatctcagcatttgggattttaatcttttgggattgtgatttttgagattttagacattagggattttgatcattctggatttcaacatttgggattatggcattcaggactgtgtcttttgggattatgatggtcaccacctaaaatcataagtttgatgtgttatttatatctttttctattatacattaaaataagtcagtaactattgaaatatttgtggactgtctagactcactctgcaccccatgggatccttgtaccacatgttgggaaatgattgtctcagggcctccagcatgtctgctcactcccatccccggcccttcctccccatcctgccgggattcctcaagtcccacattggaacacgaacacttagaagtaacaaagctcactctgtgccaagagcaacactaaagtataaatgcaattttattgataaaagagtacaatcaaagccaatatgatgtattggctaggaacagggagatgacctggattcaaatcttggtctcccacttgctctataagtcatttcaccttctcaggtagctcaggggacagctgtgaggattaaatcaattaatgtatgttcagggcttacaatgtctgacacatggtaaatactgatatatatatatatatatatatatatatatatatatatatttaattttttttcttttttttwaaaaaaaatgttctttattttttgagacagggtctagctctgttgcccaggctggagtgcagtggtgctatctcagctcactgcaacctctacctcctgggctcaagccatcctcccacctcaatcttctgagtagctgggactacagctgtgtgcaatcacacccggctaatttttgtatttttttttggtagagatggggttttgccatgttgcccaagctggtctctaattcctgggctcaagtgatccacctgcctcagcctcccaaagtgctaggattacaggtgtgagccaccatgtttggccagtaagtgctatataaatgttagatattattatagcttgtgagttttggcaatggaagttcaaaggaaaaagtaaccaatgagtgtactaagcatctttccctttaaaaaaaattggttggttagaaactcataggagtgtactcatacctactcaatcttttgttaagtactgcatgcatttatgatgttggagtattaggcttttatgaattagt

SEQ ID NO: 19653 - DNA, 544 bp, Homo sapiens
gttgtatactcatgtctgtattttcctctgcattgcctaagatagttgcttcagctstagccatcacacatgcattccagcaaatagagaggaagaaagaaacgagagggtatgtcccctctatttatattcatgtcatgatcgccctccagacactatgtaccattgctcaaaacttatttacatgggcacacctgcttcgaaggagctcagaaatgcaattttaattcgggacgaccagatgcccagctaaaaattgggaatttattagtaaataagataggcataatctatactaggagggaattaatattccctcctactttgcctcatctatactactatattataattgtattgactgaaataatatcttatcattttatagccccatagaaggtagtttttaatgtcttccatgtaatatgtactcaacaatttttagttgaatacacagcggaagatttttttacagcctttaaagtcacaaggtgttttgcccttcctagtattttgtgtgactcagcttaaattagctagttat

SEQ ID NO: 19654 - DNA, 544 bp, Homo sapiens
gttgtatactcatgtctgtattttcctctgcattgcctaagatagttgcttcagctctagccatcacacatgcattccagcaaatagagaggaagaaagaaacgagagggtatgtcccctctatttatattcatgtcatgatcgccctccagacactatgtaccattgctcaaaacttatttacatgggcacacctgcttcgaaggagctcagaaatgcaattttaattcgggacgaccagatgcscagctaaaaattgggaatttattagtaaataagataggcataatctatactaggagggaattaatattccctcctactttgcctcatctatactactatattataattgtattgactgaaataatatcttatcattttatagccccatagaaggtagtttttaatgtcttccatgtaatatgtactcaacaatttttagttgaatacacagcggaagatttttttacagcctttaaagtcacaaggtgttttgcccttcctagtattttgtgtgactcagcttaaattagctagttat

SEQ ID NO: 19655 - DNA, 515 bp, Homo sapiens
ttaggacttgccaatagcatttaaaacacaggaatttttggttcctcacataggtttaagcagatatatgcttgcctctyattagcctaattgtgaaattcctttgtcaccttaattattcctttttgattgttttttgctgagatcctgaaattctctctacttcccccagtaccttacgacccctcacataagagacacaacacaccatgatgctaagcagacctctgtagttcatgtattttcctaaaactattaatgtatcaaaacgtaattgtctctggtctgcaattatctttagcagtctactctctgctggtggtagaagttgatgacaggctaaaacttacaaatgaatctttcctatatgagaaatgtaaatctctaagtgagattaaatacaagtgtctttaaaagatactctgatatggctgattaaggagcattctttctagccaggtgcagtggctcacacctgtaatcccaacactttgggaggcttaggcaggtggatc

SEQ ID NO: 19656 - DNA, 515 bp, Homo sapiens
ttaggacttgccaatagcatttaaaacacaggaatttttggttcctcacataggtttaagcagatatatgcttgcctcttattagcctaawtgtgaaattcctttgtcaccttaattattcctttttgattgttttttgctgagatcctgaaattctctctacttcccccagtaccttacgacccctcacataagagacacaacacaccatgatgctaagcagacctctgtagttcatgtattttcctaaaactattaatgtatcaaaacgtaattgtctctggtctgcaattatctttagcagtctactctctgctggtggtagaagttgatgacaggctaaaacttacaaatgaatctttcctatatgagaaatgtaaatctctaagtgagattaaatacaagtgtctttaaaagatactctgatatggctgattaaggagcattctttctagccaggtgcagtggctcacacctgtaatcccaacactttgggaggcttaggcaggtggatc

SEQ ID NO: 19657 - DNA, 674 bp, Homo sapiens
accccttcgcacttcttaagtgtttactgagcatcaactctgtgtgaggcagctggctagatccacttagttggaaacagagaaccagtctcagacccctacagcaggatcagagtggcccaattgtatcaccattcaaagtgggacaaaggcaccgatcaaggaacacgatgggcagctggatctggaagggcagctctcctgggggtgtaatgcgctctggagcgtacttggattayaaagggaggtggagcctgggcttgagcccagtagcctgtgggtgaattccaacttccgcattggattagcaagtcactctatctcagtgcctcagtttcctaatatggaaaaggggccaaaagtaaccacacttcacagggctgcctccaggaggaaatgagattgcatctgaagcgaggggtgtggtatttgggtatttggtccgaggaaataattcagtaaacagagggcattattgttattttattggaactagagatagcagacaatgtcagcctatgtgtgtaattaccccacattctagcaacaacagtacccagagctaaagttgaagaagtcctacgaggcaccagctatgggacatatgttatctctagtccgcagacccatcccccagttgggtactgttttcccatttaaattagagaagacac

SEQ ID NO: 19658 - DNA, 511 bp, Homo sapiens
gcttggcatttaaggagatggctgattatattagtttcccagggttgctgtaacaaagtatcagagtccaaatagcttaaaactacrgaaatgtattattctctcacagttctggaggctggaagtccaaaatcgaggtgtcaactaagaggcagggctctctcctgattacactggggccacccagataatctggagtaatttccctaaaacaaacaaagttccaaaaccaaccaaaaatcagtgactatggttaaaaaaattacaaacattatcaaatcattttatgtgaaaagaagtatcccagctcagatggtgaactttttaaagattcaaagaacagatattactcctaaataaaaagtttcagagtatatataaccatgaaaagcttcccaatttattgagcaaaattagtataatcttaattttaaaatgttaacaaagatagcagaccagaaaataaaattagtctcatttatgaatcctactcataaattttacaaaaaga

SEQ ID NO: 19659 - DNA, 523 bp, Homo sapiens
gcagtagcacgtagaaacatttaaaagtacaccatatcctgaggttgttgaggagtttttaatacatgtaattatgagttactgtcaaataatgtgtactaaattttggtgacttttagaatcattattctagccttcaaaatttgtttcagtataattgaatttgatctattgagagaaaaatctaagaccaatcagtcagtgctttttaggatatcagtggtaaaacagaaatatgtatagacacacatatagagcattgacagagtaatgaaacgagcggtttgaaaaaagtgatgcatgtgtgaagggaaaaataaaagtatgttctatttgagatccttagtgcatgcaaatgattctaggtagggagtttatacttatattcttaaggaatatgtgaaaaaaagatgatcaacataaaagatagtgtattattactgcagaataatttstaaagatatgataaagcataggttggtaacctggagttcaaagccctctttggggacccatggagaga

SEQ ID NO: 19660 - DNA, 563 bp, Homo sapiens
cactggacacgcagactgggccaggcaccgtgctgggtgttgggaactccaaagtgatgggagacaggtccctacccatggtgaaaagatctctccccaggaaaagctcacgaattagtgaaggtgggagccaggcaaacataagtaggtgctagtagaaggtaggctaaataccacggagaggaagaggaaaaaggaacaaagtgctatgggaacgctgagtgtggggtgcacacactgtggggctggggagcaggtagaaagcttcacggagaaacaaatcttagagccaagttttgaagaaaaagtggatgtttttcaaacaaattgatttggagtggggtggcgtggtgcttggggcagaaggaccagcagaagcctgctgggaacaggcatcattgctcatccctgagcccactatgctcggcagatggccagcrcccacagtgggaggggactggctgtcaaaagtgatgccgttaggtgtggggcaccctggggtgttccaggagaggtgagttctaggaagtagtagctgccagccactgaggtgaggccgccta

SEQ ID NO: 19661 - DNA, 490 bp, Homo sapiens
gggagcgtggtgttccagcatgcctttcctgcagtgtataagcgctcttatgtcccttggtcacagagaatgtggccatgccctaggctgtggcaacatggtgcattataaaagggtcaggaacccttgttctaaaacatgggtgataaattgacagccacgagccaaatatgacctgcagatgtaagtttttgaccaatttaaaatagttaccaacatttcaaaattgagagatttcagagaacaatttgacctctagcttttcttaaagaattagattagctaatcccagcaatttgagaggccgaggcaggtagatcacctgaggtcaggagttcaagaccagcctggccaacatkgtgaaacccatctctactaaaaatacaaaaaattagctgggcgcagtggtacgtgcctgtaatccctgctacttgggaggctgaggcaggagaatcattcgaacccaggaggcagaggttgtggtgagctg

SEQ ID NO: 19662 - DNA, 537 bp, Homo sapiens
cacaggggactgtggaaggagaagaaagcgtcttattctgagtgtcatcatttaggagactcacacaaaagtaagagaatctttctagggaaatgttctcttttctttgcttgaactgaagttgcaatttagaggcagttacccttaaccctggcattttttttcccccagtacaagtgttcatagaagcaccacaygtaataggcaaaagctggaaacaacctaaatgtccatcaacagtggaatgggtaaatgaagtgtggtgtattcacatactttatagcaatttttaaaaacccgactacagctatctacaacaacaaaaaaagaagccagatgcaaagaactatagactgtatgactgtttatataaagttgcaaaacagaaaaactaatctctgtgttgactgacatcagaatagctgttacttccggatggaggtagtactgactgggttggagcacgagggaagtttctggggtgttgataatgttctgtatcttgacacaagtggtaatttcataaattctgtaaaa

SEQ ID NO: 19663 - DNA, 537 bp, Homo sapiens
cacaggggactgtggaaggagaagaaagcgtcttattctgagtgtcatcatttaggagactcacacaaaagtaagagaatctttctagggaaatgttctcttttctttgcttgaactgaagttgcaatttagaggcagttacccttaaccctggcattttttttcccccagtacaagtgttcatagaagcaccacatgtaayaggcaaaagctggaaacaacctaaatgtccatcaacagtggaatgggtaaatgaagtgtggtgtattcacatactttatagcaatttttaaaaacccgactacagctatctacaacaacaaaaaaagaagccagatgcaaagaactatagactgtatgactgtttatataaagttgcaaaacagaaaaactaatctctgtgttgactgacatcagaatagctgttacttccggatggaggtagtactgactgggttggagcacgagggaagtttctggggtgttgataatgttctgtatcttgacacaagtggtaatttcataaattctgtaaaa

SEQ ID NO: 19664 - DNA, 537 bp, Homo sapiens
cacaggggactgtggaaggagaagaaagcgtcttattctgagtgtcatcatttaggagactcacacaaaagtaagagaatctttctagggaaatgttctcttttctttgcttgaactgaagttgcaatttagaggcagttacccttaaccctggcattttttttcccccagtacaagtgttcatagaagcaccacatgtaataggcaaaagctggaaacaacctaaatgtccatcaacagtggmatgggtaaatgaagtgtggtgtattcacatactttatagcaatttttaaaaacccgactacagctatctacaacaacaaaaaaagaagccagatgcaaagaactatagactgtatgactgtttatataaagttgcaaaacagaaaaactaatctctgtgttgactgacatcagaatagctgttacttccggatggaggtagtactgactgggttggagcacgagggaagtttctggggtgttgataatgttctgtatcttgacacaagtggtaatttcataaattctgtaaaa

SEQ ID NO: 19665 - DNA, 670 bp, Homo sapiens
acaggaaaaatagcattgatttagcattgtttgtacaggcaaagcaaccaaaaaataaaacaaaacaaaaccagcctgtgaaaactaccttaatttcaatgttttgccacatatgcattatgtattgtctatctctatattttttgctgagtcatttgaaaatgtttcaggcatcatgacatttcacccataaasactgaagcatacgtttcctaaaaaggttgctttcagatagcattagcatatttatttatttgctttatattaatatatccagaaatagtttcaatattatgacctgtcaataaaataagcaaatgaagcttgagacttttttgaagttctttttattcatcaaatatatcctactaaggatgcacaattatattactctgccaaaattcactgaaagtaattatattctttgtatggttatgttaccttaaatatagacataggatcacttgtttcagtttgttttctcagtagacattttcaattattttattctttttcttctctgggagcatctgttgtgcgtgtgtgtgtgtgtgtgtgtgtgtgtgtgtacatacacatatatataaataaaattgacaatttaaaattgtatgtatttatgtagtacagaatgatgccatgatttataaatacaacatggagtaattaa

SEQ ID NO: 19666 - DNA, 510 bp, Homo sapiens
tgatcattttctactactcactttctaagaacgcacaaaaaacacacactcatggtcttttcccctggcatatgtttacaggaaataacacgacaggcatgaccatgatacatgcttaatttttaggtctgtcctagatgtccttctcactgcacaaccccagcacrggcaggcacaggcaacactgcatcacatgcagacagctgccccatggcctgccaacccatcctccaggctcaaggcttcactccatagctctttcacagtcttctcattagacagcgagaatgtgcttagctgtgagtaaatggttatcacaactaagagctctgagggaaagtgtttgtgggcttgaagggtgtattagtttcctaggaccgtcacaacaaactaccataagcagggtgacttaaaacaaggttggacatcgtggcttacacctataatcccagcactttgggagaccaaggtgggaggattgcttgaggccaggccttcgagaccagcctg

SEQ ID NO: 19667 - DNA, 510 bp, Homo sapiens
tgatcattttctactactcactttctaagaacgcacaaaaaacacacactcatggtcttttcccctggcatatgtttacaggaaataacacgacaggcatgaccatgatacatgcttaatttttaggtctgtcctagatgtccttctcactgcacaaccccagcacaggcaggcacaggcaacactgcatcacatgcagacagctgccccatggcctgccaacccatcctccaggctcaaggcttcactccatagctctttcacagtcttctcattagacagcgagaatgtgcttagctgtgagtaaatggttatcacaactaagagctctgagggaaagtgtttgtgggcttgaaggstgtattagtttcctaggaccgtcacaacaaactaccataagcagggtgacttaaaacaaggttggacatcgtggcttacacctataatcccagcactttgggagaccaaggtgggaggattgcttgaggccaggccttcgagaccagcctg

SEQ ID NO: 19668 - DNA, 720 bp, Homo sapiens
gggaacatgccccctgcagacacgtcttgtggcctccgaggactttctgtgaccccaccagcgtggcccctctccctctggtcttgcgcccccaggccaggtgggggcccttggaggtcttcctgaccctgctgccactgtgctgagggccaggccagcactcagggtggccccaggagccggtggtgggagtcctgtgcccctgtccccacaggcttggccccggctaggacattcccgggcccccctgctcaggccctgagcacagacacaggcaggaccacgaccgtggactttattcatgtccagcagtgaagtctgtggccccggccccggccccggccccggccccarccccaaccccaaccccaaccccggccccggccccggccccggccccagccccagccccagccccagccccagccctccgcagggcccgggcagcgtcttccgtggcccgcctgggcctgtggttgtgcgggaggcaccttcttagggcctggtcctcagtccagctcccagggcctggaggcggggatgggtgggacggtctaggaggtggggcttgggtaggttggcctggcctagagctggcccgtcagcccaagtgggcgtccagctgaatctaacacctctgtttttcctgcacctgacccctgtgaacccagccaccctgaggcaacgctgtccacagaaaccaggatgcaagtcccccag

SEQ ID NO: 19669 - DNA, 720 bp, Homo sapiens
gggaacatgccccctgcagacacgtcttgtggcctccgaggactttctgtgaccccaccagcgtggcccctctccctctggtcttgcgcccccaggccaggtgggggcccttggaggtcttcctgaccctgctgccactgtgctgagggccaggccagcactcagggtggccccaggagccggtggtgggagtcctgtgcccctgtccccacaggcttggccccggctaggacattcccgggcccccctgctcaggccctgagcacagacacaggcaggaccacgaccgtggactttattcatgtccagcagtgaagtctgtggccccggccccggccccggccccggccccagccccaaccccaaccccraccccggccccggccccggccccggccccagccccagccccagccccagccccagccctccgcagggcccgggcagcgtcttccgtggcccgcctgggcctgtggttgtgcgggaggcaccttcttagggcctggtcctcagtccagctcccagggcctggaggcggggatgggtgggacggtctaggaggtggggcttgggtaggttggcctggcctagagctggcccgtcagcccaagtgggcgtccagctgaatctaacacctctgtttttcctgcacctgacccctgtgaacccagccaccctgaggcaacgctgtccacagaaaccaggatgcaagtcccccag

SEQ ID NO: 19670 - DNA, 720 bp, Homo sapiens
gggaacatgccccctgcagacacgtcttgtggcctccgaggactttctgtgaccccaccagcgtggcccctctccctctggtcttgcgcccccaggccaggtgggggcccttggaggtcttcctgaccctgctgccactgtgctgagggccaggccagcactcagggtggccccaggagccggtggtgggagtcctgtgcccctgtccccacaggcttggccccggctaggacattcccgggcccccctgctcaggccctgagcacagacacaggcaggaccacgaccgtggactttattcatgtccagcagtgaagtctgtggccccggccccggccccggccccggccccagccccaaccccaaccccarccccggccccggccccggccccggccccagccccagccccagccccagccccagccctccgcagggcccgggcagcgtcttccgtggcccgcctgggcctgtggttgtgcgggaggcaccttcttagggcctggtcctcagtccagctcccagggcctggaggcggggatgggtgggacggtctaggaggtggggcttgggtaggttggcctggcctagagctggcccgtcagcccaagtgggcgtccagctgaatctaacacctctgtttttcctgcacctgacccctgtgaacccagccaccctgaggcaacgctgtccacagaaaccaggatgcaagtcccccag

SEQ ID NO: 19671 - DNA, 1187 bp, Homo sapiens
tgcagccataaagaaggatgagttcatatccttttcagggacatggatgaagctggaaaccatcattctcagcaaactaatccaagaacagaaaaccaaacacccgatgttctcactcataaatgggagttgaacaatgagaacacatggacagagggaggggaacacaacacaccggggcctgtctgggggtaggggctrggggaaggttagcattgggttaaatacctaatgtagatgatgggttgatgggtgcagcaaaccaccatggcacgtgtatacctatgtaacaatcctgcatgttctgcacttgtaccccagaacttaaaatataatttaaaaaaaaatctcaaacaactcactgaagtgtctcaaagctgaacaagttttaccaaaatgaatccttctcagttaactgatcaaatggatgaatcctgaccctctgaagtctctttcctgagttagagcagggaactgctctgagtgttaactgttggattcactgcagtgtcctacaatattttacaagaagatgaaaaggcaacctgcagacctaggcttgattcccaagtcacagtctgacccctgctacaggaggttaccctcctcaggaagagatagaaatagggaatttgaaggaatagtgaggggaccagggagatttgattgagtctggtttccaggtgaattaaaaggaagggtgtcatccagggtttgttgctacagtcaaaagaataaataaatcaatgaagaaataccttcattgtctgtggttttcatgcagatatactcatggaggttgtatctctccaaaaacagacaaatccaaggctgtgaacaagcatccgcatttgaattccattaaaccaaaatctatgttgaacgaagtgaagtctgtacacagcattgcaaatgtgaacacattcctgtgtgaggcacatcaccatttgtcagttattgtgaatatgtgtatttttaagcaataagatgcagctggtcagttttctgggcaatcttggcgatgcatttcctgtgctgtggttgttctctaaccactgtgagaaacccaaataaaaatcgatccccccccaaaacaaatacgtatcacaaaaccatagtaatcaaaacaacatgacacttgcacaaaaacagacacattgaccaggggaacagaataaggaacccag

SEQ ID NO: 19672 - DNA, 1187 bp, Homo sapiens
tgcagccataaagaaggatgagttcatatccttttcagggacatggatgaagctggaaaccatcattctcagcaaactaatccaagaacagaaaaccaaacacccgatgttctcactcataaatgggagttgaacaatgagaacacatggacagagggaggggaacacaacacaccggggcctgtctgggggtaggggctgggggaaggttagcattgggttaaatacctaatgtagatgatgggttgatgggtgcagcaaaccaccatggcacgtgtatacctatgtaacaatcctgcatgttctgcacwtgtaccccagaacttaaaatataatttaaaaaaaaatctcaaacaactcactgaagtgtctcaaagctgaacaagttttaccaaaatgaatccttctcagttaactgatcaaatggatgaatcctgaccctctgaagtctctttcctgagttagagcagggaactgctctgagtgttaactgttggattcactgcagtgtcctacaatattttacaagaagatgaaaaggcaacctgcagacctaggcttgattcccaagtcacagtctgacccctgctacaggaggttaccctcctcaggaagagatagaaatagggaatttgaaggaatagtgaggggaccagggagatttgattgagtctggtttccaggtgaattaaaaggaagggtgtcatccagggtttgttgctacagtcaaaagaataaataaatcaatgaagaaataccttcattgtctgtggttttcatgcagatatactcatggaggttgtatctctccaaaaacagacaaatccaaggctgtgaacaagcatccgcatttgaattccattaaaccaaaatctatgttgaacgaagtgaagtctgtacacagcattgcaaatgtgaacacattcctgtgtgaggcacatcaccatttgtcagttattgtgaatatgtgtatttttaagcaataagatgcagctggtcagttttctgggcaatcttggcgatgcatttcctgtgctgtggttgttctctaaccactgtgagaaacccaaataaaaatcgatccccccccaaaacaaatacgtatcacaaaaccatagtaatcaaaacaacatgacacttgcacaaaaacagacacattgaccaggggaacagaataaggaacccag

SEQ ID NO: 19673 - DNA, 934 bp, Homo sapiens
tacaggggtagtttgttgacccctggtctatatgcagagtgagggagagagatggatttaaacccatcttccttaggccacttcatgtgccctttcatacacattagctcttggattagcagtacctgagataagggtggtatggaaaatagagtctaaaccagagagctgagggcaaacttggcattccttcccttaaaattttatgttagtaatactgtgttggttgatcatgaaggaaataggcatgctttccccttccactgtggtatgcatttatttattcactttatactgttgattgttctagtctataatggcctctgcctctacatgcctgtgacttttatcaataattgcagatgtataagcattccaataataaggccatgactacgggggcaattgctgcaatgctgtctacaatcctgtattcaaggcgcttctttccatactatgtttacaacatcatcggtggacttgatgaagaaggtagaattccttctttctggaaaatggtgggggggaggagttattattccctagatgtgtgtatccatctagagttgaaaagaaccataaataccatctgacacaattctcatttcatttctgataaygaaagtgatgaagaaactgaagctaatgtatgacctccaaaggcacattgaagctctaatagtgaatgttgagcagccagttattttgctattttctcaggaacttgcatgagttagtagtaaataattaggcatttttatcttatagaaagaaatcggacctagaaagcttgacctaaatgtgattctgagtattgaaaatttttttattaacaaatacacttcaaaaaagttctttaacggttctagaagtcatttggggtaattaataataagcatctactccagtgttttcagaactttttgaaacacct

SEQ ID NO: 19674 - DNA, 519 bp, Homo sapiens
tttttctcccaaattaaaagtggctttagtttttctgtagtgaaaacaatcagtacatgtttatacatacactcatgyagttttatgtaagtaggactttggtatctgtttttctgtaactatacattatgtattatcaaggagatctaagctatatgcataatgatttttgtatttaattaacaaaaaatttttttgtcttctgtttttgctgctgtaatacatagcatcatttacctaaccagtcctctaaagggcattttggcttcctgttttcttaatataaacactatgatgaacatccttgtacatacatttttgtgtacttccccaattatgcttgtcttgctagaataaacttcgagtagttgaagtattgggtcagataaatttttttttgtattttgttgagtatactctttctgaaggatacgccagtaccctgagtacccgattttatataaccttcccagtattagaattaacacattttgaaacatctttttgcctattgaacag

SEQ ID NO: 19675 - DNA, 519 bp, Homo sapiens
tttttctcccaaattaaaagtggctttagtttttctgtagtgaaaacaatcagtacatgtttatacatacactcatgcagttttatgtaagtaggactttggtatctgtttttctgtaactatacattatgtattatcaaggagatctaagctatatgcataatgatttttgtatttaattaacaaaaaatttttttgtcttctgtttttgctgctgtaatacatagcatcatttacctaaccagtcctctaaagggcattttggcttcctgttttcttaatrtaaacactatgatgaacatccttgtacatacatttttgtgtacttccccaattatgcttgtcttgctagaataaacttcgagtagttgaagtattgggtcagataaatttttttttgtattttgttgagtatactctttctgaaggatacgccagtaccctgagtacccgattttatataaccttcccagtattagaattaacacattttgaaacatctttttgcctattgaacag

SEQ ID NO: 19676 - DNA, 529 bp, Homo sapiens
cacttagtttgtagaaatttgttacagcagtaatagaacaagtggttatccatatgaggcaaattagattggatacctatctccaatagaaatcaattcaaggtgaattccaggaaaatacttaaaacatttagattaaaaataaatgagaatttttgttacttttggtaggtcatagaaccaagaaaaacaaacattaaggaggaaaaatgaacatatgactacatcaaaatataaagcttctctatttggawgatatcataaggtgacaaatcataaactgtaatatttacaacatatatataagtgaataaatatacatttagaatatatatgaactcccaaaaatcaacaggaaaaataagacatagaacaagcaaaatgcataaacaaaagaaggcaaaacaaaaataatgactcataattatatgaaaagaagctcatcttcatagatgagcagataaatgcaaattaaaaccaccctgagatgctttttacatccatgagcctgataaaagttagagtctaa

SEQ ID NO: 19677 - DNA, 529 bp, Homo sapiens
cacttagtttgtagaaatttgttacagcagtaatagaacaagtggttatccatatgaggcaaattagattggatacctatctccaatagaaatcaattcaaggtgaattccaggaaaatacttaaaacatttagattaaaaataaatgagaatttttgttacttttggtaggtcatagaaccaagaaaaacaaacattaaggaggaaaaatgaacatatgactacatcaaaatataaagcttctctatttggaagatatcataaggtgacaaatcataaactgtaatatttrcaacatatatataagtgaataaatatacatttagaatatatatgaactcccaaaaatcaacaggaaaaataagacatagaacaagcaaaatgcataaacaaaagaaggcaaaacaaaaataatgactcataattatatgaaaagaagctcatcttcatagatgagcagataaatgcaaattaaaaccaccctgagatgctttttacatccatgagcctgataaaagttagagtctaa

SEQ ID NO: 19678 - DNA, 529 bp, Homo sapiens
cacttagtttgtagaaatttgttacagcagtaatagaacaagtggttatccatatgaggcaaattagattggatacctatctccaatagaaatcaattcaaggtgaattccaggaaaatacttaaaacatttagattaaaaataaatgagaatttttgttacttttggtaggtcatagaaccaagaaaaacaaacattaaggaggaaaaatgaacatatgactacatcaaaatataaagcttctctatttggaagatatcataaggtgacaaatcataaactgtaatatttacaacatatatatragtgaataaatatacatttagaatatatatgaactcccaaaaatcaacaggaaaaataagacatagaacaagcaaaatgcataaacaaaagaaggcaaaacaaaaataatgactcataattatatgaaaagaagctcatcttcatagatgagcagataaatgcaaattaaaaccaccctgagatgctttttacatccatgagcctgataaaagttagagtctaa

SEQ ID NO: 19679 - DNA, 698 bp, Homo sapiens
tacttatgcagtaggacagtttatagataagtcgcctgaattccagggcccattggttcacttagaaccagtgaacctagcaaggaatggcagtgtgcccttggcagtgggggtagagaggaccgtttgatgatgtwaagtaagcaatgactaagacaaattccctgcataggtttcagactaaatcgtgccccactcctccaaatttatctgttgaaatcccaactcccaaatacacctcagaatatgatcatatttggagatagggcctctaaagaagtaattaaggttaaatgagattatatagatgggtcttaatccaataggacaggttccccacacaagaagagggagagacaccaggatgtgtcttcacacagaagaaaaaccatgtcaggacacagtgagaaggcaaccatctgcaagccaaagagagaggattcaggagagaccatgccttctgacactttcattttaggcttccagaactccaaggtatttcactatggtgatcagagcagactagtacaccccagtacacaagttgtccactaaaacatcagatgatcttcttgtaccgatagaacagatcgtttcattcagctgcgccgaccatccattgcaggtcgctgcctacctatgcccagcacattacagagtgcagcaggggacaaacaggaagcctggaaccagcactg

SEQ ID NO: 19680 - DNA, 577 bp, Homo sapiens
attgtaagttgaagagagcaggaggggggatgaaacgaggagtggctcaatccctctaattcacatggaacaagttgagggctgaggcaggtgctgcaagactttgaccctacccagagctcagaagcaggcagatctttacccaaagtagaaaaccccaataggagagcagagaatcccagaggccaggagacccaggcagcagccaacaaggttatagcaaagctgtccctgggcaycagctggaggggctgattgagatcccaatgtctgggaaaagcagggcaaggccagagagcagggccaagtcggaagtgcagacaggagtgccagagctgcaggaaaaggtgtagtgggccccaagcgctctgcctgtggggacggaagtaagactttcaggctcccaggctgggtccgcttgcagagagcctgtgtccaggctctatcctcgtagctgccctcagagcttgggcctgaagttctctaggagagccgtgaaaatgcagtgacaaagtagacctccttctcagcctcttcctgagaacaaccagtccatgggaagtctggggagcagtaa

SEQ ID NO: 19681 - DNA, 577 bp, Homo sapiens
attgtaagttgaagagagcaggaggggggatgaaacgaggagtggctcaatccctctaattcacatggaacaagttgagggctgaggcaggtgctgcaagactttgaccctacccagagctcagaagcaggcagatctttacccaaagtagaaaaccccaataggagagcagagaatcccagaggccaggagacccaggcagcagccaacaaggttatagcaaagctgtccctgggcaccagctggaggggctgattgagatcccaaygtctgggaaaagcagggcaaggccagagagcagggccaagtcggaagtgcagacaggagtgccagagctgcaggaaaaggtgtagtgggccccaagcgctctgcctgtggggacggaagtaagactttcaggctcccaggctgggtccgcttgcagagagcctgtgtccaggctctatcctcgtagctgccctcagagcttgggcctgaagttctctaggagagccgtgaaaatgcagtgacaaagtagacctccttctcagcctcttcctgagaacaaccagtccatgggaagtctggggagcagtaa

SEQ ID NO: 19682 - DNA, 577 bp, Homo sapiens
attgtaagttgaagagagcaggaggggggatgaaacgaggagtggctcaatccctctaattcacatggaacaagttgagggctgaggcaggtgctgcaagactttgaccctacccagagctcagaagcaggcagatctttacccaaagtagaaaaccccaataggagagcagagaatcccagaggccaggagacccaggcagcagccaacaaggttatagcaaagctgtccctgggcaccagctggaggggctgattgagatcccaatgtctgggaaaagcagggcaaggccagagagcagggccaagtcggaagtgcagacaggagtgccagagctgcaggaaaaggtgtagtgggccccaagcgctctgcctgtggggacggaagtaagactttcaggctcccaggctgggtccgcttgcagagarcctgtgtccaggctctatcctcgtagctgccctcagagcttgggcctgaagttctctaggagagccgtgaaaatgcagtgacaaagtagacctccttctcagcctcttcctgagaacaaccagtccatgggaagtctggggagcagtaa

SEQ ID NO: 19683 - DNA, 612 bp, Homo sapiens
cacccagtctcccttaaaaatacaaaaaattagccgggcgcagtggcagacacctgtaatcccagctactcaggaggctgaggcaggagaatcaygtgaacctgggaggtggaggttgcagtgagcggagatgccaccactgcactccagcccgggcaacagtgcaagaccccgtctgaaaataaataaataaataaataaataaatttttttaaaaaaatgaatgaatagcactgacttgggatcggctatatgccatctctgggcaatggaatacgagaaagtgtaaatgcgctttcccttgcccctctttggcccaccataagcaagtccacactcaagcagccactgctctctggaactaggctccagaatgacaaacacaaagcccacctgagcccaatctgaaggctagagacaagttcagctgacccatgaatgagaaaaataaatgctgttttaataagctaccgttggcatggttcaaatgcaacattattctggcaagtgaataaaataaggaattttttttaaggtggaggcactttgaaaaaagactcatagtagtaattaaaagtattcattctggccaggcgcggtggctcacgcctg

SEQ ID NO: 19684 - DNA, 1391 bp, Homo sapiens
attctctctatagcccttctgaatggtctgtgacacacgcatgctttcagctggagtttgctctgtctggttttcggtctgtgacacacgcatgcttttagctagtttgctctctatagcccttctgaatggtctgtgacacacgcacgctttcagctagagtttgctctttctggttttcggtctgtgacacacgcatgctttcagctagagtttgctctctctggttttcggtctgtgacacacgcatgctttcagctagggtattctctctatagcccttctgaatggtctgtgacacacgcatgctttcaggtggagtttgctctctctggttttcggtctgtgacacacgcatgctttcagctagagtattctctctatagcccctctgaacggtctgtgacacacgcatgctttcagctggagtttgctctctctggttttcggtctgtgacacacgcaggcttttagctagagtttgctctccatagcccttctgaatggtctgtgacacacgcacgctttcagctagagtttgctctctctggttttcggtctgtgatacacgcacgctttcagctagagtttgctctctctggttttcggtctgtgacacacgcacgctttcagctagagtattctctctatagccattctgaacggtctgtgacgcacgtatgctttcagctagagtattcttttttttttttttgagacggagtcttgctctgtcgcccaggctagagtgtgcagtggtgcgatagcggctcactgcaagctccgcctcccaggttcatgccattctcctgcctcagcctccagagcagctgggactacaggtgcccrccaccacgcccggctaattttttgtatttttagtagagactgggtttcaccgtgttagccaggatggtcttgatctcctgaccttgtgatccacccgcctcagcctcccaaagtgctgggattacaggcttgagccaccacgcccggccttcagctagagtattctctctatagcccttctgaatggtctgtgacacacgcatgctttcagctagagtttgctctctctatagcccttctgaatggcctgtgacacacgcatgctttcagctagtttgctctctctggttttcggtctgtgacgcacacatgctttcagctagagtttgctctctatagcccctctgaatggtctgtgacacatgcatgctttcagctattctctctatagcccttctgaacggtctgtgacaccattatgctttcagctacagtttgctttctctggtttttcagtggtgctctggggaaggcagaagagtaggaacaggaaagaaaccacacttgaacatgatgtcaaagaaagtaaatgcttctgtacc

SEQ ID NO: 19685 - DNA, 1391 bp, Homo sapiens
attctctctatagcccttctgaatggtctgtgacacacgcatgctttcagctggagtttgctctgtctggttttcggtctgtgacacacgcatgcttttagctagtttgctctctatagcccttctgaatggtctgtgacacacgcacgctttcagctagagtttgctctttctggttttcggtctgtgacacacgcatgctttcagctagagtttgctctctctggttttcggtctgtgacacacgcatgctttcagctagggtattctctctatagcccttctgaatggtctgtgacacacgcatgctttcaggtggagtttgctctctctggttttcggtctgtgacacacgcatgctttcagctagagtattctctctatagcccctctgaacggtctgtgacacacgcatgctttcagctggagtttgctctctctggttttcggtctgtgacacacgcaggcttttagctagagtttgctctccatagcccttctgaatggtctgtgacacacgcacgctttcagctagagtttgctctctctggttttcggtctgtgatacacgcacgctttcagctagagtttgctctctctggttttcggtctgtgacacacgcacgctttcagctagagtattctctctatagccattctgaacggtctgtgacgcacgtatgctttcagctagagtattcttttttttttttttgagacggagtcttgctctgtcgcccaggctagagtgtgcagtggtgcgatagcggctcactgcaagctccgcctcccaggttcatgccattctcctgcctcagcctccagagcagctgggactacaggtgcccgccaccacgcccggctaattttttgtatttttagtagakactgggtttcaccgtgttagccaggatggtcttgatctcctgaccttgtgatccacccgcctcagcctcccaaagtgctgggattacaggcttgagccaccacgcccggccttcagctagagtattctctctatagcccttctgaatggtctgtgacacacgcatgctttcagctagagtttgctctctctatagcccttctgaatggcctgtgacacacgcatgctttcagctagtttgctctctctggttttcggtctgtgacgcacacatgctttcagctagagtttgctctctatagcccctctgaatggtctgtgacacatgcatgctttcagctattctctctatagcccttctgaacggtctgtgacaccattatgctttcagctacagtttgctttctctggtttttcagtggtgctctggggaaggcagaagagtaggaacaggaaagaaaccacacttgaacatgatgtcaaagaaagtaaatgcttctgtacc

SEQ ID NO: 19686 - DNA, 1391 bp, Homo sapiens
attctctctatagcccttctgaatggtctgtgacacacgcatgctttcagctggagtttgctctgtctggttttcggtctgtgacacacgcatgcttttagctagtttgctctctatagcccttctgaatggtctgtgacacacgcacgctttcagctagagtttgctctttctggttttcggtctgtgacacacgcatgctttcagctagagtttgctctctctggttttcggtctgtgacacacgcatgctttcagctagggtattctctctatagcccttctgaatggtctgtgacacacgcatgctttcaggtggagtttgctctctctggttttcggtctgtgacacacgcatgctttcagctagagtattctctctatagcccctctgaacggtctgtgacacacgcatgctttcagctggagtttgctctctctggttttcggtctgtgacacacgcaggcttttagctagagtttgctctccatagcccttctgaatggtctgtgacacacgcacgctttcagctagagtttgctctctctggttttcggtctgtgatacacgcacgctttcagctagagtttgctctctctggttttcggtctgtgacacacgcacgctttcagctagagtattctctctatagccattctgaacggtctgtgacgcacgtatgctttcagctagagtattcttttttttttttttgagacggagtcttgctctgtcgcccaggctagagtgtgcagtggtgcgatagcggctcactgcaagctccgcctcccaggttcatgccattctcctgcctcagcctccagagcagctgggactacaggtgcccgccaccacgcccggctaattttttgtatttttagtagagactgggtttcaccgtgttagccaggatggtcttgatctcctgaccttgtgatccacccgcctcagcctcccaaagtgctgggattacaggcttgagccaccacgcccggccttcagctagagtattctctctatagcccttctgaayggtctgtgacacacgcatgctttcagctagagtttgctctctctatagcccttctgaatggcctgtgacacacgcatgctttcagctagtttgctctctctggttttcggtctgtgacgcacacatgctttcagctagagtttgctctctatagcccctctgaatggtctgtgacacatgcatgctttcagctattctctctatagcccttctgaacggtctgtgacaccattatgctttcagctacagtttgctttctctggtttttcagtggtgctctggggaaggcagaagagtaggaacaggaaagaaaccacacttgaacatgatgtcaaagaaagtaaatgcttctgtacc

SEQ ID NO: 19687 - DNA, 557 bp, Homo sapiens
ggtcaaatcgatgttttaaacttgctggaaataaacggttcctttcttgcatggctcgatgagcaataaggttcctctgtgtcattttgtttacgatttttaggattgctttttaaagccggacacggcggctgatggctgtaatcccagcactttaggaggccgaggcaggaggatcacttgagataaggagttcaggaccagcatgggcaacacagcgagaccccatctctatagaaaacacaaaaatgaggctgggggtgctcatacacgcactgagggttgaccctggtgttcttgccttctyagattcttctggagctggagatgaactcggacctcaaggcccagctcagggaactgattattacagcagcgagggaaactgaagttggtggtggtgagaaagttatcatgggcaggtacagcagctcacgcctggaatcccagcactgtggggagctgaggcgggaagatcacgaggtcaggagctcaagaccagcgtggccaacatggtgaaaccccgtctctactaaaaatacaaaaattagctgggt

SEQ ID NO: 19688 - DNA, 557 bp, Homo sapiens
ggtcaaatcgatgttttaaacttgctggaaataaacggttcctttcttgcatggctcgatgagcaataaggttcctctgtgtcattttgtttacgatttttaggattgctttttaaagccggacacggcggctgatggctgtaatcccagcactttaggaggccgaggcaggaggatcacttgagataaggagttcaggaccagcatgggcaacacagcgagaccccatctctatagaaaacacaaaaatgaggctgggggtgctcatacacgcactgagggttgaccctggtgttcttgccttcttagattcttctggagctggagatgaactcggacctcaaggcccagctcagggaactgattattacagcagcgagggaaactgaagttggtggtggtgagaaagttatcatgggcaggtrcagcagctcacgcctggaatcccagcactgtggggagctgaggcgggaagatcacgaggtcaggagctcaagaccagcgtggccaacatggtgaaaccccgtctctactaaaaatacaaaaattagctgggt

SEQ ID NO: 19689 - DNA, 577 bp, Homo sapiens
gccaaacaygtgaatgaggtcatctgaggccatcccaccccaaactgcagatgcatgaatgaccctgggtgaaactaacagaagaactgcccagctgaacccagcccagttgttgcaccacagaatcatgatcatgagtaaattaaaaggttgctattttaagccactaagtttggggtggctgttatgcagcaataggtaattgatactctctgcttcccctaagcatatcataggccccttaactccaagcccagaatgaacatatcattgttcattcatcctcacaacctgtccctccccttctgtctctcacctcaggaactggcacctctctatgccaaatcatacatctgcagccagtcttaactccccactcttttcatcaagtacagctgactttatctcctaaatatctctagaatctcctccactgcccctgcccatctggtctcatcacaggtcatccagaccagtagtcattacagcaaagaacacacaccccagaaaatgctcaatacaatcaccagggtagctggaagaaaacaagcaattctagttttatttattttattta

SEQ ID NO: 19690 - DNA, 577 bp, Homo sapiens
gccaaacatgtgaatgaggtcatctgaggccatcccaccccaaactgcagatgcatgaatgaccctgggtgaaactaacagaagaactgcccagctgaacccagcccagttgttgcaccacagaatcatgatcatgagtaaattaaaaggttrctattttaagccactaagtttggggtggctgttatgcagcaataggtaattgatactctctgcttcccctaagcatatcataggccccttaactccaagcccagaatgaacatatcattgttcattcatcctcacaacctgtccctccccttctgtctctcacctcaggaactggcacctctctatgccaaatcatacatctgcagccagtcttaactccccactcttttcatcaagtacagctgactttatctcctaaatatctctagaatctcctccactgcccctgcccatctggtctcatcacaggtcatccagaccagtagtcattacagcaaagaacacacaccccagaaaatgctcaatacaatcaccagggtagctggaagaaaacaagcaattctagttttatttattttattta

SEQ ID NO: 19691 - DNA, 577 bp, Homo sapiens
gccaaacatgtgaatgaggtcatctgaggccatcccaccccaaactgcagatgcatgaatgaccctgggtgaaactaacagaagaactgcccagctgaacccagcccagttgttgcaccacagaatcatgatcatgagtaaattaaaaggttgctattttaagccactaagtttggggtggctgttatgcagcaataggtaattgatactctctgcttcccctaagcatatcataggccccttaactccaagcccagaatgaacatatcattgttcattcatcctcacaacctgtccctccccttctgtctctcayctcaggaactggcacctctctatgccaaatcatacatctgcagccagtcttaactccccactcttttcatcaagtacagctgactttatctcctaaatatctctagaatctcctccactgcccctgcccatctggtctcatcacaggtcatccagaccagtagtcattacagcaaagaacacacaccccagaaaatgctcaatacaatcaccagggtagctggaagaaaacaagcaattctagttttatttattttattta

SEQ ID NO: 19692 - DNA, 577 bp, Homo sapiens
gccaaacatgtgaatgaggtcatctgaggccatcccaccccaaactgcagatgcatgaatgaccctgggtgaaactaacagaagaactgcccagctgaacccagcccagttgttgcaccacagaatcatgatcatgagtaaattaaaaggttgctattttaagccactaagtttggggtggctgttatgcagcaataggtaattgatactctctgcttcccctaagcatatcataggccccttaactccaagcccagaatgaacatatcattgttcattcatcctcacaacctgtccctccccttctgtctctcacctcaggaactggcacctctctatgccaaatcatacatctgcagccagycttaactccccactcttttcatcaagtacagctgactttatctcctaaatatctctagaatctcctccactgcccctgcccatctggtctcatcacaggtcatccagaccagtagtcattacagcaaagaacacacaccccagaaaatgctcaatacaatcaccagggtagctggaagaaaacaagcaattctagttttatttattttattta

SEQ ID NO: 19693 - DNA, 893 bp, Homo sapiens
gcagaacttgtctttgccatcagttccttttcattttatctgagccacaccctggtgcccctgtgttgccttctccttctctctcccttcctcyctccatcctttcttttcttctttcttcattttcttttatatagttttttgtttttacttcaggtgcattgatgcatacaaacataaaaacatctgttggctgagtgtggtggctcatgactgtaatcccagcagtttgggaagctgaggtaagcagatcacttgagcccaggcgttcaagatcagcctgggtaacatggtaaaaccccatctctacaaaaagtacaaaaattagccgggcctggtggcaggcacctatagtcaagctacttgggaaactgaggtgaaaggaacacttgagcctggaaggtggaggttgcagtgagccaagattgtgcgactgccctccagtctgggccatacagtaagactgtctaaaaaaaaaaaaaattcattgattttctcagttcatggcactttaccatcttgagtccattcatacgtcttttcttgttttacttattgtttgtttattcatacctttaaaatgttttgattttatcttattgaattttttttccaggctgggtgtggtggtgcacacctgtaatcacacctgtaatcaggcacatgcctgaggtcaggaggtcgcgaccagtctgactaacatggtgaaaccccgtctctactaaatacaaaaaaattagcccggcatggtggcgcatacctgtaatcctaactacctgggaggctgagacaggagcatcacgtgtacctgggagtggaggttgcagtgagcagagagagtgccactgcacttcagcctgggcaacaagaacaaaactccatctcaaaaaaaa

SEQ ID NO: 19694 - DNA, 525 bp, Homo sapiens
gctgggcatggtggctcatgcctataatcccagcactttgggaggccaaggagggtggatcacgaggtcaggagatggagcccatcctggctaacatggtgaaaccctgtctctactaaaaacacaaaaaattggccgggcttggtggcgggtgccagtagtcccagctactcaggaggctgaggcaggagaatggcgtgaacctgggaggcggcgcttgcagtgagctgagatcgctccactgcactccagtctggatgacagagcgagactccgtctcaaaaagataagaaatwaaaaaattttaaagtgtaagcatctcagatgccttgcaggaatgtgggataaagtgctcagaatgttccctggcagatagtataggcttgttttccgtgaagagcctgtaactgccacttggttccccttccacccctgacattaggaaatagttgtgcaatggttgttactctcagggtggtcacttaggcaaactccagaggagggtgtacttccactgattatcct

SEQ ID NO: 19695 - DNA, 543 bp, Homo sapiens
ttaatttgctatatacatttagtaccatttcctgagacttaaatgtagacacacacgcacrtgcgtgcacacacacgtacatatataataaatacaacatatatataaaatatatgtataattttcaacaatttcactgggtcacaggtctaagaagattctcaccttgtaacaccagaagtggaacaatcctagtagtaatgtatttaactgcttgaaaaaaaattaaaattattcactagagaaataaaattagttaaagaaaacagaggttattgtttggatattttcggctcatagcaaattaatgggtgttctgcaatttagtagttccagaacatacattcaagcttctactcttttttatgataaactaaaacccatcatttgaaatctccaaccatgtaaacaacagtctctagtaggtttttgctgcttcattctaaaatatgaacaaagaaatatcaccacacatctaagaaaaacatgtacagaaagaaaataagaaaaaacaaaaagcaaatcagtccagacgaaagaaac

SEQ ID NO: 19696 - DNA, 531 bp, Homo sapiens
gttttttaatgtacgtgtgcagtctttcaggcactttgagttgagttgactagccgggggcaaacattcataagacagtgctctgtgggaaarctcaaaccaacagatgaagtcacttgctggatcttaacctatttgtcagtggaggtctgcctgtgtggtctaaatctatttcaaaaattcaacattatgaagtggggggagaaaaacaggtttttcaactacacatatcaactaacaggacttggaagacctataatgatgttttgcatagacaaggatatacagatgttaatgtcatccctgccttcagttctggcatacccactccttcctgaaaggtgggccaatgtttcaatgtatagctgtgcctcaggttattgggggtggggggatcccaaactccagattatgaacgggcctcagaaccagagtggaaaggggcaatttatcccttgccacagttgttctcatttttctaagaaaaaatgccgctttacccttaaatccaattacctcagaaataatctt

SEQ ID NO: 19697 - DNA, 531 bp, Homo sapiens
gttttttaatgtacgtgtgcagtctttcaggcactttgagttgagttgactagccgggggcaaacattcataagacagtgctctgtgggaaaactcaaaccaacagatgaagtcacttgctggatcttaacctatttgtcagtggaggtctgcctgtgtggtctaaatctatttcaaaaattcaacattatgaagtggggggagaaaaacaggtttttcaactacacatatcaactaacaggacttggaagacctataatgatgttttgcatagacaaggatatacagatgttaatgtcatccctgccttcagttctggcatacccactccttcctgaaaggtgggccaatgtttcaatgtatagctgtgcctcaggttattgggggtggggggatcccaaactccagattatgaacgggcctcagaaccagagtsgaaaggggcaatttatcccttgccacagttgttctcatttttctaagaaaaaatgccgctttacccttaaatccaattacctcagaaataatctt

SEQ ID NO: 19698 - DNA, 2621 bp, Homo sapiens
gatctccctccgccacctagactggagtgtagtaagcctatctccgctcactgcagcctcaagcagtcctccaacctaagcctcccaagtagctgggactacagagacataccactacgctaattttttagtttttgtttgtttgtttgtttttgtagagacagggtctcactatgttgcccaggctggtcttgaacccctgggctcaaatgatcctccttcctcggcctcccaaaattttgggattacagacatgagcgaccacatccagtgcaaatttttttataccaaggcaaagatgatcatgcaaaagaaactaatgaatgaacaagccgttggaacaaaaacaatttgttaatgcttccctggccttacaaatactggagtggtaatgggtggaatccattctattaaaatagaatggattttaaatgtgtgggggtttagatattcttctaccacctctgatttttctggaaaccattacagttccacaatccttttccctccaggtgatctgggtcactttcatcactttcatcactatcagttcatccactatttgcaccatttggccagctaagagttggctaaaagtgcagccaggtgtgtcgtaatgatgcaagactatagcagtataatccccatgatgcattcacaggatgcattacagagaaggggaaggaaagagtgcaattccaagatgaactttgacttgcaacccacactcccttcaacaaacagctttaagtaaatcttggaaatattgttcaaaatacatgtgacaaaacgtgaccatctttcctctgttacgtggcgggtatgatcctttctgtattcctaacatctctcaattwgggttgaatgtgcagtccctaagtcataagcaagtgccagtcaccacttatggttgctccgaagagaaaattagaccttgctttagttttttcttccaaaagaacaacttttcatttcttaaccattgtcagcaatttccataggctggattgacttaccttcatgatgtttggaagttaagacaatgtatttggcaccagaggcctgaaaaatatctgcccactggttggcattaaaaaattttgctgtaaatagtggtccaaaatcttcatatttgaaactaggagggtaattatctttcataaattccacatacttcggtatcttttccttttgccaataccacctaaggggaggaaaggaaagagtgcataaacagcacatacacacatatttaaaagaactgctccagctccccttaccatttacccctcacacagataggacccagattctctttctcacttccccattagtttgacttggctttaaagatagcttatgcaaactaaaccccctctcattttccacctatccccctgtgatatccactcagctcataaactagagcattctaggcaactcagctacccattctctcttttttttaagacagggtctcactctgtcactcaggttggaatgcagtaatggaatcatggttcactgcaaccttgacctcctgtgctcaagcaatcctctcgccttagcctcctgagtagctaggaccacaggcacgtgccaccacacctggctattttttttttctttgtagagatgtggtttccatatgttgcccaggctggtcttaaactcctgggctcaagcgatcttcctgcttcagtctcccgaagtgttaggattacaggcatgagtcaccgtgtccagccccattctcttttaattcttcacttttaaatcacaacatgtagtatatgtctttacacattgtcccttgtaacataagtgattagggcttctaaaaggaagactacatgcctaaaacataatatgcatctattatattcagtagtagagaacactttggaggcacaggacagaaagggaggcaaaagtaaaattaaaaagatgctgttattttaataaatggactcaaccttcaacaattacttgctatacgcattcattctaagcaatggtatattgaccctaaactgcgtaagcaagacttcatgaggaaaagcacatctacacattttagataaacacagcagtaactatcctcatgaaatagatgcaacccccatttttgacccacctcctgctttttctatcaccattcctttcatatgagtatttctacaggataagcaaatccataatcagcactatatttcccaagacgatcaggagactctgctaagaagaaataattgaagggcatactatgcggcaggcatgctgtttgcctgcccaaaagtcgtatttacgtaatttcccagcttccactacagctgcgacagggatgtgagatccatgctggccaagggaacttgagggaaagccaactttggggactgtggaaatggtttccctcctaatgaaaagagacactggccttcctgcctttgggcagggttgtgtgaagttatggtgcctggctgccatcctgtgaccatgaagggacaagtccccaggctgaggatgaaagaaagagcccgtgtctttgatttcatcaatgaaccgactactctaaatttcctgttatgtgagataacaagcccctatcattatacctttta

SEQ ID NO: 19699 - DNA, 2621 bp, Homo sapiens
gatctccctccgccacctagactggagtgtagtaagcctatctccgctcactgcagcctcaagcagtcctccaacctaagcctcccaagtagctgggactacagagacataccactacgctaattttttagtttttgtttgtttgtttgtttttgtagagacagggtctcactatgttgcccaggctggtcttgaacccctgggctcaaatgatcctccttcctcggcctcccaaaattttgggattacagacatgagcgaccacatccagtgcaaatttttttataccaaggcaaagatgatcatgcaaaagaaactaatgaatgaacaagccgttggaacaaaaacaatttgttaatgcttccctggccttacaaatactggagtggtaatgggtggaatccattctattaaaatagaatggattttaaatgtgtgggggtttagatattcttctaccacctctgatttttctggaaaccattacagttccacaatccttttccctccaggtgatctgggtcactttcatcactttcatcactatcagttcatccactatttgcaccatttggccagctaagagttggctaaaagtgcagccaggtgtgtcgtaatgatgcaagactatagcagtataatccccatgatgcattcacaggatgcattacagagaaggggaaggaaagagtgcaattccaagatgaactttgacttgcaacccacactcccttcaacaaacagctttaagtaaatcttggaaatattgttcaaaatacatgtgacaaaacgtgaccatctttcctctgttacgtggcgggtatgatcctttctgtattcctaacatctctcaatttgggttgaatgtgcagtccctaagtcataagcaagtgccastcaccacttatggttgctccgaagagaaaattagaccttgctttagttttttcttccaaaagaacaacttttcatttcttaaccattgtcagcaatttccataggctggattgacttaccttcatgatgtttggaagttaagacaatgtatttggcaccagaggcctgaaaaatatctgcccactggttggcattaaaaaattttgctgtaaatagtggtccaaaatcttcatatttgaaactaggagggtaattatctttcataaattccacatacttcggtatcttttccttttgccaataccacctaaggggaggaaaggaaagagtgcataaacagcacatacacacatatttaaaagaactgctccagctccccttaccatttacccctcacacagataggacccagattctctttctcacttccccattagtttgacttggctttaaagatagcttatgcaaactaaaccccctctcattttccacctatccccctgtgatatccactcagctcataaactagagcattctaggcaactcagctacccattctctcttttttttaagacagggtctcactctgtcactcaggttggaatgcagtaatggaatcatggttcactgcaaccttgacctcctgtgctcaagcaatcctctcgccttagcctcctgagtagctaggaccacaggcacgtgccaccacacctggctattttttttttctttgtagagatgtggtttccatatgttgcccaggctggtcttaaactcctgggctcaagcgatcttcctgcttcagtctcccgaagtgttaggattacaggcatgagtcaccgtgtccagccccattctcttttaattcttcacttttaaatcacaacatgtagtatatgtctttacacattgtcccttgtaacataagtgattagggcttctaaaaggaagactacatgcctaaaacataatatgcatctattatattcagtagtagagaacactttggaggcacaggacagaaagggaggcaaaagtaaaattaaaaagatgctgttattttaataaatggactcaaccttcaacaattacttgctatacgcattcattctaagcaatggtatattgaccctaaactgcgtaagcaagacttcatgaggaaaagcacatctacacattttagataaacacagcagtaactatcctcatgaaatagatgcaacccccatttttgacccacctcctgctttttctatcaccattcctttcatatgagtatttctacaggataagcaaatccataatcagcactatatttcccaagacgatcaggagactctgctaagaagaaataattgaagggcatactatgcggcaggcatgctgtttgcctgcccaaaagtcgtatttacgtaatttcccagcttccactacagctgcgacagggatgtgagatccatgctggccaagggaacttgagggaaagccaactttggggactgtggaaatggtttccctcctaatgaaaagagacactggccttcctgcctttgggcagggttgtgtgaagttatggtgcctggctgccatcctgtgaccatgaagggacaagtccccaggctgaggatgaaagaaagagcccgtgtctttgatttcatcaatgaaccgactactctaaatttcctgttatgtgagataacaagcccctatcattatacctttta

SEQ ID NO: 19700 - DNA, 2621 bp, Homo sapiens
gatctccctccgccacctagactggagtgtagtaagcctatctccgctcactgcagcctcaagcagtcctccaacctaagcctcccaagtagctgggactacagagacataccactacgctaattttttagtttttgtttgtttgtttgtttttgtagagacagggtctcactatgttgcccaggctggtcttgaacccctgggctcaaatgatcctccttcctcggcctcccaaaattttgggattacagacatgagcgaccacatccagtgcaaatttttttataccaaggcaaagatgatcatgcaaaagaaactaatgaatgaacaagccgttggaacaaaaacaatttgttaatgcttccctggccttacaaatactggagtggtaatgggtggaatccattctattaaaatagaatggattttaaatgtgtgggggtttagatattcttctaccacctctgatttttctggaaaccattacagttccacaatccttttccctccaggtgatctgggtcactttcatcactttcatcactatcagttcatccactatttgcaccatttggccagctaagagttggctaaaagtgcagccaggtgtgtcgtaatgatgcaagactatagcagtataatccccatgatgcattcacaggatgcattacagagaaggggaaggaaagagtgcaattccaagatgaactttgacttgcaacccacactcccttcaacaaacagctttaagtaaatcttggaaatattgttcaaaatacatgtgacaaaacgtgaccatctttcctctgttacgtggcgggtatgatcctttctgtattcctaacatctctcaatttgggttgaatgtgcagtccctaagtcataagcaagtgccagtcaccacttatggttgctccgaagagaaaattaraccttgctttagttttttcttccaaaagaacaacttttcatttcttaaccattgtcagcaatttccataggctggattgacttaccttcatgatgtttggaagttaagacaatgtatttggcaccagaggcctgaaaaatatctgcccactggttggcattaaaaaattttgctgtaaatagtggtccaaaatcttcatatttgaaactaggagggtaattatctttcataaattccacatacttcggtatcttttccttttgccaataccacctaaggggaggaaaggaaagagtgcataaacagcacatacacacatatttaaaagaactgctccagctccccttaccatttacccctcacacagataggacccagattctctttctcacttccccattagtttgacttggctttaaagatagcttatgcaaactaaaccccctctcattttccacctatccccctgtgatatccactcagctcataaactagagcattctaggcaactcagctacccattctctcttttttttaagacagggtctcactctgtcactcaggttggaatgcagtaatggaatcatggttcactgcaaccttgacctcctgtgctcaagcaatcctctcgccttagcctcctgagtagctaggaccacaggcacgtgccaccacacctggctattttttttttctttgtagagatgtggtttccatatgttgcccaggctggtcttaaactcctgggctcaagcgatcttcctgcttcagtctcccgaagtgttaggattacaggcatgagtcaccgtgtccagccccattctcttttaattcttcacttttaaatcacaacatgtagtatatgtctttacacattgtcccttgtaacataagtgattagggcttctaaaaggaagactacatgcctaaaacataatatgcatctattatattcagtagtagagaacactttggaggcacaggacagaaagggaggcaaaagtaaaattaaaaagatgctgttattttaataaatggactcaaccttcaacaattacttgctatacgcattcattctaagcaatggtatattgaccctaaactgcgtaagcaagacttcatgaggaaaagcacatctacacattttagataaacacagcagtaactatcctcatgaaatagatgcaacccccatttttgacccacctcctgctttttctatcaccattcctttcatatgagtatttctacaggataagcaaatccataatcagcactatatttcccaagacgatcaggagactctgctaagaagaaataattgaagggcatactatgcggcaggcatgctgtttgcctgcccaaaagtcgtatttacgtaatttcccagcttccactacagctgcgacagggatgtgagatccatgctggccaagggaacttgagggaaagccaactttggggactgtggaaatggtttccctcctaatgaaaagagacactggccttcctgcctttgggcagggttgtgtgaagttatggtgcctggctgccatcctgtgaccatgaagggacaagtccccaggctgaggatgaaagaaagagcccgtgtctttgatttcatcaatgaaccgactactctaaatttcctgttatgtgagataacaagcccctatcattatacctttta

SEQ ID NO: 19701 - DNA, 522 bp, Homo sapiens
aaagctcagctctgcagggcatggataataacttcagttttgaatatctgcacattgtgatgtgcattcacattcatgaggagatttctaatagatatatatgaagctcgcagaatctgcaggtctagatttaagtgatggatgtaagtattgttaaaaatctaaaaattcacagtaaactctaattgtgttttcttagactctgtgtttatctatttggcatccgttaactatagagccaaagagagccaaatggatgaagttgtttacaactcctgggatccagagcccgtatgctgaaacacttctttacctaagtctcacataccaagccaatatttatttcccttgscctaaatcaacccaagtactggtgcccaaagactagagacagcccctatgccttaaggccctccagaattttttaaactgcctatccaaagccattcccctgccctgtcttgccttttcctatggagaacccaataaatgctttagcctgggctttccttttcctcttgc

SEQ ID NO: 19702 - DNA, 522 bp, Homo sapiens
aaagctcagctctgcagggcatggataataacttcagttttgaatatctgcacattgtgatgtgcattcacattcatgaggagatttctaatagatatatatgaagctcgcagaatctgcaggtctagatttaagtgatggatgtaagtattgttaaaaatctaaaaattcacagtaaactctaattgtgttttcttagactctgtgtttatctatttggcatccgttaactatagagccaaagagagccaaatggatgaagttgtttacaactcctgggatccagagcccgtatgctgaaacacttctttacctaagtctcacataccaagccaatatttatttcccttggcctaaatcaacccaagkactggtgcccaaagactagagacagcccctatgccttaaggccctccagaattttttaaactgcctatccaaagccattcccctgccctgtcttgccttttcctatggagaacccaataaatgctttagcctgggctttccttttcctcttgc

SEQ ID NO: 19703 - DNA, 522 bp, Homo sapiens
aaagctcagctctgcagggcatggataataacttcagttttgaatatctgcacattgtgatgtgcattcacattcatgaggagatttctaatagatatatatgaagctcgcagaatctgcaggtctagatttaagtgatggatgtaagtattgttaaaaatctaaaaattcacagtaaactctaattgtgttttcttagactctgtgtttatctatttggcatccgttaactatagagccaaagagagccaaatggatgaagttgtttacaactcctgggatccagagcccgtatgctgaaacacttctttacctaagtctcacataccaagccaatatttatttcccttggcctaaatcaacccaagtactkgtgcccaaagactagagacagcccctatgccttaaggccctccagaattttttaaactgcctatccaaagccattcccctgccctgtcttgccttttcctatggagaacccaataaatgctttagcctgggctttccttttcctcttgc

SEQ ID NO: 19704 - DNA, 634 bp, Homo sapiens
gtcctggacagtgtgaaaaatcaaaggatgaatcaggcagagacctcttcgagcagatattattgagcagaagaggtaaattatgcacacaatagggtgcaagatgaaaagtggtatgagatgaatgatcataaagggtggtgggaattctgagatgatcatgaaaagtttcctgcccaagtggaatttgaatttgtccttgaaagagagtgaaatctggactgggaatgtcaaattaaaaataaaaatccagactttgtaaggtggggagactattgcaattgggaagctactctaactataagatctacaagcctttcaaagttaggcaaaaggatttttctttcatagggaagagtwaacaaggctggaaagaaaaaaaaaaaaagcagatgtagggaagtgggatgaaaaggagtggcaagatgtgacagtggaccccagaatatttaatcctaaagccagtatagtctctggaagggggctattaagagggattgtatgttgcctcaggctaaggtggtgcaaagctcagggatctagaggaaggacagaatgttaaccgtctttctttaagaagcattatattctgattgatcacttggggcaaaacagttcataattatctatgagg

SEQ ID NO: 19705 - DNA, 556 bp, Homo sapiens
aaaacacaaataatactctgaaagccatggccagaataaatgcaataaacactgtcctatgctgaagtaaaaagcatatattcattactggaatcttgatgttttctgtatttttaaacaattgtattacattatgcaacttgtatcattacattttttkatgtgttcggttaataaagaatagtcattcacacaggtaaaaagagaatctgagctgtttctaaaccaagttataataaatggtgcaagggaaaaaatggaatcaactgttgttcaatctattgacaagaagtgctttcaacacctctgattttatgcctcttaccttttccatagaaaattctatgaaaaaaaaatccaggcttctcacaaaatgtaaaacagaaaaaaaataatttaaggtaaacagaatctactcagaatttatatgattctttgttccttgctagttgatttataaaatcattatacttaatgcaatgtttatatttttagaacaccccctgaatgatgtatatactctgtgtgtgtgtgtggtggggggtggtatatacac

SEQ ID NO: 19706 - DNA, 536 bp, Homo sapiens
tttcttatataaataggccaaaatatggaaagtattcattgagtcttcaaaatatttatttgttttggaatcagtattggaatttaaagagtcaaagactggggaacacttttggtgaataatcaagggaaatatatattcagagtacctatagttagtgctcaaatcggtccttacatagcattctgaaaaaccacttcacgactctcataggtcagtttcatgaatcttccttaggctcatagaaatgtaaaatatattcaaaagaaagaataattagcaatttgggtagtcacaaactccatatttcaaacaaatggaattggttcttattcagataaagagtaaacctaattatcawtccaagtaaacttaaactttgttaggttaggagctaatttgctgtattgagcaatatttgaataatggtatcgatgaatattataaatacattatacatttttaactgtaattaaacttttctttaatgtaaggaggaaaaaagtgacagaaagcgagagaggcaatgaaagaga

SEQ ID NO: 19707 - DNA, 539 bp, Homo sapiens
aacacagtcctgaattatacaagacattcctaggtattttcccacatttgtggctatttatcatgatgtagcttttaaaacatgcatgtcttcaggctcttgattcttggaatttaagaagcttgaaaataacacatctcaaaatgagccaaagtcatgtttgttgcagaaaacaccacaagttcacccaaatgagagccaacacttcaacaataacaaaaacatcttaatcttaaatttccagtagttctaattttaaaaattactgcagaaaaagtagamgcaagaaaggaggaaatattattattattattattattattgccactagcattttcagaatccttactatttagcagacatggtgccgagttcttcatatgcatttaataaacagcataacacaggtagtattaccacttccttctggatgagccagactaataccatatgatgtacaatattatacttttctttgcccccacccaatatacactgcaatgtaaactccatgatagcaggaatttgggactattttt

SEQ ID NO: 19708 - DNA, 523 bp, Homo sapiens
gatggcttccaggttacttgtttaggaaattgggaggatggtggccccattctttaaagaagagaagataaaaagggtttggattaggggggatatatgagttcagttttgaacatgttcagattgaaatgataatgagatacttgtagattttttttatggacaggaactcaggatagagctctgggagggatgccagtatttgaagggtggtaaatataggagttgttgatgcctcgagtttgacaaaggttgcacaagagagggagtgacggcccccctaattctcaaatcatgggtacaggagcaagggcccagggaggaggctgagaggagcagtccgaaatccgaggtgtagggggtcagccaggggagggactgccattggagggtgtccaacacatggggatgtcagactactccttcggcgctcttgrtactgaggaggcaaaacctacaaagtcccagcccccaaggatgcttctaccgctaccctcacgcccagtgaagccatcatttaaag

SEQ ID NO: 19709 - DNA, 526 bp, Homo sapiens
tttgataatacccatcccagtgtttgaggtggtattgaaaggtaaagctttctatacaatatttcttccttccccagtttgcctctcaataggatataaactccataaaatcaagtactctgtttattcactgctttatccccagccaggccacgcatatagccattgctcaatacatgtgttgtattgactgagtgaatgattttttttttttttttttgagacagggtctcattctktcaccaggctggagggcagtggtgtgatcttgtctcactgcaacctctgcttccaaggctcaggtgatcctcccacctcagcctccccagtatctgggactacaggcacacaccaccacgtctggctaatttttctattttttgtagaagtggagttttgccatgttgcccaggctggtcttgaactcctgggctcaagtgatctgccaacctgagcctcccaaagtgctgggattagaggcatgagccaccctgcccagccgtgaatgaattttaaatgctcagta

SEQ ID NO: 19710 - DNA, 573 bp, Homo sapiens
aaattaatgaatccagtcgtcctctgaagtgctgagggtcagacataaccacgtagcctcgagttctctgtaagggccagacccatcttggaggttgcagctaacttcaatttttaccaatgcatttaattaggggacccatccacattcaagtactgaattgctgggatcccattgggattcagttcagcttatgtttattggactctacccaataccaaattcaaaggtgtgtcagacatggtccttgctatcaaggagctcctgctgagtgaagaaaatggacccgtggatattaccaatataatgtgtatctcrgaggaggaacactttgtccaaccagggaggatacagaaaatttctaggagataacacctaaaggaaaaggggaagggaataggcagagggctctcagacattaatgtgtgtgttgtgagtaaggaaactgtgcagtcatgaagtgataatgggtctggagaggccttggattttaccctaaaggtagttattgactgaatttaggtggcgagatacccagaggtcaaatttgctcttcagcaagaaagactgctg

SEQ ID NO: 19711 - DNA, 548 bp, Homo sapiens
aaatgagttttcttttcaagttaattggtactttgaaaatgccacaaagaggttcagtagatgatagtttatactcatggaatttttgctgctgggagtttttgtaaaaccatcaacatttttttgtactagatctttggggaactttcagttgctaataaattttgtaatttgcattgacattactttaaaaaaattctctaacaaagtctttttttcccagaagtctcagaatcgtaataaattctgaattctattttgtttgatttttcttggatgcctggaccatggattaattacagtaagagtaacttcaaggtcgggcatggtggctcacrcctgtaatctcaacacttggggagggagagatgggaggattgcttgagctcaggaattagagaacagcctgggcaacatggccaaacctcatctctataaaaaatggaaaaattagctgagcgtgttgttgtgtgccggtagttccagcttctcaagatcacctgagcctgagaggtagtggtggcagtgagccaagatcacaccactgc

SEQ ID NO: 19712 - DNA, 578 bp, Homo sapiens
gccgcccgggaggcagcggctggaggagcggacgggccccgcggggcccgagggcaaggagcagccgcctgccttggcctcccaaagtgccgagattgcagcctctgcccggccgccaccccgtctgggaagtgaggagtgtctctgcctggccgcccatcgtctgggatgtgaggagcccctctgcctggctgcccagtctggaaartgaggagcgtctccgcccggccgccatcccatctaggaagtgaggagcgcctcttcccagccgccatcacatctaggaagtgaggagcgtctctgcccggccgcccatcgtctgagatgtggggagcgcctctgccccgccgccccatctgggatgtgaggagcgcctctgcccggccgagaccccgtctgggaggtgaggagcgtctctgcccggccgccccgtctgagaagtgaggagaccctctgcctggcaaccaccccgtctgagaagtgaggagcccctccgcccggcagccgccccgtctgagaagtgaggagcctctccacccggcagccaccccatctgggaagtgaggagcgtctccgcc

SEQ ID NO: 19713 - DNA, 578 bp, Homo sapiens
gccgcccgggaggcagcggctggaggagcggacgggccccgcggggcccgagggcaaggagcagccgcctgccttggcctcccaaagtgccgagattgcagcctctgcccggccgccaccccgtctgggaagtgaggagtgtctctgcctggccgcccatcgtctgggatgtgaggagcccctctgcctggctgcccagtctggaaagtgaggagcgtctccgcccggccgccatcccatctaggaagtgaggagcgcctcttcccrgccgccatcacatctaggaagtgaggagcgtctctgcccggccgcccatcgtctgagatgtggggagcgcctctgccccgccgccccatctgggatgtgaggagcgcctctgcccggccgagaccccgtctgggaggtgaggagcgtctctgcccggccgccccgtctgagaagtgaggagaccctctgcctggcaaccaccccgtctgagaagtgaggagcccctccgcccggcagccgccccgtctgagaagtgaggagcctctccacccggcagccaccccatctgggaagtgaggagcgtctccgcc

SEQ ID NO: 19714 - DNA, 528 bp, Homo sapiens
gaaacagtttccaccttgagggtatttcctgaaccatatgaacttgagttatgcttttcatggccttatggaactgagaaatggaaattactatccagagtaccagtggtaaaaaacctaataagagactcctgcatcaatatgggacttcaaagaattgcgtctttacaataacagtgagctggaaacaatccctactccccagttggattgcaaggaaaatgaactgtttttaatttagttaatgagaagattgggtgtgtgtgtgcaagggagtctcctctgagattttgtaatcccaagcaggccctcacttagtatatagcctgaatcatggcactctgatgatatgaaaaatctaaagctgagaatctaatttacacaggcccagactggtaatgccctyagttgcctgacagaagtaaacataaatattctctgaagaactcatcttaatcctagacctctttaaaaaagtttaaagaaaatgatcagttcgcagacaaaaatcacaaaactctcaagaaa

SEQ ID NO: 19715 - DNA, 631 bp, Homo sapiens
ccagtttggaactattacaaatggtgctgctgtaaacattcttgcacatatctttttttttttttttttttcagacagggtctcactctgtcacccaggctggagtggtgtgccaccatcagggctcactgcagcctctacctccctaggctccagcgatcctcccacctcagcctcccaggtagctgggactacaggtgcgtgccactatacctggctaatttttgtattttttggtagagacgaggttttttcacgttgcccaggctggtctcaaactcctgggctcaagcaatctaccacctcggcctccaaaagtgttggggttacagccatgagcccctgcacctggccacrtatcttttgatgaacacgtgaacacattgtagctgggtttaaacccacaagtgtgattacccaagccccctttctctatcaaacattttaagctttctttcatttaaatgttcgaaatgaaacttatggatgataatgcacacacacatcaatgcaatgtctctaatataaaggagacataaaatggaagtgacttatgataaaataatgtgtatttcaatatattcttgggcacaacgaccccagaaggcataatgaagatgccagaaccctg

SEQ ID NO: 19716 - DNA, 531 bp, Homo sapiens
tgaatagttggctgaccaagtaggcaaggacataaagtggcttacaaataacctagaaggtgaggatccagaatcaggaccaaaacatactgacgcctggtttgtttctgccagtgcccccaacactggtttagctaatggactgaatccattccaggccttgctttggaaggggagatttgggacacsgattaggagtagggtcacaggagaacagaaagaaacctttgagggaaatactatgggagaatgtttacatttatctctggcttagaaaaaatgtcttgggatttaacaattatttagaagattgttgtagaagtttgcattgtctggagacaaagaactgttcttgctgatgaaatgtttacctggttatgaaggcagttatactatatagttccagaccttgcctttttatgaggaaagaaatgaagtcactgtatcttttgcactgtgcccatgacagtgttgtaccatacagagtaactgtgaattgagagctttctcacccttaaatgccaaaaaatg

SEQ ID NO: 19717 - DNA, 524 bp, Homo sapiens
catacacacagtatgggtttagaatataactatcatttggtatagaaaaattattttttaaaaaacagccaatttgtagatattttggaaccacataccactggrtacaaacttataagagatagcagagtagggtgactatacttagccacaaatgtatagtacttgggtgatggacaacctaaatgccctgacttgatcactgggcattgtatacatgtaaagttttctcacgtacccccatacagttgcacaaataaaaatagaaagttacaacaaataagtacagttttcaaaataagataaatttttaagacccttgctaattaagttagcagtaactccaaattgaagataatttgacctcaaccgagctaaagtctactttgtaacatatttgaaaaagatggtaaaaagctattaattggcacatttgtcatggttaattctatatttcactttggatagtctaaaacagttcaaattcatgaggttttatcatggctggaatatttggtgttttc

SEQ ID NO: 19718 - DNA, 1482 bp, Homo sapiens
ttctgatatcagtccgaaagtttatttttcagggaagtttttcttgacattccagcctacactggtttctacttttatatattgtcttatcctttaatcctcatataatttattatagttcataattacatacatgtggaggtatttgactgtctctcccaaagcagcatagaactcttaagaagacatagattatttctattttactcactaatttttccctaactcctggcagagtgatgactrtttattgaatgaagaagtagtataatcaataggttgagtatatatgtgtatacgtgtaactgtatccatttattgaattttagtgcaacttctgcttccagtagtttcacttaatagccttacttttagaataaaagactcctggctctaaaattgccgtaggtctgttgtgataaaagtgaacacctttatggtcagagctttgtctagagtacagttgattgggaagattgtgtgccaggttgtgtgtcgtgaagacaaaggctgtcgtagtagctctgatgggcaggtggctggaaggtgaaaagaaagtgaccagtcagctgttgtcaatacaggattgagtctttcagtcagctcttggagtggcctggggttgagattgagcgttggaaaccaaaatacccttctccattttgctgatggatttagaggctttcctttaggggcttacttttccttcactacccccaccacagaattactcagagcatgttttttttgtttttaatttttattatttatttattcatatgaaacagagtctcactctgtggcccaggcttgagatcagtgacatgatcatggctcactgcagttttgaccttccaggttcaagcgatcttctagcctcagcctcctgaggagccgggactgtaggcacatgccaccacgcctgcctaatttcttttattttttgtaaagatgaggccttgctatgttgctcaggcttgtcttgaactcctggcctcaagtgaacctcccaccttggcctcccaatgtgctgggattacaggtgtgagccatcatggtcagacctcagtgcatgttttaattcatgtatcggaatttacacacataagacatctgttatcttagagtctccttggccccttagacccttcctgattgcatggtttcaggctatgggtacaaactgcgtttaaaggaaattgtttaaaatgaaggaatgtatactggaatgttcaaatattctagtgaaatatcagaatcccaaataaaattattcagtctaaaatgtaaaacaaaatgtatcataaatgaaaaactgttttaaagtatatgaacaatgctcaatatcattaattatcagggaaatgccaattaaaataacaacaaaatatcatctcacacctgtcagaatggctattatcaaaaagacaaaggccgggcatagtggctcacaactataatcttagcactttgggaggctga

SEQ ID NO: 19719 - DNA, 1482 bp, Homo sapiens
ttctgatatcagtccgaaagtttatttttcagggaagtttttcttgacattccagcctacactggtttctacttttatatattgtcttatcctttaatcctcatataatttattatagttcataattacatacatgtggaggtatttgactgtctctcccaaagcagcatagaactcttaagaagacatagattatttctattttactcactaatttttccctaactcctggcagagtgatgactgtttattgaatgaagaagtagtataatcaataggttgagtatatatgtgtatacgtgtaactgtatccatttattgaattttagtgcaacttctgcttccagtagtttcacttaatagccttacttttagaataaaagactcctggctctaaaattgccrtaggtctgttgtgataaaagtgaacacctttatggtcagagctttgtctagagtacagttgattgggaagattgtgtgccaggttgtgtgtcgtgaagacaaaggctgtcgtagtagctctgatgggcaggtggctggaaggtgaaaagaaagtgaccagtcagctgttgtcaatacaggattgagtctttcagtcagctcttggagtggcctggggttgagattgagcgttggaaaccaaaatacccttctccattttgctgatggatttagaggctttcctttaggggcttacttttccttcactacccccaccacagaattactcagagcatgttttttttgtttttaatttttattatttatttattcatatgaaacagagtctcactctgtggcccaggcttgagatcagtgacatgatcatggctcactgcagttttgaccttccaggttcaagcgatcttctagcctcagcctcctgaggagccgggactgtaggcacatgccaccacgcctgcctaatttcttttattttttgtaaagatgaggccttgctatgttgctcaggcttgtcttgaactcctggcctcaagtgaacctcccaccttggcctcccaatgtgctgggattacaggtgtgagccatcatggtcagacctcagtgcatgttttaattcatgtatcggaatttacacacataagacatctgttatcttagagtctccttggccccttagacccttcctgattgcatggtttcaggctatgggtacaaactgcgtttaaaggaaattgtttaaaatgaaggaatgtatactggaatgttcaaatattctagtgaaatatcagaatcccaaataaaattattcagtctaaaatgtaaaacaaaatgtatcataaatgaaaaactgttttaaagtatatgaacaatgctcaatatcattaattatcagggaaatgccaattaaaataacaacaaaatatcatctcacacctgtcagaatggctattatcaaaaagacaaaggccgggcatagtggctcacaactataatcttagcactttgggaggctga

SEQ ID NO: 19720 - DNA, 593 bp, Homo sapiens
tgaccatatagtattacattgtagaaatatggcatatttaactatttcactatcagtaatcatttaggttaatttaaccattaactaacaatttaaaatattaataaataacactttktaagcagttaatatgtgccatgtaatgaactaagtgcttctcattaattattttgtttaatctttaattctgtgatgaattaatattatccccattttacggtagatgagacagaagtttaaagattcttagtaaccccattcaataaatcagagaaagtaggtggtaaaattgctatataaacccaaaagtgttattcaaagtcatcaatcatgagtgctgaccacagtgactctcaagctatacatacataataggtttcagttttataattggctattataaaatgagtctatggtttccttttatattcaaattgttgaatataaaatatactcatggggcaagaggtcccatgagtatatttatgggaaaaaactctacatcaaggtgttgtctgctacccacatttcctcttctctaaccagctgcatctgaaaatttttctgtatttgcatctcctcacatggactgt

SEQ ID NO: 19721 - DNA, 593 bp, Homo sapiens
tgaccatatagtattacattgtagaaatatggcatatttaactatttcactatcagtaatcatttaggttaatttaaccattaactaacaatttaaaatattaataaataacactttgtaagcagttaatatgtgccatgtaatgaactaagtgcttctcattaattattttgtttaatctttaattctgtgatgaattaatattatccccattttacggtagatgagacwgaagtttaaagattcttagtaaccccattcaataaatcagagaaagtaggtggtaaaattgctatataaacccaaaagtgttattcaaagtcatcaatcatgagtgctgaccacagtgactctcaagctatacatacataataggtttcagttttataattggctattataaaatgagtctatggtttccttttatattcaaattgttgaatataaaatatactcatggggcaagaggtcccatgagtatatttatgggaaaaaactctacatcaaggtgttgtctgctacccacatttcctcttctctaaccagctgcatctgaaaatttttctgtatttgcatctcctcacatggactgt

SEQ ID NO: 19722 - DNA, 556 bp, Homo sapiens
caatcagaaatgtgagatatggggagtattaatgaaccatggggtttcccaaatattttagcttggggtgaagggactggtggttggctcagtctataggcattaagtgtaactctgtggccttgggacagtcaagtgctcatgtccaaagatgtaccctttgattttttgtccatccatccatccatccatccatccatccctccatccctgaatccctmcatccctccatccattcctctatgcatccatccatccatccatccatcttctcaaccattcatcctctcattaatctgtttaaccattatccatccctgaacatttattgagctcctgtcatgtgccagggcttatgttgcttgtcaaggagaaggaagaaaaaacaaggtttttatcttttggatacttcagtctgtgatgtaaaaaagatacgtaaacacatcattgcaataccttttgctaagagcaacaacagaaaggattttacaaagtgccgagagaaggcatgttggttgtgaagattaaatgagattaaatgtgtgaaaagcacttt

SEQ ID NO: 19723 - DNA, 570 bp, Homo sapiens
tttttcttttttttaaagagacaggacctcactgtgtcacccaggttgaagtgcagtagcaccatcatagcttgctgtaacctcatacacctgggctcaaaagatcctcctgccttagcctcctgagtagttgggactacaggtacgcgccaccacacccagcttaatttttaaattctttgtagagacagagtctcactagatctccaactcctgacctcaagtgatcctccctccttggccctgcaaagcaagattcgcgtgagccaccatgcctggcccaactttgatttccagagttaaaccagaaggctcgacaagcattctgatgrtatttcttggttttttttttgttttttgttttttcctgagcaattctacatgaattctctttacgaagctcacctagatagtgtgacctagcagaagcagcaatggtgtgggattctggagacctccgtttaggcccaaactgaaacgtatggctgtgtgaccagaagggaagtcactttcccactcttcacctcactttccagctggaaaattgggggtggggagggccatgaccac

SEQ ID NO: 19724 - DNA, 690 bp, Homo sapiens
gcctactttaagagatacagatgacatttagaagaccagtgggttaaactgattactatgctcagacacacttggtaatccaggatgaaaataagtagaacacaccaaaattcaggatagttcatgcaactaacagagagatcatttgtcatatgktttttgcccacacagaagggaatatgattgtctgcacagcatatgttcatgaatgtctaaagtgtagcatgaaggttggccagccagattatgatgcagcacattgtactggcctgtgctgacccgaaggcccctcaatagtcttggcatggacaacacctatgaaggtcaagtggaggtgagcagagatgggtatcacatgggaagcattgatggttacttggtgccttcacttgctacttgccagaactaccaacggaaataaaggtaggggggccctgaagggaggtgtggattgaggttttctatccctcacagttaccaaacaattccctggttccaattcagaaagcagggagttcaatgcagaagcacatcctgggtcagaagatcgcagattatatgcattacccaatgtaagaagatgaagatgtttacaagaaacaattttctcaatacataaagaacaacataactccagtcatgacggagagacatgtaagaaagctcatgatgctgaacaagagaatccag

SEQ ID NO: 19725 - DNA, 527 bp, Homo sapiens
caacagaaaagggtggaggattcagaaaaaccctggttcatttgtaaaataccagccagacctcaggaaagacggaaaccaaggcagttccaggaatctaagtagcaggagtcaaggacctgtcctcagagtgacccagctctgaatcagttcatccctgcatccctccctcaggagagctgtgattggccagcatgggtcacatgaccaccatcttgcctgacagctggaccacacgatgtgaaggaaaatcacagtgttcccggacgcatcccactcccttcaaaggcagtggttccctgtggagtgattctcagccccggggatgggaccacaccctcagagaggcttggctaaatctgggccagaggtgcaggagtattgggtggatgttgttctatcttccctctkcccctcttaagactgctgaggatggggtggggcacagaattctcaatcactcttaacaaaatgcatccaagattgagccacaaagctgaatgactggaaacagggcttcaaggacc

SEQ ID NO: 19726 - DNA, 527 bp, Homo sapiens
caacagaaaagggtggaggattcagaaaaaccctggttcatttgtaaaataccagccagacctcaggaaagacggaaaccaaggcagttccaggaatctaagtagcaggagtcaaggacctgtcctcagagtgacccagctctgaatcagttcatccctgcatccctccctcaggagagctgtgattggccagcatgggtcacatgaccaccatcttgcctgacagctggaccacacgatgtgaaggaaaatcacagtgttcccggacgcatcccactcccttcaaaggcagtggttccctgtggagtgattctcagccccggggatgggaccacaccctcagagaggcttggctaaatctgggccagaggtgcaggagtattgggtggatgttgttctatcttccctctgcycctcttaagactgctgaggatggggtggggcacagaattctcaatcactcttaacaaaatgcatccaagattgagccacaaagctgaatgactggaaacagggcttcaaggacc

SEQ ID NO: 19727 - DNA, 728 bp, Homo sapiens
agggctttgcttgggattggaggcttctctgggaatgaggcaagtctatgtctgagtatcttaatagtccttacgtagaagatgggaagaatgaattgaggctagtgtcataagtagtaaagaagcagccgttattcatattagcccatctatagggctaatatgtcagtagatcgagaccagtaagtggcttagacaatgttcatgtttttgtctgtgttcactcatgattatggagtggccttgtttttgtcttgattcactacagtcgcaggatggcatctgatcacttcatcatgtcttctggtaaagtttcaataagcatttacatacttaactatgtttagtgaaaaattgatttcctcttatttactatttatattatagttaggatacaattttttaaaaagtggagtatagaggtaggtaagatgtgtcaattcawtttcaggttggtgaagggacactattaaatacttgttatattgagagggagggtattacggacaaaaaagttgatgttttactcatctattgcttcttaaccaatctgtttaacccagagtttagcttggaaaaatgataatcatatgttatctttcatggtttttgtgggtcaggaatttgggcagagctccactggccagctcttaattggagtttcttatggggttgcaatcatatgttagctggggccatgttcatctgaaggcttgactgaggctgga

SEQ ID NO: 19728 - DNA, 550 bp, Homo sapiens
tggggtttcaccgtgttagccaggatggtctcgatctcctgacctcatgatccgctcaccttggcctcgcaaagtgctatgatgacaggagtgagccaccgcgcccggcctacaaacagggatttttacatcatcactcctttcccacatctcccccatcactttggtcctcccctccccaattcctacatgcacrgggtttcttgttattctcccctctttgcttctcgcttaagcgactgtatggccccaacagcttcagagtgtttttcagctcaacctgttcaatccatcccatcactatggagaaactgaggttcagagaggagaagggacttttctgagtgtcagcatgtcattttccctgctcaagcaccatggaatctacagccatcttgttggcattgaaggtccttgacagtcaggccctgcccatcacttctggccctctgacctcctccccaactaatttgctcaccagctggccccagagctccacctaagaaagggaagggtccatgtgcagaacattgcctcctgccgacttagc

SEQ ID NO: 19729 - DNA, 550 bp, Homo sapiens
acggagaaacagagcttcagagagaggaacccagcaagttagttacagacctgacaatgggcatcatcatcaacttttttccttcctcagaaactaaccttcgcactgtcaagtttaagtctgataggttatcaaaggcccagggaagagggatcatctaggtgaactttgagaagcagatcttggaggaacaaaggcaatcccctctgcaccagggccatcagggaggcaaccccagctctggamacaggcagtctgggctgtgagctggtgttggcaaggcctggtcttcagaacagacctatcctaggagcctgaagggcccaacacgtccagcaatgctgttaactgccaggaggaaatatgaagaggaagctagactatgatgaggaaattcaaatatctgcctttgaaagttaaaaaaatatttgattcataaaactgtcacataatgctgaacaattaaaactggcagacacagactcagaaacaccccttgaatacctgtgagtgtaggacccctggttctgctgacttgctcattaccggg

SEQ ID NO: 19730 - DNA, 1075 bp, Homo sapiens
cagcccattgaagtggatgattcctaagaaatacattaacagagagttgtgttagctcagagctaggagaggacatttccagcaaaactytcccgggaaaaagaatgaaagtaatttaattctgttgggagaatgatgttcttcttgtaaattctaagtgttttttaaggaaatcagttgaaaaaagtatgcttacaatcaaatccccagtctttcctgtgtttaaagaatgtttcaaactctcaagggagatgaacaaggaaggaaaagatgaaatggttaggagtgataatcttccagctctgactgtgtcctggccagtacagcctggctcatcctcaggccagtcactacagaaagccagacatgaatgccgccccctaaaacacaaaaatgccttactgagagctttgcagaacagaggagtaaaagggcttcccggcatagatattggcgtgaacacctgcagtcagttcctgaagcctcaccagtacggcaagaaggacttcggaagaatcagagagaagttaacaacagcaaaaccttgaaagctcaaaagcagggggaagacaggcaaataatgagcagatctgaaaaaaaaaaaaaaaaaaaaaaaaagctaattctcacctggcaacgagaaatccaggcagtggtgaaaaccaacccaatcttcctttgcagcaagctgaaaagctctggaatttgacagatacctctgtagatggagcttgggatggaggggtttgtgtaagaaaataagaattggctgagagcttatttatgaagtagtgggtcccaggtcccctccacattctgtgagctgaatcactgccccttccctggcccaacaaaagtctgtggctttgttcttcagtgagagtaaaagagagggtctctgggctgaagcacaacaagctcagctgaggtctagggtctatgctgaaaatggggtattcaagggacatttgtctactggatgctgagacgctggcccacccacctccacctgcccacgtgctccaccatgatgccgcagccaggaggaaacagtgctcacgattccgtcagctcc

SEQ ID NO: 19731 - DNA, 1075 bp, Homo sapiens
cagcccattgaagtggatgattcctaagaaatacattaacagagagttgtgttagctcagagctaggagaggacatttccagcaaaactttcccgggaaaaagaatgaaagtaatttaattctgttgggagaatgatgttcttcttgtaaattctaagtgttttttaaggaaatcagttgaaaaaagtatgcttacaatcaaatccccagtctttcctgtgtttaaagaatgtttcaaactctcaagggagatgaacaaggaaggaaaagatgaaatggttaggagtgataatcttccagctctgactgtgtcctggccagtacagcctggctcatcctcaggccagtcactacagaaagccagacatgaatgccgccccctaaaacacaaaaatgccttactgagagctttgcagaacagaggagtaaaagggcttcccggcatagatattggcgtgaacacctgcagtcagttcctgaagcctcaccagtacggcaagaaggacttcggaagaatcagagagaagttaacaacagcaaaaccttgaaagctcaaaagcagggggaagacaggcaaataatgagcagatctgaaaaaaaaaaaaaaaaaaaaaaaaagctaattctcacctggcaacgagaaatccaggcagtggtgaaaaccaacccaatcttcctttgcagcaagctgaaaagctctggaatttgacagatacctctgtagatggagcttgggatggaggggtttgtgtaagaaaataagaattggctgagagcttatttatgaagtagtgggtcccaggtcccctccacattctgtgagctgaatcactgccccttccctggcccaacaaaagtctgtggctttgttcttcagtgakagtaaaagagagggtctctgggctgaagcacaacaagctcagctgaggtctagggtctatgctgaaaatggggtattcaagggacatttgtctactggatgctgagacgctggcccacccacctccacctgcccacgtgctccaccatgatgccgcagccaggaggaaacagtgctcacgattccgtcagctcc

SEQ ID NO: 19732 - DNA, 647 bp, Homo sapiens
ccatattccaagggagaaattagactccaccttttgactgagacaggagagcatatagaattagaaatactactgtggccattttgggaaaatatgacctgttacrgcccccctccccacccacccggcactgctgtaacccactaaattgggattaattccagccagtcgaggtcaggctcttcccggtcctttctatctgcctctcagcctcatgtcactctggttcattaacacatctttccttctcatgtttctccccctgcctgaatttgaggaaatcataacgttcttcaaggccagctcttatgagaagtcctccctgattgctccagcctcccagctgggccttagggcttcttttccctctgaaacctgcttttccttccaggactggtgtggagctctgagcaccagggaatgttatcaaagaagatgcagctttggcattctggactgaagccaggatcgcagcacagtgattagggagtcagacacagagaagtggccgaagaggggccagagtgagactggagaggaaggaaggagcttcccacatcacagctccctagggcccacctcatggaggaagagcaatagagctgtgccctgtgacacctggagtccctgaattgctcaggtggaaa

SEQ ID NO: 19733 - DNA, 1401 bp, Homo sapiens
tttgatgccaaaatggttaatctgctaagcttctctccaattgtataaagttgttcgtgtgtctgtataaatgtgttattgtgtatatgtgtgtgtgtgtgtgactcttyaaaatctgaaaatattatttgaggaaattcaaacacctccttgacaaatcaaagattaacctcaactaatgattataataaacacagaacacttgtgtctgttgatttctgttgacagaaaatgtataaacagcactccaagtggtgaatttgctgcatgaatatggccttagatataatataatacatggaaaacagagactgtaatgctgttcttggcaactgctttcctatttggaaggaaaaatttcttcagtgttttcttcagcccagtatgcctgcatttgccctcatgcaatagccttttctctcatctccaagtacttcttcatcaaatatctcaaagcatctagtagatttcctctttggattttctgtaggtaaatacagtcatccccttcatatccatgggttccacatctgtggattcaaccacttttggatcaaaactattcagaagaaccataagtggatggttgtgtctgtactgaacatgtatagacattttttcttgacatgattccctaaacaatacagtataacactatttacgtagaacttacattgtagtaggtattataaataacctagaaatgacaaagtacatgggagaatatgcatagattatatgcaaatactatacaatgttatataaaggacctgagcatctgtggatttgggtatctgaggggagtcctggaaccaaccatccatagataccaagggatgagagtatttctcttggtttgaggttggccatcttttccctttaaaatattgaaggtcatagttaaatcagctattggtttctagaaaacaattaaaattttacattagttgctttaaagtggtttggatgtgtgtgtttgataattttcactatcctggttatatcaaaatagggctttaaaaaaaacagagatacattgaggattaaaaaaatctaatgagtattagcaaaattcacagaaatcatgcccaatgacaggcacacagaagtagaagtggaaataaacccaaaaggttttccatccgtggttgtgtggacttttcatgtatggcaggtgggcagatgaaagccaatatgataaaagtccacctcatcctattcccggtgttaaaatcattgtttgctgggaagacgctgaaccccaccaacatgtagccccctactctagcaggtggggaagattctcttctgagcctctgccctctatccagtacatttatcaccatatgtccacattttctcatcctcaagaaagaaaaatatggacaaaggagggggaaa

SEQ ID NO: 19734 - DNA, 635 bp, Homo sapiens
gaaaacctgtgttctaagaagcatcaaagacaaattaagcatcagagaaaaagtaaattacacatttattgactgttttatgaggttatggagatagttcattaaatattcccctcaaaagatgattcttcttataaagagagtcaggagcagcaaagtgatcaataaacattggcatattcacaacagactcaaggcaacttgtgaytaaccgtgttttcttttctttttttttttttttttgagacagggtggtctcactcagtcgcccaggcttgaatgcagtggcgcgatctcggctcactgcaacctccgcctcccgggttccagtgattctcctgcctcagcctcccaagtagccgggactaccagcgcccaccaccacacctggctaatttttgtattttggtagagatggggtttccccatgtttcctactggctttggcaaacccaggtatggaaatccccaggaaaccaattatttcactgagtcagaagactggccagtgtttactgcgtccatcttgaaaattctaccactatggatttcataaaaagccacaactcaaacaaaactgaaacccacatacactcaaggactgaatcgaatatctcattgctagaaaacatgca

SEQ ID NO: 19735 - DNA, 635 bp, Homo sapiens
gaaaacctgtgttctaagaagcatcaaagacaaattaagcatcagagaaaaagtaaattacacatttattgactgttttatgaggttatggagatagttcattaaatattcccctcaaaagatgattcttcttataaagagagtcaggagcagcaaagtgatcaataaacattggcatattcacaacagactcaaggcaacttgtgactaaccgtgttttcttttctttttttttttttttttgagacagggtggtctcactcagtcgcccaggctkgaatgcagtggcgcgatctcggctcactgcaacctccgcctcccgggttccagtgattctcctgcctcagcctcccaagtagccgggactaccagcgcccaccaccacacctggctaatttttgtattttggtagagatggggtttccccatgtttcctactggctttggcaaacccaggtatggaaatccccaggaaaccaattatttcactgagtcagaagactggccagtgtttactgcgtccatcttgaaaattctaccactatggatttcataaaaagccacaactcaaacaaaactgaaacccacatacactcaaggactgaatcgaatatctcattgctagaaaacatgca

SEQ ID NO: 19736 - DNA, 635 bp, Homo sapiens
gaaaacctgtgttctaagaagcatcaaagacaaattaagcatcagagaaaaagtaaattacacatttattgactgttttatgaggttatggagatagttcattaaatattcccctcaaaagatgattcttcttataaagagagtcaggagcagcaaagtgatcaataaacattggcatattcacaacagactcaaggcaacttgtgactaaccgtgttttcttttctttttttttttttttttgagacagggtggtctcactcagtcgcccaggcttgaatgcagtggcgcgatctcggctcactgcaacctccgcctcccgggttccagtgattctcctgcctcagcctcccaagtagccgggactaccrgcgcccaccaccacacctggctaatttttgtattttggtagagatggggtttccccatgtttcctactggctttggcaaacccaggtatggaaatccccaggaaaccaattatttcactgagtcagaagactggccagtgtttactgcgtccatcttgaaaattctaccactatggatttcataaaaagccacaactcaaacaaaactgaaacccacatacactcaaggactgaatcgaatatctcattgctagaaaacatgca

SEQ ID NO: 19737 - DNA, 635 bp, Homo sapiens
gaaaacctgtgttctaagaagcatcaaagacaaattaagcatcagagaaaaagtaaattacacatttattgactgttttatgaggttatggagatagttcattaaatattcccctcaaaagatgattcttcttataaagagagtcaggagcagcaaagtgatcaataaacattggcatattcacaacagactcaaggcaacttgtgactaaccgtgttttcttttctttttttttttttttttgagacagggtggtctcactcagtcgcccaggcttgaatgcagtggcgcgatctcggctcactgcaacctccgcctcccgggttccagtgattctcctgcctcagcctcccaagtagccgggactaccagcgcccaccaccacacctggctaatttttgtattttggtagagatggggtttccccatgtttcctaytggctttggcaaacccaggtatggaaatccccaggaaaccaattatttcactgagtcagaagactggccagtgtttactgcgtccatcttgaaaattctaccactatggatttcataaaaagccacaactcaaacaaaactgaaacccacatacactcaaggactgaatcgaatatctcattgctagaaaacatgca

SEQ ID NO: 19738 - DNA, 548 bp, Homo sapiens
gctctgtttccccttgaagcatacagtcacccattacacgaaccacatgggttctcttagcaaagacaacagggctcggggaagaagtggtggttgaaaggaaccaccaggtcttccatattagggatgaatgggtgcgcgctggagtgycagtatgtgtatttgtataaaaggatgtactaaaatttctactttcgtttttagtcattttaaaatctcaaacagcatttaaggagagggtgaaatgtttctctctccctaaaggtggtaaaatgctggtctgataacattctaaacatttttccacatccttagaatcttgagctgttggtaaatattctatcatcatttatctcaccagtccctcattcatggacaaggaagttgttttccatttatcctcattcagatattgccgggatgaccattcttggagtgcggttttcatgcactttccttttgccccatgagtggaactgctgggccgttttcaggctttggagagctgtcaccacagtgtcctctggagagtgtgagccagctgccct

SEQ ID NO: 19739 - DNA, 540 bp, Homo sapiens
agtgaagcagatccaagttcatcagggaactgtgacttcatgcctatcactcccccattcataaggggtaggaaggagagatgcaagttcctctagcataggaaatcaggttccctcctcactgtttctccactgctgccctcctgggttgaagtgggtgacgctcagctctatgccacgatggccaatggaaaagtcaagtgtaactgtaaaacaccattgtcctaaaagacagcaatcttcctccttttgcttctcccatggcttctgcataatgtttgcttaaggaaacttggacatgttcagaaaatggcctttcacctacaggacaatatttcaaatgaagttagaattagactcaaggaaaccaggcagtggtctcataggatatttgaaacatatcaagactcccattttcttagctttcatgcacatctagatgtgaaatggaagtgttgttacttggargtgagaacaatgttgttctcacctccaaaacacagggcttcccctctgcctgccatgcccttcccctcagtc

SEQ ID NO: 19740 - DNA, 643 bp, Homo sapiens
gcatttatttgagcatctgttagccagtcacttccctagtaggaccctaggacaggggccattcccttcatcactatctcacctccccaggcattgtggctgccctgacctggccagcctcactcctcagtgtcgccaatgtcatcgacaacccctggggggtgtgtctccatcgatcagcagaggttggcaagcacctggcccacatcctgctctcccggcagcaggtacctgggaatggctgtgtgggcgtggcattgagcaagaggggaagtcaggtgctgacttgttcacagatatcagccttagaggcaaggctacttggagataactcaatggttttgggggtgtgggcagtccttgctgcctctccagttcaagtaatgaatgtgtcctaggatgaacagtaaraattatagactctgcagctctagcaggtatttaggtaaggactgaataacagggcatctgcaggtaggaacaagtctgggggactctggcagaagcaaaagtggctcctatgtatcagctcttcattcaagtgtttaggataatcactgggctcatttgggtgatatttcagtggaaacctctgacgcagtttgcagtgaagccagtaaagtgaatgagaccaggtgcttca

SEQ ID NO: 19741 - DNA, 511 bp, Homo sapiens
catataggttgacttttaagatttatatattttttacagtaaagctttcatagacatttccccaccagagttaggactgtacctcatataaaaatcctctggggtggagtggggtcaggggcagcaaagggcagggagacaggtgaaagggaatttagggacaagcatggcaatagtaccttgcaaggcctgttttttgttcatttgtttttgagacagggtcttactctgttgcctgggctggagtgcagttgcacagtcttggctcactkcaacctccgtctcctgggctcaagcaattttcccacctcagcctcctgagtagctggaactgtgggcacacgccaccacacctggctatttttttttttttttttgcatttttagtagagatggggtttctccatgttgcccagggtggtctcaaactcctgggctcaagcgatcctcccgccttggccgctcacagtgctgggattatagatgtgagccactgggcccggtcatgcga

SEQ ID NO: 19742 - DNA, 511 bp, Homo sapiens
catataggttgacttttaagatttatatattttttacagtaaagctttcatagacatttccccaccagagttaggactgtacctcatataaaaatcctctggggtggagtggggtcaggggcagcaaagggcagggagacaggtgaaagggaatttagggacaagcatggcaatagtaccttgcaaggcctgttttttgttcatttgtttttgagacagggtcttactctgttgcctgggctggagtgcagttgcacagtcttggctcactgcaacctccgyctcctgggctcaagcaattttcccacctcagcctcctgagtagctggaactgtgggcacacgccaccacacctggctatttttttttttttttttgcatttttagtagagatggggtttctccatgttgcccagggtggtctcaaactcctgggctcaagcgatcctcccgccttggccgctcacagtgctgggattatagatgtgagccactgggcccggtcatgcga

SEQ ID NO: 19743 - DNA, 511 bp, Homo sapiens
catataggttgacttttaagatttatatattttttacagtaaagctttcatagacatttccccaccagagttaggactgtacctcatataaaaatcctctggggtggagtggggtcaggggcagcaaagggcagggagacaggtgaaagggaatttagggacaagcatggcaatagtaccttgcaaggcctgttttttgttcatttgtttttgagacagggtcttactctgttgcctgggctggagtgcagttgcacagtcttggctcactgcaacctccgtctcctgggctcaagcaattttcccacctcagcctcctgagtagctggaactgtgggcacacgccaccacacctggctatttttttttttttttttgcatttttagtagagatggggtttctccatgttgcccagggtggtctcaaactcctgggctcaagcgatcctcccrccttggccgctcacagtgctgggattatagatgtgagccactgggcccggtcatgcga

SEQ ID NO: 19744 - DNA, 850 bp, Homo sapiens
atgcatgtggagcttaaaacctagatggcaggttgataggtgcagcaaaccaccatggcccatgtatacctatgtaacaaacctgcacattcggcatatgtatcccggaacttaaagtaaaattaaaaaaataaattttacagatatattgaaatactgggatgactactcttctaaagcttagttaatgtgtttttgattaaacaaatgcaatccaaaagatacatattamcatgtctttctatgtagcaagcactattaggcatttggaaaacatgtcctctagattgaaaggagtcaagaattgttccccaaatgtctggaaaataattgttatccaaatgtaaacgtgcatgaaagagaaacatgtaaaactcaaggcagtcagcaaaagggcaggttttcattgctaccttttaaattcggaacatttgactaaagtgaagggatgtgagaagaaccatggggaaaggctatctgcttaatgaaaaataataggcatcggcattttctccctcaaagctggggtgggctatgaaagtacttcctcaatagctgcctggggactttcaagacattttataaagttatttttttcaagaggctttttttttttcctgcagaggccacagtgaaaagtgtgaaaaatctatagagaaattaaatgaagcaatctacagatttttagagtagaaagtgggaacagaaatagtgggaaaaggcctggtatggtggctcacacctgtaatcccagcagttcaggaggccgagacgggcggatcacctgagttcgagttcgagaccagcctggccaatatagtgaaaccccatctctactgaaaatacaaaa

SEQ ID NO: 19745 - DNA, 559 bp, Homo sapiens
tcgtgttgaagcaaaaaccagacatcgtgtcatttattctgttgatattttagcgttatctctaaaaaaatgctcttcctcaaaacataatcgcgatgctcttatcaaacttaagaaataaaccttattctgttaatatcatccaaatctagtcagtgttccaattttccccattggcccatacattttttaaatgcaaggtttcaatttatttttatggcacttttacttggaacgctgtgggtttctgcccgtctccagaattaggtggctttttaatgcaggtaagtgttcttttattttatgcytttgccttgtttgttctgtaagttaacccttcatattttttttttctctctctctctctctgtccttgcaattgacgtggtgaagaaactgagttgcatatactttagagttcctgctctctggactttgctgatcgtatcttcaatgtgtcatttaatatgttctcctgtcccttttgctcctgcaaaatggcagttaggtctagaggcttgatcacagtcaggtgagatattgagcaagaatacgccaa

SEQ ID NO: 19746 - DNA, 532 bp, Homo sapiens
gatgggattcaaacacaggcaacctctgctcataartactactctggccttgcctgctgctctgctgggaagagcccaaagcgacagaaaccaaggacaaggccaggacaagatggggctgagtcctggggccctgccctggttcctgccaggggcagcagctcagcaagctcctgggccctccctggttccgctgatgctcgctgcgtggctgagccacctgctaagccacactggctcctgtgctcattctcccaggtacagtgtgttccgggtcaccgggtgcctaaacacaaagtgtacttatccatcggccgtgttccggcacgcaggccgttaccactgaacgagccagaatgttctgccttcttcctttattaggtgtgacacaaaacccctgctcccggggaagtccaggagaaagtacagcccgctcctctgaggaggcggacaactaagaagtgagtcagccaggacccttctttagagagaagtcacccattccctcactgctgcctggcctagaacatcc

SEQ ID NO: 19747 - DNA, 494 bp, Homo sapiens
cttccttctctctctttttctttctttcccttcctcccttccttccttccttcctagagtatttacaatgtayctcttagcaaatttcaagtatgcagtacagtattagctattttttaagtttattgaggtaaatttatatacatgaaaatgcattcttttttgcatagaagtctgtgagtttaaacaaaaacattggaattgtttatctgttatgcattgttagtgtcttttctgattaattaagtcattttattcagaaaatatttattttgcattaactgtgccaaccaggttctatatagaatttacaatgagacatgacatggtcctttgcttcaagaaaataattatttcctaaaaaatatgcaaatgaaagatgattctatagtagcactattttgaaaactaaatctcagagtctttagtttcattcgttcaaccattcactcttttattaaacatttgttgaaagcgtatgatgtctgtctgca

SEQ ID NO: 19748 - DNA, 546 bp, Homo sapiens
tattcagattgtccttcctgggatagtacttcctaatttaatgttgaagtctttctataaaaattgttcataaatatttgaaagtgaaagaattctccagatatttgatctgggacagttcccagtgatcttacacaacactctcatttagctctgcccatgactacctggaataaaggttacgtttttcaagcttcccttgcagctaggaatgtccatgtgactaagttctggtcaatgaaatgtaaacagaagtgtcacgtataagttccaaaaatggtctttaaagcatgagggcaatgtgtttyggaccctttttttttttttttttccccattgagagggaattgagagggatgttgacataatagatgaagctccagcagccatcttagcccatgaggtaaaaatctggcactaaaaatggcaataccagcaagatagaatgggcctgagttgatgatgactttctgaacatgcctactggactacctacctccagttttcttttgcaggaaagagaaacaagacttctatcttatttag

SEQ ID NO: 19749 - DNA, 492 bp, Homo sapiens
gattttcatgcagaacaaagaacctaattggttccacagttacacagcactcctaagaaacaaaccatagggacttctagctaaacatggcaaattaaaaatatctgtatctatatctatatgtatatttccaatccttctcaaagtccccctaagatgacagtcagtggtatagtttggatatttgtccccccgaatctcatgttaaaatgcaatccccaattctgraggtgaggcaggcagatcacttgaagttaggagttcgagaccaggttggccaacatggtgaaaccccgtctctactaaaaatacaaaaattaacatgatccagttgggtcatgggggtggatccctcatggctgggtgctgtccttacaatactgagtgagttcttgtgagatctggtggtttataagtgtgtggcacctccccctactctctttgttgctcctgctcttccggtgcgatatacagctcccctttgctttccat

SEQ ID NO: 19750 - DNA, 530 bp, Homo sapiens
ggggctatttgttctgtatttacccttccaagtgggactcccttccacggttccatggcctcttatccttccttcaaaggtccctgaagaagagggccagcttcagagtactcttccttgtggtataaagctacttcctgtgttcacttcccaccatgcgtttttaggcgtgttctgcaatcagtgggtctcagatgtttttctggctcttttcttgatgaagctccttggtgcccargtaaagcaggcagttgaatacgtaggtctgaacctcaggagagacctcacagctggagacgtgggttttgaccatccccatggagtcattaattgacatcatagcagagggtgagatgtcagctaaggagatggaaaataggaataaatttccgcaagactctaaatcctctggaaggtgtggacaagctccgtgaagtctgctctcctgcatgtgggagagagaaaagagagagagagagagagatgtatagcaattaagaacccatgccatgcagagaatgcttagaaaa

SEQ ID NO: 19751 - DNA, 523 bp, Homo sapiens
aaaaaaacaggctgggcgaggtggctcacatgtgtaataccagcaccttgggaggccgaggcaggcggatcacccgaggtcaggagttcgagaccagcctggccaacataatgaaatgccatctctactaaaaatacaaaaaattagccaggcatggtggtgyacacctgtagtcccagctactccagaggctgaggcaggagaatcgcttgaatccaggaggcagaggctgcagtgagctgagattgagccactgcactccagctaggcgacagagcaagactctgtctcaaaataataataatagtaataaactcgatgttttctcatagtgcacagatcctaatttcaaatctcacaatcttatgataatgactattattcttaatatcactaatatgaaaaagctacttcatgaattagtctttctcttccgtatctatccaattcactagatatgttgtgataatgcttttacaaacatttaatttcatgacctatggaggctttattaagatgggca

SEQ ID NO: 19752 - DNA, 523 bp, Homo sapiens
aaaaaaacaggctgggcgaggtggctcacatgtgtaataccagcaccttgggaggccgaggcaggcggatcacccgaggtcaggagttcgagaccagcctggccaacataatgaaatgccatctctactaaaaatacaaaaaattagccaggcatggtggtgtacacctgtagtcccagctaytccagaggctgaggcaggagaatcgcttgaatccaggaggcagaggctgcagtgagctgagattgagccactgcactccagctaggcgacagagcaagactctgtctcaaaataataataatagtaataaactcgatgttttctcatagtgcacagatcctaatttcaaatctcacaatcttatgataatgactattattcttaatatcactaatatgaaaaagctacttcatgaattagtctttctcttccgtatctatccaattcactagatatgttgtgataatgcttttacaaacatttaatttcatgacctatggaggctttattaagatgggca

SEQ ID NO: 19753 - DNA, 621 bp, Homo sapiens
caaaataaattcaattttcaacagaactgactgaatctttgtgactttagttctgttttcaccagttctgcagtactgaagtctgataactacgaacccgcctgggcgggactctctcggggccagagctgcatcccctccggctttgctcccaggctggcttagcacggggcttgacacaaccagagttaaataaacgtctgtcaagttgacctgaattaggaaaaacatatcctaagacagcaatcaacatcatgttgttaaaaaatgtttctrgaaaagggggaattgttataaagaaatgtattttagggaaattttaatagcaaaaagtcctgacgaatggtctcataaagaagtgaccatttatattaagctgaactttatccaaaaagagcaaacttcaatagaaagttaatacgacacttttctggaaaaaaaaattcatggttataaaggaatatatggaaaaaggcaatttttaataccccaagtcccaagggacgatttctcaaactactgcttcaaagaaataaaaaaaatcacattaccacactatggtaagcctaacacatgaaacagaccctagaatttcccaaaccggaacaaggatctccttct

SEQ ID NO: 19754 - DNA, 599 bp, Homo sapiens
acctgcccacattggtgaggatgatcttccttgcttggtgtacagattcaaatgctaatctcttcaggaggtaccctcataaacccaccagaaatagtgttttaccatctatccgggcactccttagcccagtaaagttgacataaaactaaccatcataagagttgaaacatgtcttagatgtcatttcttccaatttacctgtggaaatctccagcaaaggacatgtcttacccagcccatagattgagaaccaaaacatcaaaatttactgggcaaaagatgtttggaatattattgttattatcatgaggattattactttagacagggtcttgctctgttgcccaggctggagtgcagtaagatcacagttcactgcagccttgaccttccaggctcaagagatcttcccacctcagcctctcgggtagctgggactaccggtgtgtgccaccatacccggccaattttgtattttttgtagagacaaagtctcactatgttacccaggctggtcttgaactcctgcgytcaagcaatctcccacctcggcctcccaaagtgatggaattacaggcgtgagccatggtgactgg

SEQ ID NO: 19755 - DNA, 674 bp, Homo sapiens
gagcacatactcagttcagaggcaaacagtttaaaatgaattcctggaatgtcaatgggatgtccacatggatactgaagatggtagttatagcatgaaattgtttggaggttctcttsctgcaactctcccttattctgttagaaactaaactttggggtatggtcacataatgcccacaggtttaaaaacacaggctggatatgatagcaaatgttattgattgtactagggccaagtatgcatctatgtgatactgcaagcctaactggcctccaaggaaatcccactgatctgtgttaaaagcttggatctacattaagctctggatagaactggaaagttggctggatgtcttagaaatgtgctatatgaaagaaagactgtccttttaaaattatattcagtctttgtggaggggactgagagttaccatcttgaggatggcatgaaatgagagtgtgtgaattaaagtcagaggggctaaggataccatgtttggaccttgttccttgttaccaaacaagcaacgagggtccttttggactccatataaaaaaaaactcatcataaattgaaaaacaaaactaaattctataagaaacaaatatgtagcttctcagtatgtcctcagtttgtggccaagcagcatttgtccataccgtttgtatttt

SEQ ID NO: 19756 - DNA, 952 bp, Homo sapiens
agatattcaggtaccatccccaaagattgtgttatttgttcaagggtggagaagatagttttatttgttcaagggtggagtctgggcattagtatctttttaaagatccccaggaaattctaatgtgacctcagggcggaaaattattgtaccaagacccataaagcaagaattcagagtggaggttactgttaatgctcatggtaaaagtaatataaataacagactttatgaagtgccataaagataactttttctggataacaatagccagtaaaatatctattgtggttgtaaattacatagaaggattctgatttttaactgcaaaattacagacttttcyaacattctcatgcctacattaatcttttcttggttacgcgcaccatagatggaaataacaatcacagagtctttcatataaactgtgcaatcctattgcttttaatgaaaaaatcagcaaacttttatgtttaaaactcatcaataagacaggtttaaggaaagagaggacaaagggtaaggaaaagaaagcgatgtagaggagggtacttgaataccagaagcaacctttatagtaaatgtttgaaaaaaggcttatggtttgttaaatgaggataaagaaagaaggaggaaagaagagagagtaagagaaagaaagagtgggtggaatttagaaaatgcaccatgattgcctcaagtaccaaccctaatgttaaggtggagtgaagaatcaaagaaggaccttggctttggagtctagcctagactggaatctgaggtccacctcaattccttgagtgatcaatgaaagtgggactattggcacattccttacaggtgggtatgaagatcaaatgagataatttttgcaaaagcatcaagcaaagggtctggcacttactggtgattataacatgggagctattgagtaataactattatcata

SEQ ID NO: 19757 - DNA, 517 bp, Homo sapiens
acaaactaggtaaataaaatcttcctaacaataatatttagatagttgggtctttactaattaaaccagcaaaagaagaaatggcaggagaaaaaaacccacagaaacagaaacaatatactttaaaatgtaaaatcaacacaaaatgttgatgaaacccaaagtgtatctcatatggytagtgatagccttccttctaatagatttctgtcttctaactctcccagtgatctgacatacatccaaagttatttgaccattcttatttaaatctcatcaaaagaaaaatttcagatttttcaaaacttttatatacttttacacacattacagtctgactaatttccaaactggcagcttcccaaaagtaaatgacaaaggaaggtaacatgatgaactgatattttaatttgctaagtaaaaaatgataattaacaaggggaaaccgccaggcgtggtggctcacgcctataatcccagacctttgggaggctgaggtgggtggatcacgaggtca

SEQ ID NO: 19758 - DNA, 1199 bp, Homo sapiens
gacattgaatctttcccttctccactcttcccacaaaaccttgtgagaaatgctaccacagagacagaggtacagtgctgcaattcacctgcagaattgggtctaacctgtatccagaactgcttaaagcctgcttgtgatggtaactattacagttgtagggtctccattaaatgatgcttacatcctcaacagcagaaagtccttggttacttgcctcacttctagtgaattgggctgtaaagaatattgatatagatgctaccttctcaaatatggaattctgttttttttttaatcaaccttttaatggtacataaataattcttaatgggtgacagaaaaagaagaaattatttttaccagaatgtaggaatttaaactgagctcacytgttaatatggaatatatagtaggctaaatagacaccaagaaatccagattatagagttaacactgccattaactaactataacttaaagaacatccttcttagtggttttctaatgcttagaaaaaagagaggtaaacttggtaatctgtatcttccttttcaactatgaaaacaatgattcatattatctgtcatcaaaggattattgtgataattaaaatttatacttttaaaactgctttgagaaaactttggtttatttaatcttgagaatgttgagagaataaggcctgattgggtcatatggtttgcctcctgcatgtactcaaaagcaacagactcaaaaaccaagtttgctgaccccagaatcctttccattacattcattcaacgacaaacatttattaagtgcctactatgtggcagatactcttttaggtgctgggaattcagaggtgacaaaactaaataaggaatctgcttccatgcagtttgtgccagagactaaataaatacatgagatcatttcagatactggtaagtgtataatgaaaacagtaatgtatcacttgaggccaggaggagaggaagggctctgttagatttggaggtcaaagaaggcctctctaaaaaggtaacacttgagctgacacttaagcaacatgaaggagccacacttgatcagatctggggacaagatttccattccattgatggagtaagtttggtttgtcccaggaacagaaaggtcagtgagtcatgcatgtgggagcaagacgaagaatgacagggactaaagtaaag

SEQ ID NO: 19759 - DNA, 721 bp, Homo sapiens
cctctatttattaaatgcctgataaacactgaggtgttatgaagatataataatcacaattcttccaatcaaggcacttaactgtatacaggaagtttactacaaattatcctgtttcttcagaaaaagagtttttagagggtgggctcaaggtgtttattttttcaattttcaataatagactgtattggtatataatgcattgaagctcaatcaatattgcatttatgcytaacatatttatacattgaattaacatttattgcctgcttatcaaatggcataatacataaacagcacattgcacagtactggcatacaaggagtgcacaattaatgtcatgttatatggagagataaatggcaggccagccaggacttgtaacaggcaataaccacacaaaagatgtacaaagaattctggtgctacagaagcagagaaaatagcctgggggaatccaagcaaataactgacactgattagtagaaggaacaaagggaatatgtttgcaaaaaagttagtcatcatttggtattaaaacacaaaggaagtttaaaattgctgaacaatatcagtgttgtctatgcttatttggtgtcattctcacctaaaatttcttaactgctaaagacttgtgaaaaacctttatgttttacgaaaactttatgttttatttaagaatggttctgtataactaagaaagatggaatgccattcact

SEQ ID NO: 19760 - DNA, 1294 bp, Homo sapiens
gaaactccatctcaaacaaaacaaaaaaaatactaagggaaactattttaacattttttatggtattcaaagcaatcttcctttcaacaaactaaatgtgtaacaacaagggaatataaataaatgatactagacctgaaatagtcaaaactgatttatcccaaggtactcataaatctacaaattctgaaaaaaaacactgacatctcatttcctaacaaataagtaataaaaaaaatcaatctttctaagcttttaattattctgtaagtggaagactacaacaatttataatactaataatgccaattttgccactaaaatgaacactattctgcatcattactatgatgactgatatccaggaacttatctaactctctgaagagatttttctttaatgactttataagagttattgtgcatattaaggaccagtagaaaacaacagagtggcactgaaacgcttatactgggcaggaaactatactcacaagctgagaaatgtattcagcacacatggggtaatagcagcagtgactcagacttgtgcatcaataaaatccctgggtcatggacctttgagaatgtttctcacttgttaaatccatatccaacagtaggatttctcaaaataatggaatatcatgcagccattaaaattggtacctgtgatggctacacagagaaggttaaaaaaaataataataacatcctaggccgggcacagtggctcacacctgtaatcccagcactttgggaagctgaggcagggggatcacaaggtcaagaaataaagaccatcctggccaacatggtgaaactccatctctactaaaaatacaaaaattagctgggcatggtggcacacacctgtagtctcagctactcaggaggccgaggcaggagaatcacttgaacctgagaggcagaggtttcagtgagctgagatggcaccactgcactctagcttggcaacagagtgagactccgtctcaaataataataataataacatcctagaataacataataaaacaattacataagaaaaaagcacaaacttttaaaagaactatacattttataacttatatgcattttataactgtcaaatacagtaaaaaaagttacagtgataggattgtctaaagcttttaagatccttattttcttttatgatgtcttaaagggtatttaataataaaaatgttwtagaaaacagttatagggctggacacagtggctcacgtctgtaatcccaacactttgggaggccgaggtggatcatttg

SEQ ID NO: 19761 - DNA, 1294 bp, Homo sapiens
gaaactccatctcaaacaaaacaaaaaaaatactaagggaaactattttaacattttttatggtattcaaagcaatcttcctttcaacaaactaaatgtgtaacaacaagggaatataaataaatgatactagacctgaaatagtcaaaactgatttatcccaaggtactcataaatctacaaattctgaaaaaaaacactgacatctcatttcctaacaaataagtaataaaaaaaatcaatctttctaagcttttaattattctgtaagtggaagactacaacaatttataatactaataatgccaattttgccactaaaatgaacactattctgcatcattactatgatgactgatatccaggaacttatctaactctctgaagagatttttctttaatgactttataagagttattgtgcatattaaggaccagtagaaaacaacagagtggcactgaaacgcttatactgggcaggaaactatactcacaagctgagaaatgtattcagcacacatggggtaatagcagcagtgactcagacttgtgcatcaataaaatccctgggtcatggacctttgagaatgtttctcacttgttaaatccatatccaacagtaggatttctcaaaataatggaatatcatgcagccattaaaattggtacctgtgatggctacacagagaaggttaaaaaaaataataataacatcctaggccgggcacagtggctcacacctgtaatcccagcactttgggaagctgaggcagggggatcacaaggtcaagaaataaagaccatcctggccaacatggtgaaactccatctctactaaaaatacaaaaattagctgggcatggtggcacacacctgtagtctcagctactcaggaggccgaggcaggagaatcacttgaacctgagaggcagaggtttcagtgagctgagatggcaccactgcactctagcttggcaacagagtgagactccgtctcaaataataataataataacatcctagaataacataataaaacaattacataagaaaaaagcacaaacttttaaaagaactatacattttataacttatatgcattttataactgtcaaatacagtaaaaaaagttacagtgataggattgtctaaagcttttaagatccttattttcttttatgatgtcttaaagggtatttaataataaaaatgttttaraaaacagttatagggctggacacagtggctcacgtctgtaatcccaacactttgggaggccgaggtggatcatttg

SEQ ID NO: 19762 - DNA, 1294 bp, Homo sapiens
gaaactccatctcaaacaaaacaaaaaaaatactaagggaaactattttaacattttttatggtattcaaagcaatcttcctttcaacaaactaaatgtgtaacaacaagggaatataaataaatgatactagacctgaaatagtcaaaactgatttatcccaaggtactcataaatctacaaattctgaaaaaaaacactgacatctcatttcctaacaaataagtaataaaaaaaatcaatctttctaagcttttaattattctgtaagtggaagactacaacaatttataatactaataatgccaattttgccactaaaatgaacactattctgcatcattactatgatgactgatatccaggaacttatctaactctctgaagagatttttctttaatgactttataagagttattgtgcatattaaggaccagtagaaaacaacagagtggcactgaaacgcttatactgggcaggaaactatactcacaagctgagaaatgtattcagcacacatggggtaatagcagcagtgactcagacttgtgcatcaataaaatccctgggtcatggacctttgagaatgtttctcacttgttaaatccatatccaacagtaggatttctcaaaataatggaatatcatgcagccattaaaattggtacctgtgatggctacacagagaaggttaaaaaaaataataataacatcctaggccgggcacagtggctcacacctgtaatcccagcactttgggaagctgaggcagggggatcacaaggtcaagaaataaagaccatcctggccaacatggtgaaactccatctctactaaaaatacaaaaattagctgggcatggtggcacacacctgtagtctcagctactcaggaggccgaggcaggagaatcacttgaacctgagaggcagaggtttcagtgagctgagatggcaccactgcactctagcttggcaacagagtgagactccgtctcaaataataataataataacatcctagaataacataataaaacaattacataagaaaaaagcacaaacttttaaaagaactatacattttataacttatatgcattttataactgtcaaatacagtaaaaaaagttacagtgataggattgtctaaagcttttaagatccttattttcttttatgatgtcttaaagggtatttaataataaaaatgttttagwaaacagttatagggctggacacagtggctcacgtctgtaatcccaacactttgggaggccgaggtggatcatttg

SEQ ID NO: 19763 - DNA, 1294 bp, Homo sapiens
gaaactccatctcaaacaaaacaaaaaaaatactaagggaaactattttaacattttttatggtattcaaagcaatcttcctttcaacaaactaaatgtgtaacaacaagggaatataaataaatgatactagacctgaaatagtcaaaactgatttatcccaaggtactcataaatctacaaattctgaaaaaaaacactgacatctcatttcctaacaaataagtaataaaaaaaatcaatctttctaagcttttaattattctgtaagtggaagactacaacaatttataatactaataatgccaattttgccactaaaatgaacactattctgcatcattactatgatgactgatatccaggaacttatctaactctctgaagagatttttctttaatgactttataagagttattgtgcatattaaggaccagtagaaaacaacagagtggcactgaaacgcttatactgggcaggaaactatactcacaagctgagaaatgtattcagcacacatggggtaatagcagcagtgactcagacttgtgcatcaataaaatccctgggtcatggacctttgagaatgtttctcacttgttaaatccatatccaacagtaggatttctcaaaataatggaatatcatgcagccattaaaattggtacctgtgatggctacacagagaaggttaaaaaaaataataataacatcctaggccgggcacagtggctcacacctgtaatcccagcactttgggaagctgaggcagggggatcacaaggtcaagaaataaagaccatcctggccaacatggtgaaactccatctctactaaaaatacaaaaattagctgggcatggtggcacacacctgtagtctcagctactcaggaggccgaggcaggagaatcacttgaacctgagaggcagaggtttcagtgagctgagatggcaccactgcactctagcttggcaacagagtgagactccgtctcaaataataataataataacatcctagaataacataataaaacaattacataagaaaaaagcacaaacttttaaaagaactatacattttataacttatatgcattttataactgtcaaatacagtaaaaaaagttacagtgataggattgtctaaagcttttaagatccttattttcttttatgatgtcttaaagggtatttaataataaaaatgttttagaaaamagttatagggctggacacagtggctcacgtctgtaatcccaacactttgggaggccgaggtggatcatttg

SEQ ID NO: 19764 - DNA, 538 bp, Homo sapiens
agatgcccttctagggagagggtggggagagtagagaagtggagaaggggtacagggaggctgtgtcaccccaggcagggctgaatgccattgcatccgggatgattgatgggtcgtggcaggaccaaggacagggggacccactctgtggctgcctccagggwtcaagctctcttggcacagatcccaggcactcctgcaacagtgcaggtttaagccaccgatctacatgctggcactgaccaccggagggactgggcgaagggcagcaggagcctgggagggcacctgggcggcagtggaaggagctggccatcgtgagggcgctggctgcattgtgaatttgcagtagggagggggtgagggagttgggtgggcaacatggcggttctcaaagagaccacgtccttgtacaggtgcccaccccgacccatgcaccagacccgctgctgcctcccctgctggggtttgtaatataattatagcctccacccagtgctgtcacctgctgccttgggggtgggcagcaagagcatca

SEQ ID NO: 19765 - DNA, 537 bp, Homo sapiens
aaatagggagtcaatgcccccaaaacaatgcccttgaggcagtaggctctgggggacccaagccatttgaaaggtgagggagatgaggctgcccaggcaggacctctgggccccaaagctggtttctgcggataccaggggccaggcagcttcctgggagtgagatcagctgcagatggaaccacaggggcactgagctgctggggaaagggtggggagagccagcgtcttcatggggattctctactccctaatctaggagatgcagggccagagagctgatgctggaagtgaattagtccccaccatggactgaactctcctgcgggcagagatccgtagaggggagaggaaaaggctgtacttggaagttgagcttgttgtcctagcttgatggrggagacatgggccctttgttgtcctagcttgatgggggagacacaggcccttccatctgaagaagaagtgagcgtgctgctcccggcagccacgctgctccaccccaccccgacccaccccgatttcccccagcaccca

SEQ ID NO: 19766 - DNA, 626 bp, Homo sapiens
ttgcatatatttccttaggtcccactgattggttatttgaaagtccccaattcctgccaaccctgtctgcttgcaatggccctgtggggtgggagtggaggtggggaaagtgcagttgggcactgcttggctgagagctgaggcttgtccctgaggcctgaggctaatccacaggtctggtctgggtgggacagggtgctcgctgagaatcaggcccgtagggattgctcagtggcacagagcaggtaacagkccccaggcctcgcctaacacagaaagtgctcagccagctctttcgtcaatagatgagcaaagcgtggatggggcaaaatgagcgtcggctgcccagtctgctcagatcttcaggtggggtctcagtgatagggtcctcagcactgctgagatggcacctggtcccctgggccagtgtggccagccctgggggtggatgttggggaatctgagaggctgccgatcagatgctgccagcttcacctcctgccttcccactccacctggggaccaggcgcctggctgtgcatttgtggaaactctgtttccacagccacccagagggcaggcagcaagaggctgaggagttctcaaaaaggaggaaagtgctgcta

SEQ ID NO: 19767 - DNA, 615 bp, Homo sapiens
tttctgggatttgtgctagttagtgttgtaggccagtgattaattcttcattgacattgagtatggacatttgggcaagctcatctccaggcaccgcccccacctaacgtgctcctgtgtaatccctatcccaagtatcagtctgaggctgagtatttttaaaatactgtgagcttgagacactaatggacagtttgaacacttgcaaaaatatgtgttcagtaggaagttatatatttgcatattccttttcttgtagtacagttgtacaatcaaacaaatttaactttctaattatccagagaatgtaaataagtgttctatcatcttacaatagaaagaactttttwaaaaagggattaatcttatttctttgctagatttatttaaaaggttattttccattctccttgtcatatttctttcattttatctaaaagtttcctttattcttcaacctcaagctctttgtctttcgaaaatgccatatttgcttgatgaagcctcagggaaatgataatgctttgtatccactggaagtggtcacttgtctcgtattttatttggtcattcaatttttgtttgagagaacagacatgcatgacattttgcaat

SEQ ID NO: 19768 - DNA, 574 bp, Homo sapiens
ggtgatacagtttcactctgttgcccagtctggagtgcaatggtgcgatcttggctcacttcaacctctgcctcccagattcaagcaattctcctgcctcagcctcccgagtagctaggattacaggcctgtgccaccacgcctagctaatttttgtatttttagtagagacggagctttgccatgttgtccagtctggtctcaaactcctgacctcaagtgatctgcccacctcgttccctttttgatacaaccaattttaactttctttggctttcccgctttctttctttaaattttgtttgtctaagtttttttctggagaaatgcttaatgaactggttttgggctgtgyacacttttcagattatttgggttaatctgtatctgccttcacaaactggcagccaaaggtgttggggtgggaggcaaattcgatgcccagacatgtattgattaatttggacacatgtttaaaaacattggtttctttaccatcacttaaaaatgttagagctcttgtataaaaatacagatttctggctgggcacagtggctcacgcctgtaatccca

SEQ ID NO: 19769 - DNA, 524 bp, Homo sapiens
tttttcttttctaggaaccctcttcataaatcaaactcagaagacagctctgtaggtcagtaccacttttcttggtttacctatttaattatttcaatactttatagaaaacacgaatatgtgaaaatacaaaacccacaagaatccttctactcagaaataaacactgttaagattttgatgtacatccttattctcctttttctaggcagttttaaaaaaatataattgtgatcatattctgcatactgttttatagtttttaasttgaatatgttatgagcattttcccatgactgaatattctctacgttaatacagaaaaattagaagcaacctaaatatccagcaaagaatgaattggttaattagcttatggcacatccaatatggtggaatattatgcagacttaaaaatttactgctgctataaaaatcctggggtctgtgtccctaataatgtccttaggataaatccttcaatttggaattttttggatccaagattatgcataattaaggca

SEQ ID NO: 19770 - DNA, 807 bp, Homo sapiens
ctctggcaccaagtaaacaactgacgataatcaacagtttcattcctccatccgtcagggcaaggttttcgtctcttctagtcagggaagcataactctggggcctcaagtctgaacaatggccctaacgtagcatttcattgctttttgaggagcaggccatgcacatggggaccctgaaccctgctgtgagccaccctccagctgggggagcctgtcaggctgcaccccatctcacttgacttggccttgattcaccatcttcaaacaggtagctgtgaatggcttaggaccattctcagagttcacttcaccagctgagtttaaaacatcccgctatcctgtgagaatgatgaacagccacagccacgctgggcctgtgcttgtamaacaaacttgactttgcttctgcgcttcccagaagacactccagcatgctctgggagtaggcatactgggtatttgcacctgatgtgcaagaaagagtgcttggaagatcacagaagagtcagacaggaggagagccgaggggttgaaaccctcccgcgaacaggtacctggcacgtacctggcacaccattctcctccggagagtgctgctctgtcgcccaggctggagtgcagtggcacagtcacagctcactgcagcctcaaactcccgggctcaagtgatcctcctgcctcagcttcctgagtagctgggactatgggcatgctaccatgcctggctaatttttaaatttattttgtagtagagacagtgtctcactatgttgcccaggctggccttgaactcctgccctcaag

SEQ ID NO: 19771 - DNA, 807 bp, Homo sapiens
ctctggcaccaagtaaacaactgacgataatcaacagtttcattcctccatccgtcagggcaaggttttcgtctcttctagtcagggaagcataactctggggcctcaagtctgaacaatggccctaacgtagcatttcattgctttttgaggagcaggccatgcacatggggaccctgaaccctgctgtgagccaccctccagctgggggagcctgtcaggctgcaccccatctcacttgacttggccttgattcaccatcttcaaacaggtagctgtgaatggcttaggaccattctcagagttcacttcaccagctgagtttaaaacatcccgctatcctgtgagaatgatgaacagccacagccacgctgggcctgtgcttgtacaacaaacttgactttgcttctgcgcttcccagaagacactccagcatgctctgggagtaggcatactggktatttgcacctgatgtgcaagaaagagtgcttggaagatcacagaagagtcagacaggaggagagccgaggggttgaaaccctcccgcgaacaggtacctggcacgtacctggcacaccattctcctccggagagtgctgctctgtcgcccaggctggagtgcagtggcacagtcacagctcactgcagcctcaaactcccgggctcaagtgatcctcctgcctcagcttcctgagtagctgggactatgggcatgctaccatgcctggctaatttttaaatttattttgtagtagagacagtgtctcactatgttgcccaggctggccttgaactcctgccctcaag

SEQ ID NO: 19772 - DNA, 807 bp, Homo sapiens
ctctggcaccaagtaaacaactgacgataatcaacagtttcattcctccatccgtcagggcaaggttttcgtctcttctagtcagggaagcataactctggggcctcaagtctgaacaatggccctaacgtagcatttcattgctttttgaggagcaggccatgcacatggggaccctgaaccctgctgtgagccaccctccagctgggggagcctgtcaggctgcaccccatctcacttgacttggccttgattcaccatcttcaaacaggtagctgtgaatggcttaggaccattctcagagttcacttcaccagctgagtttaaaacatcccgctatcctgtgagaatgatgaacagccacagccacgctgggcctgtgcttgtacaacaaacttgactttgcttctgcgcttcccagaagacactccagcatgctctgggagtaggcatactgggtatttgcacctgatgtgcaagaaagagtgcttggaagatcacagaagagtcagacaggaggagagccraggggttgaaaccctcccgcgaacaggtacctggcacgtacctggcacaccattctcctccggagagtgctgctctgtcgcccaggctggagtgcagtggcacagtcacagctcactgcagcctcaaactcccgggctcaagtgatcctcctgcctcagcttcctgagtagctgggactatgggcatgctaccatgcctggctaatttttaaatttattttgtagtagagacagtgtctcactatgttgcccaggctggccttgaactcctgccctcaag

SEQ ID NO: 19773 - DNA, 807 bp, Homo sapiens
ctctggcaccaagtaaacaactgacgataatcaacagtttcattcctccatccgtcagggcaaggttttcgtctcttctagtcagggaagcataactctggggcctcaagtctgaacaatggccctaacgtagcatttcattgctttttgaggagcaggccatgcacatggggaccctgaaccctgctgtgagccaccctccagctgggggagcctgtcaggctgcaccccatctcacttgacttggccttgattcaccatcttcaaacaggtagctgtgaatggcttaggaccattctcagagttcacttcaccagctgagtttaaaacatcccgctatcctgtgagaatgatgaacagccacagccacgctgggcctgtgcttgtacaacaaacttgactttgcttctgcgcttcccagaagacactccagcatgctctgggagtaggcatactgggtatttgcacctgatgtgcaagaaagagtgcttggaagatcacagaagagtcagacaggaggagagccgaggggttgaaaccctcccgcgaacaggtacctggcacgtacctggcacaccattctcctccggagagtgctgctctgtcgcccaggctggagtgcagtggcacagtcacagctcactgcagcctcaaactccygggctcaagtgatcctcctgcctcagcttcctgagtagctgggactatgggcatgctaccatgcctggctaatttttaaatttattttgtagtagagacagtgtctcactatgttgcccaggctggccttgaactcctgccctcaag

SEQ ID NO: 19774 - DNA, 807 bp, Homo sapiens
ctctggcaccaagtaaacaactgacgataatcaacagtttcattcctccatccgtcagggcaaggttttcgtctcttctagtcagggaagcataactctggggcctcaagtctgaacaatggccctaacgtagcatttcattgctttttgaggagcaggccatgcacatggggaccctgaaccctgctgtgagccaccctccagctgggggagcctgtcaggctgcaccccatctcacttgacttggccttgattcaccatcttcaaacaggtagctgtgaatggcttaggaccattctcagagttcacttcaccagctgagtttaaaacatcccgctatcctgtgagaatgatgaacagccacagccacgctgggcctgtgcttgtacaacaaacttgactttgcttctgcgcttcccagaagacactccagcatgctctgggagtaggcatactgggtatttgcacctgatgtgcaagaaagagtgcttggaagatcacagaagagtcagacaggaggagagccgaggggttgaaaccctcccgcgaacaggtacctggcacgtacctggcacaccattctcctccggagagtgctgctctgtcgcccaggctggagtgcagtggcacagtcacagctcactgcagcctcaaactcccgggctcaagtgatcctcctgcctcagcttcctgagtagctgggactatgrgcatgctaccatgcctggctaatttttaaatttattttgtagtagagacagtgtctcactatgttgcccaggctggccttgaactcctgccctcaag

SEQ ID NO: 19775 - DNA, 1206 bp, Homo sapiens
tttattatctgtaattcgttctgacattttctatgctatcacacttactctatctcatttcctttaaaggctggttgtgatccaatagatttcataactcactgaagagtcccaacctgtcatttaaaaacattatggtaatgcaagttacagaacaaatgttcaatattcctgattcatttggatgcaaaaatgttgtgaaatctttattcaagtggaatagacaaactgtcgattagtcttcaaaatggtgaggactcgggcaattacaatttcactttaattaatttaatttagtgttgtcatgcagtgaatgcaggaatttttattattttgtaaaagcraaaaagataagaggaggaaattattatatattagttcattcttaatatactatccaatatatcatatacattcatagtaacgcagcatgacagccaaactggtgctgcagaaggagcaacaagctggccgtcaggagccatgactcctccacaagccatggcagaaccgtgtcctgcagaacctgcatgctgcatgggcaaatacccactagagagagccacagtttcccaacacggggacagtcacatcagaattttccaattttataagagaacattttttatcttgcttcatttattttatttactaactttgaaataggatatataatttttaataaatagaaattatgatgagaaactatatgtagtggccgggtgcagtggctcacacctgtaatcccagcactttgggaggccgaggcgggtggatcacctgaactcaggagtttgagaccaggctgactaacgtagcgaaaccccgactctactaaaaatataaaaattagccggtcatggtggtaggtgcctgtaatcccagctactcaggaggctgaagcaggagaataacttggaccagggaggtggaggttgcagtgagccgacattgccccattgcactctagcctgggtgacagagcaagacaccatctcaaaaaaaaaaaaaacccgaaaaaaacaactatatgtagtgaaaaacctccctttgtctcagacacccaaactccactctttgaaatggtttaacagttttgcatatacttctagagatgttttccatatattctcttttagaaaaaaaaaaaaggcacttacacttctaaatcatgtttttttcaaaggcttacgataaatttgaagc

SEQ ID NO: 19776 - DNA, 564 bp, Homo sapiens
ctttcatgggtgagcttgcarattgtgctctttctgttgactgtcctgggctatgccagatccagagaagcacggcaggatcattaccagctaagaaggggtcttaccattgcctgccccttaggaatcagttgccctaggcgaagtccctgttttcctccaagcagactgataaacactggctgtgctcaagcagcagcagggctggattcgcgtcacttactttggtatgcaggaggctgcttgtattccgtggcgcagggagctaagcacacacgtcagagaaagccatttcaatttatcattttaattttgctattaagcatccacggaccctaaatggattctccacaatggcatctgcaagtccattatcagctaaatgtttaatgagttttttaagtaaccgatggatgccacagtgtataggaaactttcttgagtttttttcacatataaggaggcatttctcgaagtcacttgggatggcttaacatagctcatccctgccagctgacttgtggcctctttcccttccttccatgtgcagtgccttctatcttg

SEQ ID NO: 19777 - DNA, 564 bp, Homo sapiens
ctttcatgggtgagcttgcagattgtgctctttctgttgactgtcctgggctatgccagatccagagaagcacggcaggatcattaccagctaagaaggggtcttaccattgcctgccccttaggaatcagttgccctaggcgaagtccctgttttcctccaagcagactgataaacactggctgtgctcaagcagcagcagggctggattcgcgtcacttactttggtatgcaggaggctgcttgtatkccgtggcgcagggagctaagcacacacgtcagagaaagccatttcaatttatcattttaattttgctattaagcatccacggaccctaaatggattctccacaatggcatctgcaagtccattatcagctaaatgtttaatgagttttttaagtaaccgatggatgccacagtgtataggaaactttcttgagtttttttcacatataaggaggcatttctcgaagtcacttgggatggcttaacatagctcatccctgccagctgacttgtggcctctttcccttccttccatgtgcagtgccttctatcttg

SEQ ID NO: 19778 - DNA, 564 bp, Homo sapiens
ctttcatgggtgagcttgcagattgtgctctttctgttgactgtcctgggctatgccagatccagagaagcacggcaggatcattaccagctaagaaggggtcttaccattgcctgccccttaggaatcagttgccctaggcgaagtccctgttttcctccaagcagactgataaacactggctgtgctcaagcagcagcagggctggattcgcgtcacttactttggtatgcaggaggctgcttgtattcygtggcgcagggagctaagcacacacgtcagagaaagccatttcaatttatcattttaattttgctattaagcatccacggaccctaaatggattctccacaatggcatctgcaagtccattatcagctaaatgtttaatgagttttttaagtaaccgatggatgccacagtgtataggaaactttcttgagtttttttcacatataaggaggcatttctcgaagtcacttgggatggcttaacatagctcatccctgccagctgacttgtggcctctttcccttccttccatgtgcagtgccttctatcttg

SEQ ID NO: 19779 - DNA, 533 bp, Homo sapiens
tagagacggggtttcaccatgttggccaggatggtctggagctcttgacctcatgatccacccgcctcggcctcccaaagtgctgggattacaggcgtgagccaccatgttcagcctggagttctttcctgattctatgaggctgtgagtagtggttcttaaccaggaatgttatcaccaccacctcaggggaggtgcacatttcttgatatggggggtcggggttgggggcaccagggatgccccatgtcctgtaattactgtccacagtgtccacacaggaagataccggttgtatcagagacttggtctaggattcacaggtttttcttccagttggatttaatgagcttctctctgtcctaagacccaaatgctgtggggtttgccaacattacaaggtaggcatttcacagaacggaattctggcaggccrtcttcatgcagtgaattgctgtcattggtaggtggtgctttttattgcccccatctccagcagagatcttataaattccctttgcctgaaatcagca

SEQ ID NO: 19780 - DNA, 576 bp, Homo sapiens
caggaggctgaggcaggagaatcgcttgaacccaggagatggaagttgcagtgagccaagatcgtgccactgtactccagcctggaggacagagcatgasttcgtctcaaaaaaaaaaaaaaaaaaggctactgtgtcttcttttctcttcctgtgtgcaagtctgtgatttcaaggctatggccatgttacgtgtagccgtacccatgtcttgaggtgcagccccgtgtgaatgtgtgtcctgggatgtagtgagatgtgtcgcctctaccgagctgtttctaattttgttggattcccttttcatttcacatctcagactcaagccaaatgctgcctcctttgaaaccctccttaacagaaacatgaggaccatttataaaaggtgaccgtagtgtgagataaggggtggaaagtactgggatagcacgtggaccttgatttgatcaaatggaccaagtctcataaaatggctgctgagtgcttttctatttagaaagagaatttcccccaatacggtttcatttgaatctcacacaatccaaaaacagagatagtattagtctcagtttgtaa

SEQ ID NO: 19781 - DNA, 576 bp, Homo sapiens
caggaggctgaggcaggagaatcgcttgaacccaggagatggaagttgcagtgagccaagatcgtgccactgtactccagcctggaggacagagcatgagttcgtctcaaaaaaaaaaaaaaaaaaggctactgtgtcttcttttctcttcctgtgtgcaagtctgtgatttcaaggctatggccatgttacgtgtagccgtacccatgtcttgakgtgcagccccgtgtgaatgtgtgtcctgggatgtagtgagatgtgtcgcctctaccgagctgtttctaattttgttggattcccttttcatttcacatctcagactcaagccaaatgctgcctcctttgaaaccctccttaacagaaacatgaggaccatttataaaaggtgaccgtagtgtgagataaggggtggaaagtactgggatagcacgtggaccttgatttgatcaaatggaccaagtctcataaaatggctgctgagtgcttttctatttagaaagagaatttcccccaatacggtttcatttgaatctcacacaatccaaaaacagagatagtattagtctcagtttgtaa

SEQ ID NO: 19782 - DNA, 576 bp, Homo sapiens
caggaggctgaggcaggagaatcgcttgaacccaggagatggaagttgcagtgagccaagatcgtgccactgtactccagcctggaggacagagcatgagttcgtctcaaaaaaaaaaaaaaaaaaggctactgtgtcttcttttctcttcctgtgtgcaagtctgtgatttcaaggctatggccatgttacgtgtagccgtacccatgtcttgaggtgcagccccgtgtgaatgtgtgtcctgggatgtagtgagatgtgtcgcctctaccgagctgtktctaattttgttggattcccttttcatttcacatctcagactcaagccaaatgctgcctcctttgaaaccctccttaacagaaacatgaggaccatttataaaaggtgaccgtagtgtgagataaggggtggaaagtactgggatagcacgtggaccttgatttgatcaaatggaccaagtctcataaaatggctgctgagtgcttttctatttagaaagagaatttcccccaatacggtttcatttgaatctcacacaatccaaaaacagagatagtattagtctcagtttgtaa

SEQ ID NO: 19783 - DNA, 531 bp, Homo sapiens
cgcagacataattctaacaggttttttgtgcaaacaaaagataaagaaagctacagcaatgatttactgatatctaaagttgaaaactgacaaaacacaaactgcttttttcttactgtttgaactgtttatcctttaaactactaaataagatagatatggccaaaattaaatatggtttaaaaactacaaaaccaaatactccaatcttaacagccattaagttctgtctttgagttacctaaatgtcctaactttatttttttttaattttcaccattgcctttgtcccagcaaaagaaaggatttataaatttctgctttataaatcctatttagttattatrttgtgaaataaactactcatctggatttttcttaaatgaggaggatgcatttgaaatgaaaattccaaaatattttcccaagaaaaactcactaaagaatgaattaactgaactaaatctggaatcttagctgcaaagtctatcctatttcaaaataacctaccatttgaacataacacaccac

SEQ ID NO: 19784 - DNA, 619 bp, Homo sapiens
tgcaatacaaattataatttatgataaacttataatctattatattttaatgtaaatttcaaatcttaatatgtgtttttggctgggcacagtcgctcatgcctctaatcctagcactttgggaggctgaggcgggcagatcatctgaggttgggagttccagaccagcctgaccaacatggagaaaccccgtctctactaagaaatacagaattagccagacgtggtgacacatgcctgtagtcccagctgcttgggaggctgaggcaggggaatcgcttgaacttgggaggcagaggttgcagtgagcagagatcacgctattgcactccagcctgggcaacaagagcaaaactccgtctcaaaaaaaaaaaaaaaaagaaagaaaaatgtgtgttagtttttaagtmtgccaaaatgtaatgaatagaaggaagttgagtgtgtcaccctttatatagaaaattggcatcttaagtccatcagcagcaatgcacagtttatttttggtttatttattgaaatggctgcactggctgtcaccagattcttctgctaatttcaaataggtgttttggcctagggagcagattctcccccaactgcagagctaattgat

SEQ ID NO: 19785 - DNA, 1952 bp, Homo sapiens
gggggttgttctctggtgggcaggggtggatctcacaaagtacattctcaagggtggggagaattacaaagaaccttcttaagggtgggggagattacaaagtatattgatcagttagggtggggcaggaacaaatcacaatgctggaatgtcatcagttaaggctgtttttacttcttttgtggatcttcagttaatttaggccatctggatgtatacgtgcaagtcacaggggatgcgatggcctggcctgggctcagaggcctgacaggaatgacacrttgggtgtcagaaaaaaaacacagaaaactccctaagcagattggttgaaagcaggctgactgcatgtcatctgggggtgcgtctccccccaagagcaggtttcacatctcattccccggttgattggacaagacccttcctgtctttaagttctgttttcttcctccctttgtctctccgaagaaaatcagctgcatgaaaacgatcctctgggcagaaattggtgctgttggagccgcacagaggtgccctcccgtgccccctggcccccaccgggccgtgtctcctcctgcctgttgcaatcagccctcgtccgactctttttggaagtgattaaaacataactgtcatagctctgggggagacaggctgcagatcctgattataattcagaaggatctaaagaaaaagtaattttttaaaaaaattctggttaaagccaaagctcataagacgtgtgtgatggagtggtatgcaagagcacaattaatgtatgtcctagacatctgcccacaggattcagggctggcaaatgagtgcgtccctaaaaataatgactagtgctatctttaaaaagtcttttgtggcatagcagattaagatggatggcctgggaagtacagtggcagcgtgtgctgtggtatccaggaataagttgtacctcctcggggtggcagtggaactgggccgtgaacagcttttgcttcccagagaggactgccatggcctgctgcatggaatttgattttaatctgtttgttatttttgggtttggtcttggactgggtttgaaatccagatgtgacttttttttttcttttttcagttttctttatagcagcaatgttgtatcttgtgtgtttcctaacaagactgagctctgagcaaggcagcctctggaaccaaatgtctgcaggcccaggagacctttctagaaagttcataggtgggaggccgaggcgggcggatcacgaggtcaggagatcgagaccatcccggctaaaacggtgaaaccccgtctctactaaaaatacaaaaaattagccgggcgtagtggcgggcgcctgtagtcccagctacttgggaggctgaggcaggagaatggcgtgaacccgggaggcggagcttgcagtgagccgagatcccgccactgcactccagcctgggcgacagagcgagactccgtctcaaaaaaaaaaaaaaaaaaaaaaaaaaaaaagaaagttcataggcggttctgcagtttgagccccttctgtgggtctgtgcctgctttagccgcttgagatatggcattgaacaaaacacaggccccgcctgggagaagctgccaggccagctggggagacagacctgataagtgaaaatgagatcgcgtggcctgcatgctccgaagaagactaaggcaggaaacaggactattttctcccgactgaattgtcctggtatccttgttaatatcagttgactgtgacttgagacttatcttggacacccctttctgttccgtgggtctgtgtctgccttgatgtcagtcccacagtttcgacgactggagctttgtagtcaggtgtgaaacagtggagtgtgggtcctccagttttgttcatctttttcagattgttttggcaatccaggagtcctttgaatttacatatgcattttatttt

SEQ ID NO: 19786 - DNA, 591 bp, Homo sapiens
tgctctaatcccagaaacaggaagaactgcctcttttaaattaaaaggttgcttttgttctcagaggccaacccaagccccttggccatggacaaggcccccagctggaaccacagcacagggcagcatctcccagaacaggctagggagggtgcctcctccaggagcccagagccgaggctggccagctatctgcgtggagtgtggagaggacgtcatggctccaggaagcggtgaggtcccagggctctgactcaggctctgaacatggggtgtccccttgcaatggtaagaacagggtttgatcagcaagggcaatccctcttcctcttagatgacccatccttttcaagcaagtccccatcccaagaggaatggggcaggtcgccgggctgggagtcctccacccggatgtgaatctctgccaaggagcaactgagcagcagtgccaagtaaggaggctgctccagcttcaggtcttcacagtgggcactggcygccagatcagtgaagcccacagacaggcccctccaggctatagggaaagccctgttccttactgtgccctgggaataacacaagtacacacac

SEQ ID NO: 19787 - DNA, 694 bp, Homo sapiens
tcagctaatttttgtacttttagtacagacggggtttcaccatggtggccaggctggtctcgaactcctgacctcaggcgatccacccaccttggcctcccaaagtgctgggattacaggcatgagccactgtgcccagcctaaagcattttttaaatccttgtacactggaagtacctgctttgaaaaccttgtggaattcacaatgaaagctactctacctgcaggttggcagttaaaatttcatgctttctcggtcacagcctggrttcaattccaagtcagggaaccagtcccaactaaaatatgataataaaagatttgaaaaaaaaagtttttaagagctctctggtcagaagtcagattaattaaaagctgatgttcaagctatgtatacataaaggcctgccttttctcttttagatcctgtttctgggaacttttttcagttgactgacacccctttttaaagtatatttagtccttctgtttgcttccttccttgatggtataacttttgcggggaaaaatgtaatattttcattggccttttggaaaactttaagtatcctcaaattggcttctgtagaaattgttctttcatttccttccacttctgcctctccttccttttgccatcatcttcagcaccacatgcagtgttctagagaggacttccaatgactctgccacc

SEQ ID NO: 19788 - DNA, 1186 bp, Homo sapiens
cttgactacatgtgaaagcaacaggaaaaactcttaataaaattatatgcttttctaaaatgtgttggcaactggaagcagcctgtagtataactgtcaatgagcaaggagcaaggatagagtactttcagccaatggtgtgccaaattgtgaacaaactgtggagagagtccaggaaagatctcaagtggatacttcagtgaacagtaagtaactaagaacttcaaaggattgccctacagactcctgaacctaaattaaaggtaaaaacaacagccctcagagcaattagcaggcttcaactgggatgtgcattcctgataagaattagccgggaaagggcacaatgtaccttgcaaaatctgaaacgttgcctaaggagtaagcaatcagagcacctgggttcttctggcaatatctgcgctcacctttcctggttgtgggtttgtccgataccctagtgcaaatagattgaaagccagagcctgaatcacactggttaaaatttatggtttctcatgtacactatcatatttaagtatactactatctagtgttttcattatagagatctcccattttcagttactcattttctgattcagtatcctttaggtattattgtgaccaaaatatgtagcagtctgctttccaaataataagtgagtcacgattctggggtccaggacaagcaagtatacatccctgcttttagaactgtttcatatttaaatttagatgtgccatagaagttttgaagttttgttaatgctccttttattgagactgaatctggtcaaacagtataccaaaatgataacaacttaagaaatttacttgtttttttttttttttgagacggagtctcactctgtcaccaggctggagtgcagtggcgaaatctcggctcrctgcaacttctgcctcccgggttcatgcgattctcctgcctcagcctcttgagtagctgggactacaggcctgaccaacaggaagaaaccccatctctactaaaaatagaaaattagccatgcgtggtggcacatgcctgctatcccagctactcaggaggctgaggcaggagaatcgcttgaacctgggaggcggaggttgcagtgagctgagatcgtgccattgcactccagcctgggcaacaagagcgaaactctgtctcaaaaaaaataaa

SEQ ID NO: 19789 - DNA, 1993 bp, Homo sapiens
agggataatgtctagagatccatatgtggttgtgcaagttgctcactgcacaacagtgcctggccaaagggtgggggtgaaatcttgacccagttctatttgccaagccgcaaaccttggaatggaccatttccacccagaggaggttctattttcttaattgcacaaaggcaatatgactaacagcagcccctataacatccccaatagttattaccctttttgaggttaggcctacttttattctttagaataagcaatgagataaatatcaagacaccaggaggcagagatcagtccaaatccccgttattctctctaccaatgacaacttgtcaaaaacacagattctgggcactatccccaggattctgatccagtagtccaggctggggcacaggaacctgcatttttaagaggcacagtagttgaatatgttgtacatactttgctacacctaagcattataatttttggggaccgttcattcatagtgtagtggtattattattcaggtgtgagatactggttttcaagtgaggtctttggttagttgtccagtcaatacaggcctccttgtggtttatattgactttttgagtttttgaattgtttgtacattaaaactagactgactattactagggtcatttcagccctttcaatctgctaccccttacccccatcatcccttgcccctggggtcttttttttccttttccatcataagccaaagtccacgatagaatctgtgggagaataaagtgatatctttatgtgaggttaaacaagtttttttcctgaagtaaccatgtattgtcttaaggagtttatgccctgagttcattcacttgagtagtactgtcactatcaaacataaggttggaatgtttgtttctattaatcatgcagtggaatttaaatacaatattgcttttctctttttaaaaatgtactctgcttagaactattttggtggaaaactctctgctcaagggaaaatgccttggattgaatataatcatgaaaaagtttctggcacagaattcataattgactttctggaagagaagcttggagtgaatttaaacaaaaaccttggccctcatgaaagagccatctccagagcggtgaccaagatggtggaggagcacttctactggtgagtcccctctggggtgtccccgtcctttcgaagtaagccccaggttctgtttcacttttcagatcctctttccaccgtttcagcagttttctaccttaacagtttcggatgaagtgagtggctcagtcatcaaagttattatgactgtgaagtttctggttacctagaccaggggtcagcaaaccatttctgtacaggaccagccagtaaatattttaggctttgctggctgtacgtctcttttgcaactagtcaactctgctgttttatcacagaagcagtgataagagagtatgccaacaaatgagcatgaccgtgttctgctaaaactttattatgggtactgaaacttgaatttcatttaatgtaccatatccttcttttgatttttttcaaccatttaacaatgtaaaaacttcttagcctgtggactataatttgatgggccttgatctagactagaactcactgagttgaggaagatagttgaattgattggactcagggctttttaccaatactgtataaactgttgaattaaaataatattatgtcagagactcagaggagggaatggaagactaagtcaagatagaattcctagggtcaattgtccatagataacaagagcttctgtatgttccagaagtaaagcatactactcctttctggattttctttggcttgattgcaaactcctagtttgtattccccaagtttgaaccatcacaygagttgatgagttttccctgttctgttttttgtagccttgagctggcggtggtaccatgtgagttaagaagatatggttcttgctttacaaactca

SEQ ID NO: 19790 - DNA, 625 bp, Homo sapiens
gtcaacttttaagaaagttattaaccaaaaacttctctagagtaattaggtctctggaatatatgcctagtgagagatagttgatggactggtgaaaaacagaagtgaagagaggataaaggggaaacaggaccactgaatttaaatttatgcagagatggtcttttagaaaagcagcaaacttactctatgcagcttttcaagagcaaagttataggagtgatgtgtgaaagttacataaaggcagatttcagtaaacatttttaaaataatattccaatagtaaggaatttttaacaatagagttgctatcccaaggctgatgaattctctgtagttttaggtttgcctgcagtagaagcatgaatgctaatgaacaagttaatgactttgacaaaagtggtgacaaatttcagtcttagagtttgaaaccctctgatgtttttctatgtacatgaatctataaataagtacatgcaaagtaaataccagggttaattagaactctggaagtgayacactgaagagcaaggtgaatattagttatatgtgataatataattaaaattattttacaaccctcaagaacactaaatgacatgacagtgtatagacatattaaaag

SEQ ID NO: 19791 - DNA, 1342 bp, Homo sapiens
gacagaattttaaaaaattgtgtggcttttatagtcttcattctttttatatgatttgctggcttatgcaaatcgttctatgccaattcacaaagtcttacaaagccccttgttctgccatagctattttaatgataatattgtgtttttctctttctgaatgctcagagaagatggtgccctcttcaatttcttgactattaaaagcatttagttctggaagagtagaacttaagtagttctactatgtatatgtgtgtgtgtatgtgtatgtgtatgtaactaaggtcatgcaagcccaagcagacttttgattgagtgtatttaatggcagctttacattaagccacatgatgtggcaacagctgagatttgatgatgcttgtacttggctggcatatggaagacaaaacatgacctatgttagtggcttgccccagggtcacccagcaggacaggggaagataactgaactctagacctgaaaatccgtgaaattttagtcatatacatgacagcattgtgtattccataaagtastatataaatattgtccatatattctactcaagtagcagtgaaaaatctctacattattcatttattttgttaatttaacaaatatttaccatgatcttacagtgtacttgacacaatttgagaataatttttttggtcaatcctctcaaaacatagactgtatctttatctctgtatgtttcttattcaggggaatgatgtaaaaatgcatagaatcactttttagaagtttatattccatgacatactaccccattatgtatcaaatgctccttactatgcatgagtagggtagccaggaaacgtgtatttggaaaattttcctaagtgattttggcatattctcttgatttagaatcactgatatgtaccactaatatgctcagtaaaaatgaagattagatgggatgggtgataattttataagtcaaaattaatgtgaatatcactgaattggacctctctttcaaaactcatgtacagatattgcaaggataaataaatattggcaatattattattagaaagttgctgtgcctcagggctcagcctggttactctgtgaatcactgctatttcctctgctcttctacagagtcatttgtccaggatgagaacagtctgcccgtgccaagaaaatagttggttgttgtgaaaaaacaggaagcttatagccaaaggaggcaaaatataatggtggtgtggactctactggtggcaactgagatcggtacccactggctactgcactagtgtgagaaggaagatattaaataaaagaaaaagataatgcctaggacct

SEQ ID NO: 19792 - DNA, 544 bp, Homo sapiens
aagcagcctcaagagctttggcccgtcaccttgccttgccttctcttccttcctcgtcctctgtttgttcatctttcctgaaaaaattaagtcagctgttccccttaaccaatttccctggcattctgaagggtaggccacatggcccacctgccagctactcccacctgccaagccttcctgactatatttaccctggtactcccatgtcccggggctgcttcagcagagccaaggacacacccaggtgtttgttttctaggtcagatttcctcagccatgggtgtatctgtgcttgtccctcaaaatcctcatagctcctttccccaccccaacttccaggccagayggggttcaggggtgtctcagctaaggttcccctgaagcagacacaaattagtacaaaagggacttattaggaggtgatccttaaaaatttgggcaggagaatggaaagggtggacacagacaaaaaggatgccaagtgagaatgtgatgattactgctgcagttttctacagctgcctgtcaaactatcccaaca

SEQ ID NO: 19793 - DNA, 1520 bp, Homo sapiens
tgttttggaagtaacaactgtgtttcatgttgccaatatctggctctggagggtaaatccaggctatagttctctctgagactggaaaagactctgaaaaagtctactgaagtcagctaatcctgtgtggttaaaagcacagtgttaataaggccaaggttatggtttcagtgcctgttcaagtcacctaacttccctagaaggagagctgcacccacaaggtgctcccggtggaaggagccaggtgggacaagtccgaatacagaaatgccttccctgcactgggccatgtagaaagactagtgaatccttcttaagatgtaaggaaattgcactgaagcatttaatcttatccctgctggcagaaggacaaacactgagccttctagaaatgccacagcaaacttttgctgagcaacctcagcatgccatttgtcactgtgctggatactcagtcaggtcgtgaaaggaaaaagacaggtatttgcaaggtagtcactctcatcatctccattttacaaatgaagaaactgaggctcagagagttgaaagacttgcccagagtcacatagttcgcaagggacagagcaggaacttgaagccaggtggtctcactccagagcctgtgctcttcttgaaattacttttgacttctcaccctccctcatctcctccaggcttttcaatcatgaaatgcagctgattccacctgggtcgtgtctatcacagttcccagttttcatttctgtgacccctgcctgtattagttatctgtggctgcataacaaattaccccaagcaccagcttcgaaccatatgcatacgttaccaccacatcctgatttctgggtgttaggaatcctggcmtggtttaactgagtcttctggctgagtatctcctaaggctgcagtcatctcaaggctcagtggggaaggatctgcttccaagcccactcatgtggttgctggcaggaagcagttccttgcaggttgttggactgaggcctcggtttctcatgagctattggccagaggcctccctcagttccttgccacacggtctcttcacagagcatctcacaacatggcagctggcttcatctgagtgagcatgagagagtgtgccagtgaagcagggtaatggggagagagggaggagggatagtgccagcaagtcagaagtcacagtctctatgacctggtctagaaagtaacatcccaccacttttgctgtattctattcatgagatgtaagccagaggagattgcatgagggtgtaaataccaggaggcagggttcagtggggccaggtcacacgtgtgcctacacagaatactcagtcaccatctaccatccctccttcccattcctctcatccttgcccaagttcaggtcctcttgattctttatctgaactcatacagttgacccttaactggtctctcccaataaaccatccattgctctgagtcgtcttgctaaaacagtgacctgatcatgttttacacttgctcagaag

SEQ ID NO: 19794 - DNA, 546 bp, Homo sapiens
cttagtgtccatgtgttcttgttgtttagctcccacttataagtgagaacatatggtatttggttttctgttcctgctttagtttgcttagaatagtggtctccacctccatccatgttgctgcaaaggacatcatctcattattttttatggttgtgtagtattccacggtgtatatttaccacattttctttatccagtctgcctctttttaaatatagtcatttttctcatttttaattatcaaacatttataaaatgcttattctgtggaaggttctctgcctcaagagttacaaacattaggctgggcacggtggctcacgcctgtaatcccagcactctggaaggccaaggcgggtggatcacctgaggtagggagtttgacaccagcctgaccgacatggagaaaccccatctctactaaaaatacaaaattagctgggtgtggtgacrcatgcctgtaatcccagctacttgggaggctgaggcaggagaattgcttaaacccaggaagtggaggttgcagtgagccgaaatggtgcc

SEQ ID NO: 19795 - DNA, 566 bp, Homo sapiens
tttcggctgggtgcagtaatcccagcactttgggaggctaagaccaggggatcacaaggtcagaagtttgagaccagcctggccaatatggtgaaaccccatctctacttaaaaaaatacaaaaattagctgggtgtggtgtcgtgcgcctgcagtcccagctactcaggaggctaaggcaggagaatcgcttgaacccaggaggcagaggttgcagtgagccgagatcatgccactgcattccagcctgggcgacagagtaagactccgtctaaaaaaaaaacaacaacaaaaaaaacataacaggctttcgatatttatcaggtcaccaggcgatcagagctagaaaatcaactgaaggccaaattctcattaaaaactgaaggttttggccaggcatgggctcacacctgtaatttctgcactttgggaggctaagrcaggaggatcacttgagaccaggagttcaagatcagcctgagcaacaacagagcaagaccccatctctacaaaaatttttttaattagccaggaatagtggcatgcagctgtagtcctagctactc

SEQ ID NO: 19796 - DNA, 575 bp, Homo sapiens
acaacattcaaatggcaatgagtaaggcagttattatccccatatttagagatgaggaaactgagggtcaggagtcatttctcaaaaaaataagaggatgggttagttaataaaattaagactgaagttttactaactcttcattctttccactatcatttttgggtgttataacaggttattaacaatgaataaaatgaagttctaatattgagattaaagggtagtaaaggcctagaggagaaaaagtgagagaatgagtaacaaataataacagatacagaatgaagatgcagtttagaragagataaataggagaaaatttaaaaagaacaaaagtaggaagaaaattggaagcagaaagagtaagtgaattggcacataagagaataaagaagggaaatgagtatgttgagaaagagaataaaaataaaggtacaaaaagtcacaaattgaaactggaaaggaaggaagaaaatatagaaaaactgaagaaacaaaattttgaagtgatcacctatccaaggatttagtaacttatgtcaagagggcaggtatcataagacttctacttc

SEQ ID NO: 19797 - DNA, 575 bp, Homo sapiens
acaacattcaaatggcaatgagtaaggcagttattatccccatatttagagatgaggaaactgagggtcaggagtcatttctcaaaaaaataagaggatgggttagttaataaaattaagactgaagttttactaactcttcattctttccactatcatttttgggtgttataacaggttattaacaatgaataaaatgaagttctaatattgagattaaagggtagtaaaggcctagaggagaaaaagtgagagaatgagtaacaaataataacagatacagaatgaagatgcagtttagagagagataaataggagaaaattkaaaaagaacaaaagtaggaagaaaattggaagcagaaagagtaagtgaattggcacataagagaataaagaagggaaatgagtatgttgagaaagagaataaaaataaaggtacaaaaagtcacaaattgaaactggaaaggaaggaagaaaatatagaaaaactgaagaaacaaaattttgaagtgatcacctatccaaggatttagtaacttatgtcaagagggcaggtatcataagacttctacttc

SEQ ID NO: 19798 - DNA, 542 bp, Homo sapiens
atttagaatcttttcttgctaggaagaaccaggctttacactcccatctgctcattttctgtagaacctcagccatgcaatttcatctaaatggagcccttcctggtatcacttggcaatggcaggcatacagagacacagcctttgcaggaaagctccattctacatgtttacagtgcatagcccacagagagggcatcaataatgcagatgggctgagatccatctcagagtccccgcatcaggagctcttccctgcccaggctccaacctgtgcccactgcaggaggtggggctcagtggccaggtctcataaatgcagctagccctcatccaagggcccaagtggccattgagcctggtgagcaasgcactgtaaaatagccactgctctgggcgaaggcctgtgatggagcacctcctgtcaccttagcccctggaagggcactcccaaccttggaacaccattgtatgtgtgcatcttcccagtatctccttataacaatcccagcagtaggcagggcccttaagagaaaagcccc

SEQ ID NO: 19799 - DNA, 575 bp, Homo sapiens
ccaactgtggagacataggccactattctcatatattcaacaggctggaaaatgtcataraccaaaagactcttgaagagtttacataaccaaaacatagaataaatgaaggatattcatggaagaaacatactaacgttattcaaaaagttattatttactcccaattatttagatggctttaagtattttaaatatgcttttcccaaaataatcatacatactaattagaaataacgtacccatacttgagccataattttcctgactatccatcattcttggattcccacccaacatgggttgctttggtaacatggggaaagcactgatattttttactggaggacttgagccaacagaaacagggctatccagagacactgctcggttatatggaggacgaatagactgcacagactgtgaacttttcaaacctgttgaaaacacaatacaaaaacatttcttcgtgatttaatatataaataatcaagtacaaaacacaaataccaccactccccacccaagaatgtctttcttacaaaaacaaacactgtcttcctttacaaaataag

SEQ ID NO: 19800 - DNA, 594 bp, Homo sapiens
tctttcaccattgcaaagttgaaaaatcgtatgtcgaatcgttgtgaagtcaggaaccatctgtacaattatctccattttatggttgaagaaactgaagcayaaaaaagctcagtgatttgcccaaataaataatatgacgtgccctagtaagattcagaatctggatcttagtcatgtcattaggcttgtctgtccgataaaatgagggtaataataattgtattagtccattctcgctctgctaataaaaacatacccgggtgtgggtaatttataaaggaaagaggcttaattgactcacaattcagcatggctggggaggccttaggaaacttacaatcatggtggaagtggaagcaaacacgtccttcttcacatggtggcagcaagaagtgccgagcagaagggggaaaagccccttacaaaaaatcatcagatctcttgagaactcactcattgtcacaagaacagcataagggtaaccgcccccacgattaaattacttcccaccaggtcccatgacatgtggggataatgggaactacacaattcaggatgagatttgggtggggacacagccaaactatgtca

SEQ ID NO: 19801 - DNA, 594 bp, Homo sapiens
tctttcaccattgcaaagttgaaaaatcgtatgtcgaatcgttgtgaagtcaggaaccatctgtacaattatctccattttatggttgaagaaactgaagcataaaaaagctcagtgatttgcccaaataaataatatgacgtgccctagtaagattcagaatctggatcttagtcatgtcattaggcttgtctgtccgataaaatgagggtaataataattgtattagtccattctcgctctgctaataaaaacatacccgggtgtgggtaatttataaaggaaagaggcttaattgactcacaattcagcatggctggggaggccttaggaaacttacaatcatggtggaagtggaagcaaacacgtccttcttcacatggtggcagcaagaagtgccgagcaraagggggaaaagccccttacaaaaaatcatcagatctcttgagaactcactcattgtcacaagaacagcataagggtaaccgcccccacgattaaattacttcccaccaggtcccatgacatgtggggataatgggaactacacaattcaggatgagatttgggtggggacacagccaaactatgtca

SEQ ID NO: 19802 - DNA, 547 bp, Homo sapiens
agcaggagggtagaggaggtatggggggtgccagaatgtgatggcagcgccactcagtgcctggggtgacagrgcctggaaaggcctaagccagggtgactggaagctcaggcaacctttgtccatcgaggacaagggttggtcatttctgccctgaggtcattgtgctaaggggcatggaagacagatgacacttctgttcaaccaactcaggaacacagcagacaacacagattggtgctagggaaccaagcatgtcgaaagaaccatctttgaagaggttagttacagactagacaggtaacaaggaaggaggattcaatgtgcaggaaacacagtgaccaggaggaaccggaatgagaagcatattcagaggacagggaggggtgcacagcccttcccctctctggacaactacgagctcaggtgagggacctggggaaagaaggttggtgctgctatccctggcatctaaatgcaaggatggcagtgaggacccctcccctccaaggaatgaaagggcaagttcacatgcttcaaatggttg

SEQ ID NO: 19803 - DNA, 1909 bp, Homo sapiens
aacatggagcatgataagggctgttcagaatatgaagaaggacagtggcacagagagaaacggggtggagagcgattcaccccaagtggataaatgcaataggttctgtcttgctataaccttccaggttatcttttctgtttgaatccatctgggacttcaggcctactgtgaatgttgacactgaatttcctcagctgctcttatctgatgatctcatcatcacaatctasggcagctgctacataaacgtttgtctttttggcttattgtctttgcttttcctccctgatttaaatcccttgttggtttgctaagtctctagattaaaacaaacaaagaaactgattccactcactatccaccctccctccctcaacaaagctaatcagtattctgacttcctgtcccatagattggtgtttgtacacttcatataaatggaatcatttgatatgtgttcttttaaatctggtttcattatatctgtgacattgatctaattgttctatagaagtagaatatttttttcattttctgtataagcatctcactatataagtaagccacacttttaaatttcttctggcattgatgtatatgtaggttattcagtttccttgctaacagtcctcctgtgaacattcttgtacacgccataaatacctgaatataagttgttgtgtcatgaggcatatgcatgtttggattcaagaaatactgctcaatgcttttttcctaaatgtcaggccaattgagagtttgagttgtccacattctcatgaatgcttagtattatcaggatttgtatttagcttagtttaggctattccggtatatgtctaatgacatctcatttttgttttagtctacatttccctgaaaactaatgacattaagagccttttatataagtttgttaacactctggatagcctcttttatcaagtgtttattcaagcctttaaacccattttcccattaggttttctttttaaattaatttttggaagttgtttttttgttttttttgacagaatctctctctgttgcccaggctggattgcagtggcatgatgtcagctcactgcaacctccgcctcctgggttcaagcaattctcttgcctcagcctcctgagtagctgggactacaggcatgtgccaccatgcttggctaattttttttttttgtatttttagtagagatggagtttcaccatattggccaggctggtctcgaactccagacctcaagtgatctgcccgcctccatctcccaaagttctgggattacaggtgtgagccacagtgcctagcaattattggaatttttaatagctgcctttgccatcctcattctctgtcccgaagctttctttttcacttatttcatggtgtctctgatgaacagacacaaatgcagcccaatccaacagtcttcccttattacagttcatgtttttgttcatgtttaagagagcctctcttcactgtaaattgatacaggtatctcctatattgtattctaggagcttcttatttttcaaagttatgttttgaggacatggtacttcttttctttctgtgaatatgtacacatatctggaatataagaatgcagagaaatcaaaagaaatgtttatgcagtgagggctgcgcatacctggagaccgacggcgagcggcagcgcaacccctgccaccacacacagctgtaccggcaagtttcaaaaaccaaagaagtagggagctctcagtatttcacaaaaaaggacagcgaaataagttcctttagagatgaaaaaacagtcagcatatcaccaagataatctctaggcaaccaaaatcttgtcaacctaaagcatgccttatgctagaaaagctgagtttcgcttctcaaaatcaaatg

SEQ ID NO: 19804 - DNA, 1909 bp, Homo sapiens
aacatggagcatgataagggctgttcagaatatgaagaaggacagtggcacagagagaaacggggtggagagcgattcaccccaagtggataaatgcaataggttctgtcttgctataaccttccaggttatcttttctgtttgaatccatctgggacttcaggcctactgtgaatgttgacactgaatttcctcagctgctcttatctgatgatctcatcatcacaatctacggcagctgctacataaacgtttgtctttttggcttattgtctttgcttttcctccctgatttaaatcccttgttggtttgctaagtctctagattaaaacaaacaaagaaactgattccactcactatccaccctccctccctcaacaaagctaatcagtattctgacttcctgtyccatagattggtgtttgtacacttcatataaatggaatcatttgatatgtgttcttttaaatctggtttcattatatctgtgacattgatctaattgttctatagaagtagaatatttttttcattttctgtataagcatctcactatataagtaagccacacttttaaatttcttctggcattgatgtatatgtaggttattcagtttccttgctaacagtcctcctgtgaacattcttgtacacgccataaatacctgaatataagttgttgtgtcatgaggcatatgcatgtttggattcaagaaatactgctcaatgcttttttcctaaatgtcaggccaattgagagtttgagttgtccacattctcatgaatgcttagtattatcaggatttgtatttagcttagtttaggctattccggtatatgtctaatgacatctcatttttgttttagtctacatttccctgaaaactaatgacattaagagccttttatataagtttgttaacactctggatagcctcttttatcaagtgtttattcaagcctttaaacccattttcccattaggttttctttttaaattaatttttggaagttgtttttttgttttttttgacagaatctctctctgttgcccaggctggattgcagtggcatgatgtcagctcactgcaacctccgcctcctgggttcaagcaattctcttgcctcagcctcctgagtagctgggactacaggcatgtgccaccatgcttggctaattttttttttttgtatttttagtagagatggagtttcaccatattggccaggctggtctcgaactccagacctcaagtgatctgcccgcctccatctcccaaagttctgggattacaggtgtgagccacagtgcctagcaattattggaatttttaatagctgcctttgccatcctcattctctgtcccgaagctttctttttcacttatttcatggtgtctctgatgaacagacacaaatgcagcccaatccaacagtcttcccttattacagttcatgtttttgttcatgtttaagagagcctctcttcactgtaaattgatacaggtatctcctatattgtattctaggagcttcttatttttcaaagttatgttttgaggacatggtacttcttttctttctgtgaatatgtacacatatctggaatataagaatgcagagaaatcaaaagaaatgtttatgcagtgagggctgcgcatacctggagaccgacggcgagcggcagcgcaacccctgccaccacacacagctgtaccggcaagtttcaaaaaccaaagaagtagggagctctcagtatttcacaaaaaaggacagcgaaataagttcctttagagatgaaaaaacagtcagcatatcaccaagataatctctaggcaaccaaaatcttgtcaacctaaagcatgccttatgctagaaaagctgagtttcgcttctcaaaatcaaatg

SEQ ID NO: 19805 - DNA, 1909 bp, Homo sapiens
aacatggagcatgataagggctgttcagaatatgaagaaggacagtggcacagagagaaacggggtggagagcgattcaccccaagtggataaatgcaataggttctgtcttgctataaccttccaggttatcttttctgtttgaatccatctgggacttcaggcctactgtgaatgttgacactgaatttcctcagctgctcttatctgatgatctcatcatcacaatctacggcagctgctacataaacgtttgtctttttggcttattgtctttgcttttcctccctgatttaaatcccttgttggtttgctaagtctctagattaaaacaaacaaagaaactgattccactcactatccaccctccctccctcaacaaagctaatcagtattctgacttcctgtcccatagattggtgtttgtacacttcatataaatggaatcatttgatatgtgttcttttaaatctggtttcattatatctgtgacattgatctaattgttctatagaagtagaatatttttttcattttctgtataagcatctcactatataagtaagccacacttttaaatttcttctggcattgatgtatatgtaggttattcagtttccttgctaacagtcctcctgtgaacattcttgtacacgccataaatacctgmatataagttgttgtgtcatgaggcatatgcatgtttggattcaagaaatactgctcaatgcttttttcctaaatgtcaggccaattgagagtttgagttgtccacattctcatgaatgcttagtattatcaggatttgtatttagcttagtttaggctattccggtatatgtctaatgacatctcatttttgttttagtctacatttccctgaaaactaatgacattaagagccttttatataagtttgttaacactctggatagcctcttttatcaagtgtttattcaagcctttaaacccattttcccattaggttttctttttaaattaatttttggaagttgtttttttgttttttttgacagaatctctctctgttgcccaggctggattgcagtggcatgatgtcagctcactgcaacctccgcctcctgggttcaagcaattctcttgcctcagcctcctgagtagctgggactacaggcatgtgccaccatgcttggctaattttttttttttgtatttttagtagagatggagtttcaccatattggccaggctggtctcgaactccagacctcaagtgatctgcccgcctccatctcccaaagttctgggattacaggtgtgagccacagtgcctagcaattattggaatttttaatagctgcctttgccatcctcattctctgtcccgaagctttctttttcacttatttcatggtgtctctgatgaacagacacaaatgcagcccaatccaacagtcttcccttattacagttcatgtttttgttcatgtttaagagagcctctcttcactgtaaattgatacaggtatctcctatattgtattctaggagcttcttatttttcaaagttatgttttgaggacatggtacttcttttctttctgtgaatatgtacacatatctggaatataagaatgcagagaaatcaaaagaaatgtttatgcagtgagggctgcgcatacctggagaccgacggcgagcggcagcgcaacccctgccaccacacacagctgtaccggcaagtttcaaaaaccaaagaagtagggagctctcagtatttcacaaaaaaggacagcgaaataagttcctttagagatgaaaaaacagtcagcatatcaccaagataatctctaggcaaccaaaatcttgtcaacctaaagcatgccttatgctagaaaagctgagtttcgcttctcaaaatcaaatg

SEQ ID NO: 19806 - DNA, 592 bp, Homo sapiens
tgcactccagcctgggtgacagagcgagactctgtctcaaaaaacaaaacaaaacaaaacaaataaacctcaccccgatccttttgtagatcatgagcatgatgattgggtgttgacacaaatatgtgaaatgtgccagcctcaaaccttcttatgacatcagatcagcacatgactctgctgggaagtcattaatccattatacattaagtatctggaacttttctggttaaaacaaatatatacctatatctctaagagatattattcttgatgtaggtcaattttataggtcctgaagaggaagtagtgtaccgatgttcaaaatgatgtctggtcagtgatggttgtccaaacacacacacacacacacacacacacacacacacacacacacacacacacacacacgggggaggggggagagagagagtcactgtgttacccaggctggaatggagtgtctattcacagatgtgatcacaagtccctgcagcctttgacccctagactcaagtgatccttttgccacagcctcctgagtagctgsgactacaggcacacaccaccatccctggctcaaacacttgat

SEQ ID NO: 19807 - DNA, 536 bp, Homo sapiens
ggaaagtcaaaagattgagattcatcttccaaatcacaccatcaacagaaatctgttatgaaaaagcagcactctcaatcactgaaagaacctaggagctgcctaatctaaactcttctcatcctacaaattagcagctgaggtgaagcaactgcttgcccatgagcgagctgggtcttgaagccaccctccagacctgagatgcagcactcctgtcactacccatgcagaccaaactctatctttggcattcactaaaaacaaacagcagcatgttccctacgtacatctgaaagtgccagaacttcaatacccaaggttgaaatggtcttcaaaaattaaaaggctcagccaaaccagctgaagcagcaacacagaaattaagaatctgtacgtatctcaagtcagtcagatgattccatcacatccagagaagaattcagctctaaggacacttgtcttaaatcactcttaccatcaccatggaggccaagagtcactagatagtcacatttgaasaatctctttctatgcaa

SEQ ID NO: 19808 - DNA, 632 bp, Homo sapiens
catcccagctgccacttattgggaccactaactgaatcagaaggaaagagcacgggcagttaggggtgcaatattcgtatcagtgaatgtgcttttccagagacctcagagccttcttatgagggttggagttcacagcaagacagcagtggaggccagctgtcttctatctgtgggccgtcttatcccctatgaaccattataccctgtttctcccttcaccttgattttttccccccacctttgttcagcatttaagagccaacctcttctcattgctaaaggcttcattagacactgaaatccttggtccttcatgtaggacacaagttaatgtccccatctttagggagataaaacaagaaatctagtgccgccttatataagatacagaggagatgagatagtgctggctggggcttctatatcttggtggtagagttaattctgatatgtctgccttttgagtgggaggtgaccactgacattccctagggggaagagatcctatttggtgcctgcatgaaaagatttaaccacaaccccccttccgaggcctctccctgcacaggcccctccttcctctgtcacataccacagcccaggacagctrtctggctatgaaagggccc

SEQ ID NO: 19809 - DNA, 1183 bp, Homo sapiens
aatgaataaaataattgtggtatatttaagtaatggaatattattcaacatttttaaaaggatatccagtcatttgtgacaacactgatgaacctggaggacattatgctaagtaaactaagccagacactgggaaaaaaaaatgcatgatttcaattgtgtgtaaaagctttacttaaaacaagtcaaatacagagaaacagggagtagcctggggattaccggggtggggagggggagaaaaatgtgaagtagatcaaagggtacaaagttgcagttatgtaggacaagtctagagatctaattacatcatcagggctatatttaatattgtatactgaaaatctgctaagagtagatattaggtgctcttactacacacaaacataaaaagtaactacagaaggagatggataagttattttgcttgactctagtaatcatttcactatgtatatataaaaacattgtacaccttaaatatatacaataaaaaaggaaagaaatgcccttatttccatctccattaagaactatacatataaagtcttttccatcaaatatatgttcagatgtttcccctttaccataacgaagtttgattgaataatcagcatctgacaagtcaaagttcaatattaacttctctattaagccaagtccctaccttacatagtaatggaggagggctcaatttccaaatcccttaaatgtggggaagctgacagcagtcactaagctagcttaatgtgtttcaacgctatgagaagatttttcttgaactcacaagcccgtgagcaactttgctgtgtaacacaaaacagcatttgatgttatgtgtgatttaactttaatactcatctcccagtatattttcatctttaatctcttcattcaaaaagattcttccccaaaggtagaaatagccctttcaacagaagttacrtgacagtacattcctcataacactgaaggcatatttcacctgaatggtagtaccagtgagtgactaatactgagttagagataaaaataactaactgaaagatgaagccaggctagaagggtgccagtaaaatgaggattggtaccaggaacctctcttcctcttaaatgcaactaaaataccgattaaactttctgtagcggggaggggtaaaggaggcacaaaaccccttcagca

SEQ ID NO: 19810 - DNA, 535 bp, Homo sapiens
cagcactttctcttccccacgtcctgtcctcaagccagagtagcactccaaattatctcttcttcttcatttccacasgctccaccctaacctatcacctccgatctggtatgttgctagtctcctgctggggaccccagattccaggcttgcaacaatgccagatcttcccccatatactcatcctccttccattcaccacagtctcttcaaggtcaaggtccagtgctactcaccttcggcttcccagttcccagaacctcacctaatatggggggcacacaataaatgctgaatgaatgaatcacagttttcatcacaagatgaaagaaaaaacttaaacaaaaatcttaacttcaaaaagggatacggtttggtagttttcatcacaagatatctgcacaagaaacctcaggcccttcctagttcctactccctcgaacccagactgctgaactctgaaggcccaccatcatctcaccctgcccacctcagctcctaccagcccagaaacaggcttttggctctatctagc

SEQ ID NO: 19811 - DNA, 535 bp, Homo sapiens
cagcactttctcttccccacgtcctgtcctcaagccagagtagcactccaaattatctcttcttcttcatttccacaggctccaccctaacctatcacctccgatctggtatgttgctagtctcctgctggggaccccagattccaggcttgcaacaatgccagatcttcccccatatactcatcctccttccattcaccacagtctcttcaaggtcaaggtccagtgctactcaccttcggcttcccagttcccagaacctcacctaatatggggggcacacaataaatgctgaatgaatgaatcacrgttttcatcacaagatgaaagaaaaaacttaaacaaaaatcttaacttcaaaaagggatacggtttggtagttttcatcacaagatatctgcacaagaaacctcaggcccttcctagttcctactccctcgaacccagactgctgaactctgaaggcccaccatcatctcaccctgcccacctcagctcctaccagcccagaaacaggcttttggctctatctagc

SEQ ID NO: 19812 - DNA, 686 bp, Homo sapiens
tttttctaatgagttgagttgaaaatcagcatcagaaacatgctgcatgttacttgtacattgtatgttcatgtttaagttaactattttgcagactgcatttagttattctactatgcaaactcatgtcttcactatttctgttgtttttagatgtcctaagttaaattctttcaggtataatttttacaaatttgtaagtcagagagacccaactgatgatcgtagtaaaactaccgagttagaatggaaaaaataagtaatttaagccctctacaggctgcgatctttccagtctatgcatgccagcacatcacatatgtgattcccttagatggatccccaacttgtaagaaaatgttttcttctgtaagtaaataccactctttccttcacctcatccttcctccagagccatgttactgttaggaaattagatttactgaaacaaagcaaggtctgccagaatcatttaaaataacacaattccctgtacattctttccaatgcagtaagacatgaaactgaaacaagaggcatarctactaaacaggaggagaaaagcaatatattgtagtagataacaagatagcttaccttaaaattgaaaggaatcaactaaaaagctcctagaatcaataggcaaattcaagaaactggccaaacccaaaataattgttcaaaac

SEQ ID NO: 19813 - DNA, 686 bp, Homo sapiens
tttttctaatgagttgagttgaaaatcagcatcagaaacatgctgcatgttacttgtacattgtatgttcatgtttaagttaactattttgcagactgcatttagttattctactatgcaaactcatgtcttcactatttctgttgtttttagatgtcctaagttaaattctttcaggtataatttttacaaatttgtaagtcagagagacccaactgatgatcgtagtaaaactaccgagttagaatggaaaaaataagtaatttaagccctctacaggctgcgatctttccagtctatgcatgccagcacatcacatatgtgattcccttagatggatccccaacttgtaagaaaatgttttcttctgtaagtaaataccactctttccttcacctcatccttcctccagagccatgttactgttaggaaattagatttactgaaacaaagcaaggtctgccagaatcatttaaaataacacaattccctgtacattctttccaatgcagtaagacatgaaactgaaacaagaggcataactactaaacaggaggagaaaagcaatatattgtagtagataacaagatagcttaccttaaaattgaaaggaatcaactaaaaagctcctagaatcaataggcaaattcaagaaactggccaaacccaaaataattrttcaaaac

SEQ ID NO: 19814 - DNA, 1158 bp, Homo sapiens
ctggccaccacatttaaaaaagcacccgtctccttgctttatctctccctttcctgcttgatttcttcgtaaggcttcgcagtctattctggtgaatctccctggctccagctccacccctgtagaatatcagctccgtgagggcaggagcttcatctcttttgttcatgctcatccccagggcctacagcagtgcctgtccttctggacgtgctacatgcgtcatttgccgagagaaccaatgagtgcctggtgtggtcagggatgcaggagcagcgtgtgcggtggtggaaaccgtgtgagcaagggtgtggtataggtgcctgtttccccaaagctgaggctggaagcaggttcctgtctcccactggctagtacctgcttctcttttcggagggtagtggcccctgccaccctgcagagccatttaacgctgaattcagcctcgctctgtggaaaaacaccttgccccatggcaggctgaggctgtgcgtttccatggagttcctgttttgacctgatggaaaatctctgtgggccaccatgtgcctggccagggcagcggaggggccggagatttgcctggatctgtggcctcagccagtggtttcagccgtgcgggtccagccactccctgccctgtcacatccttccagcttccctggcaaagcagcttctcactgaggctggaaggaggtgcccaggttgggggagagaggtgggcatctttatctgggtttccagagcctgacacaccctgaaaacatggcagaatcaccctcttttatgaatgtagaaactgaggcagggagtggtgaaggcaccagcttcaggccatgcaacaagaaaagggtaggtctgggatttgaagctakctctgtctgaccccagagctctgaaccccagaaaccacacttccttcattctcgggctctgtcctcactggatgtgaagtgggaggtgaagtgatgaggaaagtggaagacacacagagatagcagctttcaacccctccctcgtgtgtccccagctcctcagccttcaggcctccgctctggtgtcctcctccaggcagccttcactgaatgcctctgcctaggtcaccctgcccagcactcagcacgattgcagttgaatgcacattgtgcaaggatttgc

SEQ ID NO: 19815 - DNA, 621 bp, Homo sapiens
tcctccttcccaccccatatgtaagtatcagaacattcaaatatgaccccatgaacctgcaatcttatttaaccccgatgtgacttcaaaaactggtaccctataattgtattaagcagataatcctctaacgtaagaattgagttttattttcaaagtctgcttgaaaataagatttgcacactgtattccaaattagatttcccatctccttactgcatcatcttttttggtggtttgaagctaagaaaatatgtgtatttcctctgataccataaccaagagaaaagagacagagtagamactgtatattttagcttcctttcaggcctctagatacagccttataatttttatggttcctggcactaacagtatgtgttgctagaaggagaagaaatagaatttgaacatcaaaagttgcggtgtttaattctcacaacagtcgtatggggcaggtattattccaatttttgcgaagaaattcatccttaatgaggctaaataacttgtctgcagtcacacaaccaatcaatgcagatcccaggtctaactccaaagactgtgtttctgcccttgtatccactgcagcctgctccataacttgactatcatctcatt

SEQ ID NO: 19816 - DNA, 553 bp, Homo sapiens
tcaagaaaagcaaaatatttaaattttcaagtgaaatctctgatttttaaatactaactagttccaaattkaaaactatcttctataaggttttgaatggttccaaacacatagaacagataaatactcaaagtgatggatacctcaaataccctgactttatcattacacattctatgtgtataacaaaatatcacatgtacccataaaaatgaatcacatatatgtaaaatgttatgatttaatacaaagtaaagaaataaaatacctgctataagttgtgtaaaaacatcttcatgttattttcagccttctacccacagtctacatggggtatctcaattaattgtcacaataatgctgccaggtagttgctgtgtcttcgtttttttcagataacccccaaatcagtgaataaactagttcagagtcacacggccagtaagaaatagggtcaagatctgagctcagcaaagtctgtctgcttttttctacatcataccatgcttttaagcttaatacataagacagattatttcctgcttcatttagt

SEQ ID NO: 19817 - DNA, 553 bp, Homo sapiens
tcaagaaaagcaaaatatttaaattttcaagtgaaatctctgatttttaaatactaactagttccaaattgaaaactatcttctataaggttttgaatggttccaaacacatagaacagataaatactcaaagtgatggatacctcaaataccctgactttatcattacacattctatgtgtataacaaaatatcacatgtacccataaaaatgaatcacatatatgtaaaatgttatgatttaatacaaagtaaagaaataaaatacctgctataagttgtgtaaaaacatcttcatgttattttcagccttctacccacagtctacatggggtatctcaattaattgtcacaataatgctgccaggtagttgctgtgtcttcgtttttttcagataacccccaaatcagtgaataaactagttcagagtcacacggccagtaagaaatagggtcaagatctgagctcagcaaagtctgtctgcttttttytacatcataccatgcttttaagcttaatacataagacagattatttcctgcttcatttagt

SEQ ID NO: 19818 - DNA, 893 bp, Homo sapiens
tagtcactaaactgcacttctacttctgattggacaagattggcactttgtaaaccaggttttctgggatgctggtttccttgaagatgtttctagctggtattatcatataggataggctgagttatgctgcattaacaagcaaaacccaaaaggtttatttctcattcgtgctgtatgtccagcaaatgtggctgggcttcattttaagtcgtcctcactcccagaccyagcctgtaggtgccccaccattgggggatcgctgattgccatggcatggttagagaaatatggttcttaaaggttctcatccagagtggcacatctctcttctgctcacaatgtgttgaccaaagcaagtcacatggatgggagcagggagatgcaatcctctcttgtgcccaaaagaggagcacaagaaatactgttgaatagcattgccagaggccacagaaaaatctccaaaaccaaaaatctctatgacccaataaattcaagaaatactgggttaaagagaaggaaaccagtatatgcactgtgagacttctcagtctttattatatacattgtaaccatcacagacagcctttaatatatacatcttaactatcacagacagccttcagtatattatatacattataaccatcacagacagccttcaatatattatatacattataaccatcacagacagcctttaatatatacattataactatcacagcctttaatatattatgtacattgtaactatcacagcctttaatatattatatacattgtaactaccaccgcctttaatatagtatacccattgtaactatcacagcctttaatatacacattgttaactaccacagacagcctttaatatattatatacattgtaa

SEQ ID NO: 19819 - DNA, 893 bp, Homo sapiens
tagtcactaaactgcacttctacttctgattggacaagattggcactttgtaaaccaggttttctgggatgctggtttccttgaagatgtttctagctggtattatcatataggataggctgagttatgctgcattaacaagcaaaacccaaaaggtttatttctcattcgtgctgtatgtccagcaaatgtggctgggcttcattttaagtcgtcctcactcccagacctagcctgtaggtgccccaccaytgggggatcgctgattgccatggcatggttagagaaatatggttcttaaaggttctcatccagagtggcacatctctcttctgctcacaatgtgttgaccaaagcaagtcacatggatgggagcagggagatgcaatcctctcttgtgcccaaaagaggagcacaagaaatactgttgaatagcattgccagaggccacagaaaaatctccaaaaccaaaaatctctatgacccaataaattcaagaaatactgggttaaagagaaggaaaccagtatatgcactgtgagacttctcagtctttattatatacattgtaaccatcacagacagcctttaatatatacatcttaactatcacagacagccttcagtatattatatacattataaccatcacagacagccttcaatatattatatacattataaccatcacagacagcctttaatatatacattataactatcacagcctttaatatattatgtacattgtaactatcacagcctttaatatattatatacattgtaactaccaccgcctttaatatagtatacccattgtaactatcacagcctttaatatacacattgttaactaccacagacagcctttaatatattatatacattgtaa

SEQ ID NO: 19820 - DNA, 535 bp, Homo sapiens
gctgggttctgtctctttccaggcaagaagggacatgtggacttgaatatttagctcagggatgttggaggcctagggtgctgctatttaaatggaaagggtgtcagggtttctgggagggagtaaggggasagaagaaaagatgcttctgttatcagaagggagtggcaacgtgacaggatactgaagcttcctcttttcttattctgtctcgtttctttcaatatacttatcacaatgtgtggctgatatttattatgcctttttcttttctattctcttttcttttttggggcaggggagctgttttgccaccaaaacctaagcccatggccgtcttcttcaccgatatgactggttctcatgcaagcacctagatggccctcgcccataattactggctgcagttgagtgaatagcggtcattatctagcgcccaccgtgtgcccggcccggtgccgggagctttgctttccgtctctcacattaggcccttttaatccaacccccaagaaggagacacgaccatcgtctt

SEQ ID NO: 19821 - DNA, 542 bp, Homo sapiens
aaatggctttaaatataaccatcttctcccagagcacaggtccttggccatatctcagtagatgcatctttaaactctactctgctatgctttaagggtaycttccaataagctgatgatatcaaacggcgtagggagctgagagtgctcagcccgtcagtcttagattagccagcctgttcttcacatcgcatcagaactacacaagcttctcatcccctaaatgctgattttcccatgtcaatttatggataagagttaatataatagttaatacttatgagtgacctacagcagagtctagttggagaggcaggcttccaggatgaatttccaggactcctctttcatttcttcatttgaaacaaggagaaacttcattcctcaaggacaggtaatgagagtgatttatctctatgagcgaggcttcagcaagacagaattagggttatagtaacagctggagtgtctcccatctactcatcttcctaagccccctgttctcatgaagagcaggcaggtttcagaaaggactcaaatac

SEQ ID NO: 19822 - DNA, 1283 bp, Homo sapiens
aggtgccactgacaatgtgactcagtttgtctaagctgcagtttcctcatctgtgaaacagagatacttttgatctgagaaggttggaaggaggaacaaagcaagggtctggaaggggctggccaagaaacctgtcatgcagtcggaggtcagcacttcacgggagctcctagtgttaaatgtggaaccacccaatgtcccctgtgagggagctcagtgacattaggggcagacaaagatactagaatgggaacaatcagattctacagctaaaaaaataaaaaagaagaaaaaaaagcaaaagtgaattttctccccatttcactaaaataatatgctctaagcctgagaccttttccctcctgtctgctgcctgaaactcatttctccaacagagatctaagccaccataaatctcatcaggggtcaaaatggctgacacaattttaactacaagcaaccacagcagaaatggcgtcattattatccccaagggctgctctctgccttttctaagggacaaaagaaaaagtcatattttttagcctggaaatatagggatttcctgcattcatatatatatatatacatatatatatgtagtattctagaattttcaagggacaaaatcaagaacccagaagcacaaaaactgtgaaaggaaagtatgaccagacataaagttgagcactatttctgccttaaacaaacaaacaaagaaaaactccttgctgccatgctacccaaaaacctagaaaaactatttctaagtaatacaatcagctatgtctccaatctcctgtgactctcggttttctacattctataaccaggtctcatctacggcacttgctccctgactgagtccacatgctttcccytggggaggcacagtactgcaatgtgattctgacactaatcacccagagtcagtgcagacttcacagatgaaaggcacagcctccaaaagactgcctcacttcagtcaccagccacaagttcaagggtcttcagaccacctacacttctggctgcaaatttgggggtttccacagccccctcaaattcaataattcactagaatgactcacagaactcagtcaagtgctacgcttaggataaaagttttaccataaaaggtacaaatcagagccagtcaagtgaaaaaaatacccagggcaaggtctgggagggttcagaatgtggagtttccatgccttcccccccatggactcaggttggttcaccctcccatcacattgatgtgttcaccaatcagaaag

SEQ ID NO: 19823 - DNA, 1283 bp, Homo sapiens
aggtgccactgacaatgtgactcagtttgtctaagctgcagtttcctcatctgtgaaacagagatacttttgatctgagaaggttggaaggaggaacaaagcaagggtctggaaggggctggccaagaaacctgtcatgcagtcggaggtcagcacttcacgggagctcctagtgttaaatgtggaaccacccaatgtcccctgtgagggagctcagtgacattaggggcagacaaagatactagaatgggaacaatcagattctacagctaaaaaaataaaaaagaagaaaaaaaagcaaaagtgaattttctccccatttcactaaaataatatgctctaagcctgagaccttttccctcctgtctgctgcctgaaactcatttctccaacagagatctaagccaccataaatctcatcaggggtcaaaatggctgacacaattttaactacaagcaaccacagcagaaatggcgtcattattatccccaagggctgctctctgccttttctaagggacaaaagaaaaagtcatattttttagcctggaaatatagggatttcctgcattcatatatatatatatacatatatatatgtagtattctagaattttcaagggacaaaatcaagaacccagaagcacaaaaactgtgaaaggaaagtatgaccagacataaagttgagcactatttctgccttaaacaaacaaacaaagaaaaactccttgctgccatgctacccaaaaacctagaaaaactatttctaagtaatacaatcagctatgtctccaatctcctgtgactctcggttttctacattctataaccaggtctcatctacggcacttgctccctgactgagtccacatgctttcccctggggaggcacagtactgcaatgtgattctgacactaatcacccagagtcagtgcagacttcrcagatgaaaggcacagcctccaaaagactgcctcacttcagtcaccagccacaagttcaagggtcttcagaccacctacacttctggctgcaaatttgggggtttccacagccccctcaaattcaataattcactagaatgactcacagaactcagtcaagtgctacgcttaggataaaagttttaccataaaaggtacaaatcagagccagtcaagtgaaaaaaatacccagggcaaggtctgggagggttcagaatgtggagtttccatgccttcccccccatggactcaggttggttcaccctcccatcacattgatgtgttcaccaatcagaaag

SEQ ID NO: 19824 - DNA, 1283 bp, Homo sapiens
aggtgccactgacaatgtgactcagtttgtctaagctgcagtttcctcatctgtgaaacagagatacttttgatctgagaaggttggaaggaggaacaaagcaagggtctggaaggggctggccaagaaacctgtcatgcagtcggaggtcagcacttcacgggagctcctagtgttaaatgtggaaccacccaatgtcccctgtgagggagctcagtgacattaggggcagacaaagatactagaatgggaacaatcagattctacagctaaaaaaataaaaaagaagaaaaaaaagcaaaagtgaattttctccccatttcactaaaataatatgctctaagcctgagaccttttccctcctgtctgctgcctgaaactcatttctccaacagagatctaagccaccataaatctcatcaggggtcaaaatggctgacacaattttaactacaagcaaccacagcagaaatggcgtcattattatccccaagggctgctctctgccttttctaagggacaaaagaaaaagtcatattttttagcctggaaatatagggatttcctgcattcatatatatatatatacatatatatatgtagtattctagaattttcaagggacaaaatcaagaacccagaagcacaaaaactgtgaaaggaaagtatgaccagacataaagttgagcactatttctgccttaaacaaacaaacaaagaaaaactccttgctgccatgctacccaaaaacctagaaaaactatttctaagtaatacaatcagctatgtctccaatctcctgtgactctcggttttctacattctataaccaggtctcatctacggcacttgctccctgactgagtccacatgctttcccctggggaggcacagtactgcaatgtgattctgacactaatcacccagagtcagtgcagacttcacagatgaaaggcacagcctccaaaagactgcctcacttcagtcaccagccacaagttcaagggtsttcagaccacctacacttctggctgcaaatttgggggtttccacagccccctcaaattcaataattcactagaatgactcacagaactcagtcaagtgctacgcttaggataaaagttttaccataaaaggtacaaatcagagccagtcaagtgaaaaaaatacccagggcaaggtctgggagggttcagaatgtggagtttccatgccttcccccccatggactcaggttggttcaccctcccatcacattgatgtgttcaccaatcagaaag

SEQ ID NO: 19825 - DNA, 388 bp, Homo sapiens
tctatgtccaacccccactcttttatgtctcatgtcttcattgcaaagcatgactcgccaaaaacacaacacagagaaaatggtttcatcaaaattcccttgcaacaacaacaacaacaaaataatattaccctgctttcattattcacaatcttttattgaggcaaaaggcaaatatcattgagccaaacctggatagacaaatatatacaaccactggtaatttaatattttgtgctaatggtatacactgtagatacaacccaagaggagtaaattacaatcctatcaataatatatcrcatccgggctccagtttcccagtacacgagaaaatgtgtattggcaaaggctctccaaatattaaaagccatgcatataatgaggc

SEQ ID NO: 19826 - DNA, 572 bp, Homo sapiens
gaacccaggaggcagaggctgcagtgagccgagattgagccactgcactccagcctaggaggcagagtgagactccatctaaaaaaataaaaaaaagataacagcctttagctaacatttttaatcaagtgtccactgcaggcactatgctacaagctttgcatgctttctgttagtgctgccagttttatggggcagatagtgttattatcccattttatagataaagaaactgagactcagagaggttaagtcatttgcccaaggtccaagctagtaacggacacatctgtctgactctaaagatcctaatttgaatactactacatgctgtctcctaattctcccccactgaaatacctgcttaccctgaagcaaagcttgactgttgttcaatgaaagctcttgtgcatgaagtgagttttagctggcaaactaacccatgcagagagtsccagcccctctgagcaccagctggacattaaacccatctcatctccaggtactgatgacatacactttcagtttataaaagtcaaattttccaacaaactagtgctactttaaaaata

SEQ ID NO: 19827 - DNA, 550 bp, Homo sapiens
gccactgaattgtgcactcgaaaatggttaaaattgtaagatttttgtatgtatattttaccacaataaaaatatacataccagccgggcacggtggctcatgcctgtaacccagcactttgagaggcccaggcagacagatcacctgaggtcgggagttcgagaccagcctgaccaacatggagaaattccgtctctactaaaaatacaaaattagctgggcgtggtggcacacgcctgtaatcccagctacttggaggctgaggcaggagaatcgcttgaacctgggaggygcaggttgcggtgagccgagatcacaccattggactccagcttgggcaacaagagcgaaactctgtctaaaatacatatatatatatatatatatatacacacacacacatatatacatatcataacatttgctgttttagcccttttgactgtgcaatccagtagtggcattaagtccatgcatattgttgtgaaaacatcattttaaaattacaaaaacaagcatggctacattacaaaataaaatgtaaaattc

SEQ ID NO: 19828 - DNA, 672 bp, Homo sapiens
agtagttgttagccttgattttaccatgcatgcttttaacaaagacaaaaattaatggtaatttagcccttctccttagaaaccctttcctctgatctcctgacttccatgatatagttgcccaatattttagtcgttacttaatctcacagactaggttttattattatttaagcagacagtgtttatttagatttttctgtttgyttatatcttctttcctcaccatgctttcacctcagacctcccatatacaatcacttacttttttcctaaagtagtttctttagtgaaggtttattattagtaaataggacctctgcattgtataactccatataaatacatttgaaagggcccccgatgttaaataccatcaggtcctattggtaaataacaatcatctgtatccatgggggatcaattccaggtcctccccactcacacgcccctctcaataccaaaatctgaggatgcttatgtctgttagacagaatggtatagtgtttgcatacaacctatgctcattctcctgtatactttaaaccatctctagagtacttataatacctaccacaatgcttacacagcacttcactcacacagactcagcatagtgcttagagcacagcaaattcaaggtttgctttttggaacttggtggaaggggta

SEQ ID NO: 19829 - DNA, 572 bp, Homo sapiens
gacctcctctattttcttctcaatactgaaatatgaggggaatttttaaaaattaattttttcatgtatattcctttctttacaggccccctaaaatgatacttgctgaaaaagcctggatttacacagctgttttataaagccattgacactttaataaaagtccaaaataaacattttaatttttttcccaaataacaagtgattgtttgtcttgtttgcactcgtgaacaaaggctgcatagccgcagttgtctagcttctctgtaatttcaggcccaagactcagcagacgctgattaaccaatccatctaccatatgtgcagaaagagacggccagcctgactctcggcagggaaaattggcatccatcttggttcacatggagatgtccttctaatctacagccgcgctggcgcaacaaaacttcgatggcctgaaataccttttgctggcttcacagcgagctgcatgtgyatgataagaatgtattatttataagaccgctgttagtaatgagctattacactaatggctcattgtgtttggaatttgatttcaaatggcatgg

SEQ ID NO: 19830 - DNA, 622 bp, Homo sapiens
ttgaaatctgatagtattaagtttgatagtattatgcgatggtgcctttgggaggtgattaggtcatgagggtgatttccctgcttttcccttttctcctgccctttacttttcatcttatgaaagactagacaggtgtgtgttgaaagcatgtaaatatacctggttttgttgccacccaaaactgccatatatgtaagttgtcctgaataaatctgactgtctrccaacctggagtgatctgccccctttttgggttgatcttgccttcctcttatggagggtggctcccggttttggcaagaagttttaccaacagtaatctgatgaggttacagagagaaatgaggaacgtgtaattagaaattagaggaaaggtgacccctattataaagtggcaaagaattggctgaattgtgtttatgtccttaccttagaattttgagtgatggaattggatatctggcagaaaaagtctttaagaaatatgttgagagtggcatggtttctcttgactgctaataagtaaaaataaaaaatgagaagagagaaataatctgaagatggaatttatgatcgaacacaattctgagattggctgtattataaacaaaaaaaagta

SEQ ID NO: 19831 - DNA, 494 bp, Homo sapiens
cctttgcccagagggtcagcagtacaactttgctgtcttttatcaagacaatatctgatctctgtcatgttgaggtctagactagagcagtgatcctcaaagtgtcatctgtgaactggtttctggtccatgtttcttatttatccccaatgaattaggaagtttgcaccagaatgtgaactataccactaagcacaccgtttggctcagctgacaatttttttcttagaaagacttttttgatgaaggagtagtgcattgatttattttctggtggaagctccttacctyactgttgcaggcacgtactttgaatagctgcttcctggtctagagggagcttgattatcttgacacccagtagaatgccatgttggagcatattaattttaccatgtcatcaggaagaaactaacaacctgatgccttaggaagacaaacacatgaccaaggaagggagacaaaccatgtgaaagttcatagacttgtgatca

SEQ ID NO: 19832 - DNA, 552 bp, Homo sapiens
tagctaagagttttgagtttagcttttttttataggtgctacatattagacattatcatggagatgcaattctgaacacaaataattatggtgtctgtgctcatggagcttagtgtctattaattgaagggaaattagacattatttaaataataataaagtgtataagtatgggaggtgcttggaaagggaagcgaatgttgttgtgagacgtattctaaagatggttggacgagtagaaggataagtggagccttctctaggtaaggaaacatttctttgagatttgaatgttgataacaaattaattccatagcaggaaaagtggggtatagggagagttatgaataacatmtgaggcagaggaaacttctctgtaatgttttaagttgtgacagacagaacaaaaatggtctatggggcttgtttgagagagcgaggagttcttgcgggaacgatatgaggactgagattttcacagagagcagaaagttatgcagggcacaaggggcaatgttaagcgtttatttttttgtcttaaatgcagtgcaa

SEQ ID NO: 19833 - DNA, 588 bp, Homo sapiens
taagtgtcagcatcaagagtcgcaacacttaggcgaattcaataacataggtacgctaagtcacccaagtcgttttccaagtcctctgagttacagtcgaagctcccgttagcagaactcggaagctcatggtgaacactggtaaacacttctggtgagagacccgtcctgacagctctgatgaatggccagattcgttttccacctggcccgactcattccaatcgcatgctgctgaaaacacctttttcatttgccctttgatgagtgctgaggcatgaacaaaagtccattgcctagctgggtacctaatttttattaataatatcttcactctatcaatcattgttaactaacgggaacacttgaagaaatgaatttaagcctgccgaaaggaaacacggcagccggtacacaccctcccaagtggattctgaggctccggccacatcccaaatgtgcagagcaagtcaggctggctgggcccgattttccccaacagaggacagctgttccctcaaagacaagktgctctgtacaagggggctgtgtcagcaaagcaatttcttttttttttttttttttttt

SEQ ID NO: 19834 - DNA, 536 bp, Homo sapiens
tcataattaaaawtttttaattatacaaaaagagaagcaggaaattaaaaatcttttcacaaagaaaatgtcgatcctagatgcttaacagatgatttctatcagacttgctttttgttcagtatttccagttttatttttttccagttttattgaggtataattgacaaataaaaattatatatatttaaggtatacaacatgatgttttgaaagatgtatacattgtgaaatgttccaaaatcaagctaattagcacatcctcacttcacatagttattttttggggtggggggtgtgaattactttttggggttgggggtgtgacctactttcttagcaaatgtcaagtatacaatacatggtgcatgcctgtagtcccagtgactagggaggctgaggtgggaggatggcttgagcccaggaggcggaggttgcattgagctgagatggcaccaatgcactccagcctgagcaacagagccagaccttgtctcaaaaaacaaaaacaaaacagtattgtgtactatagtcat

SEQ ID NO: 19835 - DNA, 575 bp, Homo sapiens
tttcatattgtaacaggataaaaaaaattttgagattatactttgtcaggaaaaaattgtccaagatgtggaaatgggcaaaagagatccctgagaattctttcagtagagtattgggcattgcctaggggaccttctgggatgatctgagtctwgagaggcctgtgcctttggattgactttccattattagtctattttacatgcctgtaggggcagcagttaaagtgaagacaactggtagcaatgtaaattgttcctgtccttaacaatgcaaatgagttttgtcccaaagagaatataactctttgtaactcaaattctgatttgaatctcttctaacaactgacttgccccttcaataattaatgagctaaataaaatctttgacacctgttcactttatatttgtataaaagtcatttccaacttctaggaaattatactctagcagcgtttcccctaatcagtgtaaggaatttgactgcccttgcagttgaggaccagggagggattttagaattatctatagcagtggtaccaagaattaatattcagctactgacattcaaagt

SEQ ID NO: 19836 - DNA, 543 bp, Homo sapiens
ccgaatgtcctgatttacaaaaacccgaagacaccacaacactcaaaggaaagcagtggcccagaacgggcagaggacttgtgagacgtcatacagcaaaccatcagaaacctgtatacatctggacaagtagatccagagaactgctcccccaaaatggcaaagaactgaagctcacagttcaaagagcagtgattgtgatttgtctaatgttaaaggagaatgtctagacgcagaataccagaacgtctggttttaatctgtcttagactgggatcccccagaaacagaccctggaataagaatttgaatataagtagcttatttgggaggygatcccagaaaccaccactagaggagggggatgtgaggccaggaagggaaggcggccaatgcctgggatttattgggttaccactgcaggccactgacatcagtcatgctggacactgtgggagatggtgtataacacagctcagagttgtccccaccttgggacaatgatgaggaagtgggggtatttatccatcaaacagcatcatc

SEQ ID NO: 19837 - DNA, 543 bp, Homo sapiens
ccgaatgtcctgatttacaaaaacccgaagacaccacaacactcaaaggaaagcagtggcccagaacgggcagaggacttgtgagacgtcatacagcaaaccatcagaaacctgtatacatctggacaagtagatccagagaactgctcccccaaaatggcaaagaactgaagctcacagttcaaagagcagtgattgtgatttgtctaatgttaaaggagaatgtctagacgcagaataccagaacgtctggttttaatctgtcttagactgggatcccccagaaacagaccctggaataagaatttgaatataagtagcttatttgggaggcgatcccagaaaccaccactagaggagggggatgtgaggccaggaagggaaggcrgccaatgcctgggatttattgggttaccactgcaggccactgacatcagtcatgctggacactgtgggagatggtgtataacacagctcagagttgtccccaccttgggacaatgatgaggaagtgggggtatttatccatcaaacagcatcatc

SEQ ID NO: 19838 - DNA, 543 bp, Homo sapiens
ccgaatgtcctgatttacaaaaacccgaagacaccacaacactcaaaggaaagcagtggcccagaacgggcagaggacttgtgagacgtcatacagcaaaccatcagaaacctgtatacatctggacaagtagatccagagaactgctcccccaaaatggcaaagaactgaagctcacagttcaaagagcagtgattgtgatttgtctaatgttaaaggagaatgtctagacgcagaataccagaacgtctggttttaatctgtcttagactgggatcccccagaaacagaccctggaataagaatttgaatataagtagcttatttgggaggcgatcccagaaaccaccactagaggagggggatgtgaggccaggaagggaaggcggccaatgcctgggatttattgggttaccactgcaggccactgacatcagtcatgctggacactgtgggagatggtgtataacacagctcagagttgyccccaccttgggacaatgatgaggaagtgggggtatttatccatcaaacagcatcatc

SEQ ID NO: 19839 - DNA, 505 bp, Homo sapiens
gtttggatgttgtcccctctaagtctcatgttgaattgtaatccccaatgttgtaagtgggacctggcaggaggtgtttgggtcatgggggcggatccctcatggttcagtgctgtcctcatgataatgagttctcatgagatctggttgtttaaagagtgcagcacctcctccactctctctcttgctcttactgtccccatgtgacaagcctgccccgttttgccttctgccattattgaaagctccctgaggcctccccagaagctgaacagatgccagtgccatccttcctgtacagcctgcacaactatgagccaattaaacctcttytctttacaaattacccagtctcaagtacttctttataacaatgcaagaatgaactaacacagatggggagattatcttggattatctgagtggattcagatgtaatcgtagggtctataaaggaagtctataaggtgttgcttttagccactaaggccgtgatgatttgcaa

SEQ ID NO: 19840 - DNA, 505 bp, Homo sapiens
gtttggatgttgtcccctctaagtctcatgttgaattgtaatccccaatgttgtaagtgggacctggcaggaggtgtttgggtcatgggggcggatccctcatggttcagtgctgtcctcatgataatgagttctcatgagatctggttgtttaaagagtgcagcacctcctccactctctctcttgctcttactgtccccatgtgacaagcctgccccgttttgccttctgccattattgaaagctccctgaggcctccccagaagctgaacagatgccagtgccatccttcctgtacagcctgcacaactatgagccaattaaacctcttctctttacaaattacccagtctcaagtacttctttataacaatgcaagaatgaactaacacagatggggagattatcttggattatctgagtggattcagatgtaatcgtagggtctataaaggaagtctataaggtgttgcttttagccwctaaggccgtgatgatttgcaa

SEQ ID NO: 19841 - DNA, 536 bp, Homo sapiens
caaagtgctaggattacaggcatgagccactgcacccagcccacctgccctttttgttctcgagggatgccatgtgtaaagacacaacgcttggggctgtagtagccattttgtgactaggaggggagccatggacaacattctgggcatgatggagcaggaggttggaagccaggatccttgatggtgtcttggagtttcctgatcagctcagggctcacccacttccgcatttctagttaaggagacaataaatgtccttayagttgaggccatatttatttgggttctttgctgcttgctgccgaacacatcaatattgatacaagctttgtcccagaggtgttacctttgaaatcaggtcctcccactactaccttgagcccttggggtagagcgggaggcagaggggggcacaggcttgaactccacaggtggctgagggccaggggtcctggacgggagaggaacatgggggaagctagtgtctggggtcccaagaataggggatggggagggcaagaaagtcagtcctc

SEQ ID NO: 19842 - DNA, 536 bp, Homo sapiens
caaagtgctaggattacaggcatgagccactgcacccagcccacctgccctttttgttctcgagggatgccatgtgtaaagacacaacgcttggggctgtagtagccattttgtgactaggaggggagccatggacaacattctgggcatgatggagcaggaggttggaagccaggatccttgatggtgtcttggagtttcctgatcagctcagggctcacccacttccgcatttctagttaaggagacaataaatgtccttacagttgaggccrtatttatttgggttctttgctgcttgctgccgaacacatcaatattgatacaagctttgtcccagaggtgttacctttgaaatcaggtcctcccactactaccttgagcccttggggtagagcgggaggcagaggggggcacaggcttgaactccacaggtggctgagggccaggggtcctggacgggagaggaacatgggggaagctagtgtctggggtcccaagaataggggatggggagggcaagaaagtcagtcctc

SEQ ID NO: 19843 - DNA, 574 bp, Homo sapiens
ttaatttcaaagtgtttgcaaaaaaaagcattttacgaatgccaaatgtattactgaagaacaacaaaataattcaagtaaaggaggattttactaccttggatttattataagaaaatgcaagggtcttcagctatggagaaaaccctgggaaatataataaattagacaatctctttatgtaactcttttgctttttcttttcttttytttttttttctttttttttctattttgagacagagttttgctctcgttgccaggctggagtgcaatggcgcgatctcagttcactgcaacctctgcctccccgggttcaagcgattctcctgcctcagcctcccgagtagctgggattacagggatgtgccaccaagcctggctaattttgtatttttagtagagatggggtttctccatgttggtcaggctggtcttgaactcccgatctcagatgatcggcccgcctcggcctcccaaagtcctggcattacaggcgtgagccaccacgcccggtcctatgtaattcttttgctagatgagctagattagtgcataatagtgatgatttggt

SEQ ID NO: 19844 - DNA, 574 bp, Homo sapiens
ttaatttcaaagtgtttgcaaaaaaaagcattttacgaatgccaaatgtattactgaagaacaacaaaataattcaagtaaaggaggattttactaccttggatttattataagaaaatgcaagggtcttcagctatggagaaaaccctgggaaatataataaattagacaatctctttatgtaactcttttgctttttcttttcttttttttttttttctttttttttctattttgagacagagttttgctctcgttgccaggctggagtgcaatggcgcgatctcagttcactgcaacctctgcctccccgggttcaagcgattctcctgcctcagcctcccgagtagctgggattacagggatgtgccaccaagcctggctaattttgtatttttagtagagatggggtttctccatgttggtcaggctggtcttgaactcccgatctcagatgatcggcccgcctcggcctcccaaagtcctggcattacaggcgtgagccaccrcgcccggtcctatgtaattcttttgctagatgagctagattagtgcataatagtgatgatttggt

SEQ ID NO: 19845 - DNA, 536 bp, Homo sapiens
cagtgagccgaaatcaagccactgcactccagcctgggcgacagagcaaggctccatctcaaaaaaaaaaaaaaaaaaaaaaaaataataataataataataatgttcttgygaggattaaatagtgtaataaatgtaataaatgtaaagtcttcaggatagtgcctggtacagggctatcactcaataaacattagtttctattaatgatattattttagataggttcgaagccaatgctgcataaagattgttctcaccatgaccaacttatcgtagctttccctggactttcctgcttatagcatagaaaatcccaaggctggggaaaaaacccttgtactgggcaaactgggacacgtggtcgcactagtcagatcccagtacaacagtcaatattttgttgcgtcctgtccatagttttgtccacaaacactgtgtgatttcattaccaagacttgtgctcagtatttacaataacaaagatacaaaatcaatgtaaatgtccctcagtggatgaatgtatcaagaaagtg

SEQ ID NO: 19846 - DNA, 536 bp, Homo sapiens
cagtgagccgaaatcaagccactgcactccagcctgggcgacagagcaaggctccatctcaaaaaaaaaaaaaaaaaaaaaaaaataataataataataataatgttcttgcgaggattaaatagtgtaataaatgtaataaatgtaaagtcttcaggatagtgcctggtacagggctatcactcaataaacattagtttctattaatgatattattttagataggttcgaagccaatgctgcataaagattgttctcaccatgaccaacttatcgtagctttccctggactttcctgcttatagcatagaaaatcccaaggctggggaaaaaacccttgtactgggcaaactgggacacgtggtcgcactagtcagatcccagtacaacagtcaatattttgttgcgtcctgtccatagttttgtccacaaacactgtgtgatttcattaccaagacttgtgctcagtatttacaataacaaagatacaaaatcaatgtaaatgtccctcagtggatgaakgtatcaagaaagtg

SEQ ID NO: 19847 - DNA, 533 bp, Homo sapiens
tttttgataatcattttgcccagtgagattatgtctttggacagcttggttgggtcaaattttcacaaactgctaggatattcataatgggccatctgcagttttaagtattcagttgattcatccaactgtatattaaatttaccagaccatcaatgtaagaggcaatagggcttggcaacacataccatactgatgataataagaatattaagaaacataggatcttgtgatggagtttctagtaattcactttctagcattttgccaattgtttaacctctttgaagatgagggcttcagtttgtctctaacagaaatatgtttgtaattggggatgaggtggggctgtcaccttccctatattcatgactatactattcctggatctaatcagcctcagaatctttaacacagaaatagactcagaattagatagatttgacacgggatttgaagaatatttgtcatgtttgagtgakataatctatagagttccctcccagcctaagtttgtagaagattttcaaatt

SEQ ID NO: 19848 - DNA, 519 bp, Homo sapiens
ttgtcacccaggctggagtgcagtggcacratcttgggtcactgcaacctctgcctcccaggttcaagcaattctcctgcttcaacctcccgagtagctgggattacaggcacgtgccaccacacctggctaattttggtatttttagtagaggcggggtttcaccatgttggccaggctggtctcaaactcctgatctcaagtgatctgcctgccttggcctcccgaagtgttggaattacaggcatgagccaccgtgcccagccagtcaatggattcttgaggagtccctttgctttctccttgggctgccccatgaggggtatgttctctagtcagggatgcccaggccagcctagcatactggggggaggttcatttctaactttgaacaatggctaaggccacaggaccctgggcaagtttgcaaaggcagagcgtcattcagagagatctggggaagtgacattgtggttgcagtgtgtgcaaaggccccggggtaggaaaggctgggcatgt

SEQ ID NO: 19849 - DNA, 506 bp, Homo sapiens
tacctttcttaaataattctgtagtggctgtatttttctagacttaaaaagaagaaaaaggtaggagaagctgccaataaaatgaactcctgatttcaataaagaagttaacttaattactactgactaagtgagcatggttaccaagataagatatgacccaagaaatcagaatggtttgaatttaaccaaactttgaagatagttaatcgatcatgcaatatctaggactgaaaaagatgaggagtctacaaagttctctaatgggagagkagccaggaacacttggggaagacctattacatatacatatacatatacatatacatatacatatacatatacatatacatatttcaaatatttctcttgtccttctgcaaacctgtagccaaagtaatattggactgggtaaagtgatagacccaggcttttatacatatatgtatatatgtatcatttttttctgaaaatagaaagctgatgaacagtttcagaatgccatt

SEQ ID NO: 19850 - DNA, 529 bp, Homo sapiens
gctcttcatgtagaaatattatctgaataattaaaagaaactcaacttcatttaaacacagaaaaaaaatttataatccaattccacataaataarttgtaagacaatatataaataaaccaaataatgtcccaacaaataatgaaaacacacccaataaccatagcgatgaagaagacaaaatcgatactttcagatttttagatattctagaaaatgttttaaatggtcaaagctttgtgagaaaagcataaatcagtaatagaacagctctgaagagaggtaactaagcaataatagaatctgtaaagagaatggaaaggaattagtaatgaactagataaatgtaaaagaaagacattttagaaatgaactttaaaatagaagaaacacaagaaaaaatagttgcacacaagaaaaagtgtagtacaggaattaaggtacagaatagaggaatgcacatttaatgaacaacaatgagaacaataacaacaacaaagtaaggtaaaaatgtttcaagagaaagtta

SEQ ID NO: 19851 - DNA, 541 bp, Homo sapiens
aagcaatcaatgaggtgaggaataattaacattctaatgatctcctaagcaatttcaggccttaagtttcatggtataaaactttttgtggaataatatgtactttcagacattccttgttttgtgtgtgtgtgtgtgtgtgtgtgtgtgtctttctttctatttattacagaggcagaaacatgaggtgattctgtgactatcagttatttggggagaacttaaactgaaagtgtttctagaatcagaccttgactactaccccaagtgcaactctcttggttagccattacatttgatcagaaactaatagttaaaaattatttagtgagttttcctttaggttggtctatagaatctattttaggacacagtaaaaattactttttatttgtaaaatacttaccatacacaaattttaattttttttactcacataaaataaatctaacataagaaccaataattctgatctatgagtacataaaattattttatttaaaaatataaaaataaaaaaaraagctacttaatgaggttt

SEQ ID NO: 19852 - DNA, 593 bp, Homo sapiens
gtgagaatatttcttcttttacttctttgtatttgtttctattctttggtaaacataataatgttgaggaaatattttgttaatttattgggtacattatttatttcttatttggaagccttggagctgaattcaggcttctctaaatggcatacatatttaactttataattgcaaaatgttccctcttttaaacagtatattgtaaatmtgaaaatacggtttatacttctctcaatatactttcaacaaaaacattagatttcctgccttgttagtgagtatatttaaatatttcataagttttcacaagcactcttgaaaaatggtctacttttttataataatattgataattttgttaatattgctagcatacaaattgagttatatttttagtaaagtaaaataggtatagttggaattatccttatttctaaatgctacttattttttaacagtattcatgcatatgttttcaaaagctaaatgacacaaaaaagcttaaaaccaaaaccatttcctcattttgtcggcggggggtgatcaggagtggtgggttttcctagtgggggccactttgaatattcaca

SEQ ID NO: 19853 - DNA, 1515 bp, Homo sapiens
tgcctggggactgcagcagaagctgccatgccctttgggggacctctccaactgtgtcagagtcctaattttaattcttccacttgcacatgaagctgaaagttgtttcccaagtatcccagcttgggcaaggcctcctggcatcacgtctgagctcctagcaacctgtgaatctctctccgtctcccccaccccaatcctcaagaaaaaggtgttctgattagagcagggtgtcctccgggtcttgcccttgtgctcccacagaccccgagccctgagctagggtgtgaggtggtaggaaaaggacttggcactccctcccccatctcccactcagagacctctagggcagtgtgtccccaccaaactccagccacccccgctcctctgcacacatcacacacgtcccttgattgttcctgccctcgggtcgccatggtgacaggcactaacagcgctgatgctatttcctagaatggacagacaccgtcccccaccctgaagacagccttccctgagctgccctcgatggcctccctcctcctgctctagcaggaggaagaagcctcggggagaaaaggccaaggaagggactgggttctgggagtggaggaggcaggtgaggagcagggatctgtgagcaggagccaggcctacctgcccacctgtgcagaggcctgagcctgctcaggggtgctgcaggggactgaagggatgcagcccaggcaagagaacagggcatgatggccgcaggcccagagcctgggagtcaggaggcctgggttccagggcctgctctgcctgtaaggccctgccagctctgggccttggtgtcctcaagacactggtcacattaaaatctctcaggctactcttctcctggggggtggggggagctgtatagagaaaaatggctgaggaacaccagtaaaaataaatgaagtgcaaggacaggggatggagagcttgagagggcagagagcacagaaccacgaggactggtggcctgaggcagcttcctgaagaggcagcggacaccctggtgtgggaaggatgctccctgaacattcctgcatggagaacagccttgcaaaggctcagggacaggaccattgtcagggaagaggagtctggatgtgactgagctggaaagtccccggaggtccgtggcaggggcagccgtggtcagagcagcgtgaggtgggcgcatgaaggaaggaggagtgaatgaaggagtggcaagcagggcgggggatggtgtggaacaggaaaactcatggattcaatggcagattagggaggacagagggcagggcctattctctgggtaccgtgggtccctccagaaaggcctgttgcatgttttcccaggggtgaaggggatcccagcccccttcccaacccsaatgctgcccctcattacaatcccacgtggtgagaggcagaagcacaaccagaaatgttccagcaaaaaaaaagacacaatggttcttggcaaacttttttggctagaac

SEQ ID NO: 19854 - DNA, 550 bp, Homo sapiens
gccatgggttgtgtgggtctataaaccaaacagacaggccttggacagacaggggtttccttcaggcagcacagcctcagccacagcagcatcctgaggctgaggatgtaacaccaagatatgaagatataaccctacgtttctaagatgcggctgttctgggggaagatataacactacgtttctaagatgcgctgtcagtgagtgacatgagagagaaagtctgcatgtcttagttatcagccatgtgagaaggaatacctggatcactgaatcatctgggcataaaagcttttttatgagttgtgttaaaaactgctttttgtggatcacatgaagcractctgaaatgcattatcctgatcatcattgttgctaatcatgtccattttgggccatgcactgcacatgcttatcattagtcaattgattaagtttgcactctttgggagaggcactactcctatccctatgttatagctgaggacgctgagacataaagagattaagacgctgtcaaccaagccaataacaatattttctctaagct

SEQ ID NO: 19855 - DNA, 639 bp, Homo sapiens
acaagtgcagaaaggaggatgatgcaggtgggtggggcccaggagtggcaggtggctgtggggacctaactgggcttattgagaggcacacagccagtgctcaataatgctaacggtaaaagagtaatattgatttattatacatttaattctttacagataagtgtgatatggctgtcccaaaaagcttgctcagttgtaaactaggccattggtctgcastaccaaaaagtcaatttggggaaccaccttctgtgagacattaacaaactgtaacccatttgggcaaggctgccacggagccaggagcagcctcacaggaggctgaggaggggcattaagcctccagagaagagacccacaagaggatgtcacaggccgcctgttcagctacactaagcagctcccaggagtgggtctcaagccatgagtgcatgtttcagggaggcagttttaagcctcacgtaaggaagaactttttaaaaattcctctcttcctaaacaaccttcctgaaagatctgaactttttgccacttaagttggacacctgccaaggaaggaaggtgtgcggaacccattccagtagtgggaaagaggtttggtgactaggctttaagttccttttcagcctaagattc

SEQ ID NO: 19856 - DNA, 602 bp, Homo sapiens
tcaaatctgtctgaccccatgttccaggtctgtctcatattctgtgctgcctcccagtagtgtctatagtcctgtagacacatttttcataaatgtggaaataaagaagttgaagcatagatttaaatcatagagttatttcktccctccaatccaagttctgtatattgatccacattgtatgaaatcaaggtggatctcagatctagttttaatggaccagggataaaggtaaaagacattctcaggtaacaaaaaaggaggttaaaatacatctgcaaccttcttttttcctcttaacaataatcccagcactgattctctgcaaagacaattgatcctaaagatgcctttttggaaactttggtaaaattttctttataattatctgaaatgagatatttattcatttttgaccaaagtggtctaagaaattgattagacatctttcaatttttccccaaattgtttcttattaataaaattaatttaccatagaccaaatgagattgttaggccattgaagcatgagctctatggcatagcctataatttaagaaagtttctcttgattactttatgaagggggaggggaacaaaaa

SEQ ID NO: 19857 - DNA, 542 bp, Homo sapiens
tcagttttcatacacaaaacataatgtatgaagatttagaatgaagtgtcccactgaaggactgaatttttatttctgctggcttatttcaaatcatttctagaggaagtccaaatgagaagctccatctctgagtctttggaatgcagaaccctgccattcgggagagcattccttcttcctctcccartgccttcacttgtccccacagttcttcctgccaatgtgagctgcagaggaaggtgcctgggacaactgactctgagactcctcacataactctccaagtctagggggttgccaggaaactaaaaattgaggctattagttttgtaaaaatacagacattccattggaatttagtatcagtctacgatacgaccacaatgtaacacagaggagttactgattcagcatgaaagtgaatgaataactggagatatgagatttatattttggaataactattattgatttaaaatattgtgtaccattgactaaagataaattataaatagataatagttaatatgtaaagtatg

SEQ ID NO: 19858 - DNA, 549 bp, Homo sapiens
aaaatggtttaaaatctggtgcaaacttttatatgtagttgtaagtttctcaacaccaaatagcagaaaccaaggagggacaatgtccaccctgtacatcatcatgttctcagagactagtgatacctatatgcaaattttcaatgaattaaagaaaggcccagtttgtgtcttattcattgatcatcctgtgtaaccaattgtacaaggcttgcggcctcattcctatatgattaagaatgtgcttggaacaatagaaatatatttatttttgtgttgaactcaaagagtgctgcaggggcaggtgtggatgctctaaaatgctaggcaatcttacacctcagcctggctggcccctggtgtggctttggagacagcctgggatttggatgctagtgtttttattaaataccatctaatgcctttgacyccttccttccaatgagtggaaattatataaggaacaaaattatagctgcacttcctatggcagcttatcaactgagccagaactgtgcagacttgttcatcacttgtatttctgtgaaa

SEQ ID NO: 19859 - DNA, 565 bp, Homo sapiens
aggaatgaattaatgacatttgctgtgacctggatgagattggagattattattctatgtgaggtaactcagaaatggaaaaccaaacatcgtatgttcttactgatatgtggcagaaaagctacgaggatgcaaaggcataagaatgatacaatagactttagggacttgaggggaagagtgagagcagggcgagggtaaaagactacaaatatggtgcagtgtatactgcttgagtgatgggtgcaccaaaatctcataaatcagcactaaagaattacctatgtaactaaataccacctgtaccccaataacttatgaaaaaataaaaataaataaataamtacgtatatgatgaaccctagaagtatagaatcttggcctttgagatggtgatgacttaaattccaaagagctgacaagcatgctgatattctcctggcatttccattggcagttttctacttcctgtgtatattcttccaccaaatatttttttctcttttttttccttttatttttttccttttacaaagtaaactacaattttgttgtgaaattctca

SEQ ID NO: 19860 - DNA, 475 bp, Homo sapiens
gatgatgtgtgcacaggacagctcatttgcaagccaggggtgtgagtccacgtgtgtgcatacatgcatgcacacacacatgcacacgaacactttcacacatggcattcccatgctcaggggtcagggccctagcaggccagttgcagaaactgatggacaataacacatcaccgcatgatcatgcttgtcttggtayagatcactgcttaactcattgtgttccaaccaggttgtgggctccatgtgggcaggggcaacagcttccatcatctctttcttacctccctaattacccagcagtgtacctgggagcaaatacgacacagcacctctagcactccagcacaaagaggtacccaagggactgcccagatttcgcaacttaatgccatgatgcccccatctgagagaactgaaactggtcctccagtgtccctgattaccagcccatccctcatccctcagttcttca

SEQ ID NO: 19861 - DNA, 794 bp, Homo sapiens
ttttacatgatttttcaaaaaattaaaaagcattaccattaagccagatctttaatattaggcttaactggttattaaaatgaaattagcaactttgctttaacttctttaataatgatttttatcagtagatttattagataatttaaaaatattataactgtgaattgcatraggactgcatttcatgtattaaatcctgaatttatacagtccattttgatgatacaagtaagaaatcctaaagtaatattttcccacccaagttgatattagagaaaaaaatcatggtcataatttatagtaaagtgtttatatctttcaatgtaacattgcttatgttatttcatcaaggtattgctaaataagaatatagatagttccatattaaatgatcatttaactatttaatttccatccttacacccaaataaggctcactttcaaaaattaatttctagaattttatttataaaactttatcaaagattataagattatattttaaaaattatttaaaatgctctactgatttagatgttttaacttgcctttgctttacctaattatagattccctgttaaattatgagagaagcttatttttagatgtgtcataaaattcagagttagagagtgaagaaataaacatacatctaaagccactctgaaaaaatactcaaaataaaataagcagagaatcaacaatgaaagtaaaagaaacatacttgtatatgaacttggcaataaattatattttccatgtttctgtttcaatcaacaaagtagtaaggc

SEQ ID NO: 19862 - DNA, 794 bp, Homo sapiens
ttttacatgatttttcaaaaaattaaaaagcattaccattaagccagatctttaatattaggcttaactggttattaaaatgaaattagcaactttgctttaacttctttaataatgatttttatcagtagatttattagataatttaaaaatattataactgtgaattgcataaggactgcatttcatgtattaaatcctgaatttatacagtccattttgatgatacaagtaagaaatcctaaagtaatattttcccacccaagttgatattagagaaaaaaatcatggtcataatttatagtaaagtgtttatatctttcaatgtaacattgcttatgttatttcatcaaggtattgctaaataagaatatagatagttccatattaaatgatcatttaactatttaatttccatccttacacccaaataaggctcwctttcaaaaattaatttctagaattttatttataaaactttatcaaagattataagattatattttaaaaattatttaaaatgctctactgatttagatgttttaacttgcctttgctttacctaattatagattccctgttaaattatgagagaagcttatttttagatgtgtcataaaattcagagttagagagtgaagaaataaacatacatctaaagccactctgaaaaaatactcaaaataaaataagcagagaatcaacaatgaaagtaaaagaaacatacttgtatatgaacttggcaataaattatattttccatgtttctgtttcaatcaacaaagtagtaaggc

SEQ ID NO: 19863 - DNA, 694 bp, Homo sapiens
aacatctcctcgcctttcattggtctgaactgggtcatgtgccatttcctgaaccaatcactttatccagcaagataggctagccccacggcttaggccaatcagaacccggccctggagctgagggtgggtcgttcagggcacgtgttgagaggacagggtagttccctgagggagggtctgtcgatttggtgggaagtgctgacatggaggctggggaggcaaacaaagccctgagatagtcgccatcgccattgcctgagatcattaatatgatccagtcaatcagaactccccccgctgctccagccctgtcttcgtgtcctgccttatggccaagccctctgcttagtggaatggagyccccctcatccatactggctcatgactccattcatttgcccttgctgtgccctccatccgggattctcagcccctaatctctaccctccttatcttttagatcccaggtcaagcttcaccttttgcaattttgaaatgaataatctctgccggggattcccacagcacctcgctcccaccatcatttccaacaccattatggtcagctttccttatggcatccctgcccctactttctacctgctatcggcgcagagcttgccagttccttgaaggtttggctctggataggacttaattaatttctctgttctcagactctgggtactgc

SEQ ID NO: 19864 - DNA, 584 bp, Homo sapiens
agtgagaaaatctaggtgaagtaactcgcatagcagctgccacaagggagggtattcaaagagacagctattatttttaacatccttcctctgctcactctttccagatgccccttcgaagcaaaccctccctctgctgaccccctaacacacactgccttttacagcactttcctatgttgtgtgccactgcacctgcattaagtctccctgctccttaagggcaggagccaggtctcgcccacttccatacatcctccagcactaagcgacttcatgtagaactttacaaatgtttgttgaatcagattatctttaattcccctggcatacaaaaataatctcagctatagtgattttcatagctgttcwctagattatgctgaggaagaagggtgggtaggacttgggggcaaagtaatatcattaccatccttccagtatctaaaacatatcccttattgcttgaaacaacacagaaacatagctgattgatttaagaaccttccagaatacaaatatgtttagctctgagaccattaacatgattttggggaatcattttgattttcaggaaacattta

SEQ ID NO: 19865 - DNA, 584 bp, Homo sapiens
agtgagaaaatctaggtgaagtaactcgcatagcagctgccacaagggagggtattcaaagagacagctattatttttaacatccttcctctgctcactctttccagatgccccttcgaagcaaaccctccctctgctgaccccctaacacacactgccttttacagcactttcctatgttgtgtgccactgcacctgcattaagtctccctgctccttaagggcaggagccaggtctcgcccacttccatacatcctccagcactaagcgacttcatgtagaactttacaaatgtttgttgaatcagattatctttaattcccctggcatacaaaaataatctcagctatagtgattttcatagctgttcactagattatgctgaggaagaagggtgggtaggactygggggcaaagtaatatcattaccatccttccagtatctaaaacatatcccttattgcttgaaacaacacagaaacatagctgattgatttaagaaccttccagaatacaaatatgtttagctctgagaccattaacatgattttggggaatcattttgattttcaggaaacattta

SEQ ID NO: 19866 - DNA, 604 bp, Homo sapiens
gggtgagaaaaatcaaaattgagcaagatccccatatcaaacctgaagtggggaggggaacccacccaggacacctcagagggcagaccaccctgttcttaatactacaaggaaagtgcggaagagagagctctgcagagttaaaaatcctcccctgcaatcagtctccttctaaaatatcaggaaaaccatttcacataaaaattgagcaacagaagtgcattgaggttcaatacgacacaaaatacaaaattaacrcaagaaaaagagacgaagcagcagaaaacctttcctactaacaatcaaaacttgcctgacaaatgggaccacaaaaatcagagctatcatctattatttcaatataaactaaaagacattaggaacaccacatgacatgaacactcttaaatgactttgggagaattcataaataaggtaacaaaactctagagaatttgaaataaaagaaaattattgcagaggtaatgattaaaatgaaaggaacataacaccaaatacacacaagggataatgccatagaaaaatagaaggcaaaaagaggaaatttgtaaaaactgaaaaacacgagtccagagatgaaaag

SEQ ID NO: 19867 - DNA, 604 bp, Homo sapiens
gggtgagaaaaatcaaaattgagcaagatccccatatcaaacctgaagtggggaggggaacccacccaggacacctcagagggcagaccaccctgttcttaatactacaaggaaagtgcggaagagagagctctgcagagttaaaaatcctcccctgcaatcagtctccttctaaaatatcaggaaaaccatttcacataaaaattgagcaacagaagtgcattgaggttcaatacgacacaaaatacaaaattaacacaagaaaaagagacgaagcrgcagaaaacctttcctactaacaatcaaaacttgcctgacaaatgggaccacaaaaatcagagctatcatctattatttcaatataaactaaaagacattaggaacaccacatgacatgaacactcttaaatgactttgggagaattcataaataaggtaacaaaactctagagaatttgaaataaaagaaaattattgcagaggtaatgattaaaatgaaaggaacataacaccaaatacacacaagggataatgccatagaaaaatagaaggcaaaaagaggaaatttgtaaaaactgaaaaacacgagtccagagatgaaaag

SEQ ID NO: 19868 - DNA, 604 bp, Homo sapiens
gggtgagaaaaatcaaaattgagcaagatccccatatcaaacctgaagtggggaggggaacccacccaggacacctcagagggcagaccaccctgttcttaatactacaaggaaagtgcggaagagagagctctgcagagttaaaaatcctcccctgcaatcagtctccttctaaaatatcaggaaaaccatttcacataaaaattgagcaacagaagtgcattgaggttcaatacgacacaaaatacaaaattaacacaagaaaaagagacgaagcagcagaaaacctttcctactaacaatcaaaacttgcctgacaaatgggaccacaaaaatcagagctatcatctattatttcaatataaactaaaagacattaggaacaccacatgacatgaacactcttaaatgactttgggagaattcataaataaggtaacaaaactctagagaatttgaaataaaagaaaattattgcagaggtaatgattaaaatgaaaggaacataacaccaaatacacacaagggataatgccatagraaaatagaaggcaaaaagaggaaatttgtaaaaactgaaaaacacgagtccagagatgaaaag

SEQ ID NO: 19869 - DNA, 912 bp, Homo sapiens
atgtcaattcagaatagcagatgattattctccagtagaagttttatatttctcctgagttttatatttctatgtccctttagtgtgaccagctgactgtaattgccacttagtgattggccagaaagctgttatgtcaatcaatcaaacaaataaatgggtgaattaattaatatttttgttgaaaccaatttaaaagaattatagcaaagcaattttgattttcaacagtcctactcaccatctgcatttggtaagactcttgacatttgtctgggttgctaagcaataaattcctctgccatgactcctgagtccctgggatcactccattattttgtcattcaagtatgtcacactgcttggtgtgggcctccaattcctgcacagtcagaaatatggacctgctgtttctacagtagaaaaagagtaaataagagaattgtgggacagaaagatgattaaaagactgaggaagtaaggctacataagcctcagaatttggaggatatacttttgaaagagaagtcatcataagctcagaagtttcatcactttaaaaacgtagttaattttcacacccagcggaaactcaccaccactggggtagttaaagtaactttgtgatttyagcaacagttctcatataaaatacactatgttttgtaaaagcttctatcacattttctatttatcagaggatagtcctgatcatttgatcatcagatatgttagagtcttgactttagtgaacacaggaaaagctggtgagaatcctttgctaatttaaaggttttgacagtagtctgactagttcaagaagcctccaactattaggatggtatataagtatttactgaaaattgacttttaaaaaatgttttgttttgatgccagtgctagattttgtga

SEQ ID NO: 19870 - DNA, 552 bp, Homo sapiens
catttgggaggcagaggcgggaggatcacttgagatcaggagytggagaccagcctggccaacttggtgaaaccccgtctctattaaaaatacagaaattagccaggcgtggtgacaggcacctgtaatcccaactactcaggaggctgaggcaggagtttcacttgaaaccaggaggcagaggttgcagtgagctgagattgtgccattgcactccagcctgggtgacaatagtgagacactgtctttattgaaaaaaaaaaaatttcttaaaatgtgttaccctgatactcttttacagatcatagttgggcacatgtacaaacttttcttttgtttgaatactttgaaaggaatttctaataaaaggttatgtctatttaaaatttagttatgcataagtagacctcaaaaaatgatttattttcctgtcttaatttccattcatgttcaatactaaatatcatccatcctttaatttttccaatataatatgtaacaaatagtattgattgatgtaaaacaattcctttttcactcattttcaatgag

SEQ ID NO: 19871 - DNA, 552 bp, Homo sapiens
catttgggaggcagaggcgggaggatcacttgagatcaggagctggagaccagcctggccaacttggtgaaaccccgtctctattaaaaayacagaaattagccaggcgtggtgacaggcacctgtaatcccaactactcaggaggctgaggcaggagtttcacttgaaaccaggaggcagaggttgcagtgagctgagattgtgccattgcactccagcctgggtgacaatagtgagacactgtctttattgaaaaaaaaaaaatttcttaaaatgtgttaccctgatactcttttacagatcatagttgggcacatgtacaaacttttcttttgtttgaatactttgaaaggaatttctaataaaaggttatgtctatttaaaatttagttatgcataagtagacctcaaaaaatgatttattttcctgtcttaatttccattcatgttcaatactaaatatcatccatcctttaatttttccaatataatatgtaacaaatagtattgattgatgtaaaacaattcctttttcactcattttcaatgag

SEQ ID NO: 19872 - DNA, 552 bp, Homo sapiens
catttgggaggcagaggcgggaggatcacttgagatcaggagctggagaccagcctggccaacttggtgaaaccccgtctctattaaaaatacagaaattagccaggcgtggtgacaggcacctgtaatcccaactactcaggaggctgaggcaggagtttcacttgaaaccaggaggcagaggttgcagtgagctgagattgtgccattgcactccagcctgggtgacaayagtgagacactgtctttattgaaaaaaaaaaaatttcttaaaatgtgttaccctgatactcttttacagatcatagttgggcacatgtacaaacttttcttttgtttgaatactttgaaaggaatttctaataaaaggttatgtctatttaaaatttagttatgcataagtagacctcaaaaaatgatttattttcctgtcttaatttccattcatgttcaatactaaatatcatccatcctttaatttttccaatataatatgtaacaaatagtattgattgatgtaaaacaattcctttttcactcattttcaatgag

SEQ ID NO: 19873 - DNA, 552 bp, Homo sapiens
catttgggaggcagaggcgggaggatcacttgagatcaggagctggagaccagcctggccaacttggtgaaaccccgtctctattaaaaatacagaaattagccaggcgtggtgacaggcacctgtaatcccaactactcaggaggctgaggcaggagtttcacttgaaaccaggaggcagaggttgcagtgagctgagattgtgccattgcactccagcctgggtgacaatagtgagacactgtctttattgaaaaaaaaaaaatttcttaaaatgtgttaccctgatactcttttacagatcatagttgggcacatgtacaaacttttcttttgtttgaatactttgaaaggaatttctaataaaaggttatgtctatttaaaatttagttatgcataagtagacctcaaaaamtgatttattttcctgtcttaatttccattcatgttcaatactaaatatcatccatcctttaatttttccaatataatatgtaacaaatagtattgattgatgtaaaacaattcctttttcactcattttcaatgag

SEQ ID NO: 19874 - DNA, 556 bp, Homo sapiens
catcctgcttctaccagagggcattattgggccccgacagtgaacattaaaagaaaggcggattgcaggctagaaaattaacaagaggaaatgagagagaaggaaaacattgttctaatcattctttgagtccttataattatgaagttaaatcattccttgagggttattatggtgatagctgtataatgaagagggggctggcagattaggataagatatgttatttctaagattgtatataaagtaaatttagaaaaaagcagcaagaaagttatttgttttatagaaaaacatcattttgattttagtcaagcaattcaacagtatttcttaaaaggaaagtgaaaacttgaagccctttccaaagcaatgtaaagcagatacagrggattgaacatgttattgttttggtcattgttagtggaattgaacttttgaagatgcattttccagatgtttgttattattgttgttgttattataattaaaacaaactgtctttggcattgctgttcatatttagagcagtttaaccttactttcaaatcctaca

SEQ ID NO: 19875 - DNA, 556 bp, Homo sapiens
catcctgcttctaccagagggcattattgggccccgacagtgaacattaaaagaaaggcggattgcaggctagaaaattaacaagaggaaatgagagagaaggaaaacattgttctaatcattctttgagtccttataattatgaagttaaatcattccttgagggttattatggtgatagctgtataatgaagagggggctggcagattaggataagatatgttatttctaagattgtatataaagtaaatttagaaaaaagcagcaagaaagttatttgttttatagaaaaacatcattttgattttagtcaagcaattcaacagtatttcttaaaaggaaagtgaaaacttgaagccctttccaaagcaatgtaaagcagatacagaggattgaacatgttattgttttggtcattgttagtggaattgaacttttgaagatgcattttccagatgtttgttattattgttrttgttattataattaaaacaaactgtctttggcattgctgttcatatttagagcagtttaaccttactttcaaatcctaca

SEQ ID NO: 19876 - DNA, 618 bp, Homo sapiens
ccaaggacaagtcacagggtgcagggtaccggagatgaggcaccaaattgcaactcctcatctggggaaatctgacgggattaaaataatttctgcagcttggtcacgtcactgaacataagcatgtgctttgtcacatgaaattatcaaaccgccctgttggacatctcattgtttccatggcataccgaggagttatgaaatcaggaacaaatccagcttttcaatatcgctatgaattaaaagaagcctgtgttcaagtgaattctaacccatggccgtggtccctgctgartttctaaggacagaggggaaaataaattaagggcatttagaatatccattgagtttaaagtccgtaatgtgctattcataacatggcacaattcggaaatcgtgatccttttagcaataatctgttactctgacacattccaagtagtcctactttgcaaaataggtaataaaaaaatagaaaacattttagtgctttttaaaattccacaaatatgtggtaaaccaaaacacagtgggatgccctatcccccttgccttcaggggaaaggaaagcttgtatttacccagcccaccagagactcacatcgtatccgctgttgc

SEQ ID NO: 19877 - DNA, 691 bp, Homo sapiens
aggatgaaacctatttgttatcccaggtccaggtgattttatccaagctagctgctgggatcaggaaggtcagacatccaaatgctggtgagggactttgctttctcacatagatgtggaaggtgtgcattattcctggacccttttcaagctgacaactggtctctctgagcctcctgcacttattttcatatgctataaatcacccgtttcaccttgctcctttcatgggcacgcctccctgcttaattgcaggtgatagttgggctccaggaaaggcccaattaggctgcagcaatcatcttcctcttaatttaaaacaactaataggacattggttctccttcacactgggagatgagcccagaagggtccagtacagtcatcatggcaggaaggttacrtttccatttgcttggttcctttctcttcatctttaaggcaattatgagcccaaaggcatctagatgtagttataagcctggctaaattatcattttaagtgtcttgaacacaggggtcaaggttttggaaaatactttcaccaactccagttggtgcccagggttacactccacacaacaggtgaagtgtcaaagctgcaggcgtaagggaattactgcctaagtagttcaagttaaacatcatctactttctgaaaagtctgcataactttcagatgaagtggaat

SEQ ID NO: 19878 - DNA, 677 bp, Homo sapiens
gttagatggggcctagggctgcctggacacggaggggacccttccaggcagaaggaacaacatgacaaggacctaaggaaggaggaatcagaaagaaagccaagaactggggttagagggtattaaacaggatctggatagaaaggccagggctagaacatgtagggtctgataggtcaggaagaacgatatgggattttgttctaaactaacgagaagccactgagagagttttaagtaaattatgtaactgtgttgcagtctattcctcttaatttgtatatttgctagagctctgagtcagtacagtactgttcaagttcgggagtgggtcaaatttcctaattgttggctgggcgtggtggctcatgcctgtaatcccagcactttgggaggccgaggcaggcggatcacaaggtcaggagttcgagaccagcatagctcatatggtgaaacgccttctctactaaaaatacaaaattagctgggtrtggtggtgtatgcctgtagtcccagctgctcgggaggctgaggcaggagaatcgcttgaacctgggaggcggaggttgaagtgagccgagatggtgccactgcactccagcttgggtgacagcgagactccgtctcaaaaaaaagaaaaaaattttttcctaattgttagtaagctttcataagaa

SEQ ID NO: 19879 - DNA, 629 bp, Homo sapiens
ctgggcaacatgatgaaacctcatcttcacaaaaaatacagaaaattagccaggcatggtggtgcacacctgtagtcccagctacttgggaggttgaggtggcaggaaggcttgagccggggacgcagaggttgcaatgagctgagatcacaccactgcagtcaagcctaagcaatagaggcagaccttgtcaaagaaagaaagaaagraaagaaagaaagaaagaaagaaagaaagaaagaaagaaagaaagaaaggaaagaaagaagaaagaaaaaactaaagtgtggactgaagccttttatcagcctagagattaaaaatacttttttctctaatagtaagaaattggaagtaacctgaaatgtctgagaatgggaaaataagtgggcaaattataatgccaccactcaagggactaatatgcagccatttaaaataataattagcaaaactgaaatgtaaaataagaaaagcttgtagttacagtggagtaaaaatatgaaagcaaattgccaagaagtcgaaggattacataaacattcagggctgttttgttagggtggtgattataggtgaagatacccctctatttctaaactccctccaatgttgttatattgtatttc

SEQ ID NO: 19880 - DNA, 555 bp, Homo sapiens
gtaaattcacaatgttgtacaaccatcactactatttatttccaaaactttttcatcacccagatactcttccttaatttttcaggcatattttatatatttgaaacttttttcaaaatttgagtcagtgttgtattgtataaagctttatcctttctgttcaaaatcatgtattttgtaattgttttaaagtttttattaaagtataacatacatatgaaaaagtgcacaaatcttaagtgtacaacttgataaagtttcaaagtcaacatatctgtaaaactasaactctgatcaagtatctcagaagcataccctttcctgggaactacctcccctcaaagtcagtattctgacttctgacagtgcagtttaaaaaattttaattaaatgcaatgttatgattagaaacataggttttggggtatgacagacatgcgttcaaatcctgggaattaggcaaatgacagtctttatgaatttcagtttcctcataggaatagagccgataacatcttcctcacagcatccttctataagatgcagaatgttttt

SEQ ID NO: 19881 - DNA, 497 bp, Homo sapiens
cagtgagttgagatcatgccactgtactccagcttcgtgacagagcaagactccatctaaaaaaaaaaaaaagatggggtctctctttgttacscaggctagtcttcaactctaggtctcaagggatcctcctgcctcagcttcccagagtgctgggattacaggagtgagccactgcgcctggcttgtgtattatctttttctctgttgaaaacaattgaaaggccattgctaacattttaggatttaccaaatgtgtgtaagttttattttacattgataattttagacctcaaatacttttgtggcaccaaaaaaaaagtaaatgcacagctctagattgttttgttttggttctgttattcgatcgccctgtttataagatttagatggctacattttttttaattgaggtaaaattcatatagaatttatcatttgaaagtatacaagtcagtggcttatatactttaaagtgtacatggcagtgacaatca

SEQ ID NO: 19882 - DNA, 561 bp, Homo sapiens
atttggtgtgtccagcctccagtttcatctttgacagacctcagcatttaataattaggagtttccatctagaaatctggattgcctgctttctaaaacactctttgctgccatgtcctctttttctcctggcatttcccacccactccatgccatacctcatctggaatacccttagctcctctgaatccatctggtccttcaagaccaaatacctagctctctttcgtgaaaccttccctgatcactatactatagtgactacttgagactcttctaaccctggctgtacttggragcttttaaaaatacaatgcctgaacaccaccccaagaaatgagtttgcagtggagcctgggcatccattattcataacagagctgttttcctcttgagaagggaagatgttgtgtaataatgtagaagagagatcttgttttggaaaatcagaagtttagttattggttgttgctatttctgaaccatatacctcggtagatcatttaacccagcgctctcaaaaacatgcatacatgtcacttgggatcttgtaagcagcaa

SEQ ID NO: 19883 - DNA, 501 bp, Homo sapiens
tctgccacagttaagctgggctcaaaaggaataaataagaaaataattgcgtgataacccagtcaactccagttattcaactaaataaagtaccctgacggtagatgaggaaggactgtcacatcaagtgtattttatggttccatttgcttctgttttttatgtccatcagaacaagtttacttgtttagttaaattgacattgcattagttgaatgtcaaaagtaatgtgtgctaatgggtcagcccaggactttgtagagtacaattcagtgcccaaacgaggcttcctgttgtggctgaagcacaagtcttatatggaaagatcacttcttaaaaggagcattttgtttaatccgctgagacagaaatcaagatgttctatcttatttttccctgtatcgttgaygatttttaactttcagtgatccctcaactgctttctcatctgaaaaatgagttgatatttaccataataaataagtgaaataaagagagata

SEQ ID NO: 19884 - DNA, 632 bp, Homo sapiens
tctgtctcacctaaggggaaaaagttcacacagttaagagggaggtaattggctttaaggagataaactgggaacacttcagccaagaactgtggtagggatgtrggggaaagctgtagcactataggaaaattcgtgaaactcacagtcctgagacacagacccactaaaagactgagacttaatgggaagactataggatgcttcccacctctcaaattttaccactgcatctacagggctcaaagtgtaacagtgaattataactagaaaagctacaattactcttctttgaggaaaagtaattatgaaaatcaaatatcaaaagagaacaaaacaaggacattacagaaatgttgtgactctggcacctatagctacagcaagcacttaacaaagccaaacccctgtgcagattaacataaatgccctcactaacagtccatttctctattacctaatacagtacgtccaactttcatcaaaaaatttcaagacctgctaataagtaaacagataaaaaacaaaatgaaacattctgaagagaggcagcaatgaagcaatcatcacaaccagattcggatatgaatcagataatcctggaattatcagacctgaaattcaaagtaatt

SEQ ID NO: 19885 - DNA, 564 bp, Homo sapiens
gttggcttttgtttttagtggtcgatttatttttgatgtctgaaaagtaggggatgactacacaaatctgcaggcatgcacacacaacacggtttctcaagcttatattgttctcttgggtagaaagagaaaaagaaaaccactttgggatatgctagagtattttcttgtaggaagtttaaagattatycattcaaaaacctgacaaattaggagccaagccttcctgggtgtttgtctgagttatattttccaatctattatgaaaatcctgaatagggcagtcattttgaagatggctttgacctttatcaagaagaaggagccagttacattcagcactatctactctacaatcagtcattgtgctgtctgggcctgctttctttaagaaagcttatttttcttctttcttgttgcttatgggtcttgtcatttatgattcctctactgcaggaagtctcgtttgtgaagagtcacagattgtaccaggtttcctttttctgtaataggatagatgaggagaagacttcgcagctgccacataggttatgctgtgctcct

SEQ ID NO: 19886 - DNA, 605 bp, Homo sapiens
caggcgtgagccaccacgcccagccctctaatttctttttctatgggagcttagagttcatagagatggaactgtgatttttgttcattacattcctccacttctcccggcagatttctgtaccccctctctgatatctagagcattgattatatgattattctagaatttttcagatggcttcatgataagcattctgacatgcctgtctcgcctaccaggccacacacttgttgaggtaaaggacaatgctcaccctctttgcaccrctatcacatcacctgttcagggcacagaacagcaaaaaagggttgacaatggaatgatgcttttttttttttttttttttttttgagatggagtctcactctgttgcccaggctggactgcaatggtgtgatctctgctcattgcaacctccacctcccgggctcaagcaattctcttgcctcaccctcttgagtagctgggattacaggcacccatcaccatgcccagctaatttttgtatttttaatagaaacagggtttcaccatgttggccaggctggtctcgaactcctgacctcaaatgatccgcccgcctcggcctcccaaagggctgg

SEQ ID NO: 19887 - DNA, 1011 bp, Homo sapiens
ccaattcatacattgaagccctagccctcaatagctcagagtgccattgtatttggagacaggttcattaaagagatgattcattaaaatgagatgcttaaggtggaccctaatctaattagactgaagtccttatgagaagcagaaatttggacacacaaaaaaccatcagtgatgcacactcacagacggaagaacatatgaggacacagcagtaaggtggccatcagtaagccaaggagaaaggcatagggagaaaccaactctgctgataccttggtcttggacttccagcgtttagaacggtgagaaaataaatttatgttgtttgagccacccagtctatggtatatttttatggcataaagcaaactaatacaatggttattagatctagatagtatattttcagcaaaatttgtctatgtttactactttgttattattttttctttgcctcattgtttctatggatttcttcaaaatgttaagctctttaggggaaactttaccatgaatagttttagaaagcaagcttgcataaatgtctgaaaaggaaacatattattcacaggtacattttaaagttactttaatgatttatacctttgttgcctacattatttgataaatggtcttaaaatccttatgagtcttaaatactaaacyctgatttaaaactttattattatataaaatataaaattgagaaaaatgtatctgttaaaacaatgacttcaagccttcgaaaattgttatatccatattgtcaatgtgtatcttttaaaatttttacaatacttgctatgaaatctaaagcacataagtgaaatatgccacccacattcatatattaaatatatgaatttgaaaatataaaaaattttaaaaatattataccaaaatttaccttactaaaatggtttgtcttttattttcacatttatttagaactatatcacatttttatatatctcattatagaatttggacaatgtttgctatatggca

SEQ ID NO: 19888 - DNA, 657 bp, Homo sapiens
tgcatggtctcattaaataaatctttacaaaaaccatgtgcagtagactttactatctctatcttataagtggtataactatgactcagagttatgtcacttgccccaaatcacaggataactagcaaaagttacattaaaaagccaaaggtttccagttgccaaatgctctcatcttccctctatagcggtggttctcctatcctttacactgttaaaaactattgaggatccaaaacaacttgtgtttatgtgggctatctctctcaaggtttattataaaacaaaaattttaaatgatattatttattaattcatttaaaataataaacacatgctaacagatactttttttttacaattacatttgtctgaaaaactaattactggaaagagtgacattggtttacatatttgccaactttaatgtctggcttaacagaagacagctggattctcagatcagcttctcctaaatctgttgaaatacattatttagggtaaagtatataaagaaaatccagcctcacataaacatgtagatggataggagagaagaaattcaatagccttttcrggtaactgtagatattaatatttgatatctacaaaagctcaaccaagggtagttagctccaatggaaggtaaataactgt

SEQ ID NO: 19889 - DNA, 528 bp, Homo sapiens
ggaaggtggtgtggacaaccagagaacacagtctctgacttagggggccaaactcatttcctttttattctttttgaatactatgaaagccaagcaaaacatgtctccccaggccagattctgtccaagagtttgcaacctatactttaaggaaacatctttggcaaaatgatcttttttttccaaatatcaagatgyactttctgttatgttatctttgcccacaaaattatacaccgaatcaggcagacttccattccggccttcccaaatatcttgtggatatttaccagtataaacatccattttgttgtaaagttacatttagcaaagcagacccagtggttcaaaagaaatttgagccatatcttcaccacgtgtttctaaaacccagaaaaacaatgaactagtcaagataatgtgtaaatttaagcattcagtagtcttgctatatgttccaaaatgacatcataaatgggtaattatggcatttggaattttaaatatgcaggaaaaaggattctatgg

SEQ ID NO: 19890 - DNA, 518 bp, Homo sapiens
actttatgatgccaaagcgtatcactttaccctgggactgccaaccgtaattctgaaatcggaacacaactgactgcatcagtgacactgaaaccataatattgcagctggcctggagcagcagcaagctgctgatcagtgagcaagacagtggggagggaggaatggctgaagaaaggcattcaagacaaatctccaaattctcaataagctgcaaccatcaaagagtccaatatctaatctagaaaatgtcaaaggtcaggttttttaacaaaatcaagtrgggagattaatattaagtatatctacactgccttcaatactgaactgtttcaggaccacttttagaaacaacaatatgataccactccccatgccaggacatcttacagcaatggcctcatattgaggaaaaaacatttgcaaataaagtagcaaacagtaacttgaagcataagacctacattctaactacagcttgaaagaaagaactgggggggagtctggaagaaaattat

SEQ ID NO: 19891 - DNA, 1033 bp, Homo sapiens
caagtttcctgagaccttcccagccttgtgggattgtgagtcaattaaacctctttcctttataaattacccagtctcaggtatgttgttataacattgtgagaatgaactaatacagtccccaaattaagaaatgttcaacttaaaaattttttgattttacaatggtgcaaaagcaaaatgtattcagtagaaaccgtactttactcatacaaccattctgtttttcacttccagtattcaataaattacatgaaatattcaacacttcattataaaataggctttgtgttagatgattttgcccaactgtaggctaatgaccacacttaaagcatacaaggctaagttacaggttaggtgtattaaatgtatttttgacctacgatactttcaataatgagtctactggaaggtaaccccatcataagttggggagcatctgtactgtttttgcaacttcctgctggcttatacttatgtcaaacttaaacaatttttttttaaaacataggcacaggttaaaaagagtaycttgctaatctgaatcttacgataacaaagaaggcatatatatgagaaggtagaaaggctggaaattggagtcaagtaataaacaaggctctcatgtagtctgtcagtaaacatctgtgtgactctgggcaagttacttactctttttttttcttttcttttgagactgagtctcgctctgttgcccaagctggagtccagtggtgcgatctcagctcacagcaacttctgcctcctgggttcaagcaattctctgggattacagacacaagccacaatgccctgctaacttttgtatttttagtagagatggagtttcaccatattgcccaggctggtctcgaactactgacctcaagtgatctacctacctcggcctcccaaagtgctgggattacaggtgtgagccactgtgcctggccaagtaacttactcttcttagtctgttttcctcttttgtagaaagggtagtcctctatcctacaaagtttctaaaaat

SEQ ID NO: 19892 - DNA, 646 bp, Homo sapiens
gcctgtagtcccagctactccggaggctgagacaggagaatggcgtgaacccggggggcggagcttgcagtgagccaagatggcgccactgcacgccagcctgggcaacagagcgagattccgtctcaaataataataattttgctttttctcactaataattccataaggttggaaaaattgaaaaggagcagcacaatcagtgtgaagaaaagagctctaggaatatgaaagtgagttatgagggcaaaagtgtgagaattctaaaagaaatactggatgagaaagtgtatgttagggaaatactgaaggggaaagagttagaaatcactgtatgaaaaactggccaacatacaaattcctctctactgtagaacagtttgaattggtctatacgctagaatgtaagcccatttactaaacactgattaagaaaagatctttaaggggtttttagtgtcttaaaattcatgtatgttgggaggcgatatctatgtattaaaagaaaatataagctcacaatttatcacttttctgygcagttacagaaacaaaattgataattaaaaaaacaaaagtcaatttgtactatgtgttcacaaacaacacaatacttcaaaaggcattaatagcagaaaacaaatga

SEQ ID NO: 19893 - DNA, 576 bp, Homo sapiens
aattattctctacaaaaagtgctatatatttgtgtgctgcttagtggtcaaagaaagtgaatatgaagtgttattccatgtcttgtcttatatcttgtattatctgttctgttccactatctgtatttgtactattatcaagacaaattttgcctgtcaccaatttcctgtgcttttagtaaactccctttttaaagcttttttttttttttttttgagatggagtctcgctctgtcacccaggctggagtgcagtggcgcaatctcagctcactgcaagctcctcctcctgggttcacgccattctcctgcctcagcctcccragtagctgggactataggtgcccgccaccacatccggctaattttttttgtatttttagtagagacagggtttcaccgtgttagccaggatggtctggatctcctgacctcgtgatgctgggattacaggcgtgagccaccgcgcccggccttaaagctttctaaagattattttgttaagtacagcttagtttttttaagtccttaattttaagtacatgcttttaagtacacttgctggaaaaaaattta

SEQ ID NO: 19894 - DNA, 576 bp, Homo sapiens
aattattctctacaaaaagtgctatatatttgtgtgctgcttagtggtcaaagaaagtgaatatgaagtgttattccatgtcttgtcttatatcttgtattatctgttctgttccactatctgtatttgtactattatcaagacaaattttgcctgtcaccaatttcctgtgcttttagtaaactccctttttaaagcttttttttttttttttttgagatggagtctcgctctgtcacccaggctggagtgcagtggcgcaatctcagctcactgcaagctcctcctcctgggttcacgccattctcctgcctcagcctcccaagtagctgggactataggtgcccgccaccayatccggctaattttttttgtatttttagtagagacagggtttcaccgtgttagccaggatggtctggatctcctgacctcgtgatgctgggattacaggcgtgagccaccgcgcccggccttaaagctttctaaagattattttgttaagtacagcttagtttttttaagtccttaattttaagtacatgcttttaagtacacttgctggaaaaaaattta

SEQ ID NO: 19895 - DNA, 191 bp, Homo sapiens
tcaacacagaagtagctgttcacaattgctcagttacctggggcatggtgggtcttggtcttcttcctcttcttggtcctttttaattcctgcaatacattcagacagggacagacaaaataagccaaytcacctacacccataacagtccactgtctaatccccacacagggatctcaggctcctcagca

SEQ ID NO: 19896 - DNA, 830 bp, Homo sapiens
aagtcctggtcatgtcatggccacataagcttagtggaaaaaaacaccattgatacaactgtcattgtgaaagtatggaggtctggagtctctcataagcctgggattttgggtcatcagggcctatggccaccttacctgggctgagcttttggacaaggtgctgtgccagtctacacccctcagccagctgttcttggaggtcctgcccctgggacttgtccggctcatacggagtgaggagggcctggagatgctcattcaatgagcgggaggcatctctcccttcccgtaacttctccyttaactgggtcagctctcgttcctgagcgtgaaccaggactttatattgcctaaggtgagacggtagagaaaatttaagagtggaaagggttgagtgatccgctcaaatattgcaacagagatttctgagacaatgtcctcaaggagacctcgaagcagaaggtcagcacatgtggaaaggaatgtctgtggccaagagaaagaatagaaaatggtttacaggcttcctctgtatcagagagggctcttgcaagatcctcgatgatgttccattcatctttctcttctgtaaacaaaagtaggtgtcttcctaattccgtttcaaaaagacatcctttcagttcctcactctggccatggacatttccatgtgaaaatacacatagtgcatcttgcggccactagatacaaagccatgtacagaaatgaggccaggtgcagatggggcgaattgaaaagatgaaagaagaaaagaaggacagggtcgagaaggcaacattgattgagtgaaagaatgagaagccgca

SEQ ID NO: 19897 - DNA, 1273 bp, Homo sapiens
ttgatatatattttgttgagatgacctaacaccattgattttgggttgcattccactaacagaacatggcaagatcaaggttatggtcagggttggttggcgatcctcagtgttgctgtgcagtagaaggtgagtttgaggtgagaggaacaagtaggaaagagtgatcccctgaaccacctcttcgctttctcagctttcatccccacctaggttttgtgagcctggaacttgagagactgttctgtagcccaggtctcctaagattggctgctggacttgcctgagttgagggtgcagtgggttgaccctgggctgcccagcattcatgtggaagtgaaggaaggaggactggttaatcccatttgaaagcatccctctctgcagcccgcaccatcttccagtgacactgtaaggatactgctttgagatgtatcaaaggctttaagtcaatgtattttctagggtctgggagacctgacattctgtgtcagaatgaaaatctgtcaagtttctaaatgaaaaaactgcaggttcacaaagtgtcatgggttacttgaggtcacaaagggatgagttttcagcactgccaataaaagcaatcacaataattattcagtaattattcataggatccatacaatccagtaaatattcacatatttagtaattattcattgaccaattcgtacaaggcattttgctcaaaactgtgtttatatttggacattgtatcttcatcataatccttaaggtaatgctattatctataagtaacagataagaaacctgaagatgagggacagctaatcacgtatttggccatatttccattttttggtttttgtgatgctggaagaatgaccagaatgggtcacgggaagagtattcattcytgtattattttccaggacagaggtgtgcccttctagagtactgggaccaaaattcagaagtgtctgaaaccttgctttaacagtatgggaaataacctctatcacctggaatttccctggaactttggaatatacaagagaagtatgagacgtgggtcttcccttggctgtgtttaattcactcttctatggaataccaatgattctcactaagacttttgcctttttataaccacaatgtatgtcttatggagaagattgtacactttgctctatttagaaagaataaatatgagcaatagttttaggttttatgccctggacttcatatttttctgatttctgttttgagattaaattctcatgtaaatagaaaa

SEQ ID NO: 19898 - DNA, 558 bp, Homo sapiens
gaaatacccaaactgaaacatgcttcatacttttatctttttttacataaaatttctcctatggaataattttagatttacataaaagttgtaaagagtattcagataaggtctttgttaatctgaaaatcaataaaacaaagattagatttattacatgaatrtcaaatgaacttattttttgtaagataagcatacttacaacagacatttagcttctctttctgtagtagttagaaaggctaggcttaaatatattaaatagaatatatgtactcagcaatattgaaatatataatattatcactattattattattaagtgtgaacaccatgctgtgaaatagatagtaaaatgtattcctctagtctaactgaaaatttataccctttgaccaacacctcctagaaacaccgccatcccttcagcttctggtaaccaccactctactctcaccttctgtaaatttgaattttttagattccacatatcaataagatcatgcaggatttttctttgtgttgactttattttagatagcataatgtccactagat

SEQ ID NO: 19899 - DNA, 665 bp, Homo sapiens
tatatctgttctaaaaattaatttgtaaattcaacttatttacaatgaatctagttttaatcactgacattaatgaaatttaatattactttttttactcaaaacatgaaattactctctcatattaaaaaagaaaagtgcatatagaccagaattggggctttttgaaaacaagatgactgactaaggagtttggacacaagttctcctcagaaagaagaaccaaagttacaggtaaatgatcataacttgaaaaatatttaagagagggtgcaggagcgtcatagagaaaccatggagagaagccaaagcatggaaaaagacagaagcaagarcctgacaaaggttgactaggaccctgtgggacctcatagaaagtgtaggtaggagtcttctgggctccctgcagctcaccgtgtggatccaagccatcagagagctcttctgtcttcgtgaacacacacactggtgtgagtggagatttgggaacttcttgagggcattacaccaaactactagttgaatagggtcatctgccttccccttgggcctgagctgcagtggtaggtttcatgcctgcagtgcactcatgtggggactgtttcctacccaggaacctcagccctctgtccccataacaccagagccgcacaaatattccctgt

SEQ ID NO: 19900 - DNA, 665 bp, Homo sapiens
tatatctgttctaaaaattaatttgtaaattcaacttatttacaatgaatctagttttaatcactgacattaatgaaatttaatattactttttttactcaaaacatgaaattactctctcatattaaaaaagaaaagtgcatatagaccagaattggggctttttgaaaacaagatgactgactaaggagtttggacacaagttctcctcagaaagaagaaccaaagttacaggtaaatgatcataacttgaaaaatatttaagagagggtgcaggagcgtcatagagaaaccatggagagaagccaaagcatggaaaaagacagaagcaagagcctgacaaaggttgactaggaccctgtgggacctcatagaaagtgtaggtaggagtcttctgggctccctgcagctcaccgtgtggatccaagccatcagagagctcttctgtcttcgtgaacacacacactggtgtgagtggagatttgggaacttcttgagggcattacaccaaactactagttgaatagggtcatctgccttccccttgggcctgagctgcagtggtaggtttcatgcctgcagtgcactcaygtggggactgtttcctacccaggaacctcagccctctgtccccataacaccagagccgcacaaatattccctgt

SEQ ID NO: 19901 - DNA, 593 bp, Homo sapiens
tcaaatgatctgtccacttcggcctmccaaagtgctgggattacaggcgtgagccaccacgcctggccagaagaaatttttattgcataaaatgagaaaggtgttctggagacaccaccagggcagggttgaaagtccctccataaagagattacccaaggtattaaccgcccatctcagcagaagccaggaatagggatgggtcatatctgcagagactgccagcttggaccaaaggggaagagatgggatgaaataaagtaacatttttggacttctggggctctacaggacaggacaatagaatgatgtggtggtgaacatactttctctttcaagaaaagaggaagaatgactccaaaggcaacttacagatcgggggctgccacttccaccacagacccagggaacaaggctgtttcctcttcgtttccagaagacgcaacttccacccgtggcttccagtagaccaggcagaacctgcctagtgcctgaggggtagagccaccacacagagcccccagagtggggctgccacaaagagacacctgagcagggtcaccacccagggctatgcggtggggaggggacaa

SEQ ID NO: 19902 - DNA, 593 bp, Homo sapiens
tcaaatgatctgtccacttcggcctaccaaagtgctgggattacaggcgtgagccaccacgcctggccagaagaaatttttattgcataaaatgagaaaggtgttctggagacaccaccagggcagggttgaaagtccctccataaagagattacccaaggtattaaccgcccatctcagcagaagccaggaatagggatgggtcatatctgcagagactgccagcttggaccaaaggggaagagatgggatgaaataaagtaacatttttggacttctggggctctacaggacaggacaatagaatgatgtggtggtgaacatactttctctttcaagaaaagaggaagaatgactccaaaggcaacttacagatcgggggctgccacttccaccacagacccagggaacaaggctgtttcctcttcgtttccagaagacgcaacttccacccstggcttccagtagaccaggcagaacctgcctagtgcctgaggggtagagccaccacacagagcccccagagtggggctgccacaaagagacacctgagcagggtcaccacccagggctatgcggtggggaggggacaa

SEQ ID NO: 19903 - DNA, 550 bp, Homo sapiens
aggctactggaccccagagcagtgtgcactccagaggcagctctggtctcaagatggcaccatgctgcagcagtttggttcatgggggtggggtgggggtgggaagtgtggaagtgcatacacattgtgctcctactctggggcaatgcagctgcatgaattcccagcagctctccaagccagactcaggactgtgagattcctctgcagtaagaactgtaggtgtttgtggtggtgataggggctggtggggatcttctgcttacctttttyctgcaaggggaaatcccttctgaatctgggcagatctgatccaagtggggaaaatgaggctgcagaggccagattcctccatgctgccctcctggacttccagtcactacagatgtgtctccactcccccactgcactccagtactctctcttcagcactccagaaaatcttagccattcattgccattgtcctttcttgggggatgaacactaggcctctctagtcagccaccttgctgatgtcaatctttgaaacatgattttttaaaggttaca

SEQ ID NO: 19904 - DNA, 550 bp, Homo sapiens
aggctactggaccccagagcagtgtgcactccagaggcagctctggtctcaagatggcaccatgctgcagcagtttggttcatgggggtggggtgggggtgggaagtgtggaagtgcatacacattgtgctcctactctggggcaatgcagctgcatgaattcccagcagctctccaagccagactcaggactgtgagattcctctgcagtaagaactgtaggtgtttgtggtggtgataggggctggtggggatcttctgcttaccttttttctgcaaggggaaatcccttctgaatctgggcagatctgatccaagtggggaaaatgaggctgcagaggccagattcctccatgctgccctcctggacttccagtcactacagatgtgtctccactcccccactgcactccagtactctctcttcagcactccagaaaatcttagccattcattgccattgtcctttcttgggggatgaacactaggcctctctagtcagccaccttgctgaygtcaatctttgaaacatgattttttaaaggttaca

SEQ ID NO: 19905 - DNA, 532 bp, Homo sapiens
aaatcagcttcggttgatgtcgatggaagctaatatgtcaaaaaagatgtatttgtacaaaaaggccactgattacatacacccacatatcctaagaatgttttgcttattatcagtgactctttataactatctctttttctcattcttccttcgtcatcctgtttctgctaacctgtkgattttcaaaatgtgtgtggacacacacacagctacacacctagacacacacacagctgtgtacctagacatacacatacacacacatcgaaccagttcgtccattttgacttagtgatttactgggactatttttatataaaaaattttcaagactaatcgtgaatcataagtgtctctaaacttataggttcacaagctcacacagttttatagccatctaagctaattgcttgatagactgaattcagaaaataaattgttaaaatgctggtagtttaaaaatagtttttgttactttattctaggctataatgattatttggagagcctacctatgctggtggcagtt

SEQ ID NO: 19906 - DNA, 561 bp, Homo sapiens
atagtcacactgtcattaagaggcagagccaggattagaacccaggccctctgtctcctgagtcagtgcatataaccactgctgggtcaccagtcttactgtcaaagacatgggagccagaaacaagatccactgacacctgttgactcctcctgcctcttttttattatctcatgacaatggcaaagattttagaatttatggctgtttgagggtgtctactacctgtctgaatccagaaaatacattctggtcaggtcaaaaatgaacccaaagtcttagatttggcagttctgaaaataccgatattctcctggggacaggcggtgaytgtaaactcaggctcatgaactagaattctcctttaccttctcctgagggtgacagtggagaccgatgctgcttaccatggtgaagtgctccctgcagcagaccatgcagatactctcagtctcatccggtacccactggtgcctggcagggggtgtcgctgggggcacaaattcctgtgagggctgggttggtgggaaactcctttcccttagactaggggaatgtata

SEQ ID NO: 19907 - DNA, 628 bp, Homo sapiens
atttttctcttcctgaagatgtggcaccttaggaagatacttaagttctttggattgagcgatatagaaattccaaggtccctttcagctagaaaattcaatgattctgaattcaatctccaagtaattcattttcatatttttttaacattcaataatgtcagaatgaatgatgcaaggaggacaaaattgaattgcagaatcataatttatattagccaaattatacaaggacattataaataaccttatctaagacagataaaagttttattttttaatgacttgtgtgtcaatatttgtaaatgctattaaataactttaaaaatgcctagtgacatcgagtaattattattttctagcttcagggcaatttgtgattagrttagattagcattttttgatcagtaaacagcctctaagtatagttgacataaccttggcagccagtggaacaaatatttaaagaaaaacaattctaacagttttctattttgttcctgttagtactggtgctatctgatttagtgagacctaaagaaatgcctacagaaatgtaacctatgagaagccctttcccttatttatcaatcatgcttacaaaaaaaagatactgataaccacaata

SEQ ID NO: 19908 - DNA, 545 bp, Homo sapiens
acccaaagtgctgtttctggaacaatacatggagttggcccatgcccttttctatgtgacaaatctttgaaaatagctattrtgtccccacctaagtgttttatttcccaggctaagcattcctgagtccttcgattatccctggatgatggagtttccaggccccttcccatcatggccagccttctctggacacactctaatttctccatgttcctcttaaaatgtggtgtccagaaggaaacacgatactctagatgtggactgaccaaacactaattacaatgggactattaactcctttgatccacagagtatatttctattaatggaggctaaaattacacaaacttttttggtggccacatcacactacgttttcattttgagttgatggtaaattatagccccttggttttttgttttgttgcgttgtgtttattttttactactgtattatttaaccaggactcttctatcttgcatcttgccagtaattatttagcttaaacacagaaatctggctgactaaatggtgagagtta

SEQ ID NO: 19909 - DNA, 554 bp, Homo sapiens
gtgttggactgaataaagaaaatgtatgtatacaccatggaatactatgcagccatataaaagcagagccttgaaggaccacaagaaaactgttcagggggtgaaaatgacagtggggaaatcgctataggataataagaaaaagatgactaatgttatatactggtgggaaggttagtaaaattgttatttgtagtaacattgaaaaaataatatgtacttaataaattgaaagttctaatgaaatacattttcaggtacttgatttgttttarcttcatatgataatttataaagagagttaaagaagggactattctgattttgagcagaatttagagaaaatatgaaatagaagtttctcatccccagtgattccaaacagcaaaaagttctcaaaataacagatgaactcagattcatcaaatgttgggggatggcagtactatgtggctccaggttaaaattaccatcaaggatatggattttagattatttgtagagacttcaaatatttaaggtggtgcctaacactgaactagaaaaaatgtttc

SEQ ID NO: 19910 - DNA, 563 bp, Homo sapiens
ctgggcaacatagtgggaccccaactctacaaaaaataaactagccaggtaggctggcatgtgcctatagtcccagctattatacttggcaggttgatgcaggagcctgggaggttgaggttgcagtgagctatgatcccaccactcccttacagcctgggtgacaaagtgagacactgtctcaaaaaaaaaaaaaaaacccacaaactgagtaaactacaggtagtgcctgacttcagtaagtactggatttaccaagcagctcttagtagggagaacatgactatttcatcatgaatacctatatcacactraagagtaattggcaaaaatgtgaacatacaaaacaaatagattaggaattttcttcctaagattcactattgactatttgcagttaaacacattcaaatgacttaaatataacatgagaaatggagtgaatctttgaagactgaaattgtcagaacttccttgtagtagcctatggcatcagatgctttattcaaaagaaatttattattattataatttaaaatattcttttacatactcctttgctg

SEQ ID NO: 19911 - DNA, 593 bp, Homo sapiens
agactttttaaaaaggtgaaatgttcctgtagtttctaatattacataaattatttctcctttaaggttatttaaatctatccaaacataaacctagaaataaactgtatgcatagggatcttatataaacacaaaaccaaataaactaaaaacataaaaccaaataaactaaaaactaaatataaaacaatataaacacaaaaccaaataaactaaaaactaaatataaaacttccaaacaaatttaaatttaacaagttacactttaaaaaaacaggtgatgtggttttgctgaatttaaatctctgctcacaacatgaaaatgtaccaactgcaccacaagatatcttttaagtttggaatgactggactactgagtgcctcataataagacatgcactttttcttagtttcaattatgcracattaatgccacatattacaaaataatttggtcatttaactcaaaaccatcttattaagaacatctctattcttttccttaatattagtccccaacaaccaaaacagtatttacttggcatcactaaaaacataaacacaaatgcaaattttgaccccagggtcaagt

SEQ ID NO: 19912 - DNA, 643 bp, Homo sapiens
ttttattttaatgtcccattctagttaccatgacactctaaaatgaagcaagtaatcttgaccacagagctttaatttctgatcagatttgccatttcaatttcaaactaaactcaggttgagcttcacttagttttctcaactatatcatgtgcattattacagcttttcatgttaatattaacagttccaattatttaaaatgcgttttcctttctatacatactactgaccaattaaactctgccataattgaatgactattatctaaatattttgttgtaacagtcatagtttaagcaacaaccttcaatatcatttcaaatatgctttgaaagcaaaattttaacattaagataacaagggagaaatactcaaatcataatataaaactcaatatatcaaaacacacttaaaattcatgagcaaatttaaaagggamacattatacaaaaaatcaagctgattatcaattttaaaaaaattcccatgaaaaatgatataaatatgctacaggaaacacaacaggtgtaatgaaacttgacagtcatcactaaactactggaaataattctgagaagacacaattcatatatatactatggcaaaataaaattcaactgtacttagaatatcttgttat

SEQ ID NO: 19913 - DNA, 609 bp, Homo sapiens
atatgtgcaaaaattcttttacactactacctctgctttccatattacccatcactgtggcatatggtaatcacagcagctactcatctgtttgcccttatttccctgcagagggaattaatttctatcctattcattttattaatggtaatataattacccataatataaaaatgtcattagtaattcaaagaaaaatgtaattatttaaacaagtagtttttttggttttttttttttttgaagtcttgctctgtcgccctggctggagtgcagtggcgcgatctcggctcactgcaagctctgcctcccaggttcacgccattctcctgcctcaacctcctgaatagctgggactacaggcgcccgccaccacgcccagctaatttttttgtatttttagtagagacagggtttcaccgtgttagccaggatggtctcgatctcctgacctcgtgatccaccagtctcrgcctcccaaagtgctgggattacaggtgtgagccaccgcgcccggcctaaaaaaagtagttttaatatcttctttttttttctaatagagacagagtttgctatgttgcccaggctggtcttgaattcctgggctca

SEQ ID NO: 19914 - DNA, 597 bp, Homo sapiens
taagacatttaaaagatattaaggaaatatgaacattatgccataaatttatgaacttagatgaaaagaaaaaatttcttaaaagacacaaagtaccaatatccctacacctattaaagaaattgaactgttttcattctattcttgttaataaaactaaattattcaatttaaaaaattgaagtaaagactttccacatagaaaataccaattaattcttgtccactggtataccataccaagtcaccacaaattmaagtttgtaccactgtgctccacctaccaccagtaaccccatcctcactgccacccacgcagtggtcatctagacagctctaaaattccatcctataactggctagttatatgcagaagattgaaactggaccccttccttacatcatatataaaaatcaactcagggccgggcgtggtggctcactcctgtaatcccagcactttgagaggccaaggcgggcagatcacctgaggtcaggagttcgagaccagcatgaccaacatggaaaaacccccgtctctactaataatacaaaagttagccaggcataatggtgcatgcctgtaatcccagctac

SEQ ID NO: 19915 - DNA, 1115 bp, Homo sapiens
tggaaatcacgtgtagcaaaaagttactatctgctagagtgtatgtgtgtgcacgcgtgcacacgcatcccggcacaggcacacttgtgtgcactcatgcaacgtgtactcaagtacctcacatttcagcatcttgcaattccttggagattaatttacatgccatcatcatgggagagacacaaactccagtctcgtcccagtatacatgcacaagccacagagtcctaattaacacagattcttcaaaatatctaattacaaactaggcagctctgaggccttctttgaaatcactgaattttctaacagaatgtcaccacctttgacagcatcagcacccattccatattaaattcccatattaagcatttttgccaagcaatggaatatcagaatggcctcattttcatccttattaatgtatttttggaacctctttacttgtcaaatgtgtgcctgaaacagatttctaaaatgcagaagttgacctgagtgtgagagatgctaagccttggctaaacggttagtttcaggagggcagagacttcgtcttgtttattgctgtacctccagggcctacaacagtgcctgtcacgaagaagactccgggcaaatattcactgaagaaatggatagatgtcttcttcaagaggctgaatatacactcacatttgtacttgctgcagacatagagaatttaatctgaaatctcagaaccgatatgctccagactctagtagagcctactgctctttctcgattctttttcccataggagggagaatagcaaaaaggctcargcaggcagggcacggtggctcacaccggtaattccagcactttgggaagccgaggtaggcggattgcttgagctcaggagttcgagaccagcctgggcaacatggcaaaatcccgtctctacaaaaaatgcataaatttgccaagtctgggggcacatgcctatagtcccagctactcaggaggctgaggtgggaggattgattgagcccaggagatcgaggctgcagtgagctgtgattgcaccgctgcactccagctcgggcgacaaatcaagatcttgtctcaaaaacataaaaaactaaaattaaaaa

SEQ ID NO: 19916 - DNA, 552 bp, Homo sapiens
atggttttacataattgtaagtaaaaaacaaaacaaaacaaaacaaaacaaaacccacaagtcaaattatcacaagtcagtgactgtctatactttcttcttrctgtccaagttaagatgttagaagaactgaaaggcttttggatataagagtgaaaagcattctaatttctcaaagtcacttatcaaaataatcccacagttataaagttccctgtgtagttagctctaagaggctttttagaaagttaagggagagctctaagttcagtggtccaggaaattgattccttgtcatcactttggctaaccaagatttatcatttatatgaatcgagagtggagaaagagtgtggtaggtaatagaatgctgaaaggaaaacatactacctaagcctttcaaatataaaatgtggacataaatccatctgctattgattataaattcttcaaaagtttactcatgcccattgtaacggcattgatgctgcaacatttaaaagccaccattatacataatctatgtgagaggttactgtaagatcttttttc

SEQ ID NO: 19917 - DNA, 586 bp, Homo sapiens
caatgaaactgctctagatggtatggaactagatctatgacatctcaatgacatgcctctaacacaggataaatggaatgggaaatgtctaagtgtgtgctgaataaatgaaatctatctctttgccaccatgttgctggttttctctggaaaagaaaagaatatagaatatacgcatctgacagaaagcaagggacactcccaagatgccagtgcaggccgggtgtggtggctcacacctgtaatcccagctactcgagaggctgaggmaggagaatcacttgaaccctggaggcagaggttgcagtgagctgagatcacaccactgcactccagcctggaaaacagagcgagactctatctcaaaaaacaaataaacaagccaagatgcggatgcagtatttctctatgtttatcctaaacagataccctaaaacacatatctcttatgtttatcctaaagagatcctctaaaatgtggatactcttccgtaaaatgtagagtatcctaaagagatactccaaatattggggaaactgtctaagaagatggtggtacaaatgagggtgcctgcagctattaaaa

SEQ ID NO: 19918 - DNA, 634 bp, Homo sapiens
ggtacgtttttcaagcacaccttttttgtgaaactgagttctaacctgaagaatacctgggattatatggcgaaaacacacaatatattaaaattttaaaacagttcttattttagkctcaaattttgtttttgggactacttagactttttttttttttccctgagatggagttttgctcctgttgctcaggctggagtgcaacggcgtgatctgggttactgcaatctctgcctcccaggttcaagcaattctcctacctcagcctcctgagtagctgggattacaggcacacacctccacaccggactaatttttgtatttttagttgataacggggtttcactatattcaccaggctggtctcggcctcagcctcccaaagtgctgggattacaggcgtgagccactatgtccgttcttgtttttcctgtctttgtaactagactttaaagctcctcaaaagagctggagtataaatgaaaatacaaagagctttgagtgtcagatctggaaaaagtctagctttatcatatacatacataaatttaaatgctggattcctcaccagcaaaagggtcttggattaagtggtataaagtagtcctgtgcttatccataggaaacacatttc

SEQ ID NO: 19919 - DNA, 634 bp, Homo sapiens
ggtacgtttttcaagcacaccttttttgtgaaactgagttctaacctgaagaatacctgggattatatggcgaaaacacacaatatattaaaattttaaaacagttcttattttagtctcaaattttgtttttgggactacttagactttttttttttttccctgagatggagttttgctcctgttgctcaggctggagtgcaacggcgtgatctgggttactgcaatctctgcctcycaggttcaagcaattctcctacctcagcctcctgagtagctgggattacaggcacacacctccacaccggactaatttttgtatttttagttgataacggggtttcactatattcaccaggctggtctcggcctcagcctcccaaagtgctgggattacaggcgtgagccactatgtccgttcttgtttttcctgtctttgtaactagactttaaagctcctcaaaagagctggagtataaatgaaaatacaaagagctttgagtgtcagatctggaaaaagtctagctttatcatatacatacataaatttaaatgctggattcctcaccagcaaaagggtcttggattaagtggtataaagtagtcctgtgcttatccataggaaacacatttc

SEQ ID NO: 19920 - DNA, 634 bp, Homo sapiens
ggtacgtttttcaagcacaccttttttgtgaaactgagttctaacctgaagaatacctgggattatatggcgaaaacacacaatatattaaaattttaaaacagttcttattttagtctcaaattttgtttttgggactacttagactttttttttttttccctgagatggagttttgctcctgttgctcaggctggagtgcaacggcgtgatctgggttactgcaatctctgcctcccaggttcaagcaattctcctacctcagcctcctgagtagctgggattacaggcacacaccwccacaccggactaatttttgtatttttagttgataacggggtttcactatattcaccaggctggtctcggcctcagcctcccaaagtgctgggattacaggcgtgagccactatgtccgttcttgtttttcctgtctttgtaactagactttaaagctcctcaaaagagctggagtataaatgaaaatacaaagagctttgagtgtcagatctggaaaaagtctagctttatcatatacatacataaatttaaatgctggattcctcaccagcaaaagggtcttggattaagtggtataaagtagtcctgtgcttatccataggaaacacatttc

SEQ ID NO: 19921 - DNA, 634 bp, Homo sapiens
ggtacgtttttcaagcacaccttttttgtgaaactgagttctaacctgaagaatacctgggattatatggcgaaaacacacaatatattaaaattttaaaacagttcttattttagtctcaaattttgtttttgggactacttagactttttttttttttccctgagatggagttttgctcctgttgctcaggctggagtgcaacggcgtgatctgggttactgcaatctctgcctcccaggttcaagcaattctcctacctcagcctcctgagtagctgggattacaggcacacacctccacaccggrctaatttttgtatttttagttgataacggggtttcactatattcaccaggctggtctcggcctcagcctcccaaagtgctgggattacaggcgtgagccactatgtccgttcttgtttttcctgtctttgtaactagactttaaagctcctcaaaagagctggagtataaatgaaaatacaaagagctttgagtgtcagatctggaaaaagtctagctttatcatatacatacataaatttaaatgctggattcctcaccagcaaaagggtcttggattaagtggtataaagtagtcctgtgcttatccataggaaacacatttc

SEQ ID NO: 19922 - DNA, 634 bp, Homo sapiens
ggtacgtttttcaagcacaccttttttgtgaaactgagttctaacctgaagaatacctgggattatatggcgaaaacacacaatatattaaaattttaaaacagttcttattttagtctcaaattttgtttttgggactacttagactttttttttttttccctgagatggagttttgctcctgttgctcaggctggagtgcaacggcgtgatctgggttactgcaatctctgcctcccaggttcaagcaattctcctacctcagcctcctgagtagctgggattacaggcacacacctccacaccggactaatttttgtatttttagttgataacggggtttcactatattcaccaggctggtctcggcctcagcctcccaaagtgctgggattacaggcgtgagccactatgtccgttcttgtttttcctgtctttgtaactagactttaaagctcctcaaaagagctggagtataaatgaaaatacaaagagctttgagtstcagatctggaaaaagtctagctttatcatatacatacataaatttaaatgctggattcctcaccagcaaaagggtcttggattaagtggtataaagtagtcctgtgcttatccataggaaacacatttc

SEQ ID NO: 19923 - DNA, 1271 bp, Homo sapiens
caacagaaagattgggggtgatttccagagcagagtttggtctgggtcttggacagtgtttatatggaagtttagttcccaaggcctttattatacttcttcaggtgtgttccatgcatgtgccatttragggcaaactgcacatgtcaggggactttggcgaatctgagattgcagacttacgtgaatatttctaattcatttcttaatgccactcagacccaaaatgtttttataaaatccatctgatatggcattcaaactgtgatattatagtttgccacctctgatctagtcaagcatatatttttccagaagagaaaattagagtccacaggaaagttacttagtctaagacctgcctgtctaattagctaacaaagtaaagattggaccctaggtcacataaagccccagtcagtgcttttttcaccactctcaaagactttcctttctcttttactgtattttcagtagtagtaatttcccaaatataaacaaagtatttttaaagtggaaacacatttaacctctgactaaatgaaaatatatttatagttgtatttatctttctcaaaattataatgaagatcatataaataggaaaggaaggcataatacattgagataattagcaaaacagaactgagattcccagactaactcatgtgaaaggaaagactaattcatctgagaatcaagcaccttctgattaatttcagcactcaaatttctttctccacaatgtattgcacagacaccgtattagtccatttttcatgctgctgataaagacatacccaagactgggtaatttacctagaaaaagaggtttaatggactcatagttccatgtggttggggaggcctcacaatcatggtggaaggcgaaaggcacatcttacatggtggcagataagagagaatgagagccaagtgtaaaggacttcaccttatagaaaggccatcagatttgtgagacttatttactaccaagagaacagtatgggggaaacctccagtatgattcaattatctcccatctggttcctcccacaatatctgggaattatggaagctacaatttcagatgagatttgggtggggacagagccaaaccatatcagacactataagtaatagcactggataagctatttcctacaaatcagtgttgggaaatgtggtttatagcttgggctgcttctagataagattgcacatgtgaacagtgctgtacatgacctttctcattgactgtaatgaggtca

SEQ ID NO: 19924 - DNA, 569 bp, Homo sapiens
gagaataagttacacaagagaaacaggaaaaaatacccacccactggctaccagaacatactgaacactcatcccattgagcttactgtcaacatgctctctttgtgaagagacctgggagccttccttttttgttctataaaggaaatgaattctgttgtagctaggatggctaatggtgcttcactgagtctctctgcacataggacgcatctgtatttctgtggggaatgaggttctcactgcatcagatgatgaagaayatccacgctccaatatccacatggcattgtactcaccaaggcaacactaactttatgctctgcactggaatgatggtaaaatttgggagctagatgtgtacttagaatttcgtgttgtttgatcgcatcgatgaaaggatatgcaatcaatctcctcctaagacagtgagtggtattggccataactcattactccgtcaaggatttggcatttcaatcgatgggaaatgatgtgtgatcattctaatttattatacatcatttcccatcaatcgacgaactaaagccttgacgtaataagtactt

SEQ ID NO: 19925 - DNA, 548 bp, Homo sapiens
gtcaggagttcgagaccagcctggccaacatggtgaaaccccgtctctactaaaaatgcaaacattagccaggcatggtggcaggtgcctgtaatgccagctactcaggaggctgaggcaagagaatcgcttgaacccaggaggcagagattgcagtgagctgagatcaaaccacttcactccagcctgggcgaaagagcaaaactccttctcaaataaaataaaataaaaaaaaaacaatgatttttaagcagctttttaagatgaattatatacttttaaatcttttgtataaaaatggataaaagtggagccgttctgatttctaaattagggaggagggatagtacttggatctgtccatataaatttaattccaaactcccccacaacttcctaccactgtgatctttggcgagttacttaatctctctaagcctcmgttcttttacctgtaaattggggtataacaataatattcaccttatagagtggctgtgaatcaatgtaaaatcctgagaacaacacctggaacatagaacaattgt

SEQ ID NO: 19926 - DNA, 567 bp, Homo sapiens
agggacgtcatcaaacactgaagctatactgaaaaagttatgtcaccattcacgaagcaagatcagaaaagcacctcaaaggatacatctaggagtttagacttttctgctttaaaatggttacattcaaaatagtgaagagagatgggagaatatttcaaagtatttctgcttggctacaaagtgttttctttttttttawatttattatactttaagttttagggtacatgtgcacaacctgcaagtttgttacatatgtatgtatacatgtgccatgttggtgtgctgcacccattaactcgtcatttaacattaggtatatctcctaatgctatccatcctccctcccctcaccccgcagcaggccctggtgtgtgatgttccccttcctgtgtccatgtattctcattgttcaattcccacctatgagtgagaacatgtggtgtttggttttttgtccttgcggtagtttgctgagaatgatggtttccagcttcatccatgtccctgcaaaggacatgaactcatccttttttatggctgcataatattccatggtgtata

SEQ ID NO: 19927 - DNA, 562 bp, Homo sapiens
tggtgttgatgaactaggaatataaatcattttgagtcctagttctttatgtgtaacaacacactgtgtaaatgtgcaacattgagtatcgtatactatacatatttgtaatctattggygtgttacagattaattccaaattcaatcttatcttacaatcctgaaagttgggaatctgggcacagtttagtgggtgcttgaggcctctcgtaagatttcagtccaactgttggccaggctgccggctcactgccaagctcactcatgtgattgttggcaggattcagttctcataggcttttggattgagggcctcagttcctcactggctgttggctggaggcctctttcaattccctgccaattgagtctctctctaggacagccctcatcatacagccggtttccctcaaaatgagcgagagaggaagagtgagaacccatgacagaagccacagtctttataatgtaatcttggaagtgacattgcattactgctgaatggaatccatattctattcattagaagtcagtcagtagttcaggccacagtcaaaggga

SEQ ID NO: 19928 - DNA, 518 bp, Homo sapiens
tttcttcatgatttagtcatatctttttgtggtataagtttatttggctattaggtataactttgctttgctgtcttagtggttgttttaggatttatagtgtatggatttacctcatcacaactcaccttcaagtwatattatatcatatcatagatggtataagaaattccaatcatatattttcatttcttcacttccagccagataccagcctggatctgtgggattgtagcatttgttaagtttagaatatatttagccaatttttcctcagatgttttttctgtctctccttctacctctttgtggacttacatattacctgctgggagtttgctcatagttctctagtatctcaaatttgtgaatcttttctttcatgatggcaaatcaatctatgctcatatctactcagtgtagctttcatctgcagcattgtaacttgtatctctagaagtgcaatttagtttttaaaagtatcttctattgctttacttatcttcttgatttttatt

SEQ ID NO: 19929 - DNA, 518 bp, Homo sapiens
tttcttcatgatttagtcatatctttttgtggtataagtttatttggctattaggtataactttgctttgctgtcttagtggttgttttaggatttatagtgtatggatttacctcatcacaactcaccttcaagttatattatatcatatcatagatggtataagaaattccaatcatatattttcatttcttcacttccagccagataccagcctggatctgtgggattgtagcatttgttaagtttagaatatatttagccaatttttcytcagatgttttttctgtctctccttctacctctttgtggacttacatattacctgctgggagtttgctcatagttctctagtatctcaaatttgtgaatcttttctttcatgatggcaaatcaatctatgctcatatctactcagtgtagctttcatctgcagcattgtaacttgtatctctagaagtgcaatttagtttttaaaagtatcttctattgctttacttatcttcttgatttttatt

SEQ ID NO: 19930 - DNA, 518 bp, Homo sapiens
tttcttcatgatttagtcatatctttttgtggtataagtttatttggctattaggtataactttgctttgctgtcttagtggttgttttaggatttatagtgtatggatttacctcatcacaactcaccttcaagttatattatatcatatcatagatggtataagaaattccaatcatatattttcatttcttcacttccagccagataccagcctggatctgtgggattgtagcatttgttaagtttagaatatatttagccaatttttcctcagatgttttttctgtctctccttctacctctttgtggacttacatattacctgctgggagtttgctcatagttctctagtatctcaaatttgtgaatcttttcttkcatgatggcaaatcaatctatgctcatatctactcagtgtagctttcatctgcagcattgtaacttgtatctctagaagtgcaatttagtttttaaaagtatcttctattgctttacttatcttcttgatttttatt

SEQ ID NO: 19931 - DNA, 1402 bp, Homo sapiens
ttatctcttcttttcttttctttctttctttttttttttttttttgagatggagtctcgttctgttgcccaggctagagcgcaatggcgcaatctcggctcaccacaacctctccctcccaggttcaagcgattctcctgcctcagcctcccaagtagctgggactataggtgtgcgccaccatgcccagctaatttttgtatttttagtagagacgagttttcactatgttgaccaccctggtcttgaactcctcaccttatgttccgcccgcctctgcctcccaaagtgctgggattacaggcgtgagccatggtgcctggtctgcctttatcttaatttaagataactctcttgacctcccgatacctccaaacaggtatcacacagatataaacccaacttgctcaattataaatccactaactcctacacaatacatacaaattcttttatttcataaagaattaacattgccagctattctcacccaatcttccaagtaaaaccttacacttatccttccttcttcttttttcatctttacacgtccaactaaccaccaagttagattgaattgaaacaaatccttcactaccactgtcatttgttgctttattgttttgcttggttgtttggggcaggaatcatttcagtagcttcctagttggccttttttcctttgccctttaggggtaacacttttttaaaaagcaaatgcctaccacaatatttaatacaccaagcttaggtgctcagtgtcagtttagtctccccttctctctaatccttaaggcaaacccatagaagtgggtttggcacaaaatgaaactcatctgatgactcgatgagttgattcttctttgaaggtttttcttttagccttaacatgtaaggatttattctcaagatccttctatgttgctttttgttcatatacaattagtattgccattaattaattaatagaaatactaattatcgaagtataaaccattaattataattcttataaattaattatattcaatattcaaaacaatattcctatgtttcgaagccatcatggttttcatctttaaggtcacccaagatgctgcagaaacatctctgttttgttgcggccaatcaacaaacggttgaatacactcccttcaagcaaacatcaaggatattttatacagtgtgctcctttgtatctctctgtgtagaactcaatcacacctcctgcaaggcagactgggaaatggcagcaaataacattgtcatcttcattttctcaaatgaaaaaataattgggaagccagccagtagttttaactttgggtggtaatgtacccagcttgcaactggggttctgtgactaagraagaagaaaagaaataccgagaggcaaccagca

SEQ ID NO: 19932 - DNA, 547 bp, Homo sapiens
ttgaatatataataacaagagcagaggcaaaaatggaagctatgatgacaatgccttcccatgaagrgaacaggaagccacggggctgcatttccggcaggttcctcccagactgtgaaatctccttgtacctgatctcatagagagatgctgtggaaaattatagacgtgatcagctttgcaatgatagaaatgcctttggcacctgcttctctcctgagattccctgaaaaaaaaaaaaaaaaaaaaaaaaccttaaagcaaagagatccacgtttgggtaattatccaagtagccaaaggggatcctaggtcacagccactccaacttttagaaaaaggccaaggagtgaatcaggacttcccataaacacttctctctgggtgcttttatactgttgcatttcttgttgttcctgttaggtctggttctaacttggttcattaagaacataactaatgaggctaaatagagacagctaatacctgggcttggtgaatctgcacaccttgccaccttctcctgaactctcttctccttgttctc

SEQ ID NO: 19933 - DNA, 547 bp, Homo sapiens
ttgaatatataataacaagagcagaggcaaaaatggaagctatgatgacaatgccttcccatgaagagaacaggaagccacggggctgcatttccggcaggttcctcccagactgtgaaatctccttgtacctgatctcatagagagatgctgtggaaaattatagacgtgatcagctttgcaatgatagaaatgcctttggcacctgcttctctcctgagattccctgaaaaaaaaaaaamaaaaaaaaaaaccttaaagcaaagagatccacgtttgggtaattatccaagtagccaaaggggatcctaggtcacagccactccaacttttagaaaaaggccaaggagtgaatcaggacttcccataaacacttctctctgggtgcttttatactgttgcatttcttgttgttcctgttaggtctggttctaacttggttcattaagaacataactaatgaggctaaatagagacagctaatacctgggcttggtgaatctgcacaccttgccaccttctcctgaactctcttctccttgttctc

SEQ ID NO: 19934 - DNA, 547 bp, Homo sapiens
ttgaatatataataacaagagcagaggcaaaaatggaagctatgatgacaatgccttcccatgaagagaacaggaagccacggggctgcatttccggcaggttcctcccagactgtgaaatctccttgtacctgatctcatagagagatgctgtggaaaattatagacgtgatcagctttgcaatgatagaaatgcctttggcacctgcttctctcctgagattccctgaaaaaaaaaaaaaaaaaaaaaaaaccttaaagcaaagagatccacgtttgggtaattatccaagtagccaaaggggatcctaggtcacagccacyccaacttttagaaaaaggccaaggagtgaatcaggacttcccataaacacttctctctgggtgcttttatactgttgcatttcttgttgttcctgttaggtctggttctaacttggttcattaagaacataactaatgaggctaaatagagacagctaatacctgggcttggtgaatctgcacaccttgccaccttctcctgaactctcttctccttgttctc

SEQ ID NO: 19935 - DNA, 548 bp, Homo sapiens
tagctttcataactttacaaagaggaaagtgtgtgtgtgtgtgtgtgtgtgtgtgtgtgtgtgtgcgcgcgcgcgygcgtgcgtgcgtgtgtgtgtgtgtgtgtgtgtgtttactagtgggactgggtctaaatttatgtgatctaagtgaaagttaatttgcttgaaacccttcttgtttgcttgaaacccacaagctgaggatcatacctaggggacctctctcccatccaagtactaaccaggcccgaccctgcttcgcttctgagatcaggtgacattgggcgcattcagggtggtatggccataagccctaggacacctttctgaactctttaacttgaagtcagcctttcttgattcataaaggcgatagaaagaatctgtaaacatctctatgttttatggtcaggtataagaattctaaattgagtggtcaaaacctggaccagtttattaaaagagattactgcaatgaagcagaaaactaaccgacttccagtcatttgttgttaaagaagtcataactagtgtcagctggtatgtga

SEQ ID NO: 19936 - DNA, 548 bp, Homo sapiens
tagctttcataactttacaaagaggaaagtgtgtgtgtgtgtgtgtgtgtgtgtgtgtgtgtgtgcgcgcgcgcgcgcgtgygtgcgtgtgtgtgtgtgtgtgtgtgtgtttactagtgggactgggtctaaatttatgtgatctaagtgaaagttaatttgcttgaaacccttcttgtttgcttgaaacccacaagctgaggatcatacctaggggacctctctcccatccaagtactaaccaggcccgaccctgcttcgcttctgagatcaggtgacattgggcgcattcagggtggtatggccataagccctaggacacctttctgaactctttaacttgaagtcagcctttcttgattcataaaggcgatagaaagaatctgtaaacatctctatgttttatggtcaggtataagaattctaaattgagtggtcaaaacctggaccagtttattaaaagagattactgcaatgaagcagaaaactaaccgacttccagtcatttgttgttaaagaagtcataactagtgtcagctggtatgtga

SEQ ID NO: 19937 - DNA, 548 bp, Homo sapiens
tagctttcataactttacaaagaggaaagtgtgtgtgtgtgtgtgtgtgtgtgtgtgtgtgtgtgcgcgcgcgcgcgcgtgcgtgygtgtgtgtgtgtgtgtgtgtgtgtttactagtgggactgggtctaaatttatgtgatctaagtgaaagttaatttgcttgaaacccttcttgtttgcttgaaacccacaagctgaggatcatacctaggggacctctctcccatccaagtactaaccaggcccgaccctgcttcgcttctgagatcaggtgacattgggcgcattcagggtggtatggccataagccctaggacacctttctgaactctttaacttgaagtcagcctttcttgattcataaaggcgatagaaagaatctgtaaacatctctatgttttatggtcaggtataagaattctaaattgagtggtcaaaacctggaccagtttattaaaagagattactgcaatgaagcagaaaactaaccgacttccagtcatttgttgttaaagaagtcataactagtgtcagctggtatgtga

SEQ ID NO: 19938 - DNA, 548 bp, Homo sapiens
tagctttcataactttacaaagaggaaagtgtgtgtgtgtgtgtgtgtgtgtgtgtgtgtgtgtgcgcgcgcgcgcgcgtgcgtgcgtgtgtgtgtgtgtgtgtgtgtgtttactagtgggactgggtctaaatttatgtgatctaagtgaaagttaatttgcttgaaacccttcttgtttgcttgaaacccacaagctgaggatcatacctaggggacctctctcccatccaagtactaaccaggcccgaccctrcttcgcttctgagatcaggtgacattgggcgcattcagggtggtatggccataagccctaggacacctttctgaactctttaacttgaagtcagcctttcttgattcataaaggcgatagaaagaatctgtaaacatctctatgttttatggtcaggtataagaattctaaattgagtggtcaaaacctggaccagtttattaaaagagattactgcaatgaagcagaaaactaaccgacttccagtcatttgttgttaaagaagtcataactagtgtcagctggtatgtga

SEQ ID NO: 19939 - DNA, 509 bp, Homo sapiens
ctctttgcaggacactgttttttgggttggggtgggggttgtttgtttttagacagggtctacttctgtcacccagtggggagtgtggtgacatgatctcggctcactgaaacctctttctccgggctgaagctatcctcccacctcagcctctcaagtagctgggactacaggtgtgcaaccccatacccagtgaatttgtgtagtttttgaagagactgtggtttcaccatgctgaccaggctggtcttgaactcctggactcaagcagtctgcctgcctcagactcccaaagtgttgggattacaggtgtgagccaccacacccagcctacatttttaaatattatgtaaaaatagagatttaggtaactatttttgattgaccttacaaagaagtacagtgyactatctaaataatgtaaaaagtgtttatttgggtttataaacactgtgcttgaaactttcctgagtttgttcctctgtactgtacagcttccacctcagttc

SEQ ID NO: 19940 - DNA, 667 bp, Homo sapiens
ccctccagtccaggtcccaaagacccctgacctggatgcccacctcagtcccttggccagtgatgtccaagcctggcagtgcaagggatgcccatcatcaaccatgcccaggacactgaatcagtcatggcaccgtattagtctgttttcacgctgctgataaagacataactcgagactgggcaatttacaaaagaaagaggcttaatgaactcacagctccatgtggctggggagacctcacaatcatggcagaaggtgaaaggcacatctcacttggtggcagacaagagaagataacttgtgcagcgaaactcccctttacaaaaccatcagatctcatgagactcattcactaycacaagaatagcatgggaaagactcgcccccatgattcatttatcttccaccgggtccctcccacaacacatagggattatgggagctacaattcaaggtaagattggggtggggacacaatgcctaaccagatcagacaccaaggctggcatctgggaggcctgagcacttgccagccagcagggctgaggccaagctctgcagatctggcttatctgctgcctgggggttctggtatatcgctggtttctgtgccagaagtaggatcctgtgttgaaccccatcttgtttctttgagaacttgagc

SEQ ID NO: 19941 - DNA, 573 bp, Homo sapiens
taaagagctctgacaaatcaatgacactaacttccgaataggcaaataggaaatgagcatgaccagacagttctcaaaagagaaaattcacatggccaataattatgaaagatgtttaaattcactgataaacrgggaacgcaaatgaaaacaaccacaccatcctacccatctgtttgacagaaatttaaaacttgagaataccaagcatcaatgagcctgtggggaagcagggcctcttctctggcattggttggagggtatattggcacagccatgttgtagagccatcttggggcagctagtaaagttaaagctgtgcaacctgacacagcaattctatttcttggtgaataggtttcagaaatgttaacccattgctctaagtgacatgttcaaagatgttcactgcagcattaagtaacacaagttccccaatagaaggaggagagatacactgaaacatgctcttatagtagaatattacacgatggtgaaaatgagctagttctgtgttaattgggaaaacaaagcttagccaaaaagaaaaaaattgcaaaatgatgcataaaa

SEQ ID NO: 19942 - DNA, 573 bp, Homo sapiens
taaagagctctgacaaatcaatgacactaacttccgaataggcaaataggaaatgagcatgaccagacagttctcaaaagagaaaattcacatggccaataattatgaaagatgtttaaattcactgataaacggggaacgcaaatgaaaacaaccacaccatcctacccatctgyttgacagaaatttaaaacttgagaataccaagcatcaatgagcctgtggggaagcagggcctcttctctggcattggttggagggtatattggcacagccatgttgtagagccatcttggggcagctagtaaagttaaagctgtgcaacctgacacagcaattctatttcttggtgaataggtttcagaaatgttaacccattgctctaagtgacatgttcaaagatgttcactgcagcattaagtaacacaagttccccaatagaaggaggagagatacactgaaacatgctcttatagtagaatattacacgatggtgaaaatgagctagttctgtgttaattgggaaaacaaagcttagccaaaaagaaaaaaattgcaaaatgatgcataaaa

SEQ ID NO: 19943 - DNA, 573 bp, Homo sapiens
taaagagctctgacaaatcaatgacactaacttccgaataggcaaataggaaatgagcatgaccagacagttctcaaaagagaaaattcacatggccaataattatgaaagatgtttaaattcactgataaacggggaacgcaaatgaaaacaaccacaccatcctacccatctgtttgacagaaatttaaaacttgagaataccaagcatcawtgagcctgtggggaagcagggcctcttctctggcattggttggagggtatattggcacagccatgttgtagagccatcttggggcagctagtaaagttaaagctgtgcaacctgacacagcaattctatttcttggtgaataggtttcagaaatgttaacccattgctctaagtgacatgttcaaagatgttcactgcagcattaagtaacacaagttccccaatagaaggaggagagatacactgaaacatgctcttatagtagaatattacacgatggtgaaaatgagctagttctgtgttaattgggaaaacaaagcttagccaaaaagaaaaaaattgcaaaatgatgcataaaa

SEQ ID NO: 19944 - DNA, 549 bp, Homo sapiens
tgcaggcttgaatccraaacctgtgtgtgccctctccatctccaagccaggagacctcatgacagaaactctggaaacattggcattgccattcatccctcatggacaactcacagttcagttccacagacaactggacgaggcgatcctcaaatttcctgggtacttcccttccgatgccaaacagattctgaccatgcagattcttctctcatctcatccatcacctcctgcaatccacaatattgcttcctctcacttcgctccttgccttggttaaatgtatgttccagaccctcgcaccatgcacaggcaagataatttctgcggtgatggaggctaatcagtgtataatccctggctcttgcaccctcctctccttgcactggaacactcgtcagctgctcacagctgctggtgtgaccctaagtctagttcaagtctgttctctcttctccatcctcctgccttacctgtagcatctccctcctggactcctctgcagcctgtgacagcccctaccacaggccttggaggcagaagacgcag

SEQ ID NO: 19945 - DNA, 549 bp, Homo sapiens
tgcaggcttgaatccgaaacctgtgtgtgccctctccatctccaagccaggagacctcatgacagaaactctggaaacattggcattgccattcatccctcayggacaactcacagttcagttccacagacaactggacgaggcgatcctcaaatttcctgggtacttcccttccgatgccaaacagattctgaccatgcagattcttctctcatctcatccatcacctcctgcaatccacaatattgcttcctctcacttcgctccttgccttggttaaatgtatgttccagaccctcgcaccatgcacaggcaagataatttctgcggtgatggaggctaatcagtgtataatccctggctcttgcaccctcctctccttgcactggaacactcgtcagctgctcacagctgctggtgtgaccctaagtctagttcaagtctgttctctcttctccatcctcctgccttacctgtagcatctccctcctggactcctctgcagcctgtgacagcccctaccacaggccttggaggcagaagacgcag

SEQ ID NO: 19946 - DNA, 522 bp, Homo sapiens
tggcagagccaagaccagaagagtataagcggaacgagaaaggaaaaaggaggttaggaagagagggaggagatagagaaacgtcaggatggtgacagggggctggggagtcaggccccatttctctgtgggcccagcccctgtgcctgtctcctggggggcagacagactcccagtaccgctgctgccagggkagttcagtagttcctgcaaggagggagtcggggggactccgcaaggatggctcggccacctgcttggtgtgggcctctggttaagcgcctgaaacacactcagcctcagctcctcacctggaaacgggggcttgtgaccactgcttcacacaataatggtgaggcttgaaagaggtggagggggtcagtgtgcctgacatgtagtaagtgctcattaaatgatggggggagggagagggagagagagagaattttattgactttatttcagcagcatcaattatcttttcccgtacgttccacccaaagtctaaagaagcaatgagga

SEQ ID NO: 19947 - DNA, 550 bp, Homo sapiens
cttttttagcccacaaactacctcctatacttaaatacatttgaaagtagtaaagaactttgggttcaggagccayagacaatattaaaagtatttatttccatccaaaactatagctttctaaaattgtggtaaaaggcataagctccaactagatcatttgacagtaacatgtagaatctcactcctgaaccaacaaggaaaagaatcccagaatgaagaccatgagaagtaatggagaaggaccagcttcggtttgttgtctcagcaagtgtcagagtggaatgctaggatgtcttgggaagcttgctcgcttgtttattttcaaatgccttttgagaacccataaggaaagcctagataagagcagacaggactagagatggctactagctatggggattcatgtgggcctttaaaagggacactccacgcccaccctctactctgccctccaaaagaaatttgcaaactggaaaagggggcagcatgaattatctccacacaagtccctagatgcctgggtttacttataatagcagctttcttt

SEQ ID NO: 19948 - DNA, 567 bp, Homo sapiens
caaagtaacaatatcaagttctgaaataaaacctttctctgctccatcagttaggatagaagcaactttccctcttcaattatgccacaatcctaatttctcaattttggttctacttgtctagggtccttgcaatgakgtcactctatcattaagttcaattgtgactgagtgggaagggagaatatttcccagtcaccttctccttgccttgtgggaagtcacagaaggatgtcaaatattatcacatggattatgtcatgcttctgtcagttaggcagcccacttgactaccatcataggaaaagttgatcgaaatatacattaaaccatggttaatttttgccttcactgtatatgcaataccgatacaagatacacatgtaggctgaagactccttcatcttcaatggtgtccttaattgtgatgttctttttttaacctacagcaccattgatacaaacccttatactcctgctcttatttctactgaaatattttatagacaacccttttctatgatttatacctcattataaaatcaaatttctaggctgtcagaaaga

SEQ ID NO: 19949 - DNA, 567 bp, Homo sapiens
caaagtaacaatatcaagttctgaaataaaacctttctctgctccatcagttaggatagaagcaactttccctcttcaattatgccacaatcctaatttctcaattttggttctacttgtctagggtccttgcaatgatgtcactctatcattaagttcaattgtgactgwgtgggaagggagaatatttcccagtcaccttctccttgccttgtgggaagtcacagaaggatgtcaaatattatcacatggattatgtcatgcttctgtcagttaggcagcccacttgactaccatcataggaaaagttgatcgaaatatacattaaaccatggttaatttttgccttcactgtatatgcaataccgatacaagatacacatgtaggctgaagactccttcatcttcaatggtgtccttaattgtgatgttctttttttaacctacagcaccattgatacaaacccttatactcctgctcttatttctactgaaatattttatagacaacccttttctatgatttatacctcattataaaatcaaatttctaggctgtcagaaaga

SEQ ID NO: 19950 - DNA, 567 bp, Homo sapiens
caaagtaacaatatcaagttctgaaataaaacctttctctgctccatcagttaggatagaagcaactttccctcttcaattatgccacaatcctaatttctcaattttggttctacttgtctagggtccttgcaatgatgtcactctatcattaagttcaattgtgactgagtgggaagggagaatatttcccagtcaccttctccttgccttgtgggaagtcacrgaaggatgtcaaatattatcacatggattatgtcatgcttctgtcagttaggcagcccacttgactaccatcataggaaaagttgatcgaaatatacattaaaccatggttaatttttgccttcactgtatatgcaataccgatacaagatacacatgtaggctgaagactccttcatcttcaatggtgtccttaattgtgatgttctttttttaacctacagcaccattgatacaaacccttatactcctgctcttatttctactgaaatattttatagacaacccttttctatgatttatacctcattataaaatcaaatttctaggctgtcagaaaga

SEQ ID NO: 19951 - DNA, 586 bp, Homo sapiens
atactttatttccttaatctgaagtaagtaaagaagacacaaatgtagcacagtatagatggtgactcagatatgttgtcaggcacaaaatgtccaaaatactgttataataagggtaaaggcaggactctgtggagagtccttgacataccaaagtaggagacaactgtttcttgaatctccaagaaaaattaaataatggtaatgggtaaaattagaagtgtgaaagaattttacaccatgttatgaagtttgaatttattctgagagcactggrgagtctttgaatggtttacaggaaaatggcgataaaaacgagcttgcattttagatcagagatcgatggtaagggatgagaatcatcagcatcgccaattaggagatgagaaactatagtgatttgaactcctgttgtggtggcaagggacgttgagaagtaaatggggttcaaaggatgttggaggtagtaataacaggcttaggtgattgatcggatgtggtaggagaaaggaggtcaaggaaggtgctgaggtttcaagcatagagaactatgagtggatgattagtagtgccactgagataggaa

SEQ ID NO: 19952 - DNA, 1123 bp, Homo sapiens
attattttgttgctgatgattatactataaccatgtttgttwgccaattattttatctgctatttcagtttccttctgtttgtggtgtacctattattttaatttaattcaacatttgagttacacttttaaagtatagaagggtgatggacatagctgaggacattttggtagttaatactgagcacatttaagatacagcagactttggttatgtaatgttggagaaaagctaaatctttcttactgttatatagaaagtaaattagttaatagcaaactttagttgacagaaaaacacaaaatgttaccaccaatacttttatatgtaaaattatgaccctaattttttaaattattatataatatttggctcctgatagaatagtctttgcacagtaccagctcccacaagtgacgttacaataaagtctcctttcaagaaatttggaagaagatggccgtctttggccatagcaattttctgtgaaactctgccataataaaatctttctgatttgactagaggcctttgttagcagtgtgaaccacctagttttctggtctaatgcacaacaattcaaaacctcttgtgcagaacacacacatttccacaaaaattgctgcaggaaagcatgatgaagaatgaaaaaatgataagtaaagagagacagaaacatatgagagtctgtaatgggcatgcaggaaaaaacaccaaaccaaatttgaaaacaataaacattcctgaaattgaaaacataaaagcagatcaaaactaatagtgaaagatacaatgaaagaaaaattatacgctttctggatctgaataaaattacctgaaaaatcgtgaagtcttagtgtgttcaataaaaaaaaaattaatgagcaagaatcagtgttataacattttctgtgtgaagttttaaatttcaagagggaaatttttctgaaaattcttagcagaaaaagtaaaattatttttgtaagtattgaaaataagatcagctttatatttctctcaattatgaacattaaaacaatgaagtaatatttctcatgttttaaggagaaaatcccacaactaaaaaatatacaaggttcaataactgcttgtttaaatgca

SEQ ID NO: 19953 - DNA, 1123 bp, Homo sapiens
attattttgttgctgatgattatactataaccatgtttgtttgccaattattttatctgctatttcagtttccttctgtttgtggtgtacctattattttaatttaattcaacatttgagttacacttttaaagtatagaagggtgatggacatagctgaggacattttggtagttaatactgagcacatttaagatacagcagactttggttatgtaatgttggagaaaagcyaaatctttcttactgttatatagaaagtaaattagttaatagcaaactttagttgacagaaaaacacaaaatgttaccaccaatacttttatatgtaaaattatgaccctaattttttaaattattatataatatttggctcctgatagaatagtctttgcacagtaccagctcccacaagtgacgttacaataaagtctcctttcaagaaatttggaagaagatggccgtctttggccatagcaattttctgtgaaactctgccataataaaatctttctgatttgactagaggcctttgttagcagtgtgaaccacctagttttctggtctaatgcacaacaattcaaaacctcttgtgcagaacacacacatttccacaaaaattgctgcaggaaagcatgatgaagaatgaaaaaatgataagtaaagagagacagaaacatatgagagtctgtaatgggcatgcaggaaaaaacaccaaaccaaatttgaaaacaataaacattcctgaaattgaaaacataaaagcagatcaaaactaatagtgaaagatacaatgaaagaaaaattatacgctttctggatctgaataaaattacctgaaaaatcgtgaagtcttagtgtgttcaataaaaaaaaaattaatgagcaagaatcagtgttataacattttctgtgtgaagttttaaatttcaagagggaaatttttctgaaaattcttagcagaaaaagtaaaattatttttgtaagtattgaaaataagatcagctttatatttctctcaattatgaacattaaaacaatgaagtaatatttctcatgttttaaggagaaaatcccacaactaaaaaatatacaaggttcaataactgcttgtttaaatgca

SEQ ID NO: 19954 - DNA, 1123 bp, Homo sapiens
attattttgttgctgatgattatactataaccatgtttgtttgccaattattttatctgctatttcagtttccttctgtttgtggtgtacctattattttaatttaattcaacatttgagttacacttttaaagtatagaagggtgatggacatagctgaggacattttggtagttaatactgagcacatttaagatacagcagactttggttatgtaatgttggagaaaagctaaatctttcttactgttatatagaaagtaaattagytaatagcaaactttagttgacagaaaaacacaaaatgttaccaccaatacttttatatgtaaaattatgaccctaattttttaaattattatataatatttggctcctgatagaatagtctttgcacagtaccagctcccacaagtgacgttacaataaagtctcctttcaagaaatttggaagaagatggccgtctttggccatagcaattttctgtgaaactctgccataataaaatctttctgatttgactagaggcctttgttagcagtgtgaaccacctagttttctggtctaatgcacaacaattcaaaacctcttgtgcagaacacacacatttccacaaaaattgctgcaggaaagcatgatgaagaatgaaaaaatgataagtaaagagagacagaaacatatgagagtctgtaatgggcatgcaggaaaaaacaccaaaccaaatttgaaaacaataaacattcctgaaattgaaaacataaaagcagatcaaaactaatagtgaaagatacaatgaaagaaaaattatacgctttctggatctgaataaaattacctgaaaaatcgtgaagtcttagtgtgttcaataaaaaaaaaattaatgagcaagaatcagtgttataacattttctgtgtgaagttttaaatttcaagagggaaatttttctgaaaattcttagcagaaaaagtaaaattatttttgtaagtattgaaaataagatcagctttatatttctctcaattatgaacattaaaacaatgaagtaatatttctcatgttttaaggagaaaatcccacaactaaaaaatatacaaggttcaataactgcttgtttaaatgca

SEQ ID NO: 19955 - DNA, 1123 bp, Homo sapiens
attattttgttgctgatgattatactataaccatgtttgtttgccaattattttatctgctatttcagtttccttctgtttgtggtgtacctattattttaatttaattcaacatttgagttacacttttaaagtatagaagggtgatggacatagctgaggacattttggtagttaatactgagcacatttaagatacagcagactttggttatgtaatgttggagaaaagctaaatctttcttactgttatatagaaagtaaattagttaatagcaaactttagwtgacagaaaaacacaaaatgttaccaccaatacttttatatgtaaaattatgaccctaattttttaaattattatataatatttggctcctgatagaatagtctttgcacagtaccagctcccacaagtgacgttacaataaagtctcctttcaagaaatttggaagaagatggccgtctttggccatagcaattttctgtgaaactctgccataataaaatctttctgatttgactagaggcctttgttagcagtgtgaaccacctagttttctggtctaatgcacaacaattcaaaacctcttgtgcagaacacacacatttccacaaaaattgctgcaggaaagcatgatgaagaatgaaaaaatgataagtaaagagagacagaaacatatgagagtctgtaatgggcatgcaggaaaaaacaccaaaccaaatttgaaaacaataaacattcctgaaattgaaaacataaaagcagatcaaaactaatagtgaaagatacaatgaaagaaaaattatacgctttctggatctgaataaaattacctgaaaaatcgtgaagtcttagtgtgttcaataaaaaaaaaattaatgagcaagaatcagtgttataacattttctgtgtgaagttttaaatttcaagagggaaatttttctgaaaattcttagcagaaaaagtaaaattatttttgtaagtattgaaaataagatcagctttatatttctctcaattatgaacattaaaacaatgaagtaatatttctcatgttttaaggagaaaatcccacaactaaaaaatatacaaggttcaataactgcttgtttaaatgca

SEQ ID NO: 19956 - DNA, 552 bp, Homo sapiens
gctaaagtcttttcagagtcagaatgacataattattatataactattcaaaacaaaacaaaaaatacttactggaaaaaagaacaactggtttgagaagaaaatcttttcatggtagagcagaaataactgtcaaggaaaatacttagaaaaagkcatatataaagagtggcctagttttactgcacacgtctttgccatgcagaaacagctaaatcccatctgacaactactttccctttcgtgtaccttgtctttagagaataaaatatatctgggtttgatatagaggagactaattttcacattaaaaatgattttcttaaaagcctggccttacagtttaaaaattatacgattaaaatcaagatattattcctataaaaagccaaactttaatccatttaaatcatgaaacttaaaacttcacttgaagcaatttcaatcatgaaacttaaaactccaaattactattgtgaattaacacttctccactatttatcttgcaattttaaaaaaaacacttcagaaagtagcaaatttgtaaaacaa

SEQ ID NO: 19957 - DNA, 552 bp, Homo sapiens
gctaaagtcttttcagagtcagaatgacataattattatataactattcaaaacaaaacaaaaaatacttactggaaaaaagaacaactggtttgagaagaaaatcttttcatggtagagcagaaataactgtcaaggaaaatacttagaaaaaggcatatataaagagtggcctagttttactgcacacgtctttgccatgcagaaacagctaaatcccatctgacaactactttccctttcgtgtaccttgtctttagagaataaaatatatctgggtttgatatagaggagactaattttcacattaaaaatgattttcttaaaagcctggccttacagtttaaaaattatacgattaaaatcaagatattattcctataaaaagccaaactttaatccatttaaatcatgaaacttaaaacttcacttgaagcaatttcaatcatgaaacttaaaactccaaattactattgtgaattaacacttctccactatktatcttgcaattttaaaaaaaacacttcagaaagtagcaaatttgtaaaacaa

SEQ ID NO: 19958 - DNA, 572 bp, Homo sapiens
ttccatatgcctgtcaatttttagaaaaagaccaagaacttctaaaataacatgtcagaatctgtgattcagagagagaacaaatgtattcagctctcagaataacctaagctctgacccaattgagtcttaaatgagaagctttctaagaatatggttgtttcacagtaactttctatgaattctctcaaacaaaatttaacaagggccacgacttcttaagatattcaaaatttaacactgctcatcctttcatccattttcgggggaaaaatcaagctacaaatccttaaaaattaagcaaataagcagaaaccttcctgtacaataagcatttcaagacacttcaggagggttgtgtctttctattgagttatatttcaagtaattgcawtagcaaaaaggtgttaggagattaaacataaagtgtattccatgcaatccctttgggtcaaggtacactgccctaaacacactagaccagtgttcattcatctgtgggatggtgaaatttctcccactctccctacccccagaaccctcacctgtggttcttggaggcactaaactca

SEQ ID NO: 19959 - DNA, 557 bp, Homo sapiens
gtgcctctagttacagctactcaggaggctgaggcaggagaattgcttcaacccaggaggtggaggttacagtgagccgagattgaggcactgcactccagtttgagcaataagagcaaaaccccatctcaaaaaaaaggaaaaaataattttttggatccagggaaatattctacatcttactkgtgtggtagtcacctggctgcatgcattcatgaaaactcagaactgtacacaaaaatggtaaatcacactgcatgtaaattacactttaataaaaaaaaatttaagggtccaggctctggaatcagactgcattcaaacctttgcttctccacattttggccgtgtgaccacaagctatattgtaacctttctgagtctaattttcttgacttgtaaaacacagctaataactccagagggttgttgggaaaattaaataaaataatgtacgtaattgtttaccatgatgccaggccatacaagtgcacaataaatggtaagtattactatttttatcctcctgttaaagagctaagaagttgtttagggca

SEQ ID NO: 19960 - DNA, 540 bp, Homo sapiens
aatgaaataaaggatgttatggaaaagataattcattaaactatagaataaaagcataacagtcctaggaataacctccacaagtataatgcaaaacctgtctgaagaaaactacaatattgctataaagactttaataaatggagaaaaatcttaatagagagggcagattraatataataaatattcaaatcatcagtatagatgtttacatcagtcctgtcaaaattctaacagtacctccattacaaaatttaaaactaagcaaaggtatgcatctctttcttcctactaaaatcccattgccattatcaaagaggtataagaactacttgataagaaggctggaaaactagtgggtgtaccaatattagttaggatgaaatccacctgtgggagacataaaacaaacaagcaaatacaaccaggcggttaaaacaaaatagcattgtttcacccgtaaatataagcagtcctgactagtatggcagcctcatggtggtcagtaacccaggcttctaactgcatgtcctgccattc

SEQ ID NO: 19961 - DNA, 540 bp, Homo sapiens
aatgaaataaaggatgttatggaaaagataattcattaaactatagaataaaagcataacagtcctaggaataacctccacaagtataatgcaaaacctgtctgaagaaaactacaatattgctataaagactttaataaatggagaaaaatcttaatagagagggcagattaaatataataaatattcaaatcatcagtayagatgtttacatcagtcctgtcaaaattctaacagtacctccattacaaaatttaaaactaagcaaaggtatgcatctctttcttcctactaaaatcccattgccattatcaaagaggtataagaactacttgataagaaggctggaaaactagtgggtgtaccaatattagttaggatgaaatccacctgtgggagacataaaacaaacaagcaaatacaaccaggcggttaaaacaaaatagcattgtttcacccgtaaatataagcagtcctgactagtatggcagcctcatggtggtcagtaacccaggcttctaactgcatgtcctgccattc

SEQ ID NO: 19962 - DNA, 540 bp, Homo sapiens
aatgaaataaaggatgttatggaaaagataattcattaaactatagaataaaagcataacagtcctaggaataacctccacaagtataatgcaaaacctgtctgaagaaaactacaatattgctataaagactttaataaatggagaaaaatcttaatagagagggcagattaaatataataaatattcaaatcatcagtatagatgtttacatcagtcctgtcaaaattctaacagtacctccattacaaaatttaaaactaagcaaaggtatgcatctctttcttcctactaaaatcccattgccrttatcaaagaggtataagaactacttgataagaaggctggaaaactagtgggtgtaccaatattagttaggatgaaatccacctgtgggagacataaaacaaacaagcaaatacaaccaggcggttaaaacaaaatagcattgtttcacccgtaaatataagcagtcctgactagtatggcagcctcatggtggtcagtaacccaggcttctaactgcatgtcctgccattc

SEQ ID NO: 19963 - DNA, 540 bp, Homo sapiens
aatgaaataaaggatgttatggaaaagataattcattaaactatagaataaaagcataacagtcctaggaataacctccacaagtataatgcaaaacctgtctgaagaaaactacaatattgctataaagactttaataaatggagaaaaatcttaatagagagggcagattaaatataataaatattcaaatcatcagtatagatgtttacatcagtcctgtcaaaattctaacagtacctccattacaaaatttaaaactaagcaaaggtatgcatctctttcttcctactaaaatcccattgccattatcaaagaggtataagaactacttkataagaaggctggaaaactagtgggtgtaccaatattagttaggatgaaatccacctgtgggagacataaaacaaacaagcaaatacaaccaggcggttaaaacaaaatagcattgtttcacccgtaaatataagcagtcctgactagtatggcagcctcatggtggtcagtaacccaggcttctaactgcatgtcctgccattc

SEQ ID NO: 19964 - DNA, 540 bp, Homo sapiens
aatgaaataaaggatgttatggaaaagataattcattaaactatagaataaaagcataacagtcctaggaataacctccacaagtataatgcaaaacctgtctgaagaaaactacaatattgctataaagactttaataaatggagaaaaatcttaatagagagggcagattaaatataataaatattcaaatcatcagtatagatgtttacatcagtcctgtcaaaattctaacagtacctccattacaaaatttaaaactaagcaaaggtatgcatctctttcttcctactaaaatcccattgccattatcaaagaggtataagaactacttgataagaaggctggaaaactagtgggtgtaccaatattagttaggatgaaatcsacctgtgggagacataaaacaaacaagcaaatacaaccaggcggttaaaacaaaatagcattgtttcacccgtaaatataagcagtcctgactagtatggcagcctcatggtggtcagtaacccaggcttctaactgcatgtcctgccattc

SEQ ID NO: 19965 - DNA, 623 bp, Homo sapiens
ccgtggttgcagatcacatggtgagagagaggaagaacaagaggagaaagtgtcaggttgtttccaacaaccagttctgtcgggaactaagaataagaactcactctctctccagagaatgacaccaagccattcatgagaaatccactccactccaccccatgatccaaacacctcccaccaggccctgtctccaccactgtggatcaaatttcaacatgaaacttgaaaggaccaamcaaaccatatccaaaccatagaaatatgtatatatggtttcttcatctaacaatggaattgttggtaaaggataggccataccattttgtttaaagtatgctttagctaaggacatggattctattgtcttataatgccatatggtttctaagcacaaagctattagagataactaaatgaaaaagatatttagcaaaaattttacagaagaaaaaggttatatacacttctataaaattggaatgtttcaagactttaaatagaacataacagttacttacagaggacagtaattattaaagcaatagtaacaaagccatctattttttatagtacttttcattttaaaatcttttgtatatacaatagtctattttcttttc

SEQ ID NO: 19966 - DNA, 881 bp, Homo sapiens
tattcttacataatcagctatttcttctagcttttcagagcatttatatagtgctgagaaaaatatatttaatctgtctgtattttttatttccttctcttaattcctcattttgtgtttgtatatttctcctatgtgtctgcctcgtgtaattaactttgatactgtatatttcataggatttttgtaaagaagcatctctggaaattattaactaacatgactttttaatcttttacatgtcattagtttatactttccctccttctgctttccacatctttattttgttttcatttttctgctttttaatttcataattaatttacttactgactatttttgttgagaatttgtgacactgatggtggataattttgctctgagccttgtgctgatagtatgctgtggctagaagagcgccacacttttgcttctgttctctttcctccgggacttctgcagtctcaggtgacctcctgagaacaccttgagctgtgttttgtgtctaagcccayggtcattttctgtaggtaattcacagggtgcgagaagaagctgtgtttcttgttttcagggtggagttgggctatgcagctgcacatcctcctgagaacgtgtcactctgtcctccacaggctcacatgcttctgctcacttggcctcctgggtgagaagagacagggagattcccctttaaagcaggtgtctccgggtgcctgcagccacactcctgcctctgccctcctgcctgaggcgttctccaaaaccctggcaagcaggagtggggagcaaccctccagccctggaaaatggggttggacgccaatgctgcagcctcccacctcaaaggcacaacttcagtgctggagaggctgagc

SEQ ID NO: 19967 - DNA, 763 bp, Homo sapiens
cctacattcacagttagaaatttgcttgaatgaaaaagtgttcaaagtaattattatcttgtatttggcttctctgggtacctgtttggcttttatttctaaataaaaaaacaaaacatgcacaatgtaaatatttttagtttgtaaaattttctttccaattacatattttgagatgttgtatatactgtaaacattttgaagtaattttgcccaaattaagaaaaaaaattcattcatctttttatcttctttttattttggttcacttttcacctgggtattaatatggatgttgcagaaagaatagctcctataaatgataggttgctrtatggatatgcaacaaaaccatctttattttacagaaaggtctcattactctaaaagaaggccagtgaagaaatttatattgaccttttggcatgacctttctaaaccaactgttccctagtacataaactagtgagtttactgcatagagacacccaaaggagtaaaacatgaagtgggagactttggccctattagaaaccttagggccaggttctgttccttatcacctatgagatttcccttgttaatgatgctgagttgggcatatttattttttagccatttcatcaacaagttttgcttatgactaaggatgtcatttcttgttcccatcacatggtgttttaggacattcctgctgctttaacaaaatatcttacttagagtaattcataatttataaaaattccttgtacattctttgtag

SEQ ID NO: 19968 - DNA, 763 bp, Homo sapiens
cctacattcacagttagaaatttgcttgaatgaaaaagtgttcaaagtaattattatcttgtatttggcttctctgggtacctgtttggcttttatttctaaataaaaaaacaaaacatgcacaatgtaaatatttttagtttgtaaaattttctttccaattacatattttgagatgttgtatatactgtaaacattttgaagtaattttgcccaaattaagaaaaaaaattcattcatctttttatcttctttttattttggttcacttttcacctgggtattaatatggatgttgcagaaagaatagctcctataaatgataggttgctgtatggatatgcaacaaaaccatctttattttacagaaaggtctcattactctaaaagaaggccagtgaagaaatttatattgaccttttggcatgacctttctaaaccaactgttccctagtacataaactagtgagtttactgcatagagacacccaaaggagtaaaacatgaagtgggagactttggccctattagaaaccttagggccaggttctgttccttatcacctatgagatttcccttgttaatgatgctgagttgggcatatttattttttagccatttcatcaacaagttttgcttatgactaaggatgtcatttcttgttcccatcacatggtgttttaggacattcctgctgctttaacaaaatatcttacttagagtaattcataatttataaaaattccttrtacattctttgtag

SEQ ID NO: 19969 - DNA, 601 bp, Homo sapiens
atccatacaatgacataattatcagggataaaaaaataagccatccagtcatgattagacatggaggaaatttgaatgcatatttctatgtgaaagaagccagtctgaaaagtctacatattgtatgagtccaagtatataatcttctagaaaaggcgaaactatagagctagtgcaaagtttagtcattaccaggagttgggcatgtgggggataagtaggtggagcacagggaatttttagggcagtgaaattattatctatgattctgtaatggtggatacatgacatcatgcawttagcaaaccccatagaactgtataatacaaagagtgaaccctaatgtaaactctggtctttagtcaataaatgcatcaatgttggcttcttaatgcaatttcattttaaaatataaattttcttattttttccacatatttcttaggggaaaattttaaataatttctagcttcactgttttctaatggataaaagcataaattaaatatgcttttattactgagaggatatgacattgtagtaacagatttattaataatcaagaatgtattaacatatttatataaggtaacattctgtg

SEQ ID NO: 19970 - DNA, 601 bp, Homo sapiens
atccatacaatgacataattatcagggataaaaaaataagccatccagtcatgattagacatggaggaaatttgaatgcatatttctatgtgaaagaagccagtctgaaaagtctacatattgtatgagtccaagtatataatcttctagaaaaggcgaaactatagagctagtgcaaagtttagtcattaccaggagttgggcatgtgggggataagtaggtggagcacagggaatttttagggcagtgaaattattatctatgattctgtaatggtggatacatgacatcatgcaattagcaaamcccatagaactgtataatacaaagagtgaaccctaatgtaaactctggtctttagtcaataaatgcatcaatgttggcttcttaatgcaatttcattttaaaatataaattttcttattttttccacatatttcttaggggaaaattttaaataatttctagcttcactgttttctaatggataaaagcataaattaaatatgcttttattactgagaggatatgacattgtagtaacagatttattaataatcaagaatgtattaacatatttatataaggtaacattctgtg

SEQ ID NO: 19971 - DNA, 601 bp, Homo sapiens
atccatacaatgacataattatcagggataaaaaaataagccatccagtcatgattagacatggaggaaatttgaatgcatatttctatgtgaaagaagccagtctgaaaagtctacatattgtatgagtccaagtatataatcttctagaaaaggcgaaactatagagctagtgcaaagtttagtcattaccaggagttgggcatgtgggggataagtaggtggagcacagggaatttttagggcagtgaaattattatctatgattctgtaatggtggatacatgacatcatgcaattagcaaaccccatrgaactgtataatacaaagagtgaaccctaatgtaaactctggtctttagtcaataaatgcatcaatgttggcttcttaatgcaatttcattttaaaatataaattttcttattttttccacatatttcttaggggaaaattttaaataatttctagcttcactgttttctaatggataaaagcataaattaaatatgcttttattactgagaggatatgacattgtagtaacagatttattaataatcaagaatgtattaacatatttatataaggtaacattctgtg

SEQ ID NO: 19972 - DNA, 477 bp, Homo sapiens
tataatctgtctcctctacttgaaaatatgtagcctgkggatcttgtggatttccatactaaatcatcccaaggccactttgcttttgagctctgtgtgtgtgtgtgtgtgtgtgtgtgtgtgtgtgtgtgtgtgtgtgtgttttgatctcttctgtaattttttttcccctgatctcgctgattgttatatttggtcagtgactgacctctagcaatgatggtgccagggcaactttgttgttgaactgtatgttaaggtttgttttggcttgttggttatatcagtacttatcaaatgaattatctgggaagagaggagaggatcttattaaaatacaggttcttattcagtaggccttgggtgggccttgaggttctgcatttctttctttctctttctttctttttctttctatttctttctttctctttcttttttctttctctttctttctttttcttttttctttctttc

SEQ ID NO: 19973 - DNA, 601 bp, Homo sapiens
tggaattgattacatggcactgaatgaactgatgaaaattgattataattgtatagctttttggagcattgctggttaatattctagtttctggatttaagaaatctctttctcttactctaactgtaacttacaacaatttagtagattatacttttgtaaacagaaatgaagcgtttatctttttttcttgcctgatttttccagaattttgaaatccttactgaatactcttatttccacgatgatatwgttgttagcaaaagtccaataagaatctattcaccttataacaggacataattggaaattttggttatattatcaaggtttttactggaatatcatatttaggaagtgtacctaagatcagttatgaccagcaattttaaggaagtaaggttgacttttatggagacaatgcttacaaagcactgtggaaaactttgaggaaagttcttcctcaaagattataaagtcacaactacccactatttttatatgtatgtgtgtgtgtgtgtgtgtgtgtgtgtgtgtgtgtgttccaaatcacttgtcctagcttgctccagcatgcctggacagaactagacaagcccca

SEQ ID NO: 19974 - DNA, 601 bp, Homo sapiens
tggaattgattacatggcactgaatgaactgatgaaaattgattataattgtatagctttttggagcattgctggttaatattctagtttctggatttaagaaatctctttctcttactctaactgtaacttacaacaatttagtagattatacttttgtaaacagaaatgaagcgtttatctttttttcttgcctgatttttccagaattttgaaatccttactgaatactcttatttccacgatgatatagttgttagcaaaagtccaataagaatctattcaccttataacaggacataattggaaattttggttatattatcaaggtttttactggaatatcatatttaggragtgtacctaagatcagttatgaccagcaattttaaggaagtaaggttgacttttatggagacaatgcttacaaagcactgtggaaaactttgaggaaagttcttcctcaaagattataaagtcacaactacccactatttttatatgtatgtgtgtgtgtgtgtgtgtgtgtgtgtgtgtgtgtgttccaaatcacttgtcctagcttgctccagcatgcctggacagaactagacaagcccca

SEQ ID NO: 19975 - DNA, 531 bp, Homo sapiens
aatcctgattctatcctagaattctaaaacatgcttcaggcagccatcaaatgatcagagtttgcacatcaaaagaaacattttctctactcctgttttacataactatcttggaagatctcatctgtactcttgactttaaattccaaaaagcctacggcttatttattagtgtatccaactcctctcatagggcctagagaacatggtttgcattggataaatatttgcagaatgaaagctaaaatgttagattagctaacaatatctaagtatattttgwcataccttaaaaactgagtgcaataaaaattgtaacataatgttcacagagaatatagaaaacagtgatgttacgatcagttatgtacattttgaaaaatgttgtttctgaacaaaaattgctttcttgacaatacttcaaaattattgtcgaataaataaacttatgttctgttcaataataagaaacatccaagggagctgtggagcttggattagggatttgaggacttggtatcagactagtcc

SEQ ID NO: 19976 - DNA, 531 bp, Homo sapiens
aatcctgattctatcctagaattctaaaacatgcttcaggcagccatcaaatgatcagagtttgcacatcaaaagaaacattttctctactcctgttttacataactatcttggaagatctcatctgtactcttgactttaaattccaaaaagcctacggcttatttattagtgtatccaactcctctcatagggcctagagaacatggtttgcattggataaatatttgcagaatgaaagctaaaatgttagattagctaacaatatctaagtatattttgtcataccttaaaaactgagtgcaataaaaattgtaayataatgttcacagagaatatagaaaacagtgatgttacgatcagttatgtacattttgaaaaatgttgtttctgaacaaaaattgctttcttgacaatacttcaaaattattgtcgaataaataaacttatgttctgttcaataataagaaacatccaagggagctgtggagcttggattagggatttgaggacttggtatcagactagtcc

SEQ ID NO: 19977 - DNA, 531 bp, Homo sapiens
aatcctgattctatcctagaattctaaaacatgcttcaggcagccatcaaatgatcagagtttgcacatcaaaagaaacattttctctactcctgttttacataactatcttggaagatctcatctgtactcttgactttaaattccaaaaagcctacggcttatttattagtgtatccaactcctctcatagggcctagagaacatggtttgcattggataaatatttgcagaatgaaagctaaaatgttagattagctaacaatatctaagtatattttgtcataccttaaaaactgagtgcaataaaaattgtaacataatgttcacagagaatatagaaaayagtgatgttacgatcagttatgtacattttgaaaaatgttgtttctgaacaaaaattgctttcttgacaatacttcaaaattattgtcgaataaataaacttatgttctgttcaataataagaaacatccaagggagctgtggagcttggattagggatttgaggacttggtatcagactagtcc

SEQ ID NO: 19978 - DNA, 531 bp, Homo sapiens
aatcctgattctatcctagaattctaaaacatgcttcaggcagccatcaaatgatcagagtttgcacatcaaaagaaacattttctctactcctgttttacataactatcttggaagatctcatctgtactcttgactttaaattccaaaaagcctacggcttatttattagtgtatccaactcctctcatagggcctagagaacatggtttgcattggataaatatttgcagaatgaaagctaaaatgttagattagctaacaatatctaagtatattttgtcataccttaaaaactgagtgcaataaaaattgtaacataatgttcacagagaatatagaaaacagtgatgttacgatcagttatgtacaytttgaaaaatgttgtttctgaacaaaaattgctttcttgacaatacttcaaaattattgtcgaataaataaacttatgttctgttcaataataagaaacatccaagggagctgtggagcttggattagggatttgaggacttggtatcagactagtcc

SEQ ID NO: 19979 - DNA, 655 bp, Homo sapiens
tcttccatggatggtgtttcagggtttcattgatcgtgtttttcttcctgagtggcacacaaaattaatggtgctccctagagttgatggtccctgcggttcagtgaaccgtgttgctcttgtgtaagctcctgtgggaacatagagtctctgtgtcccaccttcttcctcgcagtggtcagcacggatgaggtgggagttgcataaatrtcagcattcgaaagtgagggcgtctgtcggtgctgtctcactgtggggcttcagagaacgtgagcacctgtgtttgcattctccatcaaggttcatgtcctgttggctcataagcatgattatatccattatacaaactggggcacaggcacccagagagaagtcaaaagacttgttcaagatggacaactaggaagtggtggggacagaccagtcctgtctgatgccagatccagcgctgtatctgccagtcagcatgcacactttcatctctccagcctcttcccactcacctttactcaacatttctgggcctccatagtgattgtagtaattcggtaaagatgattcatttctttagtccggtcttcggacttgacttcttagaagcaggtcttgtgcaatagttgcatattaaccacttggtgacacagtgcatgagggt

SEQ ID NO: 19980 - DNA, 655 bp, Homo sapiens
tcttccatggatggtgtttcagggtttcattgatcgtgtttttcttcctgagtggcacacaaaattaatggtgctccctagagttgatggtccctgcggttcagtgaaccgtgttgctcttgtgtaagctcctgtgggaacatagagtctctgtgtcccaccttcttcctcgcagtggtcagcacggatgaggtgggagttgcataaatgtcagcattcgaaagtgagggcgtctgtcggtgctgtctcactgtggggcttcagaraacgtgagcacctgtgtttgcattctccatcaaggttcatgtcctgttggctcataagcatgattatatccattatacaaactggggcacaggcacccagagagaagtcaaaagacttgttcaagatggacaactaggaagtggtggggacagaccagtcctgtctgatgccagatccagcgctgtatctgccagtcagcatgcacactttcatctctccagcctcttcccactcacctttactcaacatttctgggcctccatagtgattgtagtaattcggtaaagatgattcatttctttagtccggtcttcggacttgacttcttagaagcaggtcttgtgcaatagttgcatattaaccacttggtgacacagtgcatgagggt

SEQ ID NO: 19981 - DNA, 618 bp, Homo sapiens
agacagaatttagttctgtgagggagccttaatttcatcagtgtgatcattgagtatatgcatttattctttcttcatttgttggtttatttgtaatttttagaaatgagggtctcactctgtcacccagtctggattgcattgacatgatcgtaactcaaactcctggcttaagggatcctcctaaaagtaagggatactttttaatatatattatataattacaaacattcctggatgcttcagaaaaagttccttagcctcctgagtagcagaggctacaggcccagctattttgtctttttttaaacctttcaaatggaccttttaagtcaacttataaattaatatagcataattaattctatgtatccataactccagtaattatgaggctctcatcttatttcttctctttcacttttttgctagataattttactggaaatcttgcacatgttatttcatgtataaatacttatataatgtatttccaactaatatagacaattgaatggtgtgttagtttgctwgggctgccatcaaaaactactataaacgagatggcttaacagcagaaaagtattgcctcacagtactggagtttacaaatctgaa

SEQ ID NO: 19982 - DNA, 549 bp, Homo sapiens
taacctctacaggactagtttcttcatctgcacaaaggggaataacaaaatactaacctcacaaggatattttaaaaattaaataaaccactccacttagcagaatgcctgggagatgttacatgtttaggtagtattagctgttaatcatattggtagtaatttttggtaggggtatgaggatagaaggaaaacagaaaagtrcaatttctaggcacttgctgtttatttatgtcacaaggagcccttcaggacagccaaggataaaacgggcttcctgggaggagacagagtggggaaggtgaggctgaaagtgaagctggataatggtcaaaaacaaacgtcacgtgcatgatacttttactgtggtccctgaatatatgaaacatcaaagaaaaacataaatatggaaataagcctctaaaatggactttccagaatgagtcagaaatgctttctgaagatgatgaagagctaaatctttatctgttttcaggtttcagttcttagggtgagtcaaatgcttaaagttagttaattctcatgaaa

SEQ ID NO: 19983 - DNA, 550 bp, Homo sapiens
aggcctttatagtatgcaaactttttgttagtctctttcggggataagagagtaacttgttacaggctttgttctagataagcacgtgtatatcagtctgggatttgtgaaaaaaatgtttagctgtaccttgaaagtggggaaggttttaattacsaggagtggggaagcattcactggtgaggagaataagtactaataaaggccaaaaggtttgagggagatggaggaaatcagggagttgatagataatttgtgatctacaccatacagtctttcttacccattgtgctacaagcaacttaagaacaaagatgctttttggctccatttgatcaccagcatctagcacagttctggttacacagttggcactcaatacatattggtttaaaaatgaaagggtgcatggcacctcgcagtgggaactaggcctagtgggaatggctctgaatctacagtacctacctggtgaagaatcatggttaaagagtctttaagtaactagcacaattgtttctgacttctgagaataccagcaacacttagg

SEQ ID NO: 19984 - DNA, 531 bp, Homo sapiens
taaggaagacttccagccgataacttgggaggaaccgaggtcctcagtccaaggacccacgaggaactgactcctgccaacagcccactgtcaacagcgagctggggcccttctcagtcaagccttgagatgcctatgaccctgggagacgcctggagccagaggactcagtgaagccgctcccggattcctgacctatcgatgcrgtgcgataataaatgtggttttaaggcactacattcggagagatgtgccacacagcaacagataacgaatacggaagggtagggatcagtcatgtgtcaggagggaagagaaggaaggaggagaggccatgctggacttgggaacagcagtgcagaggcccagaaggaactgagaatgggcccccagcagaaccacagggatctagctgggttagagcgcaagctgcaaataccactctgtaagggcagaaacgcggcctcattcaccaactgccatatccccagtgcctagaatgtgaagggtgggcatgcggtaggtgcccaa

SEQ ID NO: 19985 - DNA, 531 bp, Homo sapiens
taaggaagacttccagccgataacttgggaggaaccgaggtcctcagtccaaggacccacgaggaactgactcctgccaacagcccactgtcaacagcgagctggggcccttctcagtcaagccttgagatgcctatgaccctgggagacgcctggagccagaggactcagtgaagccgctcccggattcctgacctatcgatgcagtgcgataataaatgtggttttaaggcactacattcggagagatgtgccacacagcaacagataacgaatacggaagggtagggatcagtcatgtgtcaggagggaagagaaggaaggaggagaggccatgctggacttgggaacagcagtgcagaggcccagaaggaactgagaatgggcccccagcagaaccacagggatctagctgggttagagcgcaagctgcaaataccactctgtaagggcagaaacgcggcctcattcaccaactgccatatccccagtgcctagaatgtgaagggtgggcatgcrgtaggtgcccaa

SEQ ID NO: 19986 - DNA, 574 bp, Homo sapiens
tttttttcctgcagtgcagcctttctttcagacatgtatacaaggaagcacaatatatataacagcctaatgcagaactgttttggttgaatggggattgggcattataggctgagtctgggtccttgaaattcactttcctgttgggattgcttcattaatcactgctgtgaccaccccttctgtcctgaggggtcgctgtgcaccttacagctcctttgcaagagggratacacagctctatggtcagttctccaaaggccagaggggtaacagaagggaataaacttagcaatgggaaaaaggaaaactattaatttttgaatcagtgtaggctggctacataagagtcaccctggaaatttttaaaaacctggggtcattcctcagaattccagttcagtgaccctaggatgggccatggagtctgtatattggaaagctcctgtggaggattctgatctgttgctatatttggaaatctctgaactgggtcatctggctttctgaacaccacttggccttcagcttgtggctaccacctctagcaggggcatcttcttctaacacaggg

SEQ ID NO: 19987 - DNA, 572 bp, Homo sapiens
ttaagtaatttaccttaggtcatatagctagttaagtgttggaccaaattggaacactcagttaagttattgcagaacctgcactcttctgtgcacgtgtgtgttgtttttatggttgtgattgtgactgaagtatttaaggcaaatcccaatccttatgtcacttcactcctaaatacttcattatgcatttctagaaaatatgaatattttcttatataaygtttatgtgccattatgatgcctaactaaatacttcattatgcatttctagaaaatatggatattttcttatacaacttttatgtgccattatgatacctaacaaaactagcagtaattcttcgatgttacatgtaatccagtcatattcacatttctctgattatcccaaaaatgtctttaaaaaatcttaattcatacacatcaggctgcaaataatgatctgtacattgcaacgtttgctacatcacttaaccttattttaatctagagcagacttacctttttaaaaaatgtcattaacttgtcgaggaaacttggtcagttgtcccactgaagtccccaattta

SEQ ID NO: 19988 - DNA, 609 bp, Homo sapiens
atgttcctttcactttttgagtttctttggaaatattttaagttgtttacaaaaaagatatcactcacaaacatctgttaaagtaaatgttttattgcagcataacacagaagagcacacaaatcacaagtgttcaacttggtaatcaagtgaacagactcctgtaactcacatgtggatccatctgaatctccaaaaacccttccagtcactaccacccccagggccgctattatcctgaccccatagattagatttgccaaggacaattaaaagcaaatcattccagcatcctaaaacaactacattcacatttgcgcttttctttccagtcttttcaagatgtaaacataggcgcacacggtggctcacgcctataartctagcacattgggaggccgagacaggcagatcgcttgagctcaggagttcgagaccatcctggccaacatggtgaaaccgcgtgtctactaaaagtaaaaaattagccggatgtggtggcgcactcctataatcccagctactcgggaggctgaggcaagataattgcttgaacctgggaggcggaggctgcatggagccgagattgcgccactgcactccagcctg

SEQ ID NO: 19989 - DNA, 609 bp, Homo sapiens
atgttcctttcactttttgagtttctttggaaatattttaagttgtttacaaaaaagatatcactcacaaacatctgttaaagtaaatgttttattgcagcataacacagaagagcacacaaatcacaagtgttcaacttggtaatcaagtgaacagactcctgtaactcacatgtggatccatctgaatctccaaaaacccttccagtcactaccacccccagggccgctattatcctgaccccatagattagatttgccaaggacaattaaaagcaaatcattccagcatcctaaaacaactacattcacatttgcgcttttctttccagtcttttcaagatgtaaacataggcgcacacggtggctcacgcctataaatctagcacattgggaggccgagacaggcagatcgcttgagctcaggagttcgagaccatcctggccaacatggtgaaaccscgtgtctactaaaagtaaaaaattagccggatgtggtggcgcactcctataatcccagctactcgggaggctgaggcaagataattgcttgaacctgggaggcggaggctgcatggagccgagattgcgccactgcactccagcctg

SEQ ID NO: 19990 - DNA, 226 bp, Homo sapiens
tggcattaaagcctrcctctgagatgggcttggtgagggttgttaaacccatttggtgagtgaagaacttgcacctctcagaggtgtggctcctcacctaaagtcataaaatgaaacttctgtgctagagaacagcaagttcagaaccagaatccagttctagactctcagctcagtgctctttacacagcttagcagaaggcccgagaggccaagggtagtgtag

SEQ ID NO: 19991 - DNA, 510 bp, Homo sapiens
tacacaaagacgtttcctaaatattttataatgatattctctctacaatgttcatgcctcatcatgcagcattgtactgactcactgtcagtgcatggttgatgaattaaaaattattactcttgaaacaggtcaacaaattaagatgactttcagccacactcttcttaaaatgttttagtctgaaagtattccttgtgagtcagaatttttgcatctgttttgagagattacaatttcctttcaggttttttcaaaggtcaattaaaatacactagcagctttgagacatgagtcacagaatttaactggggttaaagatttatgtaatattaataatatgttttaatggaaataattaagcaaacatttgctttagtggactgctgygtccaactgtaggagatggctttttatttttattggatacactagtattggaatgaatgttatattcttactatccatacacaggcagtgagattagactattaatctacatgcatagtt

SEQ ID NO: 19992 - DNA, 537 bp, Homo sapiens
cagtgaccccagaaaggctttggccccaaattttgttagcccttcaaaggcccctagcaccacttagtagtcaacagcagagctgtgctgtccgacacggaagcaaccagacatctgtggctagcaagctcttaawatgtggccagtacgaaataaactgtgctgcctgtaatcccagcactttgggaggccgaggcaggtgaatcaattgaggccaggggttcgagaccagcctggccaacatggtgaaaccccgtctctactaaaaatacaaaaattagccaggcatggtggcaaacccctgtagtaccagctactcaggaggttaaggcatgggaatcacttgaacccaggaggcggaggctgcagtgagccgagatcaagccactacactccagcctgggcaacagagcgagactctgtctcaggaaaaataaaaataacttaaagaataaattgcactgtaagtataaaatacacacccaattgtcaaagacttagtacaaaaaaagtcaagtatctcactaataattttca

SEQ ID NO: 19993 - DNA, 520 bp, Homo sapiens
tgtaacyttgacttaagtgctaaactaaatatggtatcttatcacatttctgtactggtgagccaacaccacagaaaagcaaactgaaatgaatgagattctttgattaattttctagtaaaagtttaaatatcacacttcaaagtaatttaaattatagcagatggaaatggcagcatccttaaatagattcctgcacactcttccaggattcagaagtcttctatttaggtatcacagcctatcttaatatgatttacatgttggtgtctgcaacttctatcaagctgccgggttagagggcaggggctgccctatctccctactctcactgtcaaacttctgatcagatgcatttataatgactaaagatagagcctttttttttttcacttgagcttctttgctgcctagacttaccttccttgtgttcattagtcaaaccagaaaggcctttctggactgttaggctgctaagagaggttgctcagtcctctcagcctctatcctatggaattac

SEQ ID NO: 19994 - DNA, 2098 bp, Homo sapiens
ttcctggggtactctcagtcctaggacatcatagctctctttcatccctcttaaaagttartaccattatcagttaacagtttttatattaaaattatccctgttcaagttaatggtatggtttctgtatcctgactggatattaggatacagtatttactgtcttatttctactactttatgtttaaagtttttcataatatttaaactgaagttttgatcattcattaaatatttacacagaacaggacaaaggatgattttcctttgtctagttattgtaaggtagcgtccaagatttaccaccacatcatgattacagatggtcaccaacttatgttttaggattttttgactttatgatgggtttatagggatgcagccccatttcaagctgaggagctccttagggcttaggaatcatacctctttcacaccatggtaaagttggaaaattgttaagtcaagctgtcattaattaggagactgctgtgttgctaacgttatatgcatttttaacttatgatgggtttattgggaattaaccacaatgtaaatcgaggaccatctgtatattgtatgatttttgctaatgcattgagagagatctgtgtaaattatctatgacttcagaatatgcatattacctccaactgtgttaactcaacgtttttcaagagagtaagggtactttcaccctatgtggatgtactgtagaatttttctaagatacgaaagtctataaataacaaatcaacttaaactttttgggaaataatttctactaaagattcataatcggcgtattccttcaatgactgtacaagttcatccagtagataatctccttgcataaaagtttcaagatcatgcagcgtcttgtttattctgtgatctgtgacccggttctgtggaaaattatatgttcttattttctctgatcttcctttacttccaatctgtatatagagaaaaagatgagatgcagctagattcagggcaatttaaacctacaaatttaacttatttggagacttaagttcttgatttataacatgaatcaaatgcgagaaccaggttttaaacacttagaatctcaaatgacatgggaacatgatatagaaaaaagaacacgtgctctaaaatcagattaatatctgaatcctgcctcagccacttcaatgttctatgacctcgggcaacttagtttcccgatctgcaaaatacagtgtctactacacagtgatgatgacaatagagcctggcacatagatgctattcctatagtcgctgaatacatataatctctgtgaattaatgcagtcatcttccgtggtaacaaggtggtgagtttcccatattgaggaattcttaaaaggctctgtagttataaaattaaataccggccaggcgcggtggctcacacctgtaatcccagcactttgggaggctgaggtgggtggagcacctgaggtcaggagttcgagaccagcctgcccaacatggcaaaaccccgtctctactaaaaatacaaaaaattagccgggtgtggtggcaggcgcctataatcccagctactcaggaggctgcagcaggagaattgcttgaacccagggggtggaagtcgcagtgagctgagatcgcaccactgcactccagcctgggtgacaagagcggaactccatgtcaataacaaacaacaacaacaaaaattaaatacaggaagaaaaaaacaggaagaaagccaagttgagtttgctttccaactttcttgcgtaattaaaatttcaaaggattaaaaatgaatgaggactcagtatatatctttatttttagtaacggattaaaagtctgagaaaaatacctttgaatatagaaaacagggcagagatgtaagattactatcaaagaaggatagcccttagactacttgaattgttttcaacacaggttaaaacaaatatataaaaaccaagttatttaaaaaaagctgagttatataaaaatatttctatcctttaaaagcatttttaaaattctttttttacctgaatttttctagcattctgtcttttatttatttcttcttctagatgca

SEQ ID NO: 19995 - DNA, 634 bp, Homo sapiens
aggctggaagcagcaggtcttggtgatcaatcttgtgggaggawgatgaagatgaggaaagaattagggaaacctccaggtttttggcttaaacattaaattattgccctaaaattaaacacaaagaaagcaaaagtaacatttcaggtttatactcctgtactactggaaaagaaacagtgtaggcaagaccaatcaggaaaagagacagtgtaggcaagaccaatcagaaagagagctggcatccctggaacgggacagagagtaaacagccgatatgtttcacagtgggaataataccagacctcaatgtctgcctttgaacaatttgcttcatctttttttcccatgtgcctttcctatgcttgctcttctcaacctattttgagatcttcaactgtttcagtctaaatccttctctccgtcacggtctgcatccaacaccatcccctcagcaaagtggctcctgatccctcctctaacaagtcctttctccttctcctgagctttcctggcatttgctccctactttggctgacaaggtcatccttactaacctgtcttatttaccccaccaaattgtaagccctttgaggcagaaattatgctctacagttgtttcgcagttgtaatc

SEQ ID NO: 19996 - DNA, 511 bp, Homo sapiens
ctgtctcttgcttcagacaacagtattttcatggagcagacccgggactccccttcttctagcctcgattgctcccaatctcctcttcagtcacaacctctggaccatcttcttggccactctctgcttcctggaccagccaacattgtttctgtggtgagctcccagattcattagaattatttcacccatgtggaggctgccagcaaccgcctggtccacccacatctgcaggcttcccggacctacctctttctgggctttcatttcaatcttgatgatgtggcttagagggtgtgggacaatgtcgagttggtggaggagaagcctgagggctctgaaaacttgaaaatttgaaattttcttggaaacgcaaaaccagccctgtggtgccaaaccaggacmctggctgtaccctcttctaggacatgcagaagctatcccatgatgagaggggtgaaaccctggactgcatggtagatgtcctggctctgtagaagaacctgaacca

SEQ ID NO: 19997 - DNA, 658 bp, Homo sapiens
ctaaaaatagaaaaattagccaggcatggtggtatgcacctgtaatcccagcaactcaggaggctgaggcaggagaatggcttgaacctgggaggcggaggttgcagtgagcttagattgtgccactgcaatccagcctgggcgacagagtaagactctgtttcaaaaaaaaaaaaaaaattaaatggtggggggtcttattactctgctttgccttctccattgaccactggaacaaattgctttgaaggttatggcaggtagccayctctgtataggaatatgaacaattcctacctaactgaaggtatcaatttctaaatttaccaaaaaattctgatgcccaggttttcattccagagattctgattgaattggtataagaggtgtgtggctggttttctgaagcccagagagagagagagagagagagagagagagagaaatttaccctctcaggtttgttcagctagaattacaattcatttcaaatctatctaaaatgattgtcattacaaatgattccacattgtgcttagtaaccagatgaaacaagagccaacaagggctgcattatttaattctcatctattagtaaactaggacaaaatagagtaattaagtaattatgatatctaaggcactgaaagtagggata

SEQ ID NO: 19998 - DNA, 543 bp, Homo sapiens
ctgctctgcacctgtgcctcagggggctctttctcagttctcctttcctaaatccaatttttctcatgagtactagatgaaagctcaggaaaaagagtcaatggataggtacaaggattccttctgcctggaactcccggagcttctaaactcccatgccagcccacatccagcctttaaaaatttgtcataatttcagcagtttttttcttgcccaagtctatggcatctgtctcctcttcctgctgctctgccatagatggaagcagctgtgcagcctgcccaactctctctattagtctcatcctctcttggattttaggctactctgtgaccatggctctctgatgagtgtgaaataactgtaacttttcagatgattcacttgttttcataattaggctgggagtgctgtttccttgctatattttatatcctaagtggaagcagaaatccattaaactttttgagttgaaacttttgctcatgatttttattatcttgaatayaactttatacagcagaaagtactgtctcacatgc

SEQ ID NO: 19999 - DNA, 530 bp, Homo sapiens
tatcctggatgggatcctgaaacagaaagaagggattaggtaaaatctaaggagatctaaataaactatggacttccattaataagaatgtatttatattggttcattagttgtaaataaatgtatcatactaatgtgagatgttaaggacaggaaaaactaggtatgaggtaatgggccrtctctgtactagcctctcagtttttctataaacttaaaacttttctaaaaaaagtaaaatctgttaaaaagaaacacatggagggggcatgtcaacacaccccagccccacccaagtacagagtgtggttcagctgcatggggacagcagggaagacttcccaacccagggttgctgtgcaggacagtaaggagaggggaggagaagaaaccaaaccccaggactcaaaggcatgtaattggccccatccaactatgagccctgggctatggacccccactccctatcaggtcaccaaggcggcctccacggagggtcagaggaaggttgcaagaagccaggtgctttt

SEQ ID NO: 20000 - DNA, 2035 bp, Homo sapiens
tgcatacatgactgacaaaagagcatctgccttacttaaagattgaaaattgtctggtgcagttacatggtgttatcatgggcttaatggaggcagaataatttttttaaatacataaaaaagaagttgaaagtgaaaaagaaaataaatcgattattaaactcatattacgtcaacactaagagagagcatggtggttaggagtacctaggtcttgctgtataacttacctaaatttaagccccagcctcactaattactagccaggtgactggacaaatcaatcagccaaactgatgggaataataatacctaactgtgggaaccaaacaccactgtgggaaccaaaggtccattgcttagcaagtagaaactagtcagtaagcagtaaactaacagttcacttttattacataacaatctagcattggtactttttcataatcagaatattaaaatatcagttagactttctcatactagtatctatyggctatgtatccaaaacacaaagacatttctcagatcaaaaacataataacaagtctaaacagaaacattaaaatatctgaatcttaactttgtccctttaaaaaaaattaaacatgatgggatttcagatggaagtgaaaatatcctgtagatgctcactactaattcctaccatgcttggtagttaccaagagtaaaaaaaaaaaaaaaaaaatcccaaagcaacagcaacaacaacaaaaaaaacacttgatatttatggcaaatataaaggggacatgaagagctaaaataaataaagcacagtagaattcctcttcttaaaaaaaaaacaacaaaacttcacacttcaggaaatctgattagaagaaaaaggagaaatcatcacaccattataatatgggtagtccctgaaataggattaatagagtggaataaatggttggctgagaagggcccagctggaacatcagtatcacaatagggacagctgggggctggtcagactagataccccacagaggatactcagaactctcagaaaaaagatatcagagctgccttctgcccattatttttttaaaaaaacttgttactgtatgtttcaaactaaaaactatacccataacttgcttaaattaattttagaatcaatatttacacatgaatctcccattttattgagaaaggtggctcaaccatgacttagattgcgatacagatatgccggctcacatactgcataattgttttctttgggaatgatgtacagaataaaatacgcaggaataaaataacagagtgcccacgctatagaaaagggcctatttccttccctcacttctttcccagctgcccagactcatttctttatcaaatattataattaaatattttaaatagaatttcaatatctccatttaattaaggtaaaaagcaaacaaatttgaatatgatctgttcccttccccaatataacattccttattcttacatattaatttagctacattttaaatacagtctaataaaataaaacataagaaggatttgaaatttgattagtacagatacattcccagcacagtgtgcttacagatgccatgtttcttgtcactttcactttgtatttctgaggttattttatgcattaatttaaaaaataacatacacaaaattgacatgagtaaacctgattcttagtttttgccataaatgtaaataaagctcatacctgatttaactgctgctattgcctttgcaggggtggtcacagcacttattaagttacatagtgagatcccactgttgtttactttctgaatctctggtgtttttaaactccacttttcttgtaatttcttgagatataaaaacacattatttttccatcttaatattttcagagttgcacattataattcagtttcttaaacatatcttaaagtagtaataattgtagaccctgatttgtgagggagtcgatgaaagaaaaaggcacctatttgttcccacagcccaggtgactgttatctcagttaac

SEQ ID NO: 20001 - DNA, 2035 bp, Homo sapiens
tgcatacatgactgacaaaagagcatctgccttacttaaagattgaaaattgtctggtgcagttacatggtgttatcatgggcttaatggaggcagaataatttttttaaatacataaaaaagaagttgaaagtgaaaaagaaaataaatcgattattaaactcatattacgtcaacactaagagagagcatggtggttaggagtacctaggtcttgctgtataacttacctaaatttaagccccagcctcactaattactagccaggtgactggacaaatcaatcagccaaactgatgggaataataatacctaactgtgggaaccaaacaccactgtgggaaccaaaggtccattgcttagcaagtagaaactagtcagtaagcagtaaactaacagttcacttttattacataacaatctagcattggtactttttcataatcagaatattaaaatatcagttagactttctcatactagtatctatcggctatgtatccaaaacacaaagacatttctcagatcaamaacataataacaagtctaaacagaaacattaaaatatctgaatcttaactttgtccctttaaaaaaaattaaacatgatgggatttcagatggaagtgaaaatatcctgtagatgctcactactaattcctaccatgcttggtagttaccaagagtaaaaaaaaaaaaaaaaaaatcccaaagcaacagcaacaacaacaaaaaaaacacttgatatttatggcaaatataaaggggacatgaagagctaaaataaataaagcacagtagaattcctcttcttaaaaaaaaaacaacaaaacttcacacttcaggaaatctgattagaagaaaaaggagaaatcatcacaccattataatatgggtagtccctgaaataggattaatagagtggaataaatggttggctgagaagggcccagctggaacatcagtatcacaatagggacagctgggggctggtcagactagataccccacagaggatactcagaactctcagaaaaaagatatcagagctgccttctgcccattatttttttaaaaaaacttgttactgtatgtttcaaactaaaaactatacccataacttgcttaaattaattttagaatcaatatttacacatgaatctcccattttattgagaaaggtggctcaaccatgacttagattgcgatacagatatgccggctcacatactgcataattgttttctttgggaatgatgtacagaataaaatacgcaggaataaaataacagagtgcccacgctatagaaaagggcctatttccttccctcacttctttcccagctgcccagactcatttctttatcaaatattataattaaatattttaaatagaatttcaatatctccatttaattaaggtaaaaagcaaacaaatttgaatatgatctgttcccttccccaatataacattccttattcttacatattaatttagctacattttaaatacagtctaataaaataaaacataagaaggatttgaaatttgattagtacagatacattcccagcacagtgtgcttacagatgccatgtttcttgtcactttcactttgtatttctgaggttattttatgcattaatttaaaaaataacatacacaaaattgacatgagtaaacctgattcttagtttttgccataaatgtaaataaagctcatacctgatttaactgctgctattgcctttgcaggggtggtcacagcacttattaagttacatagtgagatcccactgttgtttactttctgaatctctggtgtttttaaactccacttttcttgtaatttcttgagatataaaaacacattatttttccatcttaatattttcagagttgcacattataattcagtttcttaaacatatcttaaagtagtaataattgtagaccctgatttgtgagggagtcgatgaaagaaaaaggcacctatttgttcccacagcccaggtgactgttatctcagttaac

SEQ ID NO: 20002 - DNA, 1020 bp, Homo sapiens
tgatccccttcccctgtggttcctgagccctttcctgtaaacagcattggaggtggcccacgcttccctcttgtaactgggtggaggccagcatgcggccagcagtacgtaggccccgccggggcccacaggatcctgtctctgcagcctggtgggtgggctgctctccccatccacatgtcatctgctccctgagcgcatctcactctagcagctccagcactrcaccgccagtgagctcaggccttccaatgagggcggagggagtgacccctggcgctgtcttctctggaaacaggagtgagcattaggaagcggtaggctggaggcctcaaggactggcagggtgtcacctgctgggatgggaagcccagggaccctgtggttccaggaagccatgtcaagggcagagggtggcccttttgccctgcctctactgggggcacccagggaaatccctccactgacccagaagggtgggcgggactgtgagtgggaggagttctggaacatctctgaacttctcgtccagaaaggggagatggcagcgtctggctcactgtacttctagggctgctggagggtcaggtgagatgatggacggaggagaggctcagagctaccgatttttcacacgcataggcacgggtgcacacaatacacgcaatatccacatacacacgtgtgcgtgcacacccacccaccctcggggtctcaggaaaccaggcaggggaaaaattaattctggtcttttttgatccctggaaaacactctttctctctttgcaaatggaaaattcttggttagtgataaagaaaactactccttgccccatgtggaattggcatggatttttttgtctttatctttttttttctttttctcttttttttttttttttgagacagagtcttgctctgtcacccaggctgaagtgcagtgacgcgatcttggctcactgcaacctccgcctcccgggttcaagctattctcctgcctcagccccacgagtagctggg

SEQ ID NO: 20003 - DNA, 1020 bp, Homo sapiens
tgatccccttcccctgtggttcctgagccctttcctgtaaacagcattggaggtggcccacgcttccctcttgtaactgggtggaggccagcatgcggccagcagtacgtaggccccgccggggcccacaggatcctgtctctgcagcctggtgggtgggctgctctccccatccacatgtcatctgctccctgagcgcatctcactctagcagctccagcactacaccgccagtgagctcaggccttccaatgagggcggagggagtgacccctggcgctgtcttctctggaaacaggagtgagcattaggaagcggtaggctggaggcctcaaggactggcagggtgtcacctgctgggatgggaagcccagggaccctgtggttccaggaagccatgtcaagggcagagggtggcccttttgccctgcctctactgggggcacccagggaaatccctccactgacccagaagggtgggcgggactgtgagtgggaggagttctggaacatctctgaacttctcgtccagaaaggggagatggcagcgtctggctcactgtacttctagggctgctggagggtcaggtgagatgatggacggaggagaggctcagagctaccgatttttcacacgcataggcacgggtgcacacaatacacgcaatatccacatacacacgtgtgcgtgcacacccacccaccctcggggtctcaggaaaccaggcaggggaaaaattaattctggtcttttttgatccctggaaaacactctttctctctttgcaaatggaaaattcttggttagtgataaagaaaactactccttgccccaygtggaattggcatggatttttttgtctttatctttttttttctttttctcttttttttttttttttgagacagagtcttgctctgtcacccaggctgaagtgcagtgacgcgatcttggctcactgcaacctccgcctcccgggttcaagctattctcctgcctcagccccacgagtagctggg

SEQ ID NO: 20004 - DNA, 886 bp, Homo sapiens
atattttatttatttaacattacacacaacacatatgttacaggtattttctttaacaccacgtgtaacatatctgttctaggcgtttgacaaatttcgactcaatcctcagaacaaccccattttacagattaggaaattgaggtttacatagactaagcaactttcccaggtttattaagtgatgaaacggaatctgaaatctagacatttttgttccagaacccatgctcttaaccagtgcattgagctgcctattttctcacacctatagcaacatgaaattgacaaatattttgatcatagccaacttggtaagtaaaaaaagaaaaaaatctaattttagtttgcattttctgtactatgaccaaggttgaacatttcttcaaatgtttaagaaatatgtttttcccttatgtgaactgtttttaattgttgtctttttttccttttatctattgactttcttattggtttatagaagctctttacatattaarcagtccttctgtgatatggaatgcatgcatttttctattcttttatgtctttcaactttatgggttttttaacatcacataattaaaaaacatttatgtagtcaaaatgtgcacattttttggtatgtatttgtgtctatgtgtgtgtgcatatttaacatgctgagaagttctggccgtcctgagatttaaataattctcttttgtcttcttctagtacttttatcagtccattgaagtctttcatccatctggagattttttttttctgtaaaatgtgagggagggattccgttttttcccatacaccattaattgtataatctatcttctcctttcactggacatttttcctttataatatagtaaatgtcctcatgtgtttg

SEQ ID NO: 20005 - DNA, 886 bp, Homo sapiens
atattttatttatttaacattacacacaacacatatgttacaggtattttctttaacaccacgtgtaacatatctgttctaggcgtttgacaaatttcgactcaatcctcagaacaaccccattttacagattaggaaattgaggtttacatagactaagcaactttcccaggtttattaagtgatgaaacggaatctgaaatctagacatttttgttccagaacccatgctcttaaccagtgcattgagctgcctattttctcacacctatagcaacatgaaattgacaaatattttgatcatagccaacttggtaagtaaaaaaagaaaaaaatctaattttagtttgcattttctgtactatgaccaaggttgaacatttcttcaaatgtttaagaaatatgtttttcccttatgtgaactgtttttaattgttgtctttttttccttttatctattgactttcttattggtttatagaagctctttacatattaagcagtscttctgtgatatggaatgcatgcatttttctattcttttatgtctttcaactttatgggttttttaacatcacataattaaaaaacatttatgtagtcaaaatgtgcacattttttggtatgtatttgtgtctatgtgtgtgtgcatatttaacatgctgagaagttctggccgtcctgagatttaaataattctcttttgtcttcttctagtacttttatcagtccattgaagtctttcatccatctggagattttttttttctgtaaaatgtgagggagggattccgttttttcccatacaccattaattgtataatctatcttctcctttcactggacatttttcctttataatatagtaaatgtcctcatgtgtttg

SEQ ID NO: 20006 - DNA, 557 bp, Homo sapiens
tttctcttctttatgttggtatttctaggataatgttcaataatagtaacaatagtagatctctttgccttgtcttaactttaacaggaatgtttatagatattatcttattaattataatgctgacctttgggatragataaatgcattttatcatattaagtatcctgtcatttttgagcagttgcaaaaataaaaatatggctgttgagatttatcagtgcttttccagcataaataaagatgattatatgatttgccttttgatctaataatatggggaattacattaatagatttcctaatgttgaaacatctgtgcgtttctggaaaaaggtaagttgtgtttctatttttcattaaatttcctaaagattttgctttatgaatgtgtatgctttgtggtttgtgttacgggatctttggggtgtcacttttctggccagaaacctgtggctggtggtgcctttgcccgagttttgctcgggcccgctgggctcattctgcctactcagcctggcaggctgtgctcggatcatgctaccagcctggatcct

SEQ ID NO: 20007 - DNA, 557 bp, Homo sapiens
tttctcttctttatgttggtatttctaggataatgttcaataatagtaacaatagtagatctctttgccttgtcttaactttaacaggaatgtttatagatattatcttattaattataatgctgacctttgggatgagataaatgcattttatcatattaagtatcctgtcatttttgagcagttgcaaaaataaaaatatggctgttgagatttatcagtgcttttccagcataaataaagatgattatatgatttgccttttgatctaataatatggggaattacattaatagatttcctaatgttgaaacatctgtgcgtttctggaaaaagrtaagttgtgtttctatttttcattaaatttcctaaagattttgctttatgaatgtgtatgctttgtggtttgtgttacgggatctttggggtgtcacttttctggccagaaacctgtggctggtggtgcctttgcccgagttttgctcgggcccgctgggctcattctgcctactcagcctggcaggctgtgctcggatcatgctaccagcctggatcct

SEQ ID NO: 20008 - DNA, 527 bp, Homo sapiens
ctctcctggggcagaggccacagccaaggcctagaggagggcagggcacacagcggtacccccaccctgaccacggggcagggcacacagtggcacctccaccctgaccatggtgaagtgcagcctgcatccccacgagcactcctgagccgcaggtctcagctcctgaggtcgttgtggattttaagagctgaggattttagggcttagcactgccactggcaaatggtgacaaaagacaggtttcttgcaaacaaggtaagaaccatacagcatagatgagaatgcagaaaaacagaattcatggaatccagaacgcaccacatacaaagttaaaagaccaaaacctaatttggaaaagagttgcaagacacaaaaaccaatgaagggcaaataacgtataaacaatgttatggtcaattagaaagtgacaggccgggcatggtggctcacgtctataatcccagcastttgggaggccgaggtgggcagatcacgaggtcaggagttcaagaccagcctggcca

SEQ ID NO: 20009 - DNA, 538 bp, Homo sapiens
ataacaagttttaaattatacaggccagactccaaactaattgtctttctccttcatttcagaaaaattttccaaagatgacttaaaataacacttgaattggagggaggaaggaaagctaawattattagagcacaacatcttaaattttaaagaattatatttgagaggaatatatacaatagacagcttggaagagcattctgggtagaaataagattcacctctcttccaatctgaaacataataacaatgcctttcatttgtatggttcttcagagtttaaacatggcttttaagcacatttttctctgaggaagctcttcctttgacagcatcttcctcagtgctgccttcatggaatcattccgtaagctataaatgactggattgagtgttggaggtatcacagtatagaatacggagaatacaaggtccacagtcgatgaggaatcagaaggcagtctgagaaactcaaagcctgcagctgaaagaaagaaggtggctacaaataggtgtggtaggcaggtggagaaga

SEQ ID NO: 20010 - DNA, 539 bp, Homo sapiens
gctctggaattttcccctccagccacagacttggtaacagagaagcagcaatgaaccagaggggagagaatgagactgggggcaccaggttagagtgcttttcttaccggaggatgatgaccactttcctcagttcaaaggggaagctaaacttgtgtataaaatgtctgttaggtgacctgtgaacatatttgtttgtatggaatcactagaccagaagagcagcagctctttctcgttatgcatctgtttttgtgccctttgcagcatttaagacacgtttacattttctagccaacactgactaaatgaaaactcaaatcccacaaattttagtggaggtgttatattattattaaggaatttttcttcacctgtttctcacttttatttttcattagaattttgtakatggagactgaagggctctcttgagcatgcagctatgctcactgttcaaatgggtaatcattcttctaaaccagttttaccctcaaggaaggacaacagaataaagcagacaattcctgccccaggca

SEQ ID NO: 20011 - DNA, 570 bp, Homo sapiens
ttttttttttttggaggtggagtctcgctctgtcacccagcctggagtgtaatggcacgatctcggttcactgcaacctcccacctcctgggttcaagcgattctcctgcctcagcctcttgagtagttgggactacaggtgcgcgccaccatgcccaactaactcttttttggtatttttagtagagacagggtttcgccacattggccaggttggaactcctgacctcaagtgatccacctgcctcggcctcccaaaccgctgggactacacgcgtgagccacagcgcctggccaagtttttcaaaacccatataaaaacattattaggartgttctgtttcttaatttggctttggttatacaaggtgtaacttaatgatttttgtaccattctatacttcaacatagcccaaatataaagggatttttactctacttttattgctaataaaacagcacatcacttacataatggaagactgtatgtttatgacatgaagaaagcgagaaaaaaatacaattctcctaaaaatacagcaatcctaaaaaaaaaaaaatacagcattc

SEQ ID NO: 20012 - DNA, 570 bp, Homo sapiens
ttttttttttttggaggtggagtctcgctctgtcacccagcctggagtgtaatggcacgatctcggttcactgcaacctcccacctcctgggttcaagcgattctcctgcctcagcctcttgagtagttgggactacaggtgcgcgccaccatgcccaactaactcttttttggtatttttagtagagacagggtttcgccacattggccaggttggaactcctgacctcaagtgatccacctgcctcggcctcccaaaccgctgggactacacgcgtgagccacagcgcctggccaagtttttcaaaacccatataaaaacattattaggaatgttcygtttcttaatttggctttggttatacaaggtgtaacttaatgatttttgtaccattctatacttcaacatagcccaaatataaagggatttttactctacttttattgctaataaaacagcacatcacttacataatggaagactgtatgtttatgacatgaagaaagcgagaaaaaaatacaattctcctaaaaatacagcaatcctaaaaaaaaaaaaatacagcattc

SEQ ID NO: 20013 - DNA, 570 bp, Homo sapiens
ttttttttttttggaggtggagtctcgctctgtcacccagcctggagtgtaatggcacgatctcggttcactgcaacctcccacctcctgggttcaagcgattctcctgcctcagcctcttgagtagttgggactacaggtgcgcgccaccatgcccaactaactcttttttggtatttttagtagagacagggtttcgccacattggccaggttggaactcctgacctcaagtgatccacctgcctcggcctcccaaaccgctgggactacacgcgtgagccacagcgcctggccaagtttttcaaaacccatataaaaacattattaggaatgttctgtttcttaatttggctttggttatacaaggtgtaacttaatgatttttgtaccattctatacttcaacatagcccaaatataaagggatttttactctacttttattgctaataaaacagcacatcacttacataatggaagactgtatgtttaygacatgaagaaagcgagaaaaaaatacaattctcctaaaaatacagcaatcctaaaaaaaaaaaaatacagcattc

SEQ ID NO: 20014 - DNA, 574 bp, Homo sapiens
aattccatgatcattccttcttctggttccacactcaggaagtgaaatttgtatgagggtaccagctagtccacaagatgagctgcttgtgccaagtgctyaagggaggcaatgcattcctttgacatacagcgataggaaagcgtgcctcttctagttcattcattaaagcagagctgccttatgtaagaagcttcccttacaagccctcatttgttttttattttttctctggtgtaggtatcgatatcctgaagcttgtagcagcccaagtgggaagccagtggaaagatatctatcagtttctttgcaatgccagtgagagggaggttgctgctttctccaatgggtacacagccgaccacgagcgggcctacgcagctctgcagcactggaccatccggggccccgaggccagcctcgcccagctaattagcgccctgcgccagcaccggagaaacgatgttgtggagaagattcgtgggctgatggaagacaccacccaggtaatggagcccttgttgtgtgtcattaccaccgacctattgcccctatgcttcaaattttatcagtt

SEQ ID NO: 20015 - DNA, 1118 bp, Homo sapiens
aactaggaataacaatatgaggtaggcaattattggaaaatattatttaaagtgggccattacctaattggagtattctacattttcacgtagattttattttctattacttaatgttatcttgtttctttaataagatttgaaagaagtagaattggcaataagactaaagaatagcataactggttttaaaagggggcaaaacaacagataatttaaaatagaaaaacagaaccttatattataggggagaagtctgtatctcgagacaaagaacactaaggagtatgtaaaattaacagtgtatctccagaataatacacaaaaacaaacacacagacaactggcaataatatcttatactagcatatagtgaatttcctttcacagggctctgaagatgttttgtatggttcactaaacttagcatggggatttcagaattagaaaatggagataaattagaaagggctcatgaacagaaagatagataaaggactgtggagtttaccccttaggaaacataattgagtgaaaaatatggtttgactcaccactaatataagatacagcctctaagaatgtgataaatttgagtaacccagatccatggtatttaatgagtgtgtgttacaagcactaggcagtggataggcttttcatccygtgggcacagcagtcctagctagacagtattgctggttgtacatatgcccttaggcttctgtgaaggcaaccagagattttaaggctagaccagagatgtctgagcctcagacaggagacagtctcttgaatagtgcaggggctgtttagaggcatcccagttagtgtagactcctagcaatgctcagagtacaacaaaccctccgcatcagcttattgacagcgaaagtgagaagccagagcaatgtctccaagagtgttgtgtttcccaatgtcagaagttgtcaagctgatatttattacattgtgaagactagagagctgtgtttttaaatattctcctacatgtcagtgaccccagaggcaaggcctttgcctttcagccaagctattatttcccatggggatcatgataaaggtagtggagaatttcaaactctcgatgatgagag

SEQ ID NO: 20016 - DNA, 621 bp, Homo sapiens
cccagtgttatgggagcactggggaaggagtcaggctgcttcccaggggaggcggcacttgccctgagaggggaaggttagataagagtggggatggataaggaagcagggaagatgttttggtcattgggaccagcagtgcaaaggccctgaggtgagcccagcatcttctggtccatgtctcgctgggaggcagccagccaagtccgcggtgaatgcagccctgccccctcttctaggcagatgtggctggtgggtgctatgttggatgagactggtgtagagggctggtggtggggcaggggtgtggcaggaggcccagtcagggcccagatggctcctgagtgggtggtggggtctggctgcccagagcatccggtctgccttctccscttggcctctgcccgtcagcttgttggttgccatgtctgtgtctgcttctccgcagcatggctcactctttcggggagagctaccgggtgggcagcacctctggcatccacgccatcaccgtcttctgctcctgggactacaaggtgacgcagaagcgggcctcccgcctccagcaggacaatattcgcacccggctgaaggtgagtggccccggagcaccaagctggc

SEQ ID NO: 20017 - DNA, 550 bp, Homo sapiens
tccgcattgtgccttacagttaataggtgtctaataaatatgtgttgaacagataaattgattaatgcatatcttaaacttctttatatttcccacaggtcctagaatagtgttgggctttcaatagcagggtctcagaagaatggatgaattaatcaatgaacaaaacaatgaattaacaaatcaatgaactactgagccattgaacaatggcttgaaagtaagagagtttgcatctcatgtgagagttaagatctgcagactcagtgaaaagggtgtggagtgcatgacactggctatttctaatcgagtctcctgtttcatatatatatatacacacacasagagagagagagaggtgcggttttatgctgtcacctaggctgcagtgcagtggtgcagtcataactcagtgcagccttaaacttctggtcccaagtgatcctccttcctcagcctcctgagcagctgggactacaggcgcatgccaccacacccagctaatttaaaaacatttttgagacgggatctccctatgttgcccaggctg

SEQ ID NO: 20018 - DNA, 285 bp, Homo sapiens
cacccggccacctggggaatcttctaatagtcttagggcagcttagctggcctggacccacctcccttgccacctgccccctgcaccgactgatcatgttcagtcacccaggagatgatggagaggctgatcaggcctcctggaaagggaggaagagggccctagttggagagatccatcagcagaagccagggaggagatacagacccttgctccctgaygctcctcagggctagcatggggcaggagtttagctgggaggaggcggaggcagctggcgagata

SEQ ID NO: 20019 - DNA, 509 bp, Homo sapiens
ctcacggctacctgaaggcatgactgcacttcccagcctcccttgcggctgagacgaattctggccaatgggagtggctggaaaattcactttctcttgcgtttcatcaaaccggttgggtcgggggaggactagctgcgcgcctggcacgctcctcaggcggggatacggggcagaagagcccttgggactgccttcttcgattctacacggagaagccggcgggagcagcgggggagctcgccccgagtccctgcttcatttgatcggatagtccagcggtccccaacctttctggcacaagggacccagttcatggaaggcagtttttccaagggcgggggaaggtgggtagggggtgtggacagttccaggttgaaactgtgcccctcgtcmtcagccattagattcttaaaaggagcacgcacctagatacctcgtatacgcagttcacaatagggttcccgctcctaggagaatctgatgccttgctgccctgacagcaggcg

SEQ ID NO: 20020 - DNA, 836 bp, Homo sapiens
agcctggatccgtggatgaaaaccaatatcctaataccacaataccatctaaactgtgagaagactaaagttgatgacgcaagcaacatgcttcactacagtaagagctaaaggcagctttacatgttataaaacaataacaacaaactctaccagcaagatcacaagactctctccatgaacacccagccttcagggagggcagaggcaactccgccaactcacaccacacacaccactcccttacccgctatcacggagatcaaataaacaggtcagctggggaaggatcagcgataccccactccagaagtgacttgctgcaggaagcaagttccctgccatcagaagcaggtgcttttaagttctggtcaatgtttgcaagcccaggagatataaaaccaaaagcattagtgctcactaactgcaagactcracagcgtgtacaccagtagaagcttgggagctccaggttacaaggtctgctgggagttcagccggtccaggagcctccctgctctcactaatacccagcctgcagctgcatccaaacccctggcgtaaaacctactgtcaacccctccaaactctgcctgatttatctggctctgctaacttgcaagctgagattccacatctgtgttgcatgagctgctttctgcctggaatcctccttccttttccacccatttggcatactcctactgtccttctagacccaactcaagtgtcacccgctccatgaagcctcctctgatgcctcatagagaacaaacaacatcacagacttctggtttttatcacatcctgtgttccccaattatctcaaggctttg

SEQ ID NO: 20021 - DNA, 575 bp, Homo sapiens
tgaggaccctgtccctgcagcctggagaccaggccggcctggacccctccccaaaggcctcacagtgggcagagattggggtgtgtgggagtgtacatgccgtgtgtgtgactgtgtggtctgtgtgtgtggagtatgtggtgtgtggcctgcgtggtctttctgtgtgatatatgctgacccatgtgtgtgggttgtgtgtgggcacgtgtttggtcagtgtgtggtatgtacattcacatgtggggggtgtgtttggtctgtgtgtgcacgtgtgtggtgtgtgtgcatgcacacgtgtgtgtgagtcctgtgtggtacacagggggaacagctgtgggagagccagggagctccactctagagctccacacaccctggctcttggctgccctggccctgtcagtagtcccagaaggaggttttggggccactcaggtattgggctragtgttctcatttggggaatgggaccctggggttggggtgagtcctgggccagcccctggcctggcagagcccatccctgcctttgcatctgctgcaggctccaggcatccacctgctggggctga

SEQ ID NO: 20022 - DNA, 696 bp, Homo sapiens
tttttgcaaacttgtccttcatttatttcttttayattcattttctccttcctgccctcattcccccaacttgacagtggaggtcccttttttttttttccaaattagacatttctgttgggaagtgcataattccaaaaaggaaaacgaaatggaaaatcaagtcttgatcatatcctccattaaagtgctgagtagctctctcactccgtagagtgagttttggtatgaatcacgttttctccctgaggtacatctgactttctatttagtctccttcacttattagacttccatctacatgtcttatgtgtaactactgcataagccaggcgcactaactccctcacttgaagataaacataaaatcaagttacataactgacccagaggtttgtatagagagttgtgttacgtctgtttcctgaattctctccttacttccaccattcattgaattggatcatggttattaacattatcaccacttcacccactgtgatgtttcctcattaaggagacaagcaaagatctggtggagctcaacagccttattcatatctcattaagtaagaatctctcctgatatttctctatgggacatttttggctgccctcccaaaggtgtcattgtttatggagaatgatcagcctcaagccaaagacttgagtagaaagctgctctgatcctcttct

SEQ ID NO: 20023 - DNA, 569 bp, Homo sapiens
ctctccatgccatgtggctgctgccaggctatagaagtagggtgctatgtgcgctcttccctactgtggccgagctgatatctatgttgcaagacaaagtcccttttactcttggaaattcaaggctgtctttcctattcccttcagtgcctcttttcagtgataggaagttaaaaccaggtactgtgatccctcacctggtttttggttcttatgaagggacgtttttgtgtagatgttaaatttggtgttcctatagggaggatgattagtggaggcttctatttggccatcttgctctgcctcttacttcttttgatcagtcatatcggaggtgtctattttattattcatttcaacaatctcactttagcttatcttattgaagatttgtttttaattcatgtttgagtttattctctaattttgttragttcttgaccttttgaaaattcctgtttttaaaaggtatctaatagctattagctttatcacagaggctgtaatatatgtcaccattcagttctaggtatttttttgtgtatggacaaatagatgtactccccaaa

SEQ ID NO: 20024 - DNA, 543 bp, Homo sapiens
agccttccctgctggctgggcattgctcagcattggtgcatacacttgtttccagcagaaatatggtatctggacctggaagaacccacttttccttctaacttgtttacctccttggaggtcctgtagcctctccagaggtcttgttgaccctcccttatcactaggaaaagacttgctgagggcgagggtgggtgggtgggagggacttattccaaccaaaaagggaatagaggatcctctctgggagaggtactcttagacttgtctgggtcttagtttcaaaatcaaattacggaactgacttgtgagaccttatgtttcatcatgtcttgtttgtatgaaaaccccaaaggagttgctggcgaaagctcagttggcctgacttggaacctgttctgtcttactacttgcagttagtgagtcccagagtagtcagcagcttggtagcctaactcagggtggccatctgctctatcacactgagtgaccatttgctagattactggctgggggtcatgtctcccccacattgtrtggatc

SEQ ID NO: 20025 - DNA, 513 bp, Homo sapiens
ttgttatgtagttatatcaatcagccatttctgttgytggttctttcattgctttaatatttagaaaatcattttctgcccagagattaaataaatatgcacttatactttcttatagtttcaaaaattacaaatattcctttgagacttaaaaaatggcatgactaaatggagacacttaacatgcttctgtaagagaaaagtaagtatttgtcatttctcttcaaagtacagttttgtataatcctgaggatttgtgggctaatctagaaaaaaataggaaaattcataaagcaagttcttagagacctacagagagacttagactcccacacaataatagtgggagactttaacaatgcactgtcaatattagacagatcaacaagacagaaaattaacaaggacattcaggtcttgaattcaactctggatcaaatggacctaatagacatctacataactctccactccaaatcaacagaatatgcattcttcccagtgccatatggc

SEQ ID NO: 20026 - DNA, 615 bp, Homo sapiens
tggcttgggttgtcaactactatgtatcttgcttcttcagaaattcaaaaccacactatataacaccattataccccacctaaagctgagaaatctatcttaatggtccatagccctaatttataaatcatgcatgaatcaggcctgccattgatgaaagctgagaagtttggagttaagggatttattttaacagagatacaggaaagaagaattggcaatgcttttcaaacctttaagaggtgatgccttttctaaataacaaagcttttgactcgaggtgagccaaggtttttcaaaacatatggtacatatcttttaacatcacgaagatgcacgtgaaaggacccagatatgtcaattgagagaaatatatgacatkgcttgacagcttgcaaaacaccagtgtttttgtattactgctaccagacaaagtaactttatgccacggttagtttccaagatggttgatagagtctattccatttgaattcaggggattttctaagagatcaaattctaatgtcttttggaaaaacagaaagaaaaagaaagacccacacaagaaaacagaaggccaaagtcttttaaaatttttatctagatcaattttag

SEQ ID NO: 20027 - DNA, 504 bp, Homo sapiens
ttggaattctgttttgaactttggtgagaacaaagtcatctttctaagctgtccattcccagtttcttataacatgaaatgtgtggtttctctttactctgaatcacctctccatcttgcatacaccttaactgaatatttgtccaaccttgtaatttaaggcaggcccatagtttttatgaataaagttttacgggagcatagccatggcctttcatttctatattgtctatgactgctgccacattacaccatcagagacgagtagctgcaacagagaccatatggcccacaaagcctaacatatttattagctggcctcttataaaatrattttctgacctttgatttaattttgattatttgtgattttcagaaatgacccttgtgtgagactgattccttgcattttctgtctttgaatctttagatacctttttgacagtagtttaatacatgttttccaatggacaaataacaagtaccaattctataaaacaactc

SEQ ID NO: 20028 - DNA, 570 bp, Homo sapiens
agctcagagagggaagaaaatctagagagcaagtgcartgtgaattgggttttgaaggatgaataggagagtgctgggtacgtaaggacattggaagaaaatctcaggcagaggtaagagcatagagaagagtttggaatagataagagccactgcctctggctgtgtgagtgcatgtgtgtgcatatgtgcgtgagtatgaatgtgtgtgtgtgtgtgtgtgtgtgtgtgtgtgtagggtggtagggtggtagggtgtgaatctggagatgcaggtagaaccctggacacaaaaggtttttaaggccaggcatggtggctcatgcctgtaatcccagcactttgggaggccaaggcagggagatcacttgagcccaggagatggagaccagcctgggcaacgtggcaagaccccgtctgtacccaaaaaatgaaaaattagctgagcatggtggcgcgcctgtagtctcagctacttgggaggctgaggcaggaggatcacttaagcctgggaggttgagtttgcagtgagctacaattgtgccactgcactccagcctgggcaacaga

SEQ ID NO: 20029 - DNA, 673 bp, Homo sapiens
ttcaggacaacaaatttcgcctgcttactcagatgtctgcaggaaaacagtatttagaacatgcatctaaggtatttaatggaatagaagttggggtttttgttaatagtaggactacagggaaaagtacagtgctaatcataacaaactattgaattaaaaatatgttttaaggtgttcttttttgtttaaagagttttctatgaaatgagagacatgttacaataacactaaactgtagctaaatagtcatagagtgaccaattaaagaaacactggccgggcgctatggctcacgcctgtaatcccagcactttgggaggccaaggcaggtggattacctgaggtcaagagttcaagaccagcttggccagcatggggaaaccctttctctactaaaaatatgaaaaatagctggacgttctggcgagcgcctgcaatcccagctattcgggaggctgaggcaggagaatcacttgaacccgggaggcagaagttgcagtgagctgagatcgtgctatcattgcactccagcctggggtataagagcaaaactccatctcaaaaaaaaaaaaaaagaaaaaaaagaaacactataactaaatracagtgaaatgtagatgtatggtagatcactttttttttttttttaagacaaggtcttgctctgtca

SEQ ID NO: 20030 - DNA, 1447 bp, Homo sapiens
aactatattattaactccattgattcttaaacattcaaactagtttagattcagttttagttttrctattttattttgccttcttaattgaaaatttctatctatatactttatcaagcataaatattgatgcttccttcaataaaattaggtcccttaatctgttctctgtgtgtgtgtgcacgtgagtgcatatggacatgcctgaatttagctattataacagttcgattctaaaaatattcacccctgcataaaaataattaatccacaagcatacctcaggtctgtggagctgaatattaaacatgctaaccaagaaattcagtaaaattgtaataccgtatgtagaaatcctctttaaaactcaccagcggtagttcaactaaatgcttgccattttgcccttagttaaaaatatttcctttcaagcaaacatagtaagacaggaagcaaagtgtagtgagaaaaacacatgctctggaggtttcacatttgcatttagatctcagctctgctacttactaactcagtaaagttaagcgacctctctctacattagcttttccacaagaaaaatggggatcatagtaatacctaccttctagggttgatgtgtgtatctgatgtatatgaaggatcccagtagagtattaggtagatgcaaggcctcagcaaatgttagttcttcttaattcctttcctaagactgtggacgtatgtttctgaagtgatatgcaaggctgtaagtctgcatgacttcatgaatatatctgagtgttataactaatagagagaaatggggacgcggtgcccctttgatatggttaggctttgtgtctccacccaaatctcatcttgaattgcaatccccataatccccatgtgtcaagggagacaccaggtggaggtgattgaatcatgggggcagttttccccatgctgttctcatgatagtgagtgagttctcatgagatctgatggttttataatgggctcttccccctttgctccgcacttctccttcctgccttctccttcaccttctgccatgattgtaagtttcctgacacctccccagtcacgctgaactgtgagtcagttaaaccactttcctttataaataaccaggcagttctttataacagtatgaaaatggatcaatacaccctccatttatcaactgagttatggattgcgtttggtttgtcctggcctcacgtgtgctaaggagagcgctcttgcagcaaacaagcatccaatatcctcctccacattgcacttctctatagcccaatattcagagaatctcatttcaatatttgtcatcgagtctttgttctatagatgaaactactctgaaatccagaaacacagcttgataactgatgctcttatgatcttttacattggagttttactaaataaagatctgttattatttatg

SEQ ID NO: 20031 - DNA, 547 bp, Homo sapiens
tgattccgttcttttatttcaaaaacaaaaggaatgagtcttgcatccttggcaaggtgctaggaattggagacgcaagagtgagaaagacagagcacctgctctctcaaagcttacattctactatgaggaagggacaacagaagttatataatmaattctttacaattatgtggaatgctgaataaaatgttagtatgctatgaaggtgcatactaaggatatttgacttctttgagggtgtctgaaggttaaggaaatacaattgaaactgatatttgaattataaataggcattagctaagtgaggaggtggaacagataattccaggcaaagagatgatcactgcatctgcctggacagagagtccagaagaatcctagagcatttcatggagacttggctacagaaaaagagttaagcagtcaacatgagctacagcccacactggtgacacactgatatatactcaatctaagtatgtgccaacaagatgggactcaggccttggcataagtcccagattagacttccgccctccccaag

SEQ ID NO: 20032 - DNA, 571 bp, Homo sapiens
gggggacatgcttatagaattcaggatctgacaaagagtaagaaaccaggaaataattactatataattatatccaaagcccttctttacccagactttattcactgcacgaaggtgttaacaaattccattgttgtgcaaatttaagactaataaatcattttacatccataattttatttgactctcataacaacacttagaagtgagatattattgttgctattttatagatggaaaaactgatgttcagaaaggttaagtaatttaagattgcacaactgggtactggtggatctaagaacagggacctcattctagagagtgccccaatmattactctttcctctcttgggcagcattgatacttggtaactgttccttcagaatataaaaccctccaaataaagaattagctatggaatttcagcttgagggatttgtactttcaggacgcaagaaatcattatttgtcattttttttctttgtttaaactgacatcatggcattttctattcttcaaacagatattctaatcactctagcaatataaagcaattgtaatcacag

SEQ ID NO: 20033 - DNA, 549 bp, Homo sapiens
tggctactcccagatttcctagcttggaacccacattaaggtgcgtctgccatacagagtcattctcagggtatacttaatttattgctattaggtgcatttatcatgcactcccaaaggccctatctccaaataccagtaccttggaggttagggttttagcatatgaatttaggggcaacatagttcagttcatagcaaaaagttaatccccaattcttctgggtgtagttactaattaaaagagaaccctgattatagtagagccagcagtgtcagaatctagatgacccttaagctttccactttatgggccaataaattctttttgctcrtctaaattgaattttctgccacttgcaactaaaagattcttgagtaatatgatccacaaactcgcagatcacttgatctccaaaggctgtacttgctgggtaatcagttgctttgggtgtgtgtgtaatgactgcaggaggttcttacacttaagccttcatcagaatcacctgcagaacttggtagagcccagattgctgtgcttcaacccca

SEQ ID NO: 20034 - DNA, 596 bp, Homo sapiens
aggaaagtggctcttcaccttgtagcaaggcaacaggaagctaactcaaccataagaaatgcagtgatatgtgttttgcctagagtggcttatgtaatccttatcccaacatcactattattacccctcttttacggargggaaagctgaggcttagtgacatagaataacttgcctatggctacatgtggtagcttgaaaaatggcctctcaaaggtaccaggttctaatctcttaccttgcatggaaacggggcctctgcagatgtgattaagtcaaggatcttgagatgggaaggctgtcatggattagcagggtgggccttaaatgcagttgcatgtatataagaggaaagtagaggaagatttgaccccacacacacagaaaagaaggtactgtgactacagagatgagagatttgaagctgccgaccttgaagattgaagtgctgtgaccataagccaaggaatgatagcagccactagaagctggaagagccaagaacagactgtcccctaggacccccagagggagcatagccctggcaacgccttggttttgccccagtgatactgatttcagacttctggccttca

SEQ ID NO: 20035 - DNA, 449 bp, Homo sapiens
tctctttaaagttcaggggatgtcgaggaggtacctccttcacaccttccactgctgaaggatactgaagagcttggagttgctgaagtcacccaggcatctgggctaatggattgacagacaaaagaggagcccatcattcaataattaattagttgcaatcatgggaagacaacgtcccccagagcrgataggacagccacctcctccaacctggtagtttcaaagcacccaggccctggctgctctcaaacctctttatccaatgtttcccctcagggtctagctgagcagttacactggctgacattctcttaagaaagcccaagaggaaatgtgcagaaaagacaattttcagaccttgtctcacagtcctgcccggccctgggacagggtatccagggatgtaggtctggtctagctgtatccctgtctcgataatataggag

SEQ ID NO: 20036 - DNA, 449 bp, Homo sapiens
tctctttaaagttcaggggatgtcgaggaggtacctccttcacaccttccactgctgaaggatactgaagagcttggagttgctgaagtcacccaggcatctgggctaatggattgacagacaaaagaggagcccatcattcaataattaattagttgcaatcatgggaagacaacgtcccccagagcagataggacagccacctcctccaacctggtagtttcaaagcacycaggccctggctgctctcaaacctctttatccaatgtttcccctcagggtctagctgagcagttacactggctgacattctcttaagaaagcccaagaggaaatgtgcagaaaagacaattttcagaccttgtctcacagtcctgcccggccctgggacagggtatccagggatgtaggtctggtctagctgtatccctgtctcgataatataggag

SEQ ID NO: 20037 - DNA, 1016 bp, Homo sapiens
cacacacacacacacacacgcacacacacacaaaatctcttatgttttaacaaagttgacaaatttgttttgggccacattcaaagctgtttgacctgcattcagcctgcaaactgcaggttagacaagcttggtttagcactatccccttgtgagtgagttcttatcagtgaggtcatgagagatctgattgttaaaaacagcctgggactgcccccttctctctcttactccctctctgaccatgtgacacactggcttcccttcaccttctgccatgattgtaagcttcttgaggcctcacccagagcagacgccattgcttcctgtgcagcctgcagaaccctgaaccaagataaacctctttttttaaaaaataaatgaataaattacccagcatcgcgtgtgtcttcatagcaatagtaacagactaacgtagaccctgccaaattgtgacacatgaccaaaaagtgttttcataagaataccacaaggaagtgaatatttcagtagcaggatatcagtgtgaattctactgcaagactggatagggaaaatgcggttgattcattttgtccaaaactatgcagcagctgcaggggaataaacaaccaaaaataacctacagcagtgtgggaatatatgaaggatgtgatgctctgtgacaaaaatagaaataaaatcagatttatggcacgatactctttaagaaaaatgtatacacttktgtatatacacatacacacactcagaaaacaaccttcttatcttgtaagaattctttaagagtaaagaacttatatcaaacacattagcatgcctgtctgtgacaagggataaagaataaaaaaattgaataagtaaaaccagaaagaaacttttaggaaacaataataataatgtctcatgtagtaaagaatatgattaattttttgcaactgtggtataaaaacagaaactgtcaaaatcacatgtaatgagctttagtatagagcttattgtagggcaaaaatcaa

SEQ ID NO: 20038 - DNA, 1089 bp, Homo sapiens
aagcaagccttctacagacacagtattctctctctctggcctcagagggaggatttcttcccagcctcaggggtggaactgacccaaggtgcccatcagtgcaacacattcttcttgccattgtgattggtatagggctggacacgtagtccacatcaggccaatcaaagtgagtatcaggacagtcccagggagttctgggaaaacaatgttctccctttttcactagattggaatttagaagtatagtactttgagagctgctagcaaccataggaaaagtggcagagaatcctaggaatggagtggaaagagaggaagtagatctcagaagagacagaaaaaaaaagttgatcctaacggctttcaacctgatattcagctgttcttgaagcagatctcccctggactattttgttatgtgagctcacaaatttattttgtttagtgatttaagcaactagaattttaaaaatcaatgtgtacatatatgcttagcttctcttggagtttgtgttttagcagtagaagaaaatgatttctgctgctaaaaacatgtttggaaatagctgatcttatcctagtgatctagtcctttttgttgtgcaaaaggaagtgctaaaatcagaatgagaaccatggtcacctgayatagacacaagtgatgatgatgatgatgatgatgatgatgatgatgatgatgatgatatccatgttcaagtactaattctgggcaagacactgttctaagtgctatgaatatattacctcatttaatcatctccaaaacattatgagatattctgttactatcaccatttacaaatgatgggattgaagtacagagaggataaatagcatcctaagatcacacagctagtaagttgtgatgctaggattgaacacagctgttctcttagccataccctacacccctctgacaaggtagagtgccttctcattggcccctaggttctgggctctctttccacgatgcctctattcttaaagcatgcaacccagaaggttcctgttaaatgtaagtgagagaatttctatcactgtggacctgcttccatcatctggttt

SEQ ID NO: 20039 - DNA, 604 bp, Homo sapiens
ttatataaatatatttaatttttatataaactctacagwgagattatatataatctatatataaagtgtatgtgtatatattatatatatacacacacctacatacattgcctcaaaagtctgtgagtacaaattattcttgatgatacaaggagcagttaaaaccataaagcaattctcgaatttcaaagaattgttggccttgacacgtatgctaactacagtgcaaattagaaatcagtaacaaaaggataactcacaaaaccttccacattggaactagactactttctacaaatctcttaggggaagaaaaaatatcacaatgaaaaaatcttaaattcttagaactgaacaatatactacatagaaagcagcagtaaatgaaaatctgcagtattttcaaatgacaaataaaccaggattaacagcctggaaataagcccaaacatatctgggtactgtatgtgacagaagtggcactgctaatcactgatattgggacaattaccttttcatgtgggaatctgaaaattaattaagcttgatctcataacataaaatatatacatctcaatatatacatgtctcaggtaaattaaag

SEQ ID NO: 20040 - DNA, 1334 bp, Homo sapiens
cacagaccgccagagtatttttaaactattatttgcatttttacttctctaagtgagccacatagtttttatattccctgtggtcttaagccagccccctactctagtgttatatctctctggccccggatgtttggcaatgtgtcttctgagaaattaaccttgcttttgcaatgggaggtttgtctgttcagcaagactagaactaagttaaaacgttcagaaaaggagaatttgattctctgtgatattttcttaaaaagagcctggaggtatattattgcaacgctgtttctctctctctcttttctcagttcattggtgttcatccttgctcacattgatataagagccgctggggactctaatagagctgctaatgccacttccttagagaggacttttctaatcatgytctgcaaagtagtttcccttaccgttctgtttctcagctcccagtttctttccttcacaccacttgtaacggttagtagttttttttttgtttgtttgttttgttttttttcaattatttgcttgcccacatctccggacttctaccctctatgagtgagtgagctactgtattcttggcatatagtgcactgctttgcaacaggaaatattcagtaaattttggttcagttaattgatgaaaaggaaaggagttgtggaagttcaaagactatgtttttcttgcttatgaccacttcttccccttttagctgcttgtgtttaatggatgctgggagttcacacacaatgcccttgctctcctcccagcgttgtattcagccttacagtaatttctccacagggggtgatgagagaaagagtgagaaatctcttgaaaaggaatcctgatgtatctcctgtggaggatatgtgtgcacatttaatgtggtccacacaggaagaaaatttgttgggctacatgcttggaagtggagaggtaagggggtggtttcagtgtcattaattgatgatgtgataaaaatccatattctttctgtatctctgctttgtagtcttgtgccggcttcactgcagggcaggatgtccttgtggttgcagcaggtagttttgggggctatgtgctttgtttttcacgtcaggtgtgtgtgtgtgagagagagagcgagcaagagatcaagagagtaagagagagagcaagagtgtgagagtaagagtaagagacagcaccagatccccaaccactcaacaaaaggccttttcttttctttcttttgttctaatctgattgtttctaatcaaattgggttggttacatgcccatctctgaaccagtaattccctatggcccttattcaaat

SEQ ID NO: 20041 - DNA, 850 bp, Homo sapiens
ttgaatagatcaatcaatgcccaaggatcacttactaatttattattattattattagcactgtcttgcaaatacatggtgcttaatgcagctaattgaactaaattgagttggatttacatgaacatgcaggggtatttcatgggactgttgcctttggcctttttaacaaacagttttattgaaatataattcatatatctataattcacccatttggaggtatgcaactcaatggcttttggtatattcacaaattatgcacccatcaccacaataacttttagaatattttcattacctccaagagaaacttcccactccttagctattatcctccaacttttccatcttcctcagacctaggcagccaccactttactttctgcctctatagatttgtctgcccctggtatttcatataaataaagtcatataatatgtggtctttagtgactagcttctctcactttgcatmatgtcttcagggttcacccatgttgttgtatgtatccatactgtacttcatttttttattgtcaaataatattccagtgtatggatgtaccacattttatttaatatcctttcatcagttgatggactggccttggtttttaaaccaatccctgtcaagggacatgggtttgccatgattggcttataaggcttataatcctctttgcccatccctggaccttcgtgtcagtccctccaccggaagtaccaacacagagggagggacagaatgcatgccaatggtggactgctggatccacagcaacctgtaaaccagcagatccatgtagtgtcacagaagcttccttctttcttcctcctacatttttat

SEQ ID NO: 20042 - DNA, 552 bp, Homo sapiens
agcaagtcttgcaattcctcaagatcggtgactacaacatcagccctataaaataacgtcgactgaggygtaggcacaggggggaaagcctgtaatccggatttccccagcaagaaggcgcccccacatcccgcccgcccgccagctcttacccgagggtagcagccatgagccccacggccccggtgcccgaacccagctccagcaccgaccgccggctcagcgcgtgggccccgtcgccagaaaactcgggcgtttccaggtatttagaaaggacaatggcagcgtcccacacaacgcaacccacgccaccggagctatactgctgtagtcgtagcactgtaccatcccgcttctccaaaactcgcacaaagctccgcagtgggtcctccagcgaggactccagcgtatccgccattgcgcccggcaacagaaagcggcgcgcgcagggacgtcacatcaacgcgcaccgccccgccctgcggctccgccccctgcccgccgctgagttggcgacgcagcgcgcgcgagttaacaaagcccggaaggcag

SEQ ID NO: 20043 - DNA, 573 bp, Homo sapiens
ggaatattattgaatattatttttatagcttttatgcaatgacacttgttgaatttattttgagataataggtataatagataatagccatattatcaattggctctgttgggaaaaatgagataactataatttgtatttcaaatccattgaaaagctgggattagaacacagatatatgtgtagccattatggagtatgaacgatattgttaaaatactatttatatttaaagctagtaagatcaattattgctttatgccttttaacacctaacatggtgacatattaattaactaagcacttaattctgtatttgactcagtgatttatctgttctctactayattaacaactgtctaagcaactatctaaacaattaacaattatccaaataaaataagacctagaatacaggttcttaacctagagctcatcagtgagcttgggaaggacataaactccttgaattctatgcaaatttctgtaaacttgtattttttttttagggagaagactcgacatttgcattggcttctcaaaagggtttcaactacacaaaaagtgtttaaa

SEQ ID NO: 20044 - DNA, 573 bp, Homo sapiens
ggaatattattgaatattatttttatagcttttatgcaatgacacttgttgaatttattttgagataataggtataatagataatagccatattatcaattggctctgttgggaaaaatgagataactataatttgtatttcaaatccattgaaaagctgggattagaacacagatatatgtgtagccattatggagtatgaacgatattgttaaaatactatttatatttaaagctagtaagatcaattattgctttatgccttttaacacctaacatggtgacatattaattaactaagcacttaattctgtatttgactcagtgatttatctgttctctactacattaacaactgtctaagcaaytatctaaacaattaacaattatccaaataaaataagacctagaatacaggttcttaacctagagctcatcagtgagcttgggaaggacataaactccttgaattctatgcaaatttctgtaaacttgtattttttttttagggagaagactcgacatttgcattggcttctcaaaagggtttcaactacacaaaaagtgtttaaa

SEQ ID NO: 20045 - DNA, 613 bp, Homo sapiens
tggccaggcacgatggctcacgcctgtaatcctggcactttggaaggctgaggtgggagggtcacttaagcccarttcgagaccagcttgggcaacataaggagactctgtctctacaaaaaaatcaaaaagtagccgggtgtggtggcatgcacctgtagtcctagctacttgggaagctgaggcaagaggatcccttgagcctaggagattgaggctgcagtgggccatgattgtgccacagcactcaagcctgggcaacagagcgagaacctgtctcaaaaaaaaaaaagactttgaattttattatttccaacctcatgtgggatactgcatgctaatccatttcattttcttacctggatttcttccacacactgcatagttttactgacctcaagaccctaaatccaaccttctatctcctaggctcaacaaataaagtacatccaataagaaataagggattaagcataaacttctctgacttcatctctcttcacttctaaatacagctatatatttattggttattactcttgtctgagttcatttctccctgcctcctctaagtctttgccaaatcaagaattgtctctagctacactcatag

SEQ ID NO: 20046 - DNA, 613 bp, Homo sapiens
tggccaggcacgatggctcacgcctgtaatcctggcactttggaaggctgaggtgggagggtcacttaagcccaattcgagaccagcttgggcaacataaggagactctgtctctacaaaaaaatcaaaaagtagccrggtgtggtggcatgcacctgtagtcctagctacttgggaagctgaggcaagaggatcccttgagcctaggagattgaggctgcagtgggccatgattgtgccacagcactcaagcctgggcaacagagcgagaacctgtctcaaaaaaaaaaaagactttgaattttattatttccaacctcatgtgggatactgcatgctaatccatttcattttcttacctggatttcttccacacactgcatagttttactgacctcaagaccctaaatccaaccttctatctcctaggctcaacaaataaagtacatccaataagaaataagggattaagcataaacttctctgacttcatctctcttcacttctaaatacagctatatatttattggttattactcttgtctgagttcatttctccctgcctcctctaagtctttgccaaatcaagaattgtctctagctacactcatag

SEQ ID NO: 20047 - DNA, 536 bp, Homo sapiens
aaacaaaactttattattgttctcttttttgttttttacagcatgcaacctcaaagagaaaagtttgaggaaatcacttcaaggacaaaaaattgcaatgtaaagagaattatttatctccaaattccagattacccccctgcccaacccctgccagcagcaccgtccacatggtttctcatttagttttgtgttagtttaacaaagtagactctgcaatctggataaaatagtaagtcacctcaggtaggtgccaataggatgctcctttggacattgcagattttaagtactgtctttttataatacaggaggcatgtacaagtctgtcatatgtggaaatgttgtgaacccatcatatatacaatgtgctgttttagaagayagattgtccatttaggtgtgttataacaacctagatgggaagttactttccggtgtgttcaaagttccttatctgattctgcagaggctgggatctgagcaggtcactctatctctggaggcctgttacttgatgataaatactaataaac

SEQ ID NO: 20048 - DNA, 515 bp, Homo sapiens
ttactttttaataattcagggtatttctcttatcaaatgtaaacgacttttggattgtgttcagtttattcttccttctttggttatttgaaagtcgcttgttgacataatattctaatacttactattgcagactttataacaaagatgccgtcattgaatttctcttggacaaatctgcagaaaaggctcttgggaaggcagcatctcacattaaaagcattaaggtaacacgagtgattctgaagtgctgtgagggtctgaacagtggctgaggtttattttatagaatttatacgccttaaagrctgaactcagaaatttgggattccattcccacatggccatctaatacaggtatgatcttgagaggtcacttaaatctcaagccacgagttccaccatgcatacttcctacattataaatctgttgtaatttcacctgtgtgttgtgctttgaaaattttgatgttctctattaatgttaggaggcattatttttgtaattaagattc

SEQ ID NO: 20049 - DNA, 601 bp, Homo sapiens
ctattgtgcttaggttcggcattggatatatgaacgctgattcctttaatgatcaagtcctctccacaaagagactgcgcaatctataagaaataagggatgtaaacaaagaagattaaaccactgattcatatatttaaagtagcaacaaaacttagattacaagcattaatttatctaaagccagaggaaaaataagcaatgaacactcatttcatttaaacccccaatacagcttttagttttattaacagcagcagtgatatttcagtcgattttcaaaagacataggctgggcatggtggctcatgcctgtaatcctagcgctttgggaggccaaggtgggaggactgtgtgaggccaatagttcaagactagcctggmagcctagacaacacagggagaccccacctctatcaaaaaaaaccacaaaaaagccacattagctgggcgtagtggcatgcatctgtcctagctacttgggaggctgaagctggaggatcctccccctggaggctgagcccaggagttctagggtgtagtgagctatgattacaccactgtgttccaccagcctgggcaacagagtgagaccctgtct

SEQ ID NO: 20050 - DNA, 639 bp, Homo sapiens
cagtgaaccattaaaaagtagacgtacccttaattttttccatcagcatttctttttcttgtaaggcttcagtgaagagtaacgttttaagttacaaaagtacacagtcatgcatcacataatgatggatataaatacatcatgagccattacacaatttcatcatcgtggccaggtgtggtggctgacacctgtaatcccagcactttgagaggccgaggcgggtggatcacttgaggtcaggagttcaaaccagcctggtcaacatggtgaaaccccacctctactaatacaaaaatcagccgggtgtggtggcaggcacctgtaatcccagcatcttgggaggctgaggtaggagaatcacttgaacccggaagaggaggttgcagtgagccaagattgcaccattgcactccagcctgagcaayaagagtgaaactccatctcaaaaaaaaaaaaaaagggccaggtgcggtggctcacacctgtaatcccagcactttgggagcccgagatgggcggatcatgaagtcaggagatcaagaccatcctggctaacacggtgaaaccccatctctactaaaaatacaaaaaattagccaggcgtgttggtgggcacctgtagtcccagctactcgg

SEQ ID NO: 20051 - DNA, 639 bp, Homo sapiens
cagtgaaccattaaaaagtagacgtacccttaattttttccatcagcatttctttttcttgtaaggcttcagtgaagagtaacgttttaagttacaaaagtacacagtcatgcatcacataatgatggatataaatacatcatgagccattacacaatttcatcatcgtggccaggtgtggtggctgacacctgtaatcccagcactttgagaggccgaggcgggtggatcacttgaggtcaggagttcaaaccagcctggtcaacatggtgaaaccccacctctactaatacaaaaatcagccgggtgtggtggcaggcacctgtaatcccagcatcttgggaggctgaggtaggagaatcacttgaacccggaagaggaggttgcagtgagccaagattgcaccattgcactccagcctgagcaataagagtgaaactccatctcaaaaaaaaaaaaaaagggccaggtgcggtggctcacacctgtaatcccagcactttgggagcccgagatgggcggatcatgaagtcaggagatcaagaccatcctggctaacacggtgaaaccccatctctactaaaaatacaaaaaattagccaggcgtgttggygggcacctgtagtcccagctactcgg

SEQ ID NO: 20052 - DNA, 695 bp, Homo sapiens
caagcctgtaatcctagcactttgggcggccgaggtgggcggatcatgaggtcaggagtttgagaccatcttggccaacatggtgaaaccccgtctctactraaaatacaaaaaaattagccgggcgtggtggtgggcgcctgtagtcccagctactctggaggctgaggcaggagaatggcgtgaacccgggaggcggagcttgcagtgagccgagatggcgccactgcactccagcctgggcgacagagcgagactccgtctcaaaaaaaaaaaagaaaaaaagaaaatgagtaagccagacttatacgagtcagttctaggtcaacaaggctttgatattctctgtgcaatgtgtatgtaataatacttgcaaaattatatcgtactagatttttatgaacaaaataataagttattgcaacaatcaaaactatgaaatcttcaggaagttcttggggctttatactccattaaaacagaggtgtaatgatgttattaacttgctattgataaaaatgtttgggagtggctacttattaacttaatagctatacctagaaaacaatatcatctggtgcaaataagtttacttctttcattataaatgatactgatctttttttattggctgggagatttctctgagcctttaatacgcaaatataatttgtgaatgtaaaggagacagtctt

SEQ ID NO: 20053 - DNA, 695 bp, Homo sapiens
caagcctgtaatcctagcactttgggcggccgaggtgggcggatcatgaggtcaggagtttgagaccatcttggccaacatggtgaaaccccgtctctactgaaaatacaaaaaaattagccgggcgtggtggtgggcgcctgtagtcccagctactctggaggctgaggcaggagaatggcgtgaacccgggaggcggagcttgcagtgagccgagatggcgccwctgcactccagcctgggcgacagagcgagactccgtctcaaaaaaaaaaaagaaaaaaagaaaatgagtaagccagacttatacgagtcagttctaggtcaacaaggctttgatattctctgtgcaatgtgtatgtaataatacttgcaaaattatatcgtactagatttttatgaacaaaataataagttattgcaacaatcaaaactatgaaatcttcaggaagttcttggggctttatactccattaaaacagaggtgtaatgatgttattaacttgctattgataaaaatgtttgggagtggctacttattaacttaatagctatacctagaaaacaatatcatctggtgcaaataagtttacttctttcattataaatgatactgatctttttttattggctgggagatttctctgagcctttaatacgcaaatataatttgtgaatgtaaaggagacagtctt

SEQ ID NO: 20054 - DNA, 570 bp, Homo sapiens
caaagggggaaaaaaagtctctttgcttctagacgttgtttctgtagatgtaaaggctgttmacttctgcagtcatcttgctgagaataaattcagaatgaagatggcaaaatggagcaagaaataagttaatgacccggaaggcctccttctgaagttgttattagagagataacatacttctttattgtttaagctggtttgagttgagggttttcttcactgcagccaaaatgccattagccaaaatctaaactggtataattttcactttattaagcagcatatcttcctgctatgttttttcctatactcattttaagacttcctattaaaggatagacttaatttattcaactgtgactattaaagccaattcaaatatcatctggtccttgaagccttcttcagatctgccaaaataactggctcctttttctgtgtttttggagcaatagtatctacatctaccctagaatgcatcgctctgtattataattatttcctgtctcccaatatcatttgattttgagtaccttaaggtaagacattgggctgggtgcagtggct

SEQ ID NO: 20055 - DNA, 464 bp, Homo sapiens
gccctgttcagcagttcaattgacttccttctgccastgtggaaggagctgattttgcctccatttgcacatttgtttcaacattcctttatttcatatttctcctttgcaccagttataagatccacttggtttcctcgttgattgagttaaaatatctaacacatgttcattttatctgagtcataatttacttttcttaaaattatattttaacaatatctaatcgctgtacataaactataaaattatcgtttgataaagtaataaggtaaagtactgctaggaagtagttgaagcccacgtttgagaatcactacacgtggtttctaatgccagatttgttctttgctatctcggcaaatttaaatgcttctaatttcattacctcatatataaaatgtaggtaataatacctgctttgtgggtgaatgaaataatacaaattactacatactttgatt

SEQ ID NO: 20056 - DNA, 464 bp, Homo sapiens
gccctgttcagcagttcaattgacttccttctgccactgtggaaggagctgattttgcctccatttgcacatttgtttcaacattcctttatttcatatttctcctttgcaccagttataagatccacttggtttcctcgttgattgagttaaaatatctaacacatgttcattttatctgagtcataatttacttttcttaaaattatatkttaacaatatctaatcgctgtacataaactataaaattatcgtttgataaagtaataaggtaaagtactgctaggaagtagttgaagcccacgtttgagaatcactacacgtggtttctaatgccagatttgttctttgctatctcggcaaatttaaatgcttctaatttcattacctcatatataaaatgtaggtaataatacctgctttgtgggtgaatgaaataatacaaattactacatactttgatt

SEQ ID NO: 20057 - DNA, 464 bp, Homo sapiens
gccctgttcagcagttcaattgacttccttctgccactgtggaaggagctgattttgcctccatttgcacatttgtttcaacattcctttatttcatatttctcctttgcaccagttataagatccacttggtttcctcgttgattgagttaaaatatctaacacatgttcattttatctgagtcataatttacttttcttaaaattatattttaacaatatctaatcgctgtacataaactataaaattatcgtttgataaagtaataaggtaaagtactgctaggaagtagttgaagcccacgtttgagaatcactacacgtggtttctaatgccagatttgttctttgctatctcggcaaatttaaatgcttctaatttcattacctcatatataaaatgtargtaataatacctgctttgtgggtgaatgaaataatacaaattactacatactttgatt

SEQ ID NO: 20058 - DNA, 527 bp, Homo sapiens
gttaccactggtagctgaggacatcatgcagaaagaacaggagaaggagaatggttgttgccttcaccacgaaagccccaatgtgctacctctaccagccacattgtcaataacagttggctttttttttttttttttttttttttttttttttttttttgccagggaccaatttcgggcagaagacttaaattaggtaaatatagattctgttacactctattgttttgtttgcatagccagcagtctacgttgtttctagaggactctagaggaccttaatgtgtttctacctcaaggtgacctctgaagagttaccctttagtagaaagaagtacaatggtcaccaaaaatggtcattccacaaccatcaaaacaatattagacaactttggattcatattttagtcttattcctgrtttcggacaactctgatgttaacagcttttagaagttttagatgtttgctttattttctttcataccattaccaataattcattatcagataactaaaatttgcaca

SEQ ID NO: 20059 - DNA, 529 bp, Homo sapiens
tgcgttaattgtgtgtattttgcttgtattacatgasagaagtttagaattttaatgtaagtagttaaacataatcttccaaagagaacaatgtaattcagggaaaattaattcagcttttacatgaatgaaaggttaacaaagcaagctaaacaccactcgccacaagatgtaatttgtaaattctggactccaataattacacaagtcttcatgtcataagagcattttcattcatttttacattttttccatacattaaactatcttctagggatttgggaatgaggacattgcaagtgttgaaaataaataaatcattgttaaatacccagttatttgatttaccatttctttcatggcagaatatacatagtttactttgcccatgcatggaattcatttaatttaacagcacaataaacatttataaaaacattaatatttgattacaaagttatattgttattgtaatgtcatttcttttcaaaatatattggctttatcatctcctggaattaccattttg

SEQ ID NO: 20060 - DNA, 562 bp, Homo sapiens
cataccactggttataagccagatatcttacacacttaagcatgttgcaaagaatcaggatcctttagagaaaggcaaaaataaagtggaattcacattgttcctggattgagatccctccacgtatatgaaagcattcttgagactgtgattttaatttcttattttagcaggaaatgcaattaaatgtgcagtgtaccagtagtgataragtctcccaagaagcatagtcttcgatcacatcagctcctgaggatagtggatgatctttctcttgtggccatacgtggtctctgaggtctatctctgtgttaccttctagcagtctatgctgtccaccagttccctctgagacgggaccacttgttcagctttctgaacaagtcacttcctgtgttcttgtggtcaaccttggtactcacagttttccaaacagattctcttgggcatctgtttggtgttagcatttccagaattggtacagctctaaatccctctgtgttcccaaatacaagatcagcagccttgtatttgatcttcctcctaggaatggctaatggct

SEQ ID NO: 20061 - DNA, 522 bp, Homo sapiens
ctgattttctttaatcatagtatattattttaccattgatttcatctgaaaatgttcttcctagcattggagtcctaacaggcacttatcacacagctaaaattccccatgagttggtaacactgcagcaagccctctgccctcaaggccgtctcttcagatttggcctagataataaattgctttgttttcctcagaagccctcaaggtgtgctgaaagcccagtgtgtttgggcttccaccctaattattgagcacacaattcatttcccacttttgtcaggttgcccaagaggttacaactaatttctgtttatcatgttctgtacatttttttatcctaatttgacctttttctgtaattggaactttgacttaattttgcatctttgctcccccttaaaaacaactgtactgagagggaaagaaattgaagtttctttaaagcattttttaattcatgaakattattaacccttttaaattttctatcctgtttgtaaaggtgatcagtttacttcg

SEQ ID NO: 20062 - DNA, 539 bp, Homo sapiens
atctttcaaagaaatagtagcttactaaaaccttaaaggattgatcagtatttttgtaagttaagatggtagagtgagagtcagtcacatgtaggaacgactgaaacaatgacaggatgtgggagtcctcttgggatgtaatcaagaagyatggtaaaacaatggaaccagatttttgaggacattgcattttaaactgtgtggtttaatcaggtgtctgttactagatagcaagtggccccaaaatttggagacttaaaacaactatttattatttattacaggtctatggtttgcccagtagagtttttctgctatggtacaagcttggctgatcttgactgggctcgctcatgcattggcatttagctaaagggtctgctggagactggctgatctgggatgatctcagctattgcaaattgtccctattctttgtttcttaagttctccatcatgatagcctggagttatttttatatcagtagcaggagacaaaagagaaaaatctgaaatgcataagtacttcttaaagtctc

SEQ ID NO: 20063 - DNA, 1038 bp, Homo sapiens
gaagaggtctgcagcagggaggctggtcagggaagtaactttgcaaaataaaatcttcatactgatgcaatcccagagaacttgcctttgggtttgtgattgcaaagtgttgaatcagtctttggtgtggatacagaatatttgaagctagttgaagtgtaggggtgttgggacaggagaaatgatgagatgaagtcttatcagaggctgaaggtcaccggatattttcctagtaaaggttcctttgatgtggaatttatccgtttagcccacctaattggagttatctggtttctgtccctgaagattctgctgttggccctggactacttaattctgtttgctcaccaaatcggtgacataagttacaagttatgagatttaatgtttagagtatggttttggattataggytccttgcattcttaagttagcagaaggaaaccaagagaagcagcatggtacaaacaaaaccccaaacaagtgctaatgtcagagagacctgggttcaaatcctagctatgccacatataagttttatcatgagagtaaattgcgtaatctcccagaacctcagtgttcttgttgctaaatgtgcacaaaataactggctatcttatagagacgttgtgaagttagagtgagtgaaggtgacatgcctagtaaggacctggcacgtagaagcacacaatcagctttaactgtttctgttattagcagtggacttagcactgtataaatctgtccctccatgcttcccacttgcccatttgtcaaatggacttgacattccttactcagtggttgacagggagccaagtgagatatctgagctgttgaggatggatgtgtatctcaagatcctggcattcagactggggctctacaagtcgcactatatttgcaagttgtagcagaactatattaaaaacatgccctgcctgtttcccctcgttggtcctcccattcagagaggggctttctggccttgtgctttaaatagtcctcagacggtaatgtggatagtagatgaacaca

SEQ ID NO: 20064 - DNA, 1038 bp, Homo sapiens
gaagaggtctgcagcagggaggctggtcagggaagtaactttgcaaaataaaatcttcatactgatgcaatcccagagaacttgcctttgggtttgtgattgcaaagtgttgaatcagtctttggtgtggatacagaatatttgaagctagttgaagtgtaggggtgttgggacaggagaaatgatgagatgaagtcttatcagaggctgaaggtcaccggatattttcctagtaaaggttcctttgatgtggaatttatccgtttagcccacctaattggagttatctggtttctgtccctgaagattctgctgttggccctggactacttaattctgtttgctcaccaaatcggtgacataagttacaagttatgagatttaatgtttagagtatggttttggattataggttccttgcattcttaagttagcagaaggaaaccaagagaagcagcatggtacaaacaaaaccccaaacaagtgctaatgtcagagagacctgggttcaaatcctagctatgccacatataagttttatcatgagagtaaattgcgtaatctcccagaacctcagtgttcttgttgctaaatgtgcacaaaataactggctatcttatagagacgttgtgaagttagagtgagtgaaggtgacatgcctagtaaggacctggcacgtagaagcacacaatcagctttaactgtttctgttattagcagtggacttagcactgtataaatctgtccctccatgcttcccacttgcccatttgtcaaatggacttgacattccttactcagtggttgacagggagccaagtgakatatctgagctgttgaggatggatgtgtatctcaagatcctggcattcagactggggctctacaagtcgcactatatttgcaagttgtagcagaactatattaaaaacatgccctgcctgtttcccctcgttggtcctcccattcagagaggggctttctggccttgtgctttaaatagtcctcagacggtaatgtggatagtagatgaacaca

SEQ ID NO: 20065 - DNA, 1038 bp, Homo sapiens
gaagaggtctgcagcagggaggctggtcagggaagtaactttgcaaaataaaatcttcatactgatgcaatcccagagaacttgcctttgggtttgtgattgcaaagtgttgaatcagtctttggtgtggatacagaatatttgaagctagttgaagtgtaggggtgttgggacaggagaaatgatgagatgaagtcttatcagaggctgaaggtcaccggatattttcctagtaaaggttcctttgatgtggaatttatccgtttagcccacctaattggagttatctggtttctgtccctgaagattctgctgttggccctggactacttaattctgtttgctcaccaaatcggtgacataagttacaagttatgagatttaatgtttagagtatggttttggattataggttccttgcattcttaagttagcagaaggaaaccaagagaagcagcatggtacaaacaaaaccccaaacaagtgctaatgtcagagagacctgggttcaaatcctagctatgccacatataagttttatcatgagagtaaattgcgtaatctcccagaacctcagtgttcttgttgctaaatgtgcacaaaataactggctatcttatagagacgttgtgaagttagagtgagtgaaggtgacatgcctagtaaggacctggcacgtagaagcacacaatcagctttaactgtttctgttattagcagtggacttagcactgtataaatctgtccctccatgcttcccacttgcccatttgtcaaatggacttgacattccttactcagtggttgacagggagccaagtgagatatctgagctgttgaggatggatgtgtatctcaagatcctggcattcagactggggctctacaagtcrcactatatttgcaagttgtagcagaactatattaaaaacatgccctgcctgtttcccctcgttggtcctcccattcagagaggggctttctggccttgtgctttaaatagtcctcagacggtaatgtggatagtagatgaacaca

SEQ ID NO: 20066 - DNA, 564 bp, Homo sapiens
gggtgcaggctgtaatcgcaggaraggaggttcacaaaagtaattcagtcctagagcccaaactgtgttctctactaaaaggaatcaagaccccctagagaaatggctgactccatgtatggtgcaggatatagatcctggaacaccttttttttttttttttgccagaaagcaaggaagccatccaagtccaacaggatcacgtcaaaaggccatgggagtcaacttgaagagatacttattaacctgagacaatatgagcatctaaaacaattaatagtgactacaatgggctcaaatgcaaacaataatctatgagctcattacgatattcaggaaaaaaaactattggtcactacagtggaggttactagtcactaactcattattctgaaaaatgacttaaaatgggagatagggtggagaattaggtatttatccagtttttcctgtacaaatgtaaatgtttagggagattgaagtagatgaaacaagtctggcaaaattgagataactgtttaatccgggtgttgagtacatggaggttcattatatttcttttcc

SEQ ID NO: 20067 - DNA, 564 bp, Homo sapiens
gggtgcaggctgtaatcgcaggagaggaggttcacaaaagtaattcagtcctagagcccaaactgtgttctctactaaaaggaatcaagaccccctagagaaatggctgactccatgtatggtgcaggatatagatcctggaacaccttttttttttttttttgccagaaarcaaggaagccatccaagtccaacaggatcacgtcaaaaggccatgggagtcaacttgaagagatacttattaacctgagacaatatgagcatctaaaacaattaatagtgactacaatgggctcaaatgcaaacaataatctatgagctcattacgatattcaggaaaaaaaactattggtcactacagtggaggttactagtcactaactcattattctgaaaaatgacttaaaatgggagatagggtggagaattaggtatttatccagtttttcctgtacaaatgtaaatgtttagggagattgaagtagatgaaacaagtctggcaaaattgagataactgtttaatccgggtgttgagtacatggaggttcattatatttcttttcc

SEQ ID NO: 20068 - DNA, 598 bp, Homo sapiens
ggttgcaggacaaagctgcctggacgtggagtgtagcagtttctcaacctcagcactattgacatgtggggctggataattctttgttgtaggtggctgtccttgtgcactgtgggatacttagcagcatccttggcttctactcaccagaggccattagcactcccttccaggtgtgacacccgaaaatattttcagcattgcctggggaaagggggcaaatcattcctgatatcatcccttggtattgaagtttcattatccagcaaatatccatccatgctaacaaatatctacatgctaggactgtagtagatgccaggatagggctataaacaacacagaccaagtccccatcatcatggagtttgcaattctagtagagatagaaaaggggtggaagggagactaaagggctgaggggtgccacggtgtctgggcactaaccattccttctcccagctctgcagcacagaawtctgacaaagacggaagtcttcctgaagggtggggctagggagaagacaaagacaaagtcctctctagcaggtaggggataagaaagaggtgggggtgagaggagggaaggctgaaacac

SEQ ID NO: 20069 - DNA, 598 bp, Homo sapiens
ggttgcaggacaaagctgcctggacgtggagtgtagcagtttctcaacctcagcactattgacatgtggggctggataattctttgttgtaggtggctgtccttgtgcactgtgggatacttagcagcatccttggcttctactcaccagaggccattagcactcccttccaggtgtgacacccgaaaatattttcagcattgcctggggaaagggggcaaatcattcctgatatcatcccttggtattgaagtttcattatccagcaaatatccatccatgctaacaaatatctacatgctaggactgtagtagatgccaggatagggctataaacaacacagaccaagtccccatcatcatggagtttgcaattctagtagagatagaaaaggggtggaagggagactaaagggctgaggggtgccacggtgtctgggcactaaccattccttctcccagctctgcagcacagaaatctgacaaagacggaagtcttcctgaagggtggggctagggagaagacaaagacaaagtcctctstagcaggtaggggataagaaagaggtgggggtgagaggagggaaggctgaaacac

SEQ ID NO: 20070 - DNA, 550 bp, Homo sapiens
tccactgtcaccgtcattcctcgctccttttggccccttgctgttctgtaaacacaccaatccctctcctgcctcacagtcttggccctttctgatccctttgcctgaaaaaccctgccctgcaattctacatggcctctctttcccctgcttgggtcttcctgagatgttacctcttcagtgagaccttccctgaccgcaccacataatccacatcccccactccccccacccctgcctggatgatttctgtccttcttaatctgccttgctttttccatagcacctatcaccatctgatagtctgtttattcatacttgattatttgttaattcctgtgtccccctaactagmaaataaacaccccaacaaggcagaacttttcctactttagtgattgctacatcccagactttataacagtgtctggcgcatataaatgcttgaaaagtatttgttgagtgaatagtaaaattgaagttctggactgtcaggattaagactgtcctaggcccggtgctagagggagaatcctaaagaggacgctgg

SEQ ID NO: 20071 - DNA, 554 bp, Homo sapiens
cgcctgatgcctgtgtcagagccacgcagtctctgagtcgtgttcccaagcacaactcacatctgtgaagtacatcagggaaaattaaatragtccaagtaggaaacaagttcagatatatttggaagatattaaaaaaaggaaaaaaaaaatctccaaaaggcctgatctcacctttcactttttatagacaacattttccttctctggttacatcttttcttgaggtgtattagcaacactttgttcatttgacagccatgatatttcttctttagtattgtatgtagggtgaagttcaagttcctagttgctcgacaagttccagttccttggcatagggcatagaggtctggccaggactttgttttctctaattcaatttgtctaaaacacaagaaaagactttgtgggctgaggccgagaagtcgtgcttcatatttgcttgaatcttttggccttacttcactggcagagtctgtgaaagaacacaggtttacttaaaaaataatcttaacttaagcctttccattgtgtgaatttgacaaagaaac

SEQ ID NO: 20072 - DNA, 1131 bp, Homo sapiens
cgcctggctaattttgtatttttagtagagatggtyattcaccatgttggccaggctggtctcaaactcttaacctcaagttatctgcccacctcagcctcccaaactgctaggattacaggtgtgaccgatattaatatttctgatggtcacattgaattccattatgctgatataccacaattgctacagttgttcatttatattatttttaacgtatcacaggctgcagaaaatgtattcctggcttatctctacccatatcattaattatttccataagatacattcctaatgggattggatcacaaccccattcgggattatggcgttccggattgtgtctttagggactgtgatcaaaacctgatcagagagaccaacaggaggagacttaacgggtggcagcaatattctatttcttgaattatgtctagtaatacaggtgtttgctttataattagtcattatttgtatgttcatacacttttctagtgtaagctatattttgcaaaactaggtagcttgcatttctttggtttctaatggcattgactatgttttatatacctattggcctttcagtttttcctcttttgtgatttatttcagctgacttttttttttttttttttaagacggagtctcgctctgtagcccaggctggagtgcagtggtgtgatcttggctcaatgcaacctctgcctcctgggttcaagcgattctcatgcctcagcctcctaagcagctgggactacaggcgtgcgccaccacgcccagctatttttaatttttttttgtatttgtagtagagacagggtttcaccatgttgcccaggccactctagaactcctgagcttaggcaatctgcccacctcggcctcccaaagtgctgggattacaggcatgagccactgcgcccagcctcagctgacagttcttaagaacctgcatgtgccaagtactttataacagtcatgtgaggtgataattgttatcttcatttcacatttgaaaaaactgcagggtgaaaagggatttgccaacggtcacacatagctggtgggactagaagatgcctagtaatgtttgtgctctttctcttcttctattgcttgttctgttccttt

SEQ ID NO: 20073 - DNA, 1131 bp, Homo sapiens
cgcctggctaattttgtatttttagtagagatggtcattcaccatgttggccaggctggtctcaaactcttaacctcaagttatctgcccacctcagcctcccaaactgctaggattacaggtgtgaccgatattaatatttctgatggtcacattgaattccattatgctgatataccacaattgctacagttgttcatttatattatttttaacgtatcacaggctgcagaaaatgtattcctggcttatctctacccatatcattaattatttccataagatacattcctaatgggattggatcacaaccccattcgggattatggcgttccggattgygtctttagggactgtgatcaaaacctgatcagagagaccaacaggaggagacttaacgggtggcagcaatattctatttcttgaattatgtctagtaatacaggtgtttgctttataattagtcattatttgtatgttcatacacttttctagtgtaagctatattttgcaaaactaggtagcttgcatttctttggtttctaatggcattgactatgttttatatacctattggcctttcagtttttcctcttttgtgatttatttcagctgacttttttttttttttttttaagacggagtctcgctctgtagcccaggctggagtgcagtggtgtgatcttggctcaatgcaacctctgcctcctgggttcaagcgattctcatgcctcagcctcctaagcagctgggactacaggcgtgcgccaccacgcccagctatttttaatttttttttgtatttgtagtagagacagggtttcaccatgttgcccaggccactctagaactcctgagcttaggcaatctgcccacctcggcctcccaaagtgctgggattacaggcatgagccactgcgcccagcctcagctgacagttcttaagaacctgcatgtgccaagtactttataacagtcatgtgaggtgataattgttatcttcatttcacatttgaaaaaactgcagggtgaaaagggatttgccaacggtcacacatagctggtgggactagaagatgcctagtaatgtttgtgctctttctcttcttctattgcttgttctgttccttt

SEQ ID NO: 20074 - DNA, 2022 bp, Homo sapiens
ttgcctttgttctcaattaatgtaaaaaaaactcaatgtaaaacaattcaagaaacacagaaatcagctggaaaataaaatccccataatgtcacacctagagataacatatttttcagtgmcccttcccatatgtttttcaaccaaaatgagattagactatacactgttctttttaaaaagtattaacagcatatcacaagtgtcttttatgtcaacaaacacacaatgtgtataatgaatactacaatttgtttagcaaattcttgactgaaggacttttaggatggttctagtttttcacttttataaatcactgtgagataaacattcattcatttattcaaatatttacacctttcctcctcatctcaaaatttcagccaaagctctacattggagaacattgggcaatatattctgaagtaagatatcggaaaaatctgtgccagaggtactaacatacagcagaaccagcctagcaactgtcaggccccatttttaacctcaggcttatataaaatgaaactagaaatctgaaagactgaagagtaccatcgaagtaaagctcatgcttgggtgtctcccgtctccgatagggggaacagtgaatgcttctctccctgctgctgtaaaccaagtgagggaagccccaagaaaaccaaatacagaaattaggaatacctgcaagaaggaaagacagaacttcctccccatgcatgttcatcacgctatggactctgggccctggaactccgtgggtccacagtgggagtggtattgagagagtttggccagtatgttctggaatctggggacagagatagacacagagggtagtgctggcttcctgccaggagaactttgaaagctgtggggccaagaaagggggcagcagagggaacagtcttgggtggggggaacagagcagataaactctgcaggagttttccagatgggcaccgcaaagctggcaggcttatgctttcttgattgggctcccctaagaggactgcttgctcgagcaaggggaactgggcactaaaaaagaggaatgggggggactgccaggcagagctcaaggaaggcatccgaagaggagaagcacatcgttgcccacatgaggaaatgttataggagaaaagtgcctgtacctcatcccaagagagagacagccagcatttgaatgcctgtcatatgttcaggtcaagagaagccagtcaaagtgcaccaactaagcagaaaaactttttttttttttgagacagggtctcactctgtcacccaggctggagtgcagtggtatgatcatggctcactgcaacctccgcctcccagattcaagcaatcctcccatctcagtatcctgagtagctgggtctacaggtatataccaccatgcctggctaattttcattttttttttgtagagacgggatttttccacgttacccaggcttgtctgaactcctaggctcaagcgatctgcctgcctcggcctctcaaattgccgggattacaggcatgagcctactaagtagaccaccatgcctggcatactaagcagaaggacttttgttccatttcctgcaattcctctcctccctgcccaaccttgagggcagaggtagagaaagagcgctggagattacttttatataaacagacttattaaaggcactttttacacagaattacataatccactattatttctatgcaaaagcaaaataatggccacttcctgaaaacaaatacatctaaaatgtataaacatgtatcttcatgagaaacatattattttattcgagtaagaagctgaaatcacaagacagtctttgacattctgccagttttgactttgcatattaatgacaaccacaagtgaaagcctggactcaaagattgtaggagcaggtaaaatcagagctcccatctctcactttgtcagattaaagacacatttatgtgaaaaaaaagaagaggatttcttcaaaatcctgctagttgaatgcatttgta

SEQ ID NO: 20075 - DNA, 540 bp, Homo sapiens
ttttcctcaagaacagcagctgtaggtgatgagtgccatcatgcactggctgagtcatgattcttcaggggatatggaagactgaattagctttagggatctttgtaaaatatagaaaagtatagtacaaagtcaaatatgaatattaaaaatgtactgtaaagatcaagcatgatataaatttattttttcactttagtatatagttttttcaaaatgatagtgtgtctaactagtacttcatcaagttctttcttctaatctatattttcatttgtcattgtttcttccacagaaaaagtttcagagttcagcttcaaagctaaatgtaatcccccgtctcyccttcccctacaatagtaaaatgaagaaagctatttatttccaaattttattatgaatgcatttcttaaaaaagaacatgggattttgttcctaactaatttggctattaaaccttctcttggtatgaactaaacatgctggtgtttcattctcaggaagttataggtctgattcctacaaggccttccttgaaag

SEQ ID NO: 20076 - DNA, 1161 bp, Homo sapiens
tttgctgtctgtgaccgcatcagtccataaaccaaagtcccactacttagaggaaatgtggcctgtggtcttgtctcactgaacgggccttgactgcctctgaaaactgggttagtctctgcacggacaaaggcttgtattatctccactaaagacagggaggcccaccaaccagtcagtatactctatctccacagtctagggatatggtatatttttaacactgggatgtattccgtgactaggaaacattgtggaggggtggaaagagtataggctttggagacagaacagctacacgatcttgctcaataatgatgcatgtttgttgaatgtttactatgtgctaggcactgtactaaatggtttacaaagattatctcatttgatccttaaaacagtcagtcttctggggtagtaactatagtttcatctgacatgtcaaaaaactgaaacttaggttaaaataacttgctcatagccctggctggtaggtagcaagctgggatcctaacccagtctcatactttccaggtcctcacccttaactgcaacttgtcagcgtcctaaggtacttgaccatgcagcctgttccctaatctttaaaatcaggcattctggaaagttgaggatttggatatggtttgtaagtgcctggcacgcagtcagaayttaataaatgataccgttctcattcatagagaagctcaggtgtcatttttattctatggttttaaaatgaaataatcttggttagtcacttacaactttgacgactttaaccacctgatgaaacctaccagtttctgcagcctcaggtctccataagggtcttcttaaattggctcctcctcatttcaccaccagcttttggggcccaaggtcctaaggttgtgttcttgaagccaagttcccacattaatccatgttaaccacatgtggttaaacccctgtttaccatatacagatctatcaggcttggtgctacagagatgaggaagacagtccaggcctcccgggggcttagagcttgggggtgagagtgggggtggcagacgttaacaaaatctcccatgcagtgtgatcagcattggcactgcgctgctgtcaccaaggttgatggcctcggattcccctctgcatccaccggtgggacagctg

SEQ ID NO: 20077 - DNA, 1161 bp, Homo sapiens
tttgctgtctgtgaccgcatcagtccataaaccaaagtcccactacttagaggaaatgtggcctgtggtcttgtctcactgaacgggccttgactgcctctgaaaactgggttagtctctgcacggacaaaggcttgtattatctccactaaagacagggaggcccaccaaccagtcagtatactctatctccacagtctagggatatggtatatttttaacactgggatgtattccgtgactaggaaacattgtggaggggtggaaagagtataggctttggagacagaacagctacacgatcttgctcaataatgatgcatgtttgttgaatgtttactatgtgctaggcactgtactaaatggtttacaaagattatctcatttgatccttaaaacagtcagtcttctggggtagtaactatagtttcatctgacatgtcaaaaaactgaaacttaggttaaaataacttgctcatagccctggctggtaggtagcaagctgggatcctaacccagtctcatactttccaggtcctcacccttaactgcaacttgtcagcgtcctaaggtacttgaccatgcagcctgttccctaatctttaaaatcaggcattctggaaagttgaggatttggatatggtttgtaagtgcctggcacgcagtcagaatttaataaatgataccgttctcattcatagagaagctcaggtgtcatttttattctrtggttttaaaatgaaataatcttggttagtcacttacaactttgacgactttaaccacctgatgaaacctaccagtttctgcagcctcaggtctccataagggtcttcttaaattggctcctcctcatttcaccaccagcttttggggcccaaggtcctaaggttgtgttcttgaagccaagttcccacattaatccatgttaaccacatgtggttaaacccctgtttaccatatacagatctatcaggcttggtgctacagagatgaggaagacagtccaggcctcccgggggcttagagcttgggggtgagagtgggggtggcagacgttaacaaaatctcccatgcagtgtgatcagcattggcactgcgctgctgtcaccaaggttgatggcctcggattcccctctgcatccaccggtgggacagctg

SEQ ID NO: 20078 - DNA, 1161 bp, Homo sapiens
tttgctgtctgtgaccgcatcagtccataaaccaaagtcccactacttagaggaaatgtggcctgtggtcttgtctcactgaacgggccttgactgcctctgaaaactgggttagtctctgcacggacaaaggcttgtattatctccactaaagacagggaggcccaccaaccagtcagtatactctatctccacagtctagggatatggtatatttttaacactgggatgtattccgtgactaggaaacattgtggaggggtggaaagagtataggctttggagacagaacagctacacgatcttgctcaataatgatgcatgtttgttgaatgtttactatgtgctaggcactgtactaaatggtttacaaagattatctcatttgatccttaaaacagtcagtcttctggggtagtaactatagtttcatctgacatgtcaaaaaactgaaacttaggttaaaataacttgctcatagccctggctggtaggtagcaagctgggatcctaacccagtctcatactttccaggtcctcacccttaactgcaacttgtcagcgtcctaaggtacttgaccatgcagcctgttccctaatctttaaaatcaggcattctggaaagttgaggatttggatatggtttgtaagtgcctggcacgcagtcagaatttaataaatgataccgttctcattcatagagaagctcaggtgtcatttttattctatggttttaaaatgaaataatcttggttagtcacttacaactttgacgactttaaccacctgatgaaacctaccagtttctgcagcctcaggtctccataagggtcttcttaaattggctcctcctcatttcaccaccagcttttggggcccaaggtcctaaggttgtgttcttgaagccaarttcccacattaatccatgttaaccacatgtggttaaacccctgtttaccatatacagatctatcaggcttggtgctacagagatgaggaagacagtccaggcctcccgggggcttagagcttgggggtgagagtgggggtggcagacgttaacaaaatctcccatgcagtgtgatcagcattggcactgcgctgctgtcaccaaggttgatggcctcggattcccctctgcatccaccggtgggacagctg

SEQ ID NO: 20079 - DNA, 522 bp, Homo sapiens
agtgtaaactgaggagcggtctatgtgggaggaaaaggaaagttaagcccctcaaatacaggaaaggaaaatattaataaagaaatattctgtttaggaatttcaatagcaaatctagccacagagggttccccactacaaatgtagaatctaagcctggggctcaaggatgggccacacatttcatttaaaaaaaataataaaatccacataacctcataatctaagcagccagagagtcgtatttctccactaaggcgatcaacccggaaaccactttctttcagtaatggtgtttgagaaatgaggaagtaaaggacttgagaatttggagtgttttcttcatccaaatcgactgctaacatctgaaaaataggttgccctagaaagaatttttaaaaattgttactatcagataaagktagcctatcaaaccagtaagaggatgaattatttgctaaatggcattggggcatataccaaaatgagtggaatgtttaaatataaaataaactatggaca

SEQ ID NO: 20080 - DNA, 533 bp, Homo sapiens
taagtgaataaacattgatgaaggatggggagaaaatataagcaacatttaaattatctgtgccatccccaaggtccttagagttgtgctggttcctgtagtttgttttatttttatttatttattttttatttctgagagctgccagtttttgcttaagcttatgtgagttgagtttaagtcacttacaactcagaaagtcctgacctttgcagtcattaaaaagatatgcaataatatttcataaatttgttaatatctcatctcatcattcacgctgccagggctatgggtagggtttctattgtctcatactctctgccrttcgtaaaactcatcatgccagtcattcttccactctattgagccataattctatacattttagcacattattttcggatttaatattctttaatggcactgcagaccaaatttttagacctgacttgtgttaagatttgactcttgcatctcctttatcatttctcaccatttttctatatattttatgcttaagccacaccttaaaa

SEQ ID NO: 20081 - DNA, 579 bp, Homo sapiens
agggatttgaagccttacccctaagaaataaggtgggaagtctgggggcggtggctcactctctcagcactttgggaggccaaggtgagcgggtcacgtgaggtcaggacttcaagatcagcctggccaacatggtgaaaccttgtctctactgaaaatacaaaaattaaccaggcaaggtggcacgcccctgtaatcccagctactcaagaggctgaggcacaggaatggcttgaacttgggaggcrgaggctgcagtgagcagagatcgtgccactgcaccccagcctgggcgacaaagtgaggatctgtctcaaacaaaaaaaaaaaaaaaaagaaagaaataagatgagaattttaggcatcaacttcggagaggaaagaaaaattatttggaggtgcaaattcctttggtattagtaaaaattgactcacatgggccgtagtctccaccatgtccagtaaatgtcatcttcctctgttgctaatccttctgcttatatatatttgcttaatttttgccctgaccaccaggaaaagatttcccaagttccttttttctcatgtaaacaatttgta

SEQ ID NO: 20082 - DNA, 597 bp, Homo sapiens
ttgagattcctcataggttccttcacccagtggatttgcttttccctcagttctgcaatttccaacattctaacaccaagaaaccaaggttgtactagattctgcaggattgtcataggcagaaatactactatgggagcatgtactgataatgggcctactcttggtgattatttggatccacaagtgctatcagaaataggtatcacctgtaacctcaataagtaaataaaactataaattctaatggcatacrttcttccaaatataaatagtaatactttgttattatttttacctttgactactttttaattttattattgactaaaaatataattatatataagcagttagaacctcccaaaatgttagatcatttaatttctgaagctgtgacagacttcatggaatttgtcttatatgctcaaagtcatcttaaatttcacagatcatttacatgcttaacagtaaaacagggatcaattaaaactctatctttttaatagtaaatttctaatcttatacattcttatgattgtaaatgacagaataactttcaagtttgggatatgcatagagcttgactattgatga

SEQ ID NO: 20083 - DNA, 597 bp, Homo sapiens
ttgagattcctcataggttccttcacccagtggatttgcttttccctcagttctgcaatttccaacattctaacaccaagaaaccaaggttgtactagattctgcaggattgtcataggcagaaatactactatgggagcatgtactgataatgggcctactcttggtgattatttggatccacaagtgctatcagaaataggtatcacctgtaacctcaataagtaaataaaactataaattctaatggcatacgttcttccaaatataaatagtaatactttgttattatttttacctttgactactttttaattttattattgactaaaaatataattatatataagcagttagaacctcccaaaatgttagatcatttaatttctgaagctgtgacagacttcatggaatttgtcttatatgctcaaagtcatcttaaatttcacagatcatttacatgcttaacagtaaaacagggatcaattaaaactctatctttttaatagyaaatttctaatcttatacattcttatgattgtaaatgacagaataactttcaagtttgggatatgcatagagcttgactattgatga

SEQ ID NO: 20084 - DNA, 599 bp, Homo sapiens
aagtcagagttgactttattggtggatcctaagctttgttgtacattttattttttaaaaatctcttcggtgcctctgtattagtcctcagaaaatttaagaatcttctggttcctgaaggtttccatattttatgagtatgcctgaaactaatctaaagtgttactgctttattgcacttcctttagccaagactgagtgaaacaaaaacagtaggacaaattctgaatctgtgtcattcctgaggcaaggccactgaggcaagcactttggctgtcctcatctgtaaagagctagcataagcatcctagtgtatgggctttgattgtcaaaatgccatcacccacttcaacagggggaaatgctcactaggggcctggcactccacaaggcgtatttgtgtatttaattctatcaagagccatgtgagatgtattattatccccatttacagaaatgaaaactsagattcagagaaaatacgatttatagtaagcttgattcaaatgttagtctgactgactacaaagcccatatcctttcccttaccccttccttcaagctacttgaagaaccaactatatatatattttttgtca

SEQ ID NO: 20085 - DNA, 1461 bp, Homo sapiens
tctagcaccgctgggttagggtctgccygaccaagctggtctcagcactgggcagtcatttacaagtgatttttattttgttagattttccagttttttattgtaaacatatttcacagtatccctgtaacaatgtcacttttaagaaggggctgacatcagcatgctttcgccatctgctttgggaatataagtgaggctctgggtcagaaacagttttgttttgttttgagacagagttttgctcttgtcgcacaggctggagtgcaatggcacaatcttggctcactgcaacctccgcctcccaggttcaagtgattctcctgtctcagcctcctgagtagctgggattacaggtgcccatcaccatgcctggctaattttagtattttttgtagacacagggtcttaccatgttggccaggctagtctctaactgctgacctcaggtgatctgcctgcctcggcctcccaaagtgctggggtaacaggtgtttttgatgatcaaagggaaaagaagagacataactttctttatactggcttaatccatctttcagccttaaaattttggatgttatcaatatgtctaggttttgatgttaactatgtttggtaagaaacatgttaaaatattaaggtagaagcttttacttcttcaaactgaagaaatgtcactcaattctctttccctggcagggctgcatgaaaagctctggaatgagacagtcctgtttctaaccaggctctaccacgacccagctgtgtaactgtgctcaagacacccaatccttctgagcttctgtttcccctctgtgtgatgaggaagacaacacatattccctggtgtccctgtaaagactgaataatgtatggaaacatctacaaaagcacaaagttgagactctgacatgggcgttcaataacttgtagctattattttcatcccagagcaagcagtatctgaacacctccttattcaacccattttctctgccatgctttagcgtaatagtaacaacaatagattacatttatttaagcacaactgaagagtcactgtgcacagacagttgcccaagttaactcacttatgacaaagagactagaaactgctattaagacatactgacagttcccccggcaaaaggttcaataggctataactatcatggctttcccaggccactcagaggcttccatgtgtgatgccaacagctttcagagagaatgtacaagaaaatatactaatttcatcaattctggatttatttcacaggtcaacgtgaaaggatttactgatgagttagatgtatcaacagatctgtctagatacaagcatatttagacaatctaaaattttcacgtggagtaaaccactatggagagagagagtgaaagagagagttgtcttagggcaggtgcttggagctaatctagttgagcgacccatcctgaggc

SEQ ID NO: 20086 - DNA, 1461 bp, Homo sapiens
tctagcaccgctgggttagggtctgcctgaccaagctggtctcagcactgggcagtcatttacaagtgatttttattttgttagattttccagttttttattgtaaacatatttcacagtatccctgtaacaatgtcacttttaagaaggggctgacatcagcatgctttcgccatctgctttgggaatataagtgaggctctgggtcagaaacagttttgttttgttttgagacagagttttgctcttgtcgcacaggctggagtgcaatggcacaatcttggctcactgcaacctccgcctcccaggttcaagtgattctcctgtctcagcctcctgagtagctgggattacaggtgcccatcaccatgcctggctaattttagtattttttgtagacacagggtcttaccatgttggccaggctagtctctaactsctgacctcaggtgatctgcctgcctcggcctcccaaagtgctggggtaacaggtgtttttgatgatcaaagggaaaagaagagacataactttctttatactggcttaatccatctttcagccttaaaattttggatgttatcaatatgtctaggttttgatgttaactatgtttggtaagaaacatgttaaaatattaaggtagaagcttttacttcttcaaactgaagaaatgtcactcaattctctttccctggcagggctgcatgaaaagctctggaatgagacagtcctgtttctaaccaggctctaccacgacccagctgtgtaactgtgctcaagacacccaatccttctgagcttctgtttcccctctgtgtgatgaggaagacaacacatattccctggtgtccctgtaaagactgaataatgtatggaaacatctacaaaagcacaaagttgagactctgacatgggcgttcaataacttgtagctattattttcatcccagagcaagcagtatctgaacacctccttattcaacccattttctctgccatgctttagcgtaatagtaacaacaatagattacatttatttaagcacaactgaagagtcactgtgcacagacagttgcccaagttaactcacttatgacaaagagactagaaactgctattaagacatactgacagttcccccggcaaaaggttcaataggctataactatcatggctttcccaggccactcagaggcttccatgtgtgatgccaacagctttcagagagaatgtacaagaaaatatactaatttcatcaattctggatttatttcacaggtcaacgtgaaaggatttactgatgagttagatgtatcaacagatctgtctagatacaagcatatttagacaatctaaaattttcacgtggagtaaaccactatggagagagagagtgaaagagagagttgtcttagggcaggtgcttggagctaatctagttgagcgacccatcctgaggc

SEQ ID NO: 20087 - DNA, 1461 bp, Homo sapiens
tctagcaccgctgggttagggtctgcctgaccaagctggtctcagcactgggcagtcatttacaagtgatttttattttgttagattttccagttttttattgtaaacatatttcacagtatccctgtaacaatgtcacttttaagaaggggctgacatcagcatgctttcgccatctgctttgggaatataagtgaggctctgggtcagaaacagttttgttttgttttgagacagagttttgctcttgtcgcacaggctggagtgcaatggcacaatcttggctcactgcaacctccgcctcccaggttcaagtgattctcctgtctcagcctcctgagtagctgggattacaggtgcccatcaccatgcctggctaattttagtattttttgtagacacagggtcttaccatgttggccaggctagtctctaactgctgacctcaggtgatctgcctgcctcggcctcccaaagtgctggggtaacaggtgtttttgatgatcaaagggaaaagaagagacataactttctttatactggcttaatccatctttcagccttaaaattttggatgttatcaatatgtctaggttttgatgttaactatgtttggtaagaaacatgttaaaatattaaggtagaagcttttacttcttcaaactgaagaaatgtcactcaattctctttccctggcagggctgcatgaaaagctctggaatgagacagtcctgtttctaaccaggctctaccacgacccagctgtgtaactgtgctcaagacacccaatccttctgagcttctgtttcccctctgtgtgatgaggaagacaacacatattccctggtgtccctgtaaagactgaataatgtatggaaacatctacaaaagcacaaagttgagactctgacatgggcgttcaataacttgtagctattattttcatcccagagcaagcagtatctgaacacctccttattcaacccattttctctgccatgctttagcgtaatagtaacaacaatagattacatttatttaagcacaactgaagagtcactgtgcacagacagttgcccaagttaactcacttatgacaaagagactagaaactgctattaagacatactgacagttcccccggcaaaaggttcaataggctataactatcatggctttcccaggccactcagaggcttccatgtgtgatgccaacagctttcagagagaatgtacaagaaaatatactaatttcatcaattctggatttatttcacaggtcaacgtgaaaggatttactgatgagttagatgtatcaacagatctgtctagatacaagcatatttagacaatctaaaattttcacrtggagtaaaccactatggagagagagagtgaaagagagagttgtcttagggcaggtgcttggagctaatctagttgagcgacccatcctgaggc

SEQ ID NO: 20088 - DNA, 535 bp, Homo sapiens
cagaatgaggtttgggaattttggtcctctggccagacactatcagatagtactctgattccaccatttttgaaattatatacaacaaattttaagtattgtttattttggagagttcaggttaaaggaaatgaagactattattcagtattatttctgtaattttgtaattttaaccataacataggtttcttatcaaaatgtatggaagccagaaagcagtgaagcaacaatattttctccaaaacaaacaggccaaactttggcaggagtgacaaatctggcatgcaatggtggcttctatatcagaaatcaagtcttttactttgtgagaggcmggagtttttagttctttgtcttccttttggctgccagaggaattgaacattgtgaattcattggcatagtcccaagaaactttacttggcaagcaagctattgattttggcgggggtgggatggtgtttatcagtcacccctactagcagagatgtgataacactgcagtcagagtagttgagttttaaaattttga

SEQ ID NO: 20089 - DNA, 798 bp, Homo sapiens
ctggaacatggtaaatatttgatcagtgttcttattattgttatggttaggaaggcgctagcaagagcaccattgtacttccagagcacattccattttccagcaagtggtgctttaatagatttctagtgacttgagagtgacttccctaagcatcttgcattaaggaaatargaccttctgtattctaaaaacaccatccaataagggattttcacaatttacttgtaggacctttgttacgtagaaccttcagtgtctgctatgtggcccattaggaaaataataaattaggaaacaaaagactttatagtgtctgttactagtgctctataaaggccgatataacatttggcaagtaccttctttttctatcagatgatgcttttaatacttcatgtcaatactttcagaaaaaagtgaaatcatttcattaaacacttctttcctatttctgatttttgagttgaaagctcttaattttgaggatttaacataagaacaagtcaagggaatagaaattatctagaaaactattagctagcatagagaaaaacaagacttacagccaaaagaagaatgtgcaaataatttgggaaatgtttaaatagaaatttaaaaatggggctggtggagtcatgttgatgatttcggagttaatcatttctgcgtattaaattgtttccagcattttctagctgaagttactgttgttgtcaactactcagcatccaaaattttcacaagaaaacaaggttttttctcttcaaattacagtccaaagagtggcaaacaaga

SEQ ID NO: 20090 - DNA, 528 bp, Homo sapiens
tacccatgctggagtgcagtggcacratctcaactcactgcagccccaacctcctgggctcaagctctcctcccacctcagcctccccagtagtcaggaccacaggcaggtaccaccacaaccagctaatttttgtattttttgtagagatggggtttcaccattttgcccaggctagtctcaaactcctgggctcaagggatccaccgaccttggcctcccaaagttctgggtttacaggtgtgaaccaccatgtctggctggtgactgacatctttgaccccagcagtgagtgcggtcatttggttcaaggaggcaggaaaatgtgccaagtaactgggcgctcccacatcttggaaatttaaaatttgattattgacataaaaattcaacaagggataaatccagaacaggatagataaagccaagagaaaataaataagctgaaagattgtgctattatgaaatatatatttggtcttcaaccccatttcctgacatacaactcctaaaatccttagaaacacc

SEQ ID NO: 20091 - DNA, 528 bp, Homo sapiens
tacccatgctggagtgcagtggcacgatctcaactcactgcagccccaacctcctgggctcaagctctcctcccacctcagcctccccagtagtcrggaccacaggcaggtaccaccacaaccagctaatttttgtattttttgtagagatggggtttcaccattttgcccaggctagtctcaaactcctgggctcaagggatccaccgaccttggcctcccaaagttctgggtttacaggtgtgaaccaccatgtctggctggtgactgacatctttgaccccagcagtgagtgcggtcatttggttcaaggaggcaggaaaatgtgccaagtaactgggcgctcccacatcttggaaatttaaaatttgattattgacataaaaattcaacaagggataaatccagaacaggatagataaagccaagagaaaataaataagctgaaagattgtgctattatgaaatatatatttggtcttcaaccccatttcctgacatacaactcctaaaatccttagaaacacc

SEQ ID NO: 20092 - DNA, 528 bp, Homo sapiens
tacccatgctggagtgcagtggcacgatctcaactcactgcagccccaacctcctgggctcaagctctcctcccacctcagcctccccagtagtcaggaccacaggcakgtaccaccacaaccagctaatttttgtattttttgtagagatggggtttcaccattttgcccaggctagtctcaaactcctgggctcaagggatccaccgaccttggcctcccaaagttctgggtttacaggtgtgaaccaccatgtctggctggtgactgacatctttgaccccagcagtgagtgcggtcatttggttcaaggaggcaggaaaatgtgccaagtaactgggcgctcccacatcttggaaatttaaaatttgattattgacataaaaattcaacaagggataaatccagaacaggatagataaagccaagagaaaataaataagctgaaagattgtgctattatgaaatatatatttggtcttcaaccccatttcctgacatacaactcctaaaatccttagaaacacc

SEQ ID NO: 20093 - DNA, 528 bp, Homo sapiens
tacccatgctggagtgcagtggcacgatctcaactcactgcagccccaacctcctgggctcaagctctcctcccacctcagcctccccagtagtcaggaccacaggcaggtaccaccacaaccagctaatttttgtattttttgtagagatggggtttcaccattttgcccaggctagtctcaaactcctgggctcaagggatccaccgaccttggcctcccaaagttctgggtttacaggtgtgaaccaccatgtctggctggtgactgacatctttgaccccagcagtgagtgyggtcatttggttcaaggaggcaggaaaatgtgccaagtaactgggcgctcccacatcttggaaatttaaaatttgattattgacataaaaattcaacaagggataaatccagaacaggatagataaagccaagagaaaataaataagctgaaagattgtgctattatgaaatatatatttggtcttcaaccccatttcctgacatacaactcctaaaatccttagaaacacc

SEQ ID NO: 20094 - DNA, 848 bp, Homo sapiens
ttttttcaatcacagtttcatattcaagttgaggtaatcacagttttttctctaagaggagaggagttgggacagtggggcaagttggtgagagagcatttctgtgaagagaaacmaagaccaccacgtagtacagccccacatggtgagaagacccgctctcacgggcgggctccgacccctctttaaaaactcttctgcagcagccagactgccaggccagtgcagtcaggaaatggctcaagctcctaaagctagagctttcatttaaaacttcacagcagcccacttagagaaatggcctgtggttcccaccccccaaccccttttctaaggctgctcaagtttgagtttttaaaaagagttcggtagagctaaaggaagctacagtaactcactgcttattaatcaattgcacttaagatctatgttactgattctgaagcgaggcaagcccttgacggaccgcagcctctggccagccagaagtcagggggctcccagacttaggttccacagtggggcccttgtcatcagtggcttttggagctgggactggagcacgtgggtcttttcagaagcccttcttgatgcaaaatttcttatcaatggtatctggagttttgttcatttggcttcaaattgttttttttttttttctaatatattttactgacaagcccttgagagctgctttgctacttgcatgcaggcctctgtgtgaccaggcacacagactacatgtgctccatcttgtctctccgctgctccaggggccttgctcaaaaaccccctatattactggaaactgctggttttacctatgtgcttcttcctaaggcatgcaa

SEQ ID NO: 20095 - DNA, 571 bp, Homo sapiens
ctttttatagtttctgcataataatcagagcttctctgaacaactactaagtacgtgatgactaaaatttaaaaattgacaatattaatgctaacaaggatgcggagcaagaacttttatttttaatggaaactcayaatggtgcagcttattggtattaatctaagtgagttggaaacttatgaccataccaaatcctgcacacaaatgggtataacagctttattcattgttgtcaaaatttggaatcgaccaagatgtccttcaatagtgaatgaattttaaaaactatggtacatctatacaatgaaatactcttcagcaatgaaaataaataaaaccacaaaaagatacggagttatcttaagtgcatattactaggtgaaggaagtcaatctgaaaaggctactgtgtgagtcctactacatgtggtattttggaaaaggtaaaactatggagtcagtaaaaagatgagggtttgccaggagttcctagggaaggagggatgagtagatgcagcagggaggattttgagggcagtgaaactattttctctgatactataatgata

SEQ ID NO: 20096 - DNA, 537 bp, Homo sapiens
ctgactgaggactgcagatattcaaggcccgtgttctgacttgatgggtcttaatatgccaaagagaaatgaaagaagcttcattgcttagttggaaaatattgagagacacgagcttttgaaaattttgtatcacataatttctttaaagttttgctttcttatttgaaatatatttattccttgatgtcaagtcaaccgctccattttaaacattagagtagaactgaaaattgatccttgcttaactttttctttattcaaaagagcctcattgaatattgtcagagagtagttttgagaagaggctatgaaactgcaagtctttccaagttgacctttctggtgaagcggtgatctgatgtcaccagataagagtaaaacagtttatgctttgtgcttttaaaatgggttataaacaacatgagtttgactttattaaattaacttttcttttctaacaaacaccatctgtttaagcttggcaagtcttccacaggaaaaaatttraaaaatatgtatcctgaaatagaaaag

SEQ ID NO: 20097 - DNA, 912 bp, Homo sapiens
tctgtgggtcctaaattttctcctttctctctctctttctgtgtgtgtgtgttgggaaaatggcaagtttccaataccagctttggaggaacgattacgttttccctccaatttcaagtccgaaagaccagagccctcattccaaagccccccacccagatggattttttcgtttcatttgtcatccgtcccatgggagggccccatgtctcctcagaacccatcctggaggcagcaggtcgggtagagtgagtttggcctgctcatgacctccacccctgagattgtgaacaaggrtgtctggggcgatgctgagaatgtttttgaagctgctcccagatgacgctgatgatcacaccagattgagtgctgcgatcgccttgagtccaacctctgcataaacgaggttctcataaacaagttcactctaccctaagctaagtctatgtgagcaaacccacttcatcctttgtacctggagacctggttacactaacctgatactgacctgttcatgtagctggaatggtgtgtttcatgcagtgtggaccaagcaatggcatggggtgtgtgtgtgtgtgtgtgtgtgtctgtgtgtgtgtgtttgtgtatgcgttcacacttgtgtgtgtatatgtgcatgtagatgctgcataaatgatttttgatgtcaaagacaaacacattccattgttttaaatattctattatgtaaacaatacgcagagggaccatatctactcttgtcatattatttgtgatggtaaaacatgcatttgcaataaattaagctttctgggaaggcaagcagtattggagccaaacgactgtctcggaacatgtgtgtgttatctcggttcatatcaagtccaaagctaatggagccttccccgccatccagggaggaacacc

SEQ ID NO: 20098 - DNA, 1265 bp, Homo sapiens
ccccggctcatgctgctgagcctgtgcttggtgtcgctctgtgaaatggacccaacccacagtcctctgtgttcacaccccaccatgacctccctttccttctctgtgaattcattcccaccctgaatccccacccaaagcccctgtggcaagctgacctacttgatmtcaggcccccaccgccagcctctctgctgctcaccatgccccctcctcttgtttctctgccgcctgcttctgtgagaaatgtctactggtcatagaacgggagactcaaggcagattgagggaaagtgtactcagaaagtgtgagagcattggctgggtgtcgtggctcatgcctgtaatcccagcgctttgggaggccaaagcaggaggttcgcttaaggccaggggttggagaccagcctggacaacatagcaaggctccatctttacaaaaaaagaaagaaagaaagtgtgagaacatgaaagggagttttggtctcaagcagaggaccctgtgcatctgggtcaccatctcccagaagcagagcgatgatagttttgacctgagagacaggagctggctctgagtcctgtattcctttgacgcatcaagtgtgccctggctgccgagattcccgccccgcctccgctctgcctcctggccagccctcacctctccgtctctccgtgccttcccctccaggcccctttggccactgccgcacccccctgcagtcccctcctgaaggcgccctccccggctggccccttacacaagggcaagaaggcagtgaacaaagatagccttgagtaccggctgaggcgggagcgcaacaacatcgccgtgcgcaagagccgagacaaggccaagaggcgcattctggagacgcagcagaaggtgctggagtacatggcagagaacgagcgcctccgcagccgcgtggagcagctcacccaggagctagacaccctccgcaacctcttccgccagattcctgaggcggccaacctcatcaagggcgtggggggttgcagctgaggctggctggtggattgtgggcaccaggctccctggcacggcctaactctgcggacccccatcctgctgggggcctagaaccctgagacatagaccatggataaatggcaaccggggtggcaaagagggcaggacccagcataatgattatatggctgaataaagttgcactgtgactgggtgttgggactgttggctgtgtgtgtgtgtgtgtgtgtgtgtgtgtgtgtgtgtgtgt

SEQ ID NO: 20099 - DNA, 595 bp, Homo sapiens
gactggcgatcagcagagacctcacatctgctctggatggtgcacatggagagaagtaaagatgacctttctccccttcttaacttggagttgtgcaatggaatgargcaagaggctttgtttgcctagaatgtgaattattggccatcttccctcgggcctttagatacaaggactcaaatttgtgaagcaagcttgagtttccgttcctgtctcttctcgcctttctgagtactgtgtaatcatcgtgcagagataattgagattctggttgcaactgaaatctctgctcttccggaagtttcccttgactttgggattctccagttaatttttgtaagtatattctatggagatataaatgccctaaaaaagactgccatgcaatggaaacctctggttttacaaaggagattccagctctattgagaaagagcagagaacaaatgtggaaaaaatacaaagacacaaccccacaacagcaagagtgaagagtttggaagtgatacatgcaacagggcaattgtttggcaacttccttcctaccaagagccaaaactgcaagaccaagctaggaagagtacacagcgaatca

SEQ ID NO: 20100 - DNA, 592 bp, Homo sapiens
tgcagttttgttttttttttttactttcatcttactttgctccaaaatggggaagagcttattatcatttttcacccttttcttaaactataaattttccccttatctacattaactttgatctattttgctttgtattgacaaacccaactatgtttttaaattacagtgttgctcccaaatttagaagatccaatttggttttggctccttatttgatatctgagcactcttctgactgcctaaaaaagaaaaagaaggtagtctaacttattcttcctactccagaggaactctgaagaatgcaaaagcctagagcccttgatactacaaatggatttccagtgcactagatgaaaaatagcaatgaagagtagaataaagacaaaaactgtctctagagccttttactttatgtcctctcctagtttccccatttgagctgacagtgagcctatcgcctatataatattctgaagtattttcccttttatcagtgccagtatctatttcttctggaatkttctaagatctaagaggagagagaagcatttatgtttaattcacgatgttaaacataagtgagtcattt

SEQ ID NO: 20101 - DNA, 554 bp, Homo sapiens
tcatattaaattttttcttttaaaaattgggttcaatgaattatctaggatgattgcattgtttgtggcatcaagtgttgtttctccctttccataccaagcatatcctgcttttggtacaggatatatttttttcagatgtcaaaacacctagggatacattttatgaattactaacttacttttttaggacagacttgaaatcatttagagggtaaactctagcaatatagaaatctgttttttgttgaatggagtagcagctaatctttaagacccattgatagcattttagtagyagcacttaacattcagaaaagaaaaacaaatcatccagcttctgatcttcagttttatgtaactttacaatttggtacttgatgacttggtattggtatgagactgaatagtgtgatgttacaaacatgtgatgtttgcctaccatgttctaggcactgtgccaagtgctagagatggaatggtaggtaaagctgtggtctatacttagggagttcacagtcaaatgaaggatacagtcacaaaacagacacttg

SEQ ID NO: 20102 - DNA, 555 bp, Homo sapiens
tagagaaaggtgaaatctatacctgatccttaacattaaaagcagmgtcatcctaagactatgcattccaaaagggcagtgtatccccaggtcctaacacagtgcttggcacgtagtaggacctttatttgataaacgttgatttaacatttatttattcagtaaccatccactaataaatgagtatatgaattaatgaaataatcaattgctgaatcagtaaaaattattatttttattatttttgagacagagtcttgctctgtcacccaggctggagggcagtggcgcaatatcagctcactgcaatctccgcctcctgggttcaagcgattcttgtgcctcagcctcccgagtagctgggattacaggtgcccaccaccacacctggctaatttttgtatttttagtagaggtgggtttctccatgttggccaggctggtcttgaacttctgggttcaagtgatccacccacctcagcctcccaaagtgctgggattataggcgtgagccactgcgctcagcatcttgaatattaataatggaaggtggca

SEQ ID NO: 20103 - DNA, 548 bp, Homo sapiens
tgcccaccttggcctccgaaagtgctggaatttcagacgtgagccactgtgcccagcctcctgacttgtttttgtatttggacttttccacatcttccaacagctctgtaaaaatatgtccatccaattgcacccattcttgctattttagctctatctgagcctccttccacttcagttggactggcctggggcactgctgtcrctccagagtctcccgtcatgatcatcctgagggttttccttgcccctcttctggatgggcatcctccttggcaaggaacatccttcctgttcctgcattccagatcttcagcttcatcattttcctccctgcttttggtggaaaacaccctgtgacatcttaaggaagcaatacctttttgagattttaaatatctgaaaatatgtttatttcaatcttacacttgattgattgtcaagttgggtatacaaatatgaatggaaaatcatcctcaatcagaattttgaagcaatgattccattgtcttctagcttccacattttctattcagaagtccagggcc

SEQ ID NO: 20104 - DNA, 539 bp, Homo sapiens
agtcttaaccactttgtgagatacagcttaacaaatatgtacayacatagtgaacctaacttttttaatggggacaactttattgtccccatttaaaaaatatgaaaactgaggcatagagaagtgaaatgactttccaaggtcagttagtaggcggcagagctggattcacacctggcagtgtgtctccagatactccctctctgttactcgccaagatgccctgcaagccaaatgccatctcaaacactgatgacaggtgtattcatattttgaaattaataaaactgtgagagatagagttgaatgtgaaaggtgcaaaactgcccatttaaggccttcaagttttctggatatagagtgctttccttttcattcataggattggttcataatctttaaaaaaatataatgtttgcagactgggtacagagaattgaaaaggaaggcatgctagttacttggcatgtagcaggacttcgaattgacaggtggagaatctgaggccagagcctcattgccatgtctcttcctgcagc

SEQ ID NO: 20105 - DNA, 578 bp, Homo sapiens
ctcctggtaccctmgaacacttcagaaacacacacaagtcaagtccctcgatggctacactaggcgcctatggctggagcctccttggcacgagcgcaccatccgaggcacagctgcacttctgcaccctcatgttgggcaggctgaccacctggggcctggtcctgcctccctccttgatgctgacgatcatgggcagcgagtcagtctccgaggcgatgcactgtcgaggccccagaaacggccacttgaaggccagggcctccgggggctgccggcaggtgcccacacactcataagccaggaagcccgggggctccagcacccagttctcggcccacttcatcccctgcaggtcaatgtacatctcctggcggcagcagcgggtgccctcggtcattggtgcttcagggtcacagtcgccctgagctctgtgtgggcaaagagagcagggtcagcggtcagctgggagggctgaggtcagagggcgtctgggatggagatttatgatccacctctcaacttcaaaaagctggatgtttgtgatataggatggacagctagaaataacttgaaaa

SEQ ID NO: 20106 - DNA, 536 bp, Homo sapiens
gtttccattatgtttgctgacccagaggcagccacagcttcactccagaattgggaaactttattttctttaaagagagaagtttatgttacagtgccactgtcggattatctggctatacagtggttttccctgctactgtcctccctgtgtcaacttcaaactctcatttgaagtggactttctttaaactccaaackgatgataggtggcaaggagtggtatgggtgttcccctccgcatccaccaagatgctcacagatttttggcacccattaaaccacgtgagggccccatgctccacctcaagtcatgcatgcttccagggatcacagcgacctgcccttctaacaagaggggcagggctacagagggagagcagtggagctcagaacctgggatcccaccacaggaacccctcgttcagggacacgtctgtccactgttggacactacaactgcctaaccgccaaggcaagctgcaccctccacccacattcccgatggctgcccactactgggatccccattctgac

SEQ ID NO: 20107 - DNA, 536 bp, Homo sapiens
gtttccattatgtttgctgacccagaggcagccacagcttcactccagaattgggaaactttattttctttaaagagagaagtttatgttacagtgccactgtcggattatctggctatacagtggttttccctgctactgtcctccctgtgtcaacttcaaactctcatttgaagtggactttctttaaactccaaactgatgataggtggcaaggagtggtatgkgtgttcccctccgcatccaccaagatgctcacagatttttggcacccattaaaccacgtgagggccccatgctccacctcaagtcatgcatgcttccagggatcacagcgacctgcccttctaacaagaggggcagggctacagagggagagcagtggagctcagaacctgggatcccaccacaggaacccctcgttcagggacacgtctgtccactgttggacactacaactgcctaaccgccaaggcaagctgcaccctccacccacattcccgatggctgcccactactgggatccccattctgac

SEQ ID NO: 20108 - DNA, 580 bp, Homo sapiens
tgaattaatgctgtgtcactttggaaaaatgatttctctgtgcctcagtttttgttgtttttttactaaaatgagaataataggacctaccttttagagttgttataaggaataaattaatccacataaagcatttaagacaatttatggcatcaactataattgttagttgccatgattatcatcatcatcttcatagaaggacattttggaattacaaatggatagattgtattcattggctagtaaatgaaccggcctgcttcgaatacacaattcatactgggaagtagtagaagaatgtgttgaagtcagttggagtccacaccatggtggtcttgaattccaggctaagaaacagttaattattattcttttattgaagaggaaacaaaaaagttatatacaatgtctgaaattgcctaagtctttttttgggggggcaggggaggcagggggggcrgggtaccgagtctcactgtcgcccaggctggagtgcagtggcacaatctcggctcactgcaacgtccacctcctgggttcaagcgattctcccgcctcagcctcctgagtagctggg

SEQ ID NO: 20109 - DNA, 596 bp, Homo sapiens
tgtctccactcctatagtctcctccccttttcagtcttcggcccacttcaatataacccactaacctccccccaaacagggaatgtctgtctcttttttttttttttttttttgagacggagtctcgctctgtcacccaggctggagtgcagtggcgctatctcggctcactgcaagctccgcctcccaggttcacgccattctcctgcctcagcctcccgagtagctgggactacaggcgcccgccactacacccggctaactttttgtatttttagtagagacggggtttcaccttggtctcgatctcctgacctcgtgatctgcctgcctcggcctcccaaagtgctgggattacaggcgtgagccaccgcgcccggccgagaatgtctgtctcttattcacacttgtatcctcaatctctgcatagggcatgatacataaayggcagaaagattatgcagaatttatatagttcaagtcaagaaacgcctatatttaaggagttaatttttttatctaaccaatatttaaagagtttaacttttcatctttatctactttttttttttttttttgagatggagtcttgctct

SEQ ID NO: 20110 - DNA, 570 bp, Homo sapiens
atcatttgttatcaattaaaaagtgtttgcagagtctaacagacattggtctcagtgctaagaatacaacgatggggcggggcacagttcctcatgcctataatcccagcaccaccactttaggaggctgaggcgggagaatcacctgaggtcaggagtttgagaccagcctggccaacatagtgaaaccctgtctgtactgaaaatacaaaaattagctggatgtggtggtgtgtgcctgtwatcccagctacttgggaggctgaggcaggagaatagcttgagcccgggaggcagaagttgcagtgagcagagattgcgccattgcactccagcctaggttacagagcaagactccatctcaaataacaataataataataataataataataataataataataataataatacaataaacataaagctgcagtttctgcacccatggagttggtattctagtggaggagacaattagacagcaatggcaacaacagtgtaatcaagtctagaatcaggaaaatatagcagattataggaacacaaactatagaatgaagtggggta

SEQ ID NO: 20111 - DNA, 1013 bp, Homo sapiens
agaacttgcctctgaaagcctctgtttttaactatgttttcagctgggaaagggcactgaagaccagttacatggaagaccctattttctcctcattgcttcaatgttggacttatgaatgtggtagtctgctagggctgcacaaagtactacagaatgggaggcttaagcaacagacatgtaaattctcacagttctggagaccagaagtctaagactagggtgttggcagggatgctttcctgtgaggccttgctccatggcttgtcttctccttgtgtcttcacatggtctttgtgtgtgtgagcgtgtgtcctagtcttcttttcttacaaggacaacagtcatgttggatgatggcccatccatatgaccttgttttagcttaattacttttttatatagcctatctccaaatatagttttttatatatatatatgtatatttttagagacggagtctcgctctttcacccaggccagactgcagaggcgctatctcggctcaytgcaagttctgcctcccaggttcatgccattctcctgcctcagcctcccaagtagctgggattacaggtgcctgccactgcatctggctaaaaatacaaaaaatatagttatattttgaggtaccgggggtgaggaattcaacatgaatttggtgaggacacaattcagtccatagcactgaggttgaggaagaaactggaagcactggaagagttttgctgcagctccaagggagaaggacacacacctggctgggagcctttgtggcagcctcgaggtctagcctagaaggggttgtaaaagggctgacaaagggaggcctgagcttctggctcacagcactgggtgctgaggtctcccagcaactgactcatcaaccctgaagtcggaggctcttggaagctgaggtcctcctgccctgcactcagccccactcatgatcccctttgatgctctgcaggtagcacatgcaagggagaagggggaaatgtggcaaaggggga

SEQ ID NO: 20112 - DNA, 541 bp, Homo sapiens
acttaccagtgctttcccggggctcctcaaggacctcatggtctgactactttttccatgtaactttcaaaacacctttgctaaaacaaacagatgaaacttggcagcatgcctcggtcacagggctgagctggtacaattttctttttttttcagtcttcgaaaaacagttttcttcatctttctaaatttcaaaatcttgagtgacttagccatttgagcaggacacagaatggtgatgatttttattttatagatgaagaaaaattaaacattcaaaggggctgtaaccttccccttcatcagagagctttgagaggattctccgtgtctctcagttacagtctccaaacctcaactttgtccatggaagcacactccttctctacatagataataatttttgaaccaagttgaaatcaaaccccagcagatttgagcttgtcctggsaagaagcagtgggaaaacggtttccatgggtacagattttgacattagcagctgcaaatgttcaccaccccaagatgacaaaactccagt

SEQ ID NO: 20113 - DNA, 599 bp, Homo sapiens
gacacatctcttgcttttattggtgtgttttgtttgtatgtgttcatgctaaatgagtattgcttgctaggtatttttaaatcaagtaaagaacacagagttgtgtacctcattctgtttttkttttttttttttttttgttgttgttgtttctttgcttgtttttcatcaagcactctgtttttaagctctgtccacattgttctacttgcactcttccaacacattttaattctcccaatgatgttagtctcctacgatgcagacccgagttacctccaactttccgccatgcaaatggtgctacaggaacatcttcaaaaagaaaaacatataactatttgtctaaggatgtatgggcatgtgagtgatttctttgggatatgcactatggagcaagaagtcagacttatagggtattcatctcctatatttgactaaaatatatcagcaatctccactgaatgtaccctagtttcatgagcaccaatgtttgtatcatccagctttctagtttgttagtgttttctttaggaaataacatgttgtaatttaaatttgtgtttattggattattcatggttttgaacattttttat

SEQ ID NO: 20114 - DNA, 599 bp, Homo sapiens
gacacatctcttgcttttattggtgtgttttgtttgtatgtgttcatgctaaatgagtattgcttgctaggtatttttaaatcaagtaaagaacacagagttgtgtacctcattctgtttttgttttttttttttttttgttgttgttgtttctttgcttgtttttcatcaagcactctgtttttaagctctgtccacattgttctacttgcactcttccaacacattttaattctcccaatgatgtyagtctcctacgatgcagacccgagttacctccaactttccgccatgcaaatggtgctacaggaacatcttcaaaaagaaaaacatataactatttgtctaaggatgtatgggcatgtgagtgatttctttgggatatgcactatggagcaagaagtcagacttatagggtattcatctcctatatttgactaaaatatatcagcaatctccactgaatgtaccctagtttcatgagcaccaatgtttgtatcatccagctttctagtttgttagtgttttctttaggaaataacatgttgtaatttaaatttgtgtttattggattattcatggttttgaacattttttat

SEQ ID NO: 20115 - DNA, 529 bp, Homo sapiens
cctgtctcaaacaaacaaacaaacagttatgtcaacatgtaatgggtttcctattgtgatttttaaacaaataaataaatatgttttaatttctcagttatgtttctaatatagtaaatatatggataatacatggatataaccggcataaacaaaaactctttgtggtccttaattgttcagagaataaaggggtcctaagaggtggaagtttaagaactgtttcctggggggtaaacgttattaacsaaaatctgtggattagaaaactgaggtttagagaggtttaatgcttgtgcaggtcacatagccagtgggtagggaagtcacaatccaagccttgctcactctaccacaggaggccaccttgcaacaggtcagcaagcaagggaaagccctcctgaagcacagagagatctaagtaggagatgctggaggccctgaagaggcaaagagcacatctggggtggggtgggggatctgcacagggaaaggaaccagggaaagcctctcagaacaggtgacaccc

SEQ ID NO: 20116 - DNA, 543 bp, Homo sapiens
tccaatgcaaaaaaatgaaagtaaaaacaaatgtgtttatgtactatttgggggtgggaggagggaggcacaggaagggaagttgaccaatagccatcatcagattctcaaagaggaatatgactgcctgccaaaagtgaagatccctactatattcgatgaggctcattcacatacagtacagttctctaggttaacaacttaataatctacagcagaaaccaagtattactctcataagctgggaagacaatagaaacaatatacctaggtaagacatggctatgctccctatgtccccagaaaaaaaaattaagaaaaattttaatctacccaagtttccacatgaaattaaactgcaccaaaatgtaccaaagaggctactttatgattcctgaaaaggatattaaagaaaaagtaacayatagtacttagagtgtttagtcctgaagtgctagaacactatcaaaagggattccttgattacacattttgatatattctgcacacacatattcacataatccatctttcaaagaacga

SEQ ID NO: 20117 - DNA, 549 bp, Homo sapiens
taatatatatctctatataatggaatgctttatacttaaaattatactgtgttataaataataaataacctctccctctccctctccctcaccctctccctctctctctctccacggtctccctctccctctctttccacggtctccctctccctctctttccacggtctccctctgatgccgagccgaagctggactgtactgctgccatctcggctcactgcaacctccctgcctgattctcctgcctcagcctgcccagtgcctgcgattgcaggcgcgcgccgccacgcctgactggttttcgtatttttttggtggagacggggtttcgctgtgttggccgggccggtctccagctcctamccgcgagtgatccgccaacctcggcctcccgaggtgccgggattgcagacggagtctcgttcactcagtgctcagtggtgcccaggctggagtgcagtggcgtgatctcggctcgctacaacctccacctcccagccacctgccttggcctcccaaagtgccgagattgcagcctctgcccgg

SEQ ID NO: 20118 - DNA, 593 bp, Homo sapiens
tttttggcttgttattgttagcatgaaacctctgacctacaagtgagctggagcaggggcaattggaaaggcctgatatttctggccttccacactttaggcataccccttgctctacaagtggagtccaggcagggaaagggtaggacttctgcaacatgaggctagggagaggtgaygagaaaaaccagcaacttgcctttcccagtatgaaatcttaatcccagaatgatagctttggggagagagaccctttgtcttcctggttgtacatgcatctggtagagttttgtaagaactggagtggtgggtagtgatagtggggtaaaacatgtctcaaataccaaaaattttctctagccttaccagaatttagtaggttctcttgaatattttcccccattttccatatgtccttagcacaagttctagtgactttaaattatagtttacctattttttatcagataaaatgttgttttgctatgcttccattattcaggaagtcccagccatgaaatattattgaataaagccaatgcaattattgcaaagcagcattcaaaaattatttttacaaatataagggctat

SEQ ID NO: 20119 - DNA, 593 bp, Homo sapiens
tttttggcttgttattgttagcatgaaacctctgacctacaagtgagctggagcaggggcaattggaaaggcctgatatttctggccttccacactttaggcataccccttgctctacaagtggagtccaggcagggaaagggtaggacttctgcaacatgaggctagggagaggtgatgagaaaaaccagcaacttgcctttcccagtatgaaatcttaatcccagaatgatagctttggggagagagaccctttgtcttcctggttgtacatgcatctggtagagttttgtaagaactggagtggtgggtagtgatagtggggtaaaacatgtctcaaataccaaaaattttctctagccttaccagaatttagtaggttctcttgaatattttcccccattttccatatgtccttagcacaagttctagtgactttaaattatagtttacctattttttatcagataaaatgttgttttgctatgcttccattattcaggaagtcccagccatgaaatattattgaataaagccaatgcaattattgcaaagcagcattcaaaaattatttttacaaatataagrgctat

SEQ ID NO: 20120 - DNA, 1145 bp, Homo sapiens
attatagagccttctttacatttagtgggaaatgatcgtagcagctatctaataattaagcagatgaagagtttttttgatgaattgatcaactgaaagtttgcttaaataaaaaatagtgttttatttctaaagcatgtctgtgcgaagttgaaacataatatcaggtagaaaatgtaactcgctaataaatgccatatacataattttaaatattcgttgctcaaaataatcttgtgatgccaaccttgaagtaaggaaatgttacaatactttgtaactcattcgtggcgttgaacatacctgcagttttatgaacagcatagtttggcaccagaccatgaagaacttctgagaaccacttaatccaaaccttcacctttactaagaaaggacaataccagaagtcttatgaaatcctatcaactttttcaaaatactacaatgtgctttcaaattttcttcgaaaatccatttcttcaagtcctacggtatttgcctgcctctgctttccccagagatttctcactgcttacttcaacataggtttttctaaattcctattcaattattaaaattaatgcctgccaaggcattaatagtgacaatactattagcctttcttctcctgtcctccttgcaaacttattaaggtacattgttaagtgagatttcctggtctctagtggttcaattcccacctactagagcttcttctttgtccttgacttttcttccctggcaatcaggctctgaagctgcttctcactaccagtcctttcacatacctcagcactaccctccaaaatgtttgttggcttctaggaatttttctgtccttctcctttatatcagtacttgyattgttcctaatactaggctttgctttgaaacatatgcaaaagctctgactaatgtcataatataaatatctcaaaacctatccaaaaagtaatcagtaaactaaactctctcttcctatatttgattggctaccttcatggaagcaaactgtggctccagacaaacttagatactcttgcctttcattccatgaaccagatgagtaaccagtcaaatcctgacttccaagaattaaaccttagaatgaaccctttctggatctttctctttacacactgctg

SEQ ID NO: 20121 - DNA, 960 bp, Homo sapiens
taagtagcacttttggtttcagcaaggctaatccatgatggggcgtttctcaaaaccacctggctctgggaggaccttccgcacacacacaagcagaaacacccacatgagtccctttggttcataacttcttgggtcatttctgcaagattgacccctgccctttctttttaaaggatattttacctgaaacagtagggagacatatttctgtgttaacattgttctaaagaacctatggtcacagtacagcatcaatgggaaagtctctatgcctctcctaagtagaacctctgagatgagcagaatacttggaagggtacaaatatggctaactgttgtcaaatgtagaaatgtcatgcttcaggtagaagggttcaggaaaatcaccaaagaaattagaattccaaagtgtatcaatttacttaatcacaaaattttactctcttgtcagaatcaacaggcacagtcttagagatcttctcagctgagttcatagcactgtaatttacttagactgctatttctacaaagaggaagccagagatcctttctgcagagactgtttagtaaaaaagaaaagccaccctttagtaaccactctttagtaacatagaaaattttcataattctcttaatcaagtcccaagaaactaattcctagctctttgctcctttgattawcttctgtttgatagttcattctataaatgcaaaacctgcctggctggaatgatttgttcttagtgaaatgatgagtaagcagtatgagaaactagaatggtcacaggctttgggtagactgacaatactgtttttatgctgattttatcacatgctaactctatgatagcatagtggtatgtcggtgtgtgtatgcatgtgtgtttgtgtacatgcatacatgtatggaataattaacctctccaatactcaatttcttcatttaaaaatattaaa

SEQ ID NO: 20122 - DNA, 523 bp, Homo sapiens
ttttgggaaactatggtgaacacgagattctttacttgtctgttktaggttatttttccaggttatgtgatcctgtgatcacatatctgccaacattttcatgttttgggtatttcctaatgtaattgaatttctcctggtttagaaatttatcaacagaatcatctttatttcttcccttgatgtattcccaaatgtaagaaaaatatgcatagtgagttgataaaaagaatgcaagtaatctacttgaaaaattaagcctctactttccaggaaagataattttaatggggtttgggttcattctctatgagtccttctctatcctaatgtcatgttgggtcacaattgtctgatgatcctggctaagcatttggttaacctcattttgggtcctctttctctcttcacatggaggagcacagcacttgaacgctctcgtgtttgaggacaactgggctgacatcgagtgaatttttggaaaactattatgtctttgtagtcacttaatgtcagcttgatg

SEQ ID NO: 20123 - DNA, 523 bp, Homo sapiens
ttttgggaaactatggtgaacacgagattctttacttgtctgttttaggttatttttccaggttatgtgatcctgtgatcacatatctgccaacattttcatgttttgggtatttcctaatgtaattgaatttctcctggtttagaaatttatcaacagaatcatctttatttcttcccttgatgtattcccaaatgtaagaaaaatatgcatagtgagttgataaaaagaatgcaagtaatctacttgaaaaattaagcctctactttccaggaaagataattttaatggggtttgggttcattctctatgagtccttctctatcctaatgtcatgttgggtcacaattgtctgatgatcctggctaagcatttggttaacctcattttgggtcctctttctctcttcacatggaggagcacagcacttgaackctctcgtgtttgaggacaactgggctgacatcgagtgaatttttggaaaactattatgtctttgtagtcacttaatgtcagcttgatg

SEQ ID NO: 20124 - DNA, 1711 bp, Homo sapiens
ggtaatatttgaacccatatctgtttgattccaaaaccatgatctttattgtctcctttcattctcttagaggatggagaatttcaatcaggtagtttttaaaatttccagagaataaagaatacacttaacaaaaatggcttatcttaaatttatagtattattattaactacagataatctattgaataggtaacatgtattaccatacatcaacagataaaaacatatcattgggacaattaccgaatggtttctcataaattataaaagtatttcaattagttttattgaggtataatttacatacaatagaatctgtagacttctgttggatagcttgattaatttggcaaatgtacacagtcatgtaaccatcctcgcaatcaagatgtaggacatttccattactccaaaagctctccatgctgcagtgtattcaacccatccttgcaactccagcacctggtaaacactgacccattttctgggactattgttttgccttttctagaatctcacatatatgaattaactcttgctttccaattattatgttggggcagtttttattagaaggctgttttggagtagaaagtttggagttttcctttatagcactgcagattgaagtcatgtagaccaagtggctattgctttacagactcagtcaagtgttcttttccctgttgcagagggaatgggatttacattgtaagcagcactataaaaatggctgtgcacttcctcagagccactctgccagttacctaaactgagccaccagaatttactgatgacacttgcgagtaagtgaactctttatgcacttaaagaggaatgtttactatttgtgtagaatattggaaatgtccaagtcagagcaggttaattggatgcatgcagtagttgggaggtgggctgaggacacttccaagctctgaaggctcttccaaaagtcccatgacytgctcaaagtctgaggccccctgctaagttagcaaatgttttgtccaagtgtaggtctgaaaaaatgcagcattgtctctctgcagttctcaccagagccagacctgaaaaatcaggcacctctgcggtcagctgtgttgggtattattcttggagtcttatggacagcaccagagtcttgactacaaaagccagtcatggctggactccctcagacgcttccctacatctgcctcacattgacttataacccttgagtaggtaggactaagaaaacaacttctgtttcaggatattttagtttggatttccccagaagcagaccctgagacaaagattcgagtgaccatctggataaacatcctcaggggatggggcagtgcgacaggaaagggaagccagttacactggcaactggaggaccgttcctctaggaaactctgggagatggtggtgagctcgcaaagaagaggccaggaagctgaggtcctggtgctgccaatccctgtctgtggctgggtgagggctgcgtccagaagcatgggatcgccaggactcctggctcaccctgtgagcttgtggtcagtgcattccagagtacacaggaagcagcctttggtgtgcaagggtagcactgaggggcttgggcagggcacctgcagggactgctacacaggccataccaggttcccttcttcatgcactgtctaaaccgtgcctactctccctgcacctgccataa

SEQ ID NO: 20125 - DNA, 607 bp, Homo sapiens
tcaaaaaaaaaaaaaaggcaagggggaggggtggtaaatgttaacctatgtgtaaatgtttcatgctgtatataagttacaaaagtaaaacattataatagaaaataaaatctcatacctttcagcactaaatgcagactctgtgtcaatgtacaccacagctccttctaatcctcccatgttggtgggtaatgtagccaaaatgctcatcattatacaaaactgagtttttccacaacctggtggacctgtaatctaaaaaaaaaaaaaaaaaaaaaaaaaaaaaaaaaaaaaaagttwtttagataaacatcacaagccagtcaaagcaaaatccttttaagactttgccatatatgcagtccaactaacctgggttcccaggagagaattaagcccaagacatccattgtatggaatgaattaacttctcccctctgcatctgaattggcactagttatgtaccatccttggaggaattgagaaaatagtcactcaaatcatccactgtattttgtagttcagatgagaaacttctagttgagaaaggctgaaacattcactcatttataccatcataacttggcattctataccttttcctca

SEQ ID NO: 20126 - DNA, 607 bp, Homo sapiens
tcaaaaaaaaaaaaaaggcaagggggaggggtggtaaatgttaacctatgtgtaaatgtttcatgctgtatataagttacaaaagtaaaacattataatagaaaataaaatctcatacctttcagcactaaatgcagactctgtgtcaatgtacaccacagctccttctaatcctcccatgttggtgggtaatgtagccaaaatgctcatcattatacaaaactgagtttttccacaacctggtggacctgtaatctaaaaaaaaaaaaaaaaaaaaaaaaaaaaaaaaaaaaaaagttttttagataaacatcacaagccagtcaaagcaaaatccttttaagactttgccatatatgcagtccaactaacctgggttcccaggagagaattaagcccaagacatccattgtatggaatgaattaacttctcccctctgcatctgaattggcactagttatgtaccatccttggaggaattgagaaaatagtcactcaaatcatccactgtattttgtagttcagatgagaaacttytagttgagaaaggctgaaacattcactcatttataccatcataacttggcattctataccttttcctca

SEQ ID NO: 20127 - DNA, 587 bp, Homo sapiens
atccatggaactacaaacagcaaaacaattaggtctgcttctttaaaaataacactcagatttcatttatcttactaacgattagtcaagttataatgacggctagactatactgcatsaaagtacatatattttgaagctacatacatattattccagacctttttttttttttttttttttttttgagatagtgtctcgctctgtcacccaggctggagtgcaatggtgcaatctcagctcactgcaaccttcgactcctgggttcaagtgattctcctgcctcagcctcccaagtagctgggactacaggcacgtgccaccacgcctggctaattttttgtatttttagtagagatggggtttcaccgtgttagacaggatgggcttgatctcctgacctcgtgatccacccgccctggcctcccaaagtgctgagatttataggcgtgagccaccacgcccagccccagatgtttctaaaatagtttgcccttgtactcctgcaaatcaccatcaggacaggataggtaaccaaaagtgtactcatgtattcatgtactattttcaggtcaggctaaaggatt

SEQ ID NO: 20128 - DNA, 587 bp, Homo sapiens
atccatggaactacaaacagcaaaacaattaggtctgcttctttaaaaataacactcagatttcatttatcttactaacgattagtcaagttataatgacggctagactatactgcatcaaagtacatatattttgaagctacatacatrttattccagacctttttttttttttttttttttttttgagatagtgtctcgctctgtcacccaggctggagtgcaatggtgcaatctcagctcactgcaaccttcgactcctgggttcaagtgattctcctgcctcagcctcccaagtagctgggactacaggcacgtgccaccacgcctggctaattttttgtatttttagtagagatggggtttcaccgtgttagacaggatgggcttgatctcctgacctcgtgatccacccgccctggcctcccaaagtgctgagatttataggcgtgagccaccacgcccagccccagatgtttctaaaatagtttgcccttgtactcctgcaaatcaccatcaggacaggataggtaaccaaaagtgtactcatgtattcatgtactattttcaggtcaggctaaaggatt

SEQ ID NO: 20129 - DNA, 564 bp, Homo sapiens
gcttgacttgttcagctaaaatgaagatttggaagtgattgcttccaccgacctgaagtacctgttggtgccagtgtttcaaggagccttcaccatgaaacaagtcaagcccagcaagcgtctagatcatttgcagtgggctcaagagcactataaactaattaactgtgccattgctatcaggtggcagagcttgagctgccgaaaaccaagaactcagctgaaaaatcacactgctaatttctccatggcttatcctagcctcattgctatggcatctcaaagacaggctaaaagagagagacacaagcagaaggagttggagcacaggttgtctgcaatcaaatctgctgtggaaactggtcaagcagatgatgagcgtgttcgtgaatattatcttcttcaccttcagaggtgaactgatatcagcttagaagagattgagagcattgaccaggaaataaagatcctgagagaaagagactcttcaagagaggcatcaacttctaaytcatctcgccaggagaggcctccagtgaaacccttcattctcactcggaacat

SEQ ID NO: 20130 - DNA, 537 bp, Homo sapiens
cagcagggcatggtggcaggtgcctgtaatctcagctacttgggaggctggggcaggagaattgctggaacttaggaggcagaggttgcagtgagctgaaatcgtgccattgcactccagcctgggccgacaacagcaagactcagtctcaaaaaaaaaaawtttttttttaaattatgtttattaattaaaaaaagaaagaaatcatggtcctttctgtctgtacaggtggacttcaatgtctatatgtagcagtaaaggaaatactgtctggcatgagctctgggtcactggagttgggcactctggctccttctttcccatcaaaataaaattaaaaaataataaaatcaatgactgctggatatcatggtgagagtttcatgttttgagctggggtttggggcctgattattttattaattatctgctcatctggggagcccttggtttcctttcctgtgagccccttctctgcaacccacatcggttctcttgttcagaactaccttccatcatggctaagctttgagatca

SEQ ID NO: 20131 - DNA, 537 bp, Homo sapiens
cagcagggcatggtggcaggtgcctgtaatctcagctacttgggaggctggggcaggagaattgctggaacttaggaggcagaggttgcagtgagctgaaatcgtgccattgcactccagcctgggccgacaacagcaagactcagtctcaaaaaaaaaaattttttttttaaattatgtttattaattaaaaaaagaaagaaatcatggtcctttctgtctgtacaggtggacttcaatgtctatatgtagcagtaaaggaaatactgtctggcatgagctctgggtcactggagttgggcactctggctccttctttcccatcaaaataaaattaaaaaataataaaatcaatgactgctggatatcatggtgagagtttcatgttttgagctggggtttggggcctgattattttattaattatctgctcatctggggagcccytggtttcctttcctgtgagccccttctctgcaacccacatcggttctcttgttcagaactaccttccatcatggctaagctttgagatca

SEQ ID NO: 20132 - DNA, 558 bp, Homo sapiens
ctcccagcttggggccacggtttctccagcctgtayattaaagcctcatctgttcttcctccccaggcctggagggctcaccggcccgtgagccctgtgacattacttcccctgggcagactcagggcaccatgaagcttcccaccgggtaggcactcactatgtctgttacgccgggcgccggcccgagtcctaaagataggcagccctgagggcagaggcactcactggagctcgtgcacacacgtgcacacacgcaaacagccgggcatgtgcacaggaacacaagcacacatccacacgtaactgtgtgcacacacatacacacatgcacaatccccactgtgcacctgagcatcattgtacacatgggaaatacatccacaaacacacacacccataaccaggcacatgacccggggctgccagtgccagagtgatgccagctgcgtaggccacacctcagtctgacatataccttcctggttcatcagccccatgaggaccccaactccaggatgtacagcagaaaggagtcttcacctgcttcacagatta

SEQ ID NO: 20133 - DNA, 558 bp, Homo sapiens
ctcccagcttggggccacggtttctccagcctgtacattaaagcctcatctgttcttcctccccaggcctggagggctcaccggcccgtgagccctgtgacattacttcccctgggcagactcagggcaccatgaagcttcccaccgggtaggcactcactatgtctgttacgccgggcgccggcccgagtcctaaagataggcagccctgagggcagaggcactcactggagctcgtgcacacacgtgcacacacgcaaacagccgggcatgtgcacaggaacacaagcacacatccacacgtaactgtgtgcacacacatacacacatgcacaatccccactgtgcacctgagcatcattgtacacatgggaaatacatccacaaacacacacacccataaccaggcacatgaccmggggctgccagtgccagagtgatgccagctgcgtaggccacacctcagtctgacatataccttcctggttcatcagccccatgaggaccccaactccaggatgtacagcagaaaggagtcttcacctgcttcacagatta

SEQ ID NO: 20134 - DNA, 596 bp, Homo sapiens
caaacattatggggtaaaagtaaacatccataatcaggaaaataaaatttgtgataaaacacagaaggatatggaatgcacaattactgatgactattaatgttgccattgtaaaataaagtttaaaattagttctaaatataaaacatttttatggtttttctcaaaatastgttaataagtttcaacatttcaataattatatgtttgctacatgggaaaattatgtgaaatgacatttctccttcatgctggatagttgggcctgactacttcactattttgctaatttcccagggaaatatatagtccagtacacaacttttcataaagttaacaagccaaaagctaccaagtggcatcaatcagccaaagattactaaaacaattagttgtactatatcatatcatatggactattctgatattgaattgtcaaatttatcaaaaagtctttaacaaaggaaaaaaagacttcctacctctatttcagaagcagacatgtacacagccagagtaaccaaagataacactaatataatgtatgggaaggcgtaatctgaaagataagcattggtattatgttggaaatgaaa

SEQ ID NO: 20135 - DNA, 573 bp, Homo sapiens
catattccaggacctagttacaatgaaaaagaaaacatcactgggcattttcagctctatataaagtaagagctgttcagatcggttgcacaataccaattatgaaacattactacagttcttttaaaaaaaaaaaaagaaaaaagaaaaaggaaaaaatttatcaaaacctgatctcaaaattcagtaataaattgtaaaatgtggagctaggccaaaaaagattaaaaaattaaaaaaaaaagaatgtttcatattttatgtaccacagtaatatggtcataaactggttcacaaacctactcagagccaaatagcaaaactgtcttgttaccgtgtttaaataattacagcccaaaagaaattcatctaactattcactgttctgatgtatcaactgcataaagaactgctagaggcaagtttcatctattacaktgagctgttctcatgtcaaacgacagattttttaaaagcggggaggggattaattttaaaggccaacagtctttgaagttcctgagaaagaatatgtctcatagtaagttgctttttaaacacagaaacaaaaca

SEQ ID NO: 20136 - DNA, 540 bp, Homo sapiens
ttctaataatcagtctcattacttcacttctccactgttgttgggctttgagtgctcctttaaagcaggcagaagaggcaacttgctcttgtcttggaatatatggtgaaaaagttgtaagttgatgtttgatatctacaggtttataaaaacaggctcacagtatggagctggggttacagcagaagattttggctttcaagttgaacacgctcaaagctctctaacagtataaacaggcatcatggccaggtggtgaataactttctaatggaaatgttttccccttaggcttcccaggggctctaaagttgatgatttttaattctgtgatttcctttgggtcgttgctgttggaagtcacatcctctcttggagcagctattcaagctgaaagcctttgccaatcactcagttgttctagaagcaaaagaaggttattctgggctaaccctgagttggcttgagcatgccttatrttccagcgagggcaagtagaatagagggagttgcagatgcaagagacattttggagaaaga

SEQ ID NO: 20137 - DNA, 595 bp, Homo sapiens
tgagacggagtctcactcttgttgcccgggctggagtgcagaggcacaatctcagctcactgcagccttcacctcctgggttcaagcgattctcctgtctcagcctcccaagtagctgggattacaggcgtgtgccaccacacctggctaatattttgtgtttttagtagagatggggtttcaccatttggccaggctggtctcaaactcctgacctcaggtgatccacctgcctcggcctcccaaagtgctgggattacaggtgtgagtcactgtgcccagcccctgaaacttcactctgtacaggtgccttccttcctgggccctcactccaaccctgatctccatccttgccacttgccaaaagcaagaaattctagtcagctgtcttctcacatattgttatccccaaactacattccttccacctgtccctacctccaacttctgctgacyctcctcccagctacttccacagtgttctctggacgcttcattgcattttaaatacattatcttaatcctcagcctctcataccttggtccctttctcctatgagtttatagattctggctacatcacaccgtttctttt

SEQ ID NO: 20138 - DNA, 619 bp, Homo sapiens
tttcaccatgttggccaggatggtcttgatctcttgacctcatgacctgcccgcctcagcctccccagaaaaaaaaaaaaaaagttttaattagctaggcatggtggtgtgtccctgcagtgccaactattcaggaggccaaggtgggaggatcacttgagcccaggaggtcaaggctgcagtgagctatcattgcaccactgcactccagcctgggcaacagagcaagattccgtctcaaaaaagaaaagaaaaaccattagaacagtaacatttgaatctcttgggcccagtctagaagcttccctgtgtccaaggtcagatgctgtgtgctccaaatgccaaaagaataggatcactggawgatatctttaaggaaaacatctctgaagttctgaatggaatgcaaaagtcacatctgtgagcccactccttgcccctcttctgatagttccccattacatgttgtatagatggttgggggtggtaacctgggaacaggtgattaaacatgagcaagggcataattggtataaaaatgtgtgaaatgttttataggtgcaaagctggggccccacagcacctgtgcccagggcaagggccccttagggcagtagca

SEQ ID NO: 20139 - DNA, 507 bp, Homo sapiens
aagcttgtcctggaccaagtattgtgactgtctctttatttgcaccatttcatttcatcgtcatagcatccttatgagctaaatattattctacgtatttaataggttatgmtattgaggcttataaagatttagcaacttggtcaactatattgttaagggtctcaagacaatcctctttacaggtccaagcccatcaatcaaatgtcatttggcaataactctttcttattttgttatcaatgtgtcacccaaattatttggagcctgaggccttaattaaaaatctggctggtgtgattataatgtggctgagtgctgatgccaaatttaaagtcagagtgtgatttttttaagctatgtatttcagaaggattgatggtggctacttgccttgtgctccagagcagcacccccttgatggcaagccactccaagaatgtttagggccgtagctggctggtccccaatagagaaaacccaatggctgtgtttctggagcgaccc

SEQ ID NO: 20140 - DNA, 880 bp, Homo sapiens
cctgggcaaatcacacactacatactgcacctggattccttgagagaaaaaactcttcatgtttatgaggcttcctggtttacaagctgcattcacacccatgagctcactgatgttgtatggcactatgaccatttctcctacttcacagatgagaaaatgaaagtcaagacagtctaaatggctggtccagtatcccacagtgtataactgatgtgactgggtatggtcctcagatctcctggtctgaaccttctactcctcctagctctttcctactcccctatttaagaaaaggaaaataaaaaggctgcctgcatcctgacaagtgaaggggcttgagcaagaaactccggccaacagggcataaccccttgatatatacactcattgcccctctgaggtcctgatcccatccacagcatagagggcatctccctcaagacccccattgaagtaccctccagcctgcttgcaaacggatattgagtaggtatgaagagggtagaagaggcaactgactctttccaaatctaagaacatcagatcaacrggaagataatttctgcttcctgccatgacagcatgccaaattccagactatctcttccactgtaggccactaacaaaactatttttagacattagaaggcaacacaagactgtggccctgagggaagagaaacacacaaggtgagaccaatgatggcccagctgtctacctggagacactgtccagaccacagtacagagagatggagaccaaacagaccatggtggctgcattgagaggaggagtcaaacatcacagtttggatctgctgacatggctgaagtatgagatcaggagactgaaaaggatggagttgtgcacaaaaag

SEQ ID NO: 20141 - DNA, 558 bp, Homo sapiens
gaacaaggcagaggcttaggggaaattggttgggatggttggaggatagttcagtggaaagttcagttggaggatagttcagaggatagttcaggactgagtggccccactccaggggaaaaccaccatcccactctatcccccttctggttccccatccacctgctgagagctatttccactcaataaaaccttgcactcattctccaagcccacgtgttatttgatttttccggtaccctaaggcaagaacccaggatgcagaaagtcctctgtccttgcgatagagcagaaagtctaattaagctgattaacacaagccacttgcagagggcaaaactgaaagagcacgttgtaacacatgcccactggggctcaatcccagttgctgccatggggtcggtgttccctgcgaygtgcctgcctgtctgcaagctcccccaggggtatgagcagccaggcacccaagaagccagccacacccccatcgcacatcctgtgatggggataagggaacttttctcatttcaaattgagaagaaaaacttcattcttgtc

SEQ ID NO: 20142 - DNA, 621 bp, Homo sapiens
tttttttaaaaataatactctaaaacgtctgttctacaagtaaaaaataaaagaaaccaaacagtgattatattttgatcttttttgttttgtttttgcactataaaattctatttctctctaacacaatagtgaaactctttacctacgggggtgggaggggattcacatataaggaattcagaaaaagaaaataacatggattaatattccaatttactagtttgctacattattattattaaatgccaccttaacactatcaaataaacactatcactctcatttattgacacaaaactaacacagtgacaatgcaaatatcttgttcacagcaacagcccaaacaaagaccaggagctctgacgccaaagctcacagtgtagtgcttcttcaaaaagaccatgttccctcttgcctcaggaastttgcatgccctgctttctttgtccaatgcctggctaaattgtaccataatggtttcatgctgtgtatcacagggtttgcacagggtgatccatcaaaaagtgggaagaaaatatgcagttcttatttatacatttctatctatgaagtaagaatgagtaaaacgttataaatgtttactctgactaagtactg

SEQ ID NO: 20143 - DNA, 578 bp, Homo sapiens
ttttttattatggccagatatttgcacatactgtcccatttgaaatgaaatatgatttattttatatttgtattactgatatttctaatgttgaatcttaaagttttcattcaaaagtcacttcctcctggaagtttttctgattctcactccttccctgaattagggaaatatgaattaggttcccctcttatgagcccacactacatcttatatttttcctatcatagctcatcatggagcttaataattttttaggtttctttggtaagaatcccacagtgcactatataaaggcaggacctgtttctgtctcctgactgtctcttagtacccaataaagttcctaytatataccaaatgttctataaatacttctaaagcatattaaatgttgaatgatttatatgacattattctatacatttgagccattttaaatgtgtatgataactaacctagattaaacaaagaataaatgtctatgaaaaaagactttaaaataaataaataaataataaataaataaataaatagcttgacttttatcaatgtagatattcaatcttgatgattca

SEQ ID NO: 20144 - DNA, 578 bp, Homo sapiens
ttttttattatggccagatatttgcacatactgtcccatttgaaatgaaatatgatttattttatatttgtattactgatatttctaatgttgaatcttaaagttttcattcaaaagtcacttcctcctggaagtttttctgattctcactccttccctgaattagggaaatatgaattaggttcccctcttatgagcccacactacatcttatatttttcctatcatagctcatcatggagcttaataattttttaggtttctttggtaagaatcccacagtgcactatataaaggcaggacctgtttctgtctcctgactgtctcttagtacccaataaagttcctactatataccaaatgttctataaatacttctaaagcatattaaatgwtgaatgatttatatgacattattctatacatttgagccattttaaatgtgtatgataactaacctagattaaacaaagaataaatgtctatgaaaaaagactttaaaataaataaataaataataaataaataaataaatagcttgacttttatcaatgtagatattcaatcttgatgattca

SEQ ID NO: 20145 - DNA, 1367 bp, Homo sapiens
aacataatcagcaccttggaagcctgctcttgtccctttcaagttataactttctcctcagcaaggataaccactattccaaaatctgccacccttgattagttttgctgtcttttgaattttattgaaatggaatcatactgtatggactcttttcggtctgtcattttaaattcagtattatatttatgagattcatccattttgtttcatatagctgtagtttattttcactgtattacaatgtaaattaatttattcattccatttctaatgtcctcgtttgaggatattacagatggtacagttatgaacgttcttattcattgaggataaaggactctattattttgcatctccagggcccaggatgtgccttttatgtacaaagtgctcaatatatgcactctgtatgaacaaatgaactatggtactactcttcagtgtaaaatcataggtactaatattatctcctttgagtatggtacagaatatgacttgctgaagttcatatagaaacaaggtcaattcactgtcagtgtagggcaaagttcattgggccacaatttctagcttttatgttaggagaagaaaccactaaacaacattaaaggaggattcagtttttaagaaccaggcctaaaaatccataagttgttttatgggatggttaaaagcaaagagatccaccctcccatatgattgattgtaaatcatgaatcaatagttatcagtgtaatttgttttcctagcatatggttaatatataaacaatctttgttgaagaaataaatgatgagtgaattaactgtagttaactttagaatttcttttggatttagtgcctttttatacaactagttatagcattagtgctataactttgcccgtaagatatgtgaaattgctagtgctcctctttttctgggcattgtgaatgttatttgttgagtgtctggatttcactgtcttcctttaaagagttttttagtttgttttgcaggcagttaaggtacaaaagttttctggcttttgtctactgtagttatctttgaaacccaaattgcaagaatggaggtaaaaataataaaaatgttcattcagagtagcatcactatacaaaatacttttgtcttgcctctcttgggacacttctagggatgtttaaaggagatgtggtgggaagtctctgcttagcaatggcccaatatttttaagatacacagcaccttctcartatgtggaatcccccaaataatatttacatgagtttgtttagaggttctataagagtgactctcctgattactaagaatatttaacttgccatgatttaaaaatgatgtaaaagtaaacatagttaaacc

SEQ ID NO: 20146 - DNA, 706 bp, Homo sapiens
acatcaaacagacttgaaatagcaacactctactaaataactggtttgaactcttcaaaaatgccaaagtcagaaaacacaaagttgagaaacttcctgtttaaagaatacatgacaactgaacacaatgtgtcattctggattgtaccctggacttggtggtggggagagatgttataaaggacattatggaaacaattgataaagttggaaaagggactctgggttagacagtagtgttrtatcaatactaaaagccatgactttgataactgtactgtgattatttagtagaatggccttgttcttaagaaatactcaccaaagtattaggaataaaggagcctgatgtctccaattcactctcaaatagttcagggaaaaaaatgcacttatttgtttgtgtgtatgtgtgtgtgcatgtgcatgctcgtgtgcatgtagagggaggagggcatgaggatgggaaagcaaatggaaggaaaggaaaacactggttgaatctgggaaaaggaatcatggttgtcccttgcactattcttgcaacttttctgtatgtataaaattatatctaaataaaaagttacaaaaagaaaactgcaaacatccagggatgcccacaaagctctgtcacattccagtacacagcatcaaaattctgagttttcgaaggcatttttaaagttgtaatgtactccaataaaaa

SEQ ID NO: 20147 - DNA, 706 bp, Homo sapiens
acatcaaacagacttgaaatagcaacactctactaaataactggtttgaactcttcaaaaatgccaaagtcagaaaacacaaagttgagaaacttcctgtttaaagaatacatgacaactgaacacaatgtgtcattctggattgtaccctggacttggtggtggggagagatgttataaaggacattatggaaacaattgataaagttggaaaagggactctgggttagacagtagtgttgtatcaatactaaaagccatgactttgataactgtactgtgattatttagtagaatggccttgttcttaagaaatactcaccaaagtattaggaataaaggagcctgatgtctccaattcactctcaaatagttcagggaaaaaaatgcacttatttgtttgtgtgtatgtgtgtgtgcatgtgcatgctcgtgtgcrtgtagagggaggagggcatgaggatgggaaagcaaatggaaggaaaggaaaacactggttgaatctgggaaaaggaatcatggttgtcccttgcactattcttgcaacttttctgtatgtataaaattatatctaaataaaaagttacaaaaagaaaactgcaaacatccagggatgcccacaaagctctgtcacattccagtacacagcatcaaaattctgagttttcgaaggcatttttaaagttgtaatgtactccaataaaaa

SEQ ID NO: 20148 - DNA, 717 bp, Homo sapiens
gtccacacacatctgctttaaacttcaaaaatcttgacatccagagcaaggtctgggatagtctaacttgcctaacagaggaaaggcactcaagtcttactgaagttctctagagtagtgacaatacattttattcaaatacaaagttaaagcatttctaaaaytgcaccttttcctcatgccccgaatattaagggggcaactgctcaggaattagccaagaaaaatcataaaaatatagccaatatgaccatgagagcaaaggataaagacattaccctttattttttaaatatcattttaatgatttttaaatgtattattctccctataaatgtagtctgctttcaaaaaatggaataaacacaaaaatttagacttacaaaagaggataaattagaatacactgatgaacttcattaaatgactatttttatatgaatggttttcaataaaatttctagatctagtgtttaggagtttttaaagaaaataactcaatgtctaaaatttcattcttcactgttttcacaaacatttatcccatcccacagtaaaaggcaaagcattgtactgacacattttttaataatgacaattcaaatcagttttcagttattaattcacgctagcttgaaaatctcagaagaaattgtctagaatttaaattataaaacacttttaagagaaattatttcattacttgtagtacatgca

SEQ ID NO: 20149 - DNA, 717 bp, Homo sapiens
gtccacacacatctgctttaaacttcaaaaatcttgacatccagagcaaggtctgggatagtctaacttgcctaacagaggaaaggcactcaagtcttactgaagttctctagagtagtgacaatacattttattcaaatacaaagttaaagcatttctaaaattgcaccttttcctcatgccccgaatattaagggggcaactgctcaggaattagccaagaaaaatcataaaaatatagccaatatgaccatgagagcaaaggataaagacattaccctttattttttaaatatcattttaatgatttttaaatgtattattctccctataaatgtagtctgctttcaaaaaatggaataaacayaaaaatttagacttacaaaagaggataaattagaatacactgatgaacttcattaaatgactatttttatatgaatggttttcaataaaatttctagatctagtgtttaggagtttttaaagaaaataactcaatgtctaaaatttcattcttcactgttttcacaaacatttatcccatcccacagtaaaaggcaaagcattgtactgacacattttttaataatgacaattcaaatcagttttcagttattaattcacgctagcttgaaaatctcagaagaaattgtctagaatttaaattataaaacacttttaagagaaattatttcattacttgtagtacatgca

SEQ ID NO: 20150 - DNA, 548 bp, Homo sapiens
tgctcctgaactaacctgtttgtatccaaagttataaactgttttctcctctttcttcttttttttttccctcctgttttagacaggktcttgctctgtcacccaggctgaagtgcagtggcacgatcacagttcactgtagcctcaaacttctggggtcaagtaattctcccgccccagcctccccagtagctgggactatgggtgtgcatcaccatgcctggctaatttttgtagagacagggttttgccaagttgcccaggctggtcttgaactcctaggctcaagtgagcctctcacctcagcctcccagagtgctgggcatacaggtatgagccactgcgcctggcctccttcttgttctggaaaactcttactgctgtagtttcctgcaaaattcagctcaagattttaatgcttctgaaatcattgacaaaaaggaagaactcaacccactccccccatccaatacccacatgcaacattaattacttacattattataaatgtcatgctgcaatgggatgggcccagcccaaacttgtcc

SEQ ID NO: 20151 - DNA, 532 bp, Homo sapiens
atattttgggaaagaaagagtaataaacagatacaacaaacttcatcattgtcctagtttaagaaatttccatagccaccccaacctttggcaaccactacccttatcggtcagcagccawcaacactgaggcaaaaccttccaccaggaaaatgattgactcactaaaggctcagatgatcatcaccatgttattttaaagcattttaaaattaaggtatatacatttttagacataatgctattgcacacttaatagatgacaatattgtgtaaacataacttttatatgcactgggaagcaaaaaaactcatgtgacttgctttactgtggtggcctggaaccaaacctgcaatatttccaagctatgcctgtacctcagatggggctctttgtgacatcttccttatccaaatcctggatcaagtatgttgctgctgagaatctaagacctgaacagaacaaggaagaattttgctgccagttcttagaaatttctgtaacccacttggatagatgatccaatgacta

SEQ ID NO: 20152 - DNA, 556 bp, Homo sapiens
tctattaattaggaaacatgtcaaaaataagaaaggattacctaactgtatgttgaaaaggcaaatggaaggatttgtagcatttttcctctgatttaatggtaaatgttcacaatataatgtcaagtaagaaaagtcaaatataaaactgtatgtataatataattttaatttggtatttagaatgcatataaatgaggattaaaagtctaggagaaaaccaatcaaatggtcaacatggatgatggcatataagtgttttaagttttctttaactttttgcattaaaattttttctatattgaataagcagaacatttgtaaatttatctttctaataagaaaaaaaccctaattattttatttttaacatagtagtgatgaaatttaaagagacctggaatatggagacttaaaaacctggggggaatctgtttttcattaggattgaagcaccaaacckgccttaacgatggtaaagaaaggtggacggaaagttagtaaaatgctggagaaaggcaacatttattaaaaattaaaatgtttgatctagaaa

SEQ ID NO: 20153 - DNA, 583 bp, Homo sapiens
tggtggctgaatgtaacragatgaaatataataggattaatgtacatctggaaccttggggctaaacaaatggaattttatacatgcccgggatggggcaggtgtgaaagactcaggggtgtgtgttgactgtaaagtcgacgtgaatcaacctgaacagttaccaagaaaattggtgtcatcttaggtgacattaactgaagaagagtgttgaagatgagggaggtatttctcctgctggcctctttactggtctgtcccacttggaatgccactgcactgcttttaaaggagaagcaaaatgcaatggatcgcatttgctgacagccatggggatgggggaggggactgagagtgtgtcacacgagaatgtgtgaaggaaaagcagaagagataaataagagagctggcaaataaaagagaggttctcaagtgtctggaaggtagtcatgttgaagagccttgttggtggaggacagaaagagagtacaaagaccactgggtgatggctaactgggccagcctagagcacaacctgctggcagtcagagtgggacgtgaggtggtgagttggcttccctta

SEQ ID NO: 20154 - DNA, 539 bp, Homo sapiens
caggtgtgatcccactattgatcagcagaggagttttgacctgttttctttctgacctgggctggttcaccctccttaggcaatctggtggtccccgctcccaggaggtcaccatattgacgctgaacttaatgtggacaccatcatagcgtactataacctacaactcctaggttcaagcaaccctcctgcctcagcctcccaagcagctgggactacaggcacgtgccactgcgtctggcatagataaagaacatttctatcatcacagaaagtactattggacagagctggtttagagcttttgtaggctgtcataaagatacatagagaagctaatataagagtgtaagaaagaactagacacacaacaagaggttagcaactctcagaatggccaaaccctgaagyacaattgccattgatccttcaataaattcccagtccttgggtcaattaagtgaatacttctcaaacgtttccttaaaattatcttagtaggcatccttgaaaaggtattccatggtcaaacaatttgg

SEQ ID NO: 20155 - DNA, 820 bp, Homo sapiens
ttacttagcatgatgttttcaaggattgaagcttcatccrtgttattgcatgtacttcatttcttgttttggctgatcatatgccatggtatggatagaacacattttgcttatttataactcagttacctttgtgttgcagaagatgctcatgcttctgtctccttgtttccaggccacagaaataagcacctaattgggggaggggaggagagggacttactgaatatttttcaaatcttgattttaataatttttggctttctgaattcaaagtattttgatcagtaaattggtctttttaataccccttttaaaaattacagcatcatggaggaaacttcatttgggttgtgagaatagggatttaagggggaaaaagtcgtactctagggtctgacagggcgaaaggacactttgtcatgtgacatgtttttcttggattggtcctgagatagagtaaagcaaaaagctggttcctgcgggttgtgacagagcagtggattgaccttgtttattcacttggttcattcgccctttgtgtcacagggccctaaatgggtcccaggtagcgaaatattagcttatctaatttgtatcctttcacactccttaaacacatgttcaaggaaacaggaaaaaatgcagtgcctggattagaataaaatttaaggcctggtttggtgacaggcaccagtacttttagctactctggaggctgaggcgggaggattgcttgagcccaggagttctaggctatagtgtacaatgatgattttactggcatacagatgaaaaagaaaaagatatttgaaataaa

SEQ ID NO: 20156 - DNA, 820 bp, Homo sapiens
ttacttagcatgatgttttcaaggattgaagcttcatccatgttattgcatgtacttcatttcttgttttggctgatcatatgccatggtatggatagaacacattttgcttatttataactcagttacctttgtgttgcagaagatgctcatgcttctgtctccttgtttccaggccacagaaataagcacctaattgggggaggggaggagagggacttactgaatatttttcaaatcttgattttaataatttttggctttctgaattcaaagtattttgatcagtaaattggtctttttaataccccttttaaaaattacagcatcatggaggaaacttcatttgggttgtgagaatagggatttaagggggaaaaagtcgtactctagggtctgacagrgcgaaaggacactttgtcatgtgacatgtttttcttggattggtcctgagatagagtaaagcaaaaagctggttcctgcgggttgtgacagagcagtggattgaccttgtttattcacttggttcattcgccctttgtgtcacagggccctaaatgggtcccaggtagcgaaatattagcttatctaatttgtatcctttcacactccttaaacacatgttcaaggaaacaggaaaaaatgcagtgcctggattagaataaaatttaaggcctggtttggtgacaggcaccagtacttttagctactctggaggctgaggcgggaggattgcttgagcccaggagttctaggctatagtgtacaatgatgattttactggcatacagatgaaaaagaaaaagatatttgaaataaa

SEQ ID NO: 20157 - DNA, 522 bp, Homo sapiens
agtggccatattatgctgttgtgactcacactgagtttgctataaacaaaaaatccactgttctttttaacataggcagctactcaaataggtactcctttcatgaacttgctgatatttttrgatataagcccaatataatacattatccttattaggttttaatttttagatctagcaaatccctttctagcttctcaatagcttcttagattgtgaatttctcaagcagccatcctgtcaaattttgtgtcttccacaaatgcgtgagctttttaaactcctcactgataaacatttgattatccaatatcctggaccttggtattcaggcaaagaagatacaaatactgtgtctaggccaattacacactattttcccatgtgaattattggtcaattctagcactgttccttcttcttcttcttcttctttttttaatattttgtgttcaatgtaactgcttattttattggtatctctttttctctgctttatttttagtcttacattttcagtct

SEQ ID NO: 20158 - DNA, 558 bp, Homo sapiens
gatttagaaaatctttcattgtactcacttaagaagtagaataaaaatcttgacagatgagagtctaccaaagttaggtagattataatttcccaaaggacagtgctttcygcttccagaatgtggccgttagtaggtcccctatatgcacattacttggcacttagaataagctcaatgaatttttcttgaatgaatgaaagaagaaataatgacatataatccaattacaaacacaaaaagttgaacgagatgcaaatttgaactgcaggttttaattcttcaccaacagtatgaattatacttttagcacatccatgagttcccttgtttagctccttgcttttaaatatttgatactgattgaacatttgctcccagtaaagtaagtgataagtgcagattttttctctgcatataaagaaccactttaggagtaattgtagattcccattaacttatgattaacccatataaagttaacatactttctctgtgttaaaaataatggcttaaagtttattccaaaatcccaacttcctgccacataaacaaaca

SEQ ID NO: 20159 - DNA, 569 bp, Homo sapiens
tttcatagagaggtcctggagcacgccccaaagtgcatgctgcgccttcctgagctctaacccctgggtgactgacacactcttgacacactctcccctcccccaggactgaagaccactaaagctggcatcccattctcactggtttttccacgagaagggagaaccatatcacagcaacatctgcctgcattacctgcgtctgtcttttaaaagaaactggcatttgcccagcttatagctgtgtgcatgggaacatgactgagtaggagcagtccataccatttcttcctttgtgcttgaatgacccatatttcagggatgcagccctggccatttcggaaggtgtctggagaccgaggtaattcatatcattgtaattctacagcacaaagtgccactgggtccactttgtattaatgtttccatggyaatccgatacttgacattttatttaaactattaatctagcatggctcaccagccagtgtgaggaaagttgaaccccaagatttcacttctggaatcaatattaaaccaataggtaagatgcataattaactttcacg

SEQ ID NO: 20160 - DNA, 577 bp, Homo sapiens
ataggactggcaaactcaaggaagatcttggacttaattattttgaaaacctaaaatgaagggtttgtttcagaaaagaaagagaaggcaatgagttagatacaggcatttgggcttcaaaggcctggagctgttaaaaacgtaggtttcttttccagattacaacttttcacacccactggggttcattcttttgcagaaatgcattctgccttttagaaggaaaatattatcttcagctctctgaattactcaaggcaaactctgaagccaggagcatccataatcatattatcatcacagacaataatacagcattagaaacagcaagttccctgatacaactcaatgaaacccatagtcrggttctctatgtcatattaacatatccaagtcaactcctatgctatatttctgtctttctcaaaataagagttatcactgttatagaataagggaattatcaatgttatacaaatctgctgccagcattgagttatttggtgcgtgtcagccatccatcatctgtacacagaagctgcacacagaatctgtgtagactcaactacctgtttca

SEQ ID NO: 20161 - DNA, 532 bp, Homo sapiens
taacgactgggtttgatttatagctttgccacttcgtagctgtgggaccttgggtgacttgacattattgagcttcactttctttatctgtagaatggggataattgctttacccactgcattgagtcataataaggagtcaatgagattatgcatgcaaagtgtttggcccatagtaagtgctgcgtaaaagctaggctgctattatttgttactcagtctggccccaccttgccattctaatgtccctcctcagagcctttcagaattagctcctcattctcctctgtgttcacaacactcattcttgtgttcctgagtagcttatgcagttccacctactctttawctctttcttcattttgattattcctaaatttcttcaggggacagctctgcccctcccctccctcacaggaagccctcctctgtaagtcttctctcagtgatctttttttgtccgagcttttaagtattttagaattagaaccctatagtgtaacttgaagttcctcactttctattccttgtg

SEQ ID NO: 20162 - DNA, 452 bp, Homo sapiens
taattttatgtttatgtttatgaaaaagagcatcatgcatcagtagtgaaataactatattgtgtcacaggaggaaagctaaaacactttcaatggtttcctttttggtgttcttttaaggttggtgtaaaagtaattgcagttttagatcatgaattttaaatcattacaactaggctcaaacacatatttattaatccaaataggaaccattacaatyagtccatttttgccaacaagaaataagtttgcttactactatagcataaaaatccatgcttcagaatttgatgaatgcctggaaagcattttctgcatcctgctgtttgtggaagcattttctaggcaaaacattgtggagatactggaagaagttgtattcagttggtaagaggtcaggtgaatatggcagatgaggcaaaactttgtagcccaatttgttcaattttcaa

SEQ ID NO: 20163 - DNA, 550 bp, Homo sapiens
atgtccaaaccattaccatttctagtctggtttgtactcttgtaaygatgtattagcaccttcttaaataccatattaagtatgaaatctcactcttgtttaacaacattatgtcaggttgttccagaattagtatttctcaagttgtgttctatggaatattagtttcatttgaatatgttaaatgaaaatagatgctatagagaaagcttgcttagatgatccaagaaaagatgagaaatgttacatattttgtaggcttgagaagtactgtagtaaatatatatttttattaacagaattttgcaattcagagccaaaagttttaattttcaataacatatttatatccacattgctttgataaacatactgttcaatggcatggtttcttacccatacatagaatatttatgctttgaataactcaaaaatatattagaatttgtctagtccaacttcttcattttacagataagaaaacttatgccaaaagcaattccttttttaattatttagtttgtgtagcctttaagaaagggactatatt

SEQ ID NO: 20164 - DNA, 569 bp, Homo sapiens
gagttccagaccagtctggggccaatatggtgaaaccctgcctctactaaaaatacaaaaattagctggcaatggtgtcgcgcgcctgtagtcccagctacttgggaggctgaggcagaagaaccgcttgaacctgagaggcggrggttgcagtgagccgagatcgcgtcactgcactccagtctgggcgacagagcgagtctctgtctcaaaaaaaaataaaataaataaaaaataaataaaggaatagaaagactaataaatagaatataataccaaagagagaggcaggtaaaagcttcattattttatatgtatctattctagtggaaaggaacagagtctctcaatgactagttcaagttataagcataatgtaaggagacatatgcagaaacatgtactgagactcataaaaagcccaaaagacattggtcatatttcacagagataggaatcatagcatatttctgagactatattatggactgtcaaagactattctagaaatctctgcagcaatttagaatggattttcaatttaatgttcaattattaatttaactcag

SEQ ID NO: 20165 - DNA, 527 bp, Homo sapiens
attattttcatctcttattaggacctttgctaacttgcctaactgtttctcatcttttcttcataataacctattgtccaaattaatttttgagttttattttaaaaaacacataatagataacataactctcctattcaatatatttaatgtcaatgaaagttagcatgttgaagtgcgatgtgtattctattcacttgacgtgtagttgtttaaaaatgttcttcaagtaatagattactgttatcatcctcctttatacacaaggatattgataytcagaaaattcaaataatctgagcagatgaataaagttagtaagcgttgcaactggaatgtaaaccaatatttattgattctgataccaattcaatatttattattttaaactctatcctacacaactttccattgtctgcagaaagaagttcaacattcctacaaattcatacatagttcttgacaattttccccaagccacatttagaggctcatttttttcctctttctctcatcatgtggctacc

SEQ ID NO: 20166 - DNA, 661 bp, Homo sapiens
ttatttgtttacctgccttcctcagcagaatacaaactctatgaggttaagaacactgtcttgtttgctgttctctctctctctctagcgtttgaaacagggcctggcgtctagtagaggcccaattaccatctgttgaatacaaatgaatggaagtctgttgattctggcataagcaccgcactgttttcatcatttaagtgttataatgtgtactaatattactttgtaatgaatatgaaagtctgtttagaaaggcatgggttttaagaggagacagatattggttcaaattctggctctatcaggtggtagttgcatggcctcggtcaagtggtttgacctctctgggccttaatttccttggagttaatcaggggataatcatcccctccacacagggttattataaggaataaatgagataatacacgtattgtgaaattgtttttagagacagggtctcgctctgttgcccaggctggagcacagtgatggctcactgcagcctcaaactcctgggctcaagcattcctccttcctcagcctcctgagtagctgagactgcaggtaccttccaccatgcccagctaatttattttactttattttttttgtagagatggggtctcgctttctggttcaggctgttcrcaaactc

SEQ ID NO: 20167 - DNA, 521 bp, Homo sapiens
atgcaggaataaaaaggcttgatacacatggatattatgtcatgagggattcaggagtttatattaatatacaaatattagttgttttttttttgtttgttttttgttttttgttttttttttgagacgtagtcttggtctgtcgcctaggctagagtgcagtggtgctgtctcaactcaatgcaacctccgcctcccgggttcaagcaactctcctgcctcagcctccccagtagctgggattacaggtacctgccactgtgcccggctaatttttgtgtttttaatagagatggggtttctccatctcggtcaggctggtctcgaactcctgacctcgtgatccacctgcctcagcctcccaaagtgttgggcttacaggcatgarccattgcacctggccccaatattacgatttatcctgccctacctcaccactcttttcatgattagagatggaaaaatttgatattatttaaaaatcagtaagattctatctaatcaaaccattggcagtataa

SEQ ID NO: 20168 - DNA, 521 bp, Homo sapiens
ctggatcccctgggacatcccactttggggtctaatcttagagtgtcagatatctctgaccttaggtgggcactagggccactttgtatgtttttcctgcagaggtgatagcctactatgagctttcctttgcctcctaggtgtaatccttgacttttagcatcccaccgtttagataggctgtatcttcttggatttaatgaaggttcccaaacattgcagagttaacagtaccaaggttggtggggtattccccattacggaaaggtccaaggagtatataaaaaactggggttgagaatttctgtgggattcagggcaagaaaattgatgccaaagcaatgaccatgaagctatgtggtcccttcagtggaggtccaagatgtagaatgtattctaaaccttgttggtcccaaaggcccttagccagtgaagtagrtcaagtaggagaagagaggtaacaatgcctaagatacattatcttttgccattacaggataactttataggataatttatca

SEQ ID NO: 20169 - DNA, 1257 bp, Homo sapiens
acagatctgtgccattatttttatctgctgtgtagtattccatagtatggatyaccagaattttctaactagctccttattgatgcagatttttccagtagcttcgcttttgccacagtgaatgttttatttccatgtgcaaatgtttatcgaggacagatgtgatgaaatgaaagagatggatctgaaggtattaaatttgaatgagaaaagtgctagaccccatgggctggtccccctgtctctatggggcagccaagtgaggggaaggggccagaatactgtgctctgtggcaggctcgtgggttggttttagggtccacagttgcctgggtttggatgaggggtgtgaggctgccatcagtcagcccttgacctcactgggctatgctcagcttcctggcagcactacagagcctgctgctttcagcaggctgggaacggctgcttcttgctggtggagctggtgtttgggaggctgccggggtgttagctcacagtggcgtgggagcgtggggtggcagctcccccactcccctgagctcacagcagcctctgagtcaacctcccccacctgcctggggaatgtgagttgtttccagagaaaggcaggctaggaactcactgagtttcatcctctggtcccatattgcctttagactagtgtccttgcccttggacctgcctgagccccatgctcactgctctcactgccatcaccctctgccccaggcgacgccagctccaccaagatcctcccatattccctgcgttatcttacctccacacctttgtatatgcaattccctctgtctgggacactcttcctgtgactaactcctgtaaccctcagctttgagtccggcgtgatctctggggagccatctgtgagccttttcccggccctggttaaagtagcaactcaatacgtagctgatgtttactgagagacagtgtagtgtcatggctaggagcacagaccctgcagtttgtcctccaggattcaaatcctagctctaccgtttactagctgtgcatccttgggaaagttactttacttctcagtgcctccatctccccatcggtaaaaatgaggatgatgatgtacccgcttcataacgttgttggggggttaaattaagttgataaatgttgaagtggtatggtcagagctacgtaagtggtataaattgttgttattctacactattctacatttacgtaatctattattacagcatattctgattgtcatca

SEQ ID NO: 20170 - DNA, 666 bp, Homo sapiens
tggaaaacaagaataagaagctgtagcggcgcctgtaagtgggccggagcaggcgcagcttggccacctcccgccgaaaggcaaggaaggaccggctgcgacacgaggaagaaggcccctcggcctcagcagagcgctatcctccactggttmcccgggttccccggcttgctaccgggctgctccgtgcatctttccccccaggcgtcaggaactgcgccctcatggcggaggtgaaggtgaaggtgcagccgcctgacgcggatccggtcgaaatagaaaacaggtaaaccagtgaggctccggcttggcactccatcaggcgcccagtcatttgggcagctggaccccttctccgggatcccttgggagtggccggagcgggttaggtgagcacgcgggaaaaacgattgcggggttctggacccacttgttccttcccatcctgggagagcagaactcaagaagttcaaaatgggtttgacagcttgcaactttgtgtagctggctggctttgccctgatacttttggggaagttgtgatgacgtgctgccttcctactttgacgcgatcagtgctttgagaggagccctcggctttctttccctgtagaacacttgtgaatacatgttctgatccaggatcgctcttgtcactaagggaac

SEQ ID NO: 20171 - DNA, 599 bp, Homo sapiens
catgttctgcaggactctggtatgagagctacttgtttccttccagccctacagctgcaagctttcctccttggttgctggcacatttttatttccccaaggggtgcaggacctggtaatattcttgcaatgttgcattccctgggtaggactgtctgtgcagcatggggtctctgtaggctacagggagtccatgtggctggatgagagtcagggctggagatggggattttccaataataaccygtccttgggctctgatccttgctctcctggagtgaataaagccacacccatgatggctcagatcacaagaggtgaactgatgaggactcctctggtgagggggctggatcctctgttttctgatgaggcgtggctgactcagacagattagccctgctgaatctaactcctgcctggaaataggaacttctgcttttgtttccttctttttaaaatagaaactgactattctttttgtctctttcaggtggttttttgtacttttattgttgcatctaaaccatggaaatttgaactcaccatgctgaagaaacaatgcaaagatatgtagttatcttctagtgtgttctgcc

SEQ ID NO: 20172 - DNA, 1093 bp, Homo sapiens
ctcagccattctatttcctgtcctccaggacccgagggtcagttcctttcccacaaggcagaggcacttcctgtatcagagagtgtcccaccaggataagaatgtcaacagacagatttaactgtcctgggcaaagatgccctctaaaggaatgagtcaggagatgccccatgggttttcccctgggagtgggaaggtctggaggtgagkgctcagctgcccactgtgattgaaagcctcaagcctgttcagttggatccatgccagccaagagggtatggaaaatggtactgtgatcctgcctactgtaggtagctagaccctggctcaaggaaccaggcaggggagggtggcgtcctgtgtggcagagggcgctgggctgggcatcaagaaaccttgatttgacctttgctgtgagatcttgggcagtcattttcctctctgaattcaatttccttacctgtaatatgagggggttggactagcgcagttctaaaccttttagggggctgggcgcagtggctgacgcctgtaattcttacactctgggaggccgaggcgggcagatcacctgaggtcaggagtttgagactagcctggccaacatggtgaaaccccatctctactaaaaatacaaaaattagccagggatggtggcgtgcgcctgtagtcccagctacttgggaggctgaggcaggagaatcacttgaacccgggaggcagaggttgcagtgagccaaaatcgcgccactgcactccagcctgggcaacagagcgagacactgtctcaaaaaaaagaaaaaagaaaaaaaaagaaaaagaaaaagaaaaccttttatcggtcctgatttcctttgaaaatgcaatgaaaactgcagagcttctcctagaaaaatgtacatgggtatgcacctgcacacacatacacacacacaaagtcacactcacacacacacatacctacctttatcatctttcaggtatcaagagagctcatgaagcccatgcatagatcaccccctgagtgatagatagataatccccttggttaagacttgggctagatgatctctaatcagccacgataagaaat

SEQ ID NO: 20173 - DNA, 545 bp, Homo sapiens
aatgtaaatttagtgtaattaatatgaatttattcatttaatttggattattgatgggcttgattcttcttaatcctaatgaatacttgcaggccacaggtagttgtttagcattagcaaagtttatcttaaattatttcatataattatattttaagtatgattttaggctctagatttggcctttttcaaatttgtaatatgctttatcaaacattaaacaccattttaaagtaatgtaacaggaatttgggaaacagaaaaacatacctcttttataattttagtactttaacataagagccaatatcgttttttgtacattttgaatcctccacatggaccacacatatttatagctagaaatgtgaatatatatatataattttgtattattcttcacttataaaattagcatttctgatattgtatccgtgtgtgtgtgcrcgtgtgtgtgtgtgtgtatggcttcaaatcttttatgaaacaaaatttaaagttatgaaaatattagtgcccagttcaattcccctcactccactcca

SEQ ID NO: 20174 - DNA, 545 bp, Homo sapiens
aatgtaaatttagtgtaattaatatgaatttattcatttaatttggattattgatgggcttgattcttcttaatcctaatgaatacttgcaggccacaggtagttgtttagcattagcaaagtttatcttaaattatttcatataattatattttaagtatgattttaggctctagatttggcctttttcaaatttgtaatatgctttatcaaacattaaacaccattttaaagtaatgtaacaggaatttgggaaacagaaaaacatacctcttttataattttagtactttaacataagagccaatatcgttttttgtacattttgaatcctccacatggaccacacatatttatagctagaaatgtgaatatatatatataattttgtattattcttcacttataaaattagcatttctgatattgtatccgtgtgtgtgtgcgygtgtgtgtgtgtgtgtatggcttcaaatcttttatgaaacaaaatttaaagttatgaaaatattagtgcccagttcaattcccctcactccactcca

SEQ ID NO: 20175 - DNA, 566 bp, Homo sapiens
gaccttgtgcaattcatttcttctctgcagggtctgctcccatctgtcatgggaaggaggtcagatgagaccacagctaactttccttctggctccaacactctgtgttccaggattctccagaatggaacagtctgaccttggggattctagcaggatcaagtcaggtccccttcatcatcccctctctccctctcatgccccgggaggcttccactcctgcagcatcaggcactgggaggcagagtccagctccacagtcatttttaacatattaaagttctggacagaaagctcatttgaagcctgtgtttgtgccgggagaagagaggccagagccaagcctctccccacgggggtttcatctcccccrgcttgagcagaaatgtgtcgtcacaagcaagcatccaaaaggcacggtgcccacgcctgcgggaccactccactccctaggggttctgaatatgaagtctaaacagactttggcagtttcttcctctgtattcaatcagcctccgagtactctctttcaccccctaagtgtcattcaaatctgccaggctcac

SEQ ID NO: 20176 - DNA, 566 bp, Homo sapiens
gaccttgtgcaattcatttcttctctgcagggtctgctcccatctgtcatgggaaggaggtcagatgagaccacagctaactttccttctggctccaacactctgtgttccaggattctccagaatggaacagtctgaccttggggattctagcaggatcaagtcaggtccccttcatcatcccctctctccctctcatgccccgggaggcttccactcctgcagcatcaggcactgggaggcagagtccagctccacagtcatttttaacatattaaagttctggacagaaagctcatttgaagcctgtgtttgtgccgggagaagagaggccagagccaagcctctccccacgggggtttcatctcccccggcttgagcagaaatgtgtcgtcacaagcaagcatccaaaaggcayggtgcccacgcctgcgggaccactccactccctaggggttctgaatatgaagtctaaacagactttggcagtttcttcctctgtattcaatcagcctccgagtactctctttcaccccctaagtgtcattcaaatctgccaggctcac

SEQ ID NO: 20177 - DNA, 1194 bp, Homo sapiens
ctttataactgggacagcaagtacagatcctggttcgtaggaggtgcctagaaaatacatgataggtaattagttaaattgaattaataactataataagtagtaaaacttaataaatgctagtatttttttaattgtatatatctactactagatacaaactttgagtggtggtgttcatttaccaaagttttggtttttacacttttccaaaaaatgtcaattgctattctgtactctatacaatcagaaggaagtcagtttgagcacataaaaatgacataataggccgggcgcggtggctcacgcctgtaatcccagcactctgggaggccgaggcgggcggatcacgaggtcaggagatcgagaccatcctggctaacacggtgaaaccccgtctctactaaaaatacaaaaaattagccgggcgtggtagcgggcgcctgtagtcccagctactcgggaggctgaggcaggagaatggcgtgaacccgggaggcggagcttgcagtgagccgagatcgcgccactgcactccagcctgggcgacagagcgagactccgtctcaaaaaaaaaaaaaaaaatgacataatattctgcagtatcaagaatacacagcttgatacttcagatttatttttatctttgaaagatattaataaaataagtaatttataaaaacaaagagattttaataactgaaacaaaaatactaattatgataagactaaacatgtaatgtagctgtaggttgaaataaacttgaaacactctagtgtctgcataccttttgctttccccaagaactatttctgcaaaatattcactagcctgcagagataacccacatagactatgttattaatatgcaatcttccttcctgaaacagtttacatatgcagtatakagcatctagaccttgtaattgaattttcaaagtttgctgtggtttgggagctgcatatgggtcagtaatcattatccagacaccatcatttatagtacacatacaattaatcaactcattaattatggaaagagtctcagggaaggctagtacacctatttcttaaacaaatatgttacccttgagctgtaaaagtagcatttccatcagccattgccttagattattgttagatatttgttctgggatcttttaaaacaaggcccataagaagagtcaatataa

SEQ ID NO: 20178 - DNA, 529 bp, Homo sapiens
caacctttctggggctgatgacacccacctcagagcataataggaaggagtaaatgccatatgaagcacttagctcactgtcaggtccataatgtaggtattctgtgagcagtcatgatttctaattcccaactgtaatatccttgggagacatcattcgtgttctgtttatatttttgacagccttccacccagccccatccttgtgcagtgcctggcacatacatggtagaaacatggaaaatactcaattagtaacggggtggatggatacatgggttagatatttarctggggacatttgggcacaagcttccaaaagtcaggaatggatgttcccagcctcccagcatctttcttcttggtgtatattctcttcatttttgctgttggctactttaggaccaaaagaagaaacggtgaatgatttctggcggatgatctgggaacaaaacacagccaccatcgtcatggttaccaacctgaaggagagaaaggaggtaagtggaaaaattggatgtgaacagca

SEQ ID NO: 20179 - DNA, 543 bp, Homo sapiens
aaaccatgacctttctttctaagaccagtgttaggttcacagcaaaactgagaggaaggtacaggmatattccatagacccccgtcccaacatacatagctccacacattatcaacatcccccaccagagcagtacatctgttacaactgatgcacctacatggacgcaggaagatcacccacagtccctggtttacattagggtgcattcttcgtgatgtacattcactcattctttagaccaattcattcatttttttaaagacaaaatgactaaattttcagaccgatttataatgacacctacccctcattatagtatcatacagatactgccctacaaatcctctgtgctctgcctagtcattcctctcttccttctctgcaacccctggcatccactcatctttttattgtctccataattttgcctttttcaagaacagcgtagagttggaatcacacagtgtgtggccttttcagattggtttctttcactgagcaatatgcatttacatttcctccatataatttcttggcttt

SEQ ID NO: 20180 - DNA, 543 bp, Homo sapiens
aaaccatgacctttctttctaagaccagtgttaggttcacagcaaaactgagaggaaggtacaggaatattccatagacccccgtcccaacatacatagctccacacattatcaacatcccccaccagagcagtacatctgttacaactgatgcacctacatggrcgcaggaagatcacccacagtccctggtttacattagggtgcattcttcgtgatgtacattcactcattctttagaccaattcattcatttttttaaagacaaaatgactaaattttcagaccgatttataatgacacctacccctcattatagtatcatacagatactgccctacaaatcctctgtgctctgcctagtcattcctctcttccttctctgcaacccctggcatccactcatctttttattgtctccataattttgcctttttcaagaacagcgtagagttggaatcacacagtgtgtggccttttcagattggtttctttcactgagcaatatgcatttacatttcctccatataatttcttggcttt

SEQ ID NO: 20181 - DNA, 543 bp, Homo sapiens
aaaccatgacctttctttctaagaccagtgttaggttcacagcaaaactgagaggaaggtacaggaatattccatagacccccgtcccaacatacatagctccacacattatcaacatcccccaccagagcagtacatctgttacaactgatgcacctacatggacgcaggaagatcacccacagtccctggtttacattagggtgcattcttcgtgatgtacattcactcattctttagaccaattcattcatttttttaaagacaaaatgactaaattttcagaccgatttataatgacacctacccctcattatagtatcatacagatactgccctacaaatcctctgtgctctgcctagtcattcctctcttccttctctgcaacccctggcatccactcatctttttattgtctccataattttgcctttttcaagaacagcrtagagttggaatcacacagtgtgtggccttttcagattggtttctttcactgagcaatatgcatttacatttcctccatataatttcttggcttt

SEQ ID NO: 20182 - DNA, 551 bp, Homo sapiens
actggtaaaagtaatggggcctggattccaacccatgagctaagggacagtttaccttggtacaagttggttccaataaacaaattccgtgaggaaccgggagaaggaagcatccccctgaaattctgactcctgacacagcctggttcactgcgctctcttttaccccatttcctggctcgactagttctgcttcatttaccatcattttcaaatcaacttactgttggtttctatgagaaaacccacagctgcattaagtcgttttggagacagttaatttgcccacaaatccaccctgatctttacatttgaaagacaaaagtcttgctatcaggaggtagaaggcacacaatctctctttactggttgtgacaaaacaaatcgggttttcaacacatttttgtaagatatgctaacacaataatgaaagggcagctcaactactttgggttgaataactaagcagctcaaaatactcatggctgagtcatgcactcttctaaatcawacaaaaagttaatgtatttgactttgtaaaagaagctccc

SEQ ID NO: 20183 - DNA, 2362 bp, Homo sapiens
tttttttcttgagatgaagtttcrctcttgtcccctaggctggagtgcaatggcacaatctcggttcactgcaacctctgcttcccaggttcaagtgattctcttgcctcagcctcccagttacaggcacacaccaccactcccggctaatttttgtatttttagtagaaacagggtttcaccatgttggccaggctggtctcgaactcctgacctcacctcaggtgattcacctgcctcagcctcccaaagtgcttataggcatgagccaatgcgcctggcctagcaactccactcttaaagtattactctgtgttataatttaaaacagtaaatgttctctttttgctacttacgttttaatttgtagaattccaaatgtgattttagagttactttaaactcagtagctacaaatttacagagtttgggggaaatgtctgtaaactgttaattccatattttgtaaatccttatttatgctctatgtgtttaataatgcttccttacctgatgcccagataatgaggtcttagctttatcttttgggtttatagccctgtacctacctagcactacaggagaaataggaaggcagccaaaaggaataccttagggcattgattttaaaccttattttggtacagactactaagagaacttaatgaaagcttccacgaccttattcctaaaaacatgcatatacaaatgttgatatacttttttggttattactagatcccctaaatcttgatcataggtcccaggataagtattcttgccttaagggcataactacacacaatttcagataatgtagcttagtactggtttgacattaatttggaatcatgccatcagactgacaagatgccaaaggcgaagccatcaaccaaagaatggctgaacctataaaagttaaaattgtttaaaaaaattaaaaccaatcaaccaactgttgggagaagctaaagcagggcttgcatgtctcacataatgtaaaagagtcttggaacatgtccagggtccagggtctaaaacccctcatggccttgggaacaccaagctctgtgctaaagggcagaaggctgccctgcagcaccataatctaagcccagggcataaaacccttcgtggcttgaatggaatccagggctcagggcgtggcctctggaatgtgtctagacttgctggctccttgcttctagcactcctaggctcatagatctattgtatcttaaactagaacatgtttcccattatctcaagtagcagaacatgttccatatgctgcaaagaaaatgctaaaccgtcacagctgtagatcatgtgcttgatacactgctttctttcaactcccacatcctcaccacctgcttctttgtttcatcaccaataaatagtgcaggcttccagagctcggggccttcgcagcctccatattagcattggcccccggacccactttatgcactcttaaacttgtctttttcattcttttgactccactggacttcgtcacctccacgttgggtctggccatcccaacaaccaaccaaccaataaagggtgactgaagacctaaaccaaaagttcttctttagcagaaactataggctgtaaagctatcatgttagccatatacatctacattacagcaatcaatcctggcctctttattttttttatttttatttttttgagagaggcttgtctcactctgtcatccaggctggagtgcggtgacacaatcacggctcactgcagccttgacttccccagctcaagtgatcctcctgtccccgcctcccaagtagctgggactacaaccacgtgcatgctcagctaattttttttttttttttttgagacagggtcttactttgtcacccagacgggagtgcagtggcgtgatctcggctcactgcagcctccacctcccaggctcaagcgatcctcctgccttagccccacaagtagctgggactataggcatgcaccaccatgcctggctaatttttattttttgtagagatggggtctcattatgttgcctaggctggtcttgaactcctggactcaagtgatcttcctgcctcagccgcccaaagtgctggtattacaggtatgagccaccatgcctggccaatcctggcatctttaaatgcaatagatgacataatgttagtagcaatagtagtaacaacaactaatgttcattaagcatttattacctgtgacgcactgttctaagtgccttataggaattcatttaatctttactgctaccctaagaaatattgtattttcctcattttaaagacaggaaaacagaagctttctaactacacatattggagtc

SEQ ID NO: 20184 - DNA, 2362 bp, Homo sapiens
tttttttcttgagatgaagtttcactcttgtcccctaggctggagtgcaatggcacaatctcggttcactgcaacctctgcttcccaggttcaagtgattctcttgcctcagcctcccarttacaggcacacaccaccactcccggctaatttttgtatttttagtagaaacagggtttcaccatgttggccaggctggtctcgaactcctgacctcacctcaggtgattcacctgcctcagcctcccaaagtgcttataggcatgagccaatgcgcctggcctagcaactccactcttaaagtattactctgtgttataatttaaaacagtaaatgttctctttttgctacttacgttttaatttgtagaattccaaatgtgattttagagttactttaaactcagtagctacaaatttacagagtttgggggaaatgtctgtaaactgttaattccatattttgtaaatccttatttatgctctatgtgtttaataatgcttccttacctgatgcccagataatgaggtcttagctttatcttttgggtttatagccctgtacctacctagcactacaggagaaataggaaggcagccaaaaggaataccttagggcattgattttaaaccttattttggtacagactactaagagaacttaatgaaagcttccacgaccttattcctaaaaacatgcatatacaaatgttgatatacttttttggttattactagatcccctaaatcttgatcataggtcccaggataagtattcttgccttaagggcataactacacacaatttcagataatgtagcttagtactggtttgacattaatttggaatcatgccatcagactgacaagatgccaaaggcgaagccatcaaccaaagaatggctgaacctataaaagttaaaattgtttaaaaaaattaaaaccaatcaaccaactgttgggagaagctaaagcagggcttgcatgtctcacataatgtaaaagagtcttggaacatgtccagggtccagggtctaaaacccctcatggccttgggaacaccaagctctgtgctaaagggcagaaggctgccctgcagcaccataatctaagcccagggcataaaacccttcgtggcttgaatggaatccagggctcagggcgtggcctctggaatgtgtctagacttgctggctccttgcttctagcactcctaggctcatagatctattgtatcttaaactagaacatgtttcccattatctcaagtagcagaacatgttccatatgctgcaaagaaaatgctaaaccgtcacagctgtagatcatgtgcttgatacactgctttctttcaactcccacatcctcaccacctgcttctttgtttcatcaccaataaatagtgcaggcttccagagctcggggccttcgcagcctccatattagcattggcccccggacccactttatgcactcttaaacttgtctttttcattcttttgactccactggacttcgtcacctccacgttgggtctggccatcccaacaaccaaccaaccaataaagggtgactgaagacctaaaccaaaagttcttctttagcagaaactataggctgtaaagctatcatgttagccatatacatctacattacagcaatcaatcctggcctctttattttttttatttttatttttttgagagaggcttgtctcactctgtcatccaggctggagtgcggtgacacaatcacggctcactgcagccttgacttccccagctcaagtgatcctcctgtccccgcctcccaagtagctgggactacaaccacgtgcatgctcagctaattttttttttttttttttgagacagggtcttactttgtcacccagacgggagtgcagtggcgtgatctcggctcactgcagcctccacctcccaggctcaagcgatcctcctgccttagccccacaagtagctgggactataggcatgcaccaccatgcctggctaatttttattttttgtagagatggggtctcattatgttgcctaggctggtcttgaactcctggactcaagtgatcttcctgcctcagccgcccaaagtgctggtattacaggtatgagccaccatgcctggccaatcctggcatctttaaatgcaatagatgacataatgttagtagcaatagtagtaacaacaactaatgttcattaagcatttattacctgtgacgcactgttctaagtgccttataggaattcatttaatctttactgctaccctaagaaatattgtattttcctcattttaaagacaggaaaacagaagctttctaactacacatattggagtc

SEQ ID NO: 20185 - DNA, 2362 bp, Homo sapiens
tttttttcttgagatgaagtttcactcttgtcccctaggctggagtgcaatggcacaatctcggttcactgcaacctctgcttcccaggttcaagtgattctcttgcctcagcctcccagttacaggcacacaccaccactcccggctaatttttgtatttttagtagaaacagggtttcaccatgttggccaggctggtctcgaactcctgacctcacctcaggtgattcacctgcctcagcctcccaaagtgcttataggcatgagccaatgcgcctggcctagcaactccactcttaaagtattactctgtgttataatttaaaacartaaatgttctctttttgctacttacgttttaatttgtagaattccaaatgtgattttagagttactttaaactcagtagctacaaatttacagagtttgggggaaatgtctgtaaactgttaattccatattttgtaaatccttatttatgctctatgtgtttaataatgcttccttacctgatgcccagataatgaggtcttagctttatcttttgggtttatagccctgtacctacctagcactacaggagaaataggaaggcagccaaaaggaataccttagggcattgattttaaaccttattttggtacagactactaagagaacttaatgaaagcttccacgaccttattcctaaaaacatgcatatacaaatgttgatatacttttttggttattactagatcccctaaatcttgatcataggtcccaggataagtattcttgccttaagggcataactacacacaatttcagataatgtagcttagtactggtttgacattaatttggaatcatgccatcagactgacaagatgccaaaggcgaagccatcaaccaaagaatggctgaacctataaaagttaaaattgtttaaaaaaattaaaaccaatcaaccaactgttgggagaagctaaagcagggcttgcatgtctcacataatgtaaaagagtcttggaacatgtccagggtccagggtctaaaacccctcatggccttgggaacaccaagctctgtgctaaagggcagaaggctgccctgcagcaccataatctaagcccagggcataaaacccttcgtggcttgaatggaatccagggctcagggcgtggcctctggaatgtgtctagacttgctggctccttgcttctagcactcctaggctcatagatctattgtatcttaaactagaacatgtttcccattatctcaagtagcagaacatgttccatatgctgcaaagaaaatgctaaaccgtcacagctgtagatcatgtgcttgatacactgctttctttcaactcccacatcctcaccacctgcttctttgtttcatcaccaataaatagtgcaggcttccagagctcggggccttcgcagcctccatattagcattggcccccggacccactttatgcactcttaaacttgtctttttcattcttttgactccactggacttcgtcacctccacgttgggtctggccatcccaacaaccaaccaaccaataaagggtgactgaagacctaaaccaaaagttcttctttagcagaaactataggctgtaaagctatcatgttagccatatacatctacattacagcaatcaatcctggcctctttattttttttatttttatttttttgagagaggcttgtctcactctgtcatccaggctggagtgcggtgacacaatcacggctcactgcagccttgacttccccagctcaagtgatcctcctgtccccgcctcccaagtagctgggactacaaccacgtgcatgctcagctaattttttttttttttttttgagacagggtcttactttgtcacccagacgggagtgcagtggcgtgatctcggctcactgcagcctccacctcccaggctcaagcgatcctcctgccttagccccacaagtagctgggactataggcatgcaccaccatgcctggctaatttttattttttgtagagatggggtctcattatgttgcctaggctggtcttgaactcctggactcaagtgatcttcctgcctcagccgcccaaagtgctggtattacaggtatgagccaccatgcctggccaatcctggcatctttaaatgcaatagatgacataatgttagtagcaatagtagtaacaacaactaatgttcattaagcatttattacctgtgacgcactgttctaagtgccttataggaattcatttaatctttactgctaccctaagaaatattgtattttcctcattttaaagacaggaaaacagaagctttctaactacacatattggagtc

SEQ ID NO: 20186 - DNA, 2362 bp, Homo sapiens
tttttttcttgagatgaagtttcactcttgtcccctaggctggagtgcaatggcacaatctcggttcactgcaacctctgcttcccaggttcaagtgattctcttgcctcagcctcccagttacaggcacacaccaccactcccggctaatttttgtatttttagtagaaacagggtttcaccatgttggccaggctggtctcgaactcctgacctcacctcaggtgattcacctgcctcagcctcccaaagtgcttataggcatgagccaatgcgcctggcctagcaactccactcttaaagtattactctgtgttataatttaaaacagtaaatgttctctttttgctacttacgttttaatttgtagaattccaaatrtgattttagagttactttaaactcagtagctacaaatttacagagtttgggggaaatgtctgtaaactgttaattccatattttgtaaatccttatttatgctctatgtgtttaataatgcttccttacctgatgcccagataatgaggtcttagctttatcttttgggtttatagccctgtacctacctagcactacaggagaaataggaaggcagccaaaaggaataccttagggcattgattttaaaccttattttggtacagactactaagagaacttaatgaaagcttccacgaccttattcctaaaaacatgcatatacaaatgttgatatacttttttggttattactagatcccctaaatcttgatcataggtcccaggataagtattcttgccttaagggcataactacacacaatttcagataatgtagcttagtactggtttgacattaatttggaatcatgccatcagactgacaagatgccaaaggcgaagccatcaaccaaagaatggctgaacctataaaagttaaaattgtttaaaaaaattaaaaccaatcaaccaactgttgggagaagctaaagcagggcttgcatgtctcacataatgtaaaagagtcttggaacatgtccagggtccagggtctaaaacccctcatggccttgggaacaccaagctctgtgctaaagggcagaaggctgccctgcagcaccataatctaagcccagggcataaaacccttcgtggcttgaatggaatccagggctcagggcgtggcctctggaatgtgtctagacttgctggctccttgcttctagcactcctaggctcatagatctattgtatcttaaactagaacatgtttcccattatctcaagtagcagaacatgttccatatgctgcaaagaaaatgctaaaccgtcacagctgtagatcatgtgcttgatacactgctttctttcaactcccacatcctcaccacctgcttctttgtttcatcaccaataaatagtgcaggcttccagagctcggggccttcgcagcctccatattagcattggcccccggacccactttatgcactcttaaacttgtctttttcattcttttgactccactggacttcgtcacctccacgttgggtctggccatcccaacaaccaaccaaccaataaagggtgactgaagacctaaaccaaaagttcttctttagcagaaactataggctgtaaagctatcatgttagccatatacatctacattacagcaatcaatcctggcctctttattttttttatttttatttttttgagagaggcttgtctcactctgtcatccaggctggagtgcggtgacacaatcacggctcactgcagccttgacttccccagctcaagtgatcctcctgtccccgcctcccaagtagctgggactacaaccacgtgcatgctcagctaattttttttttttttttttgagacagggtcttactttgtcacccagacgggagtgcagtggcgtgatctcggctcactgcagcctccacctcccaggctcaagcgatcctcctgccttagccccacaagtagctgggactataggcatgcaccaccatgcctggctaatttttattttttgtagagatggggtctcattatgttgcctaggctggtcttgaactcctggactcaagtgatcttcctgcctcagccgcccaaagtgctggtattacaggtatgagccaccatgcctggccaatcctggcatctttaaatgcaatagatgacataatgttagtagcaatagtagtaacaacaactaatgttcattaagcatttattacctgtgacgcactgttctaagtgccttataggaattcatttaatctttactgctaccctaagaaatattgtattttcctcattttaaagacaggaaaacagaagctttctaactacacatattggagtc

SEQ ID NO: 20187 - DNA, 545 bp, Homo sapiens
cttagcatgtacgaggtcccgggttcaatccccggcacctccaccagttttgggagtgcgcactttctcctctcaatggaccgcctttccactttcctttctccctcccgttaaataaacctagtctcattcattcaattttctgcttgtctgtacagcctttgcagtgttaagtatctgtatcgatagcattgccacaccaggaaggtcwtgaaccctttgtaaaagcattttcgcaaattaatcagcctggtttctttggatttcatgctatggtattactgaaaaacagaaaaaatataaaaataataaaagaccctttgttttattcactgttttttttttcttttcttttttgaattctgaagagttcttagagcaaagaacagcatggaggtggaatagcagaaacatatcttattgatgtctttcttctgagcttccaaccaccctataccttaccttttcttgaatcaccagatatggaagcagtgggccccgttagtattgtgcggtgataggtacatgaaggacaataaaatgct

SEQ ID NO: 20188 - DNA, 543 bp, Homo sapiens
gaagttgcttaagaaagataagaaatgtgttggcagtaatgaaatgcagaggttaagaacagggcctttggagttcctgagcttggttctaatccagctcaatcatttggtggccactgatgcttaatcaagttatttcgctgatcttcagtttcctacctacaataaaataactgccttgtaaggctgaaatgagacaaggtagtagcatgagtacggtgccagatacgcaaaagatatgcagtaagctctcaatatgtgtgttttttttttatgagaaaaaatacccatgattagaagttatttatgtccccccaataataacaacatgaataatagttaatatttgagtgcttccaatgtgccacatactgttctaagcattttatacatattttttctaaaaacatcacaactacataaagtaggaattyggagatataaaagtaattgtatagtactatacaaatgaggaatatagtactatacaaatgcagcatataaagatgaaataactcacccaggatagtaagcaacagaacc

SEQ ID NO: 20189 - DNA, 536 bp, Homo sapiens
taacggaatgagccactggaaattttaaaaggaaaagtacatgggagaacctgatcaatttagccagccacttctggagtgccacagtcactaatgaagcaacctccagtgcaggccctggctccagggcgctatgtacaacctcctgcctcgcgcaacgtgggtctcccggagcctatcctgccagcgccgcgcacggtcccagtccaccaggccgccaaggcccggaggggggcgccctagtcgcggggaacactggaaatgyttcaggggcggactccgaagaccgagtattgcctcgagggactttctgcgccaccccgtaatcgcttgcgctccaggtcttcgtaggtgggggccgggtgggtgaagactgggaccctatgccacgcgcagcactcagaggagggctggggtcccagggccgcagcgcggtcagttcagtccgggctcgagcttcctagcagcgccctccttgggggctggccctgaccctcggtgccgctacgagtgggtggccagaagctggtggtgga

SEQ ID NO: 20190 - DNA, 520 bp, Homo sapiens
cccctgtttcaagatccaatgattctgattgctcctcactgggtgaactttggggaaaatttcayttgaaatgcaggacctggagacaaagatagtgtcagaggcctcaaggattgctccacaactgtggacccttctctggtgctgacctagacctaaaagccttctgcaggactcgtggccatgccacactgctaactcacagccaactagtcacccacccctgctccaggggactttttttcatattaaatgtttattaaatcaaatctaccccattatatgtgtatttttagttatccttttttttttttttttttttttttgagacggagtttcactcttgttgcccagtctggagtgtaatggtgccatctcagctcactgcaacctctgcctcccgggttcaagtgattctacagcttcagcctctcgagtagatgggattacaggtgactgccaccacacatggctaatttttgtgtttttagtggagacgggagtttcaccatgttggcca

SEQ ID NO: 20191 - DNA, 516 bp, Homo sapiens
aaatttttgtcattgttgtttacagcaatgtataacttcttcacttgtcrtagactcattgagatatcaacagatcagaccttgattctgtcttcgaatttttgactgtattgagtgtgagggagattagaagagcttgcaagattttgtaggttggctgaccagtccttctgagtttttacaggacgtacataaaatagtcaagacatatatacagtacatgtttgaaattatttttcagactgaagaatagagaagtaattaacaatcctttgtgggtacaagtcatatcccctctacttcctaggtatatttctttgcacaagttactttaccgctttttgtttcagttctttcatcactaaaatgggtataatggtatttatccctcagggtcattgcttgacatgtagtaggtactctttaaagaatatctattttacatttgtgatttacaaaacaacgcataggcataatactaattgaataggttactgcagaattttttgtttctga

SEQ ID NO: 20192 - DNA, 516 bp, Homo sapiens
aaatttttgtcattgttgtttacagcaatgtataacttcttcacttgtcgtagactcattgagatatcaacagatcagaccttgattctgtcttcgaatttttgactgtattgagtgtgagggagattagaagagcttgcaagattttgtaggttggctgaccagtccttctgagtttttacaggacgtacataaaatagtcaagacatatatacagtacatgtttgaaattatttttcagactgaagaatagagaagtaattaacaatcctttgtgggtacaagtcatatcccctctacttcctaggtatatttctttgcayaagttactttaccgctttttgtttcagttctttcatcactaaaatgggtataatggtatttatccctcagggtcattgcttgacatgtagtaggtactctttaaagaatatctattttacatttgtgatttacaaaacaacgcataggcataatactaattgaataggttactgcagaattttttgtttctga

SEQ ID NO: 20193 - DNA, 518 bp, Homo sapiens
cattaccctaaattaacattttctttccattaaagttacagataataaaaaagacattgctttcatgtgtagtttacaacacatttaatctatagtactcctttgcttagtaattacaagcacttaaatgcttgaaagcacttagagctactagcagtgaaatgatttatttattcatacacagggaargccattaataagaagaataaaaatgcaatatttcaagaataaaaatacctgttcattagctcaatgaaatcaactctaagaagggtgttgattgatctcattttaaaaggtatgatgagtctcctcaaagtaaatgggatgtatttacataaaataattgaataatcctgacacattttgccattttattctccttacaaggagaagatttagtttctcatgtttagagtcgggcctaagaacaataaagtaattttaattgttcaagagaactgtttaaagacttttcctagcaaatgtttgccaatttaatgagaaattatttgatc

SEQ ID NO: 20194 - DNA, 625 bp, Homo sapiens
caaaatgaagggtctgaaaccaccttcctcactgagaacagagactcagtgagcttagtgtaggcctcatgtaagcccaggccaccaagccagtgcttctcacctgacttaagctacatttgcccaagcctcaacaatgggagttggcctcagcttgtgctggtgctccactgcctcctgctggtcttccccgaacccactgactttttagctaaatctggctgcattacagctcaaacctccacagactgaaatcatatcgaaaggttttaagatccagtgtctgttaattctgagtacacttggacagttctctttgcctcgagtttcttcattgtaaaatggtgaacactcagacctgctattcatatcccactaagatatgamaagaaaaatgccaagcctagagttcttacataaaacttacgttgtggcaaaacatcatgtttttgtttaagccttccatgaccaccctatttaaaaccacatccaggcactaaacagcattccttatcttcttcatgaaaaaattttttcatagcagtaatcaccaagtaatatatcaataattcacttacttgtttactgtctctcctcaaccagaatgtaagctccagagttttaa

SEQ ID NO: 20195 - DNA, 625 bp, Homo sapiens
caaaatgaagggtctgaaaccaccttcctcactgagaacagagactcagtgagcttagtgtaggcctcatgtaagcccaggccaccaagccagtgcttctcacctgacttaagctacatttgcccaagcctcaacaatgggagttggcctcagcttgtgctggtgctccactgcctcctgctggtcttccccgaacccactgactttttagctaaatctggctgcattacagctcaaacctccacagactgaaatcatatcgaaaggttttaagatccagtgtctgttaattctgagtacacttggacagttctctttgcctcgagtttcttcattgtaaaatggtgaacactcagacctgctattcatatcccactaagatatgaaaagaaaaatgccaagcctagagttcttacataaaacttacgttgtggcaaaacatcatgtttttgtttaagccttccatgaccaccctatttaaaaccacatccaggcactaaacagcattccytatcttcttcatgaaaaaattttttcatagcagtaatcaccaagtaatatatcaataattcacttacttgtttactgtctctcctcaaccagaatgtaagctccagagttttaa

SEQ ID NO: 20196 - DNA, 625 bp, Homo sapiens
caaaatgaagggtctgaaaccaccttcctcactgagaacagagactcagtgagcttagtgtaggcctcatgtaagcccaggccaccaagccagtgcttctcacctgacttaagctacatttgcccaagcctcaacaatgggagttggcctcagcttgtgctggtgctccactgcctcctgctggtcttccccgaacccactgactttttagctaaatctggctgcattacagctcaaacctccacagactgaaatcatatcgaaaggttttaagatccagtgtctgttaattctgagtacacttggacagttctctttgcctcgagtttcttcattgtaaaatggtgaacactcagacctgctattcatatcccactaagatatgaaaagaaaaatgccaagcctagagttcttacataaaacttacgttgtggcaaaacatcatgtttttgtttaagccttccatgaccaccctatttaaaaccacatccaggcactaaacagcattccttatcttcttcatgaaaaaatttyttcatagcagtaatcaccaagtaatatatcaataattcacttacttgtttactgtctctcctcaaccagaatgtaagctccagagttttaa

SEQ ID NO: 20197 - DNA, 344 bp, Homo sapiens
taaaaccagattagtactggattgacratgtgttgaaagtcaaaagaagaggcttgagatctctttatagtgtgatagttttacaagtatatacgtatgttaatgtttaaaaatttcacacctcaaaaatgtgcagtataccagatgttaattatatctcataaagctattaaaattttatctcaaaattatagctttattgcattttagggcattatccaattttgaatctaatccagttatcgtagcttaatgcagtattatgaaaataatgcctataaagatccagttcctcaaacacccttggaaccaattttgtcatctatattagttacctttgggct

SEQ ID NO: 20198 - DNA, 344 bp, Homo sapiens
taaaaccagattagtactggattgacgatgtgttgaaagtcaaaagaagaggcttgagatctctttmtagtgtgatagttttacaagtatatacgtatgttaatgtttaaaaatttcacacctcaaaaatgtgcagtataccagatgttaattatatctcataaagctattaaaattttatctcaaaattatagctttattgcattttagggcattatccaattttgaatctaatccagttatcgtagcttaatgcagtattatgaaaataatgcctataaagatccagttcctcaaacacccttggaaccaattttgtcatctatattagttacctttgggct

SEQ ID NO: 20199 - DNA, 344 bp, Homo sapiens
taaaaccagattagtactggattgacgatgtgttgaaagtcaaaagaagaggcttgagatctctttatagtgtgatrgttttacaagtatatacgtatgttaatgtttaaaaatttcacacctcaaaaatgtgcagtataccagatgttaattatatctcataaagctattaaaattttatctcaaaattatagctttattgcattttagggcattatccaattttgaatctaatccagttatcgtagcttaatgcagtattatgaaaataatgcctataaagatccagttcctcaaacacccttggaaccaattttgtcatctatattagttacctttgggct

SEQ ID NO: 20200 - DNA, 528 bp, Homo sapiens
aatacactccaccaaacaaaagggttttcaaaggcatatagaatattcaatcatataatgattcaaaatgtagaaagtcaaattttagaatgatttgcaattattcagcaagtattgtctgacaactatagaattaagctagaaaatctgcaactgtgtggaaattaaacaatatacttctaaacctatggacctaataggttggaatggagtttagaaagtattctgaactcartaaaaatgaatttattgctaaaaaaaaaacttggtggtgtgaaattgcagaaatgcttagaggaaaaaatgaccttaaagagagatattaaaagagtagaaatcctcaaaactcaatgatcttaacttccatagccagaagctagtgaaagaacaacaaatgaaacttctctaaagtgaaaacattctaataacaaggacaatagcagaactcaatgcatatacaataggggaaaaaaagcaataaagccaaattgctttttagtgtttataaaattgaggggatccttatca

SEQ ID NO: 20201 - DNA, 539 bp, Homo sapiens
cttcactgaggggtaagctctaggcaagatccacatcaccaggaacattagcatttttttttagattaaatttacttttatttacagtctcttcaaatractttcctttttttattattatacttaaagttcagggtacatgtgcacaacgtgcagttttgttacatatatatacatgtgtcatgtcggtgtgctgcacccattaactcgtcatttaacattaggtatatctggaggagccaaggtggccgaataggaacagctccagtctacagctcccagcgtgagcgacgcagaagaagggtgatttctgcatttccatctgaggtactgggttcatctcactaggaagtgctagacagtgggcgcaggacagtgggtgcagcgcaccgtgcatgagccaaagcagggtgaggcattgcctcactcgggaagtgcaagggatcagggagttccctttcatggtcaaggaaaggggtgacagacggcacgtggaaaatcgggtcactcccacccgaatactgcgcttttccaacggg

SEQ ID NO: 20202 - DNA, 539 bp, Homo sapiens
cttcactgaggggtaagctctaggcaagatccacatcaccaggaacattagcatttttttttagattaaatttacttttatttacagtctcttcaaatgactttcctttttttattattatacttaaagttcagggtacatgtgcacaacgtgcagttttgttacatatatatacatgtgtcatgtcggtgtgctgcacccattaactcgtcatttaacattaggtatatctgraggagccaaggtggccgaataggaacagctccagtctacagctcccagcgtgagcgacgcagaagaagggtgatttctgcatttccatctgaggtactgggttcatctcactaggaagtgctagacagtgggcgcaggacagtgggtgcagcgcaccgtgcatgagccaaagcagggtgaggcattgcctcactcgggaagtgcaagggatcagggagttccctttcatggtcaaggaaaggggtgacagacggcacgtggaaaatcgggtcactcccacccgaatactgcgcttttccaacggg

SEQ ID NO: 20203 - DNA, 539 bp, Homo sapiens
cttcactgaggggtaagctctaggcaagatccacatcaccaggaacattagcatttttttttagattaaatttacttttatttacagtctcttcaaatgactttcctttttttattattatacttaaagttcagggtacatgtgcacaacgtgcagttttgttacatatatatacatgtgtcatgtcggtgtgctgcacccattaactcgtcatttaacattaggtatatctggaggagccaaggtggccgaataggaacagctccagtctacagctcccagcgtgagcgacgcagaagamgggtgatttctgcatttccatctgaggtactgggttcatctcactaggaagtgctagacagtgggcgcaggacagtgggtgcagcgcaccgtgcatgagccaaagcagggtgaggcattgcctcactcgggaagtgcaagggatcagggagttccctttcatggtcaaggaaaggggtgacagacggcacgtggaaaatcgggtcactcccacccgaatactgcgcttttccaacggg

SEQ ID NO: 20204 - DNA, 539 bp, Homo sapiens
cttcactgaggggtaagctctaggcaagatccacatcaccaggaacattagcatttttttttagattaaatttacttttatttacagtctcttcaaatgactttcctttttttattattatacttaaagttcagggtacatgtgcacaacgtgcagttttgttacatatatatacatgtgtcatgtcggtgtgctgcacccattaactcgtcatttaacattaggtatatctggaggagccaaggtggccgaataggaacagctccagtctacagctcccagcgtgagcgacgcagaagaagggtgatttctgcatttccatctgaggtacygggttcatctcactaggaagtgctagacagtgggcgcaggacagtgggtgcagcgcaccgtgcatgagccaaagcagggtgaggcattgcctcactcgggaagtgcaagggatcagggagttccctttcatggtcaaggaaaggggtgacagacggcacgtggaaaatcgggtcactcccacccgaatactgcgcttttccaacggg

SEQ ID NO: 20205 - DNA, 539 bp, Homo sapiens
cttcactgaggggtaagctctaggcaagatccacatcaccaggaacattagcatttttttttagattaaatttacttttatttacagtctcttcaaatgactttcctttttttattattatacttaaagttcagggtacatgtgcacaacgtgcagttttgttacatatatatacatgtgtcatgtcggtgtgctgcacccattaactcgtcatttaacattaggtatatctggaggagccaaggtggccgaataggaacagctccagtctacagctcccagcgtgagcgacgcagaagaagggtgatttctgcatttccatctgaggtactgggttcatctcactaggaagtgctagacagtgggcgcaggacagtgggtgcagcgcaccgtgcrtgagccaaagcagggtgaggcattgcctcactcgggaagtgcaagggatcagggagttccctttcatggtcaaggaaaggggtgacagacggcacgtggaaaatcgggtcactcccacccgaatactgcgcttttccaacggg

SEQ ID NO: 20206 - DNA, 548 bp, Homo sapiens
ttccttagagccccagcaattcctcttattaaattagttccctttgaagtggaactcagctcattataataatttgaatgctgaggaattgtcttatatgttcctgtctgagaaaaattgcttttacaattgcatttatgcatgtcctggtctctgtccattgggacaaaggacagctgtcgatgctaagtggttcctgctttggagaagagctgggggagggtccgggggatctgctgccctgtgggctggagctgctgaggtgcaagtggtaggagctccacatacatgagggggacaggctgcstaggtttcctccaacatctcagccatggcccacatcagaaagctataccaggacatggaggctggtggggaactttagaaagtccaggtcaacattttcgcatggactgaatgacccagaaaaagagatgttcaaatacagacctcctggcctgcatcagcctctcctagctacagataccagtgccccacccccggagattctgattcttcaggtcagcagaggggtactagaatctgtg

SEQ ID NO: 20207 - DNA, 570 bp, Homo sapiens
caagactatgcctggcccaaagtctttgtgaaccagatatttgagagtcagtgagtgaaactagctctccatagccaggctggcttcatctgcccctggtgcaagcaataagggagcacgctgtgtgcggagatgttaaaaacaatcctaaagctcactagaagtcagttggtttcgtgtggtcaccatgagcaggctattctaaacaatgtccctggtcacatcgccttctcccacagtttccaaccttccattccctcccagcaccacactgagatgtctgttactttctgttctcccgataccctgcgagctttttgagagcaaagaccatgatttaaatcatctctgtatttccactgctgacagatagcaggtgcatgttttatacagttacaggaagatttcagtttttaggtctaaacctaactggattgaaatcccagcacagccatgaaccattcttgcaactttgggcaagttgtttcaccactatggcttcatcatycctcctatatagtgggtctgatgattattgggtttataaatatatataagtgtgtatatgca

SEQ ID NO: 20208 - DNA, 537 bp, Homo sapiens
tgggaggttctgccagtgctgccttactgtggtctccctgaacatcataaatccaggtgaccccatgtaaatgatttaagccatatcaattattgtctcccctttttatgcccaagtttgagtgaggctcaccatcagatttaaatgtttacacattgaaaacaaatatgaagatggatatttacatggtggyttccacaataactctctatggaggagcactaggaggtagggattcattagaaatgcttctgaaatagagacagaagtcacaggttcactggggactttaggcagggcacttaacctttcccagactcagtttccttgttagtaaaaaggagatcaaatcatctgcctcagttgcttcctagagttattgtgaggaagacagggtaccagaagtgtgaaagtactctgaaaaagtagggagttattattaaggggcatgatctctaaaaccaagagaccccagccactctctaagtatgattctttaaccatcagagtggacatcacctaggaacttgttggaaa

SEQ ID NO: 20209 - DNA, 687 bp, Homo sapiens
ggctgggtgtcccatgtttactgattagtaacagaaatactcagagtgtgtgtgcccatctaccttagtcactgtcccaggctcagatagcatctccaccttgggtactgcagcaagctctcttcatgtgtgccttattcctctctgtggaacccagcaaccatacactggtttcgcagtcaatcccatgctcctgaccacactctcctgctgcarttccccaaacaaaaacaatgatccaaaggcatgtacagtcgcacatgcctgtagtctcagcgacgtggaaggctgatgtggggagttcaaggatgtagtgcattctgacagcacctgcgagtagccattgtactccagcttggcaactagatgactagcaccatctctgagcaactaaaagtgaaacagaaggagacaccttccatttgtatggtgacttgtgggtcactaagcgctttccattccataggctcctctcattctcacggatgcatgatgtaattattacaaccctttcatatgagaagaaacaggccagaaaaagtggagaaagagagtaagatgggtgggagcaaatactcagaatctgatgtcacactgaagaagcacaggagaaaacccacagctgcttccaggccacctacctctctagcaaacatggagttgcttttataatgtgtaactggagtc

SEQ ID NO: 20210 - DNA, 687 bp, Homo sapiens
ggctgggtgtcccatgtttactgattagtaacagaaatactcagagtgtgtgtgcccatctaccttagtcactgtcccaggctcagatagcatctccaccttgggtactgcagcaagctctcttcatgtgtgccttattcctctctgtggaacccagcaaccatacactggtttcgcagtcaatcccatgctcctgaccacactctcctgctgcaattccccaaacaaaaacaatgatccaaaggcatgtacagtcgcacatgcctgtagtctcagcgacgtggaaggctgatgtggggagttcaaggatgtagtgcattctgacagcacctgcgagtagccattgtactccagcttggcaactagatgactagcaccatctctgagcaactaaaagtgaaacagaaggagacaccttccatttgtatggtgacttgtgggtcactaagcgctttccattccataggctcctctcattctcacggatgcatgatgtaattattacaaccctttcatatgagaagaaacaggccagaaaaagtggagaaagagagtaagatgggtgggagcaaatactcagwatctgatgtcacactgaagaagcacaggagaaaacccacagctgcttccaggccacctacctctctagcaaacatggagttgcttttataatgtgtaactggagtc

SEQ ID NO: 20211 - DNA, 521 bp, Homo sapiens
ttataaaagaagaacaaaactaagacctcacattttccaattctgaaagttactgcaaaactacaataatcaagacagtgtgatactgacataaggatagccatataagtcaatggaataaaattcaggttcagaaataaacccatacagttatggtaaattggtttttgacaagagcaccaacattattcaataagggaaagaattgtcttttcaataaatcgtgctggaacaaccagatatccacatgtaaaagagtaaatttgggccaggtgcagtggctcacgcctgtaagccagtagaaaccccgtttttagtagaaaccccgtctctactaaaaaaatacaaaaaaaaattagccgggtgtggtggygggcacctgtagtcccagctactggggaggctgaggcaggagaatggcatgaacccgggaggcggagctcgcagtgagctgagattgtgccactgcactccagcctgggcaacagagcgagactccatctcaaaaaaaagagtaaatt

SEQ ID NO: 20212 - DNA, 1147 bp, Homo sapiens
gatttgatcattacacattgtatgcaggtatcaaaatatcacatggaccccataaatatgtacaactatataccaataaaaaaygaaacaggtagttggagctaaattagaaaagtagaagcataatttgatagtcagtgggggagtcactgaaggtaactgattagggcagtgacatggccaacattatgggcactgaagattaattaagctgtgatctataggtaagctgaaaaatggaaaacaccaattaggatgatattgtaacagtccaggtgaacagtaagactgaaatataatggtttcaatgaaaatagaaaataaaaataaatatttaagagagagaactgataaaacttaatgactagttgaatgtagtcacagtcacagagagaagttaaaattgttaccatgctccaaaccttaaaagccagaataatggagataccatcagggacgtcagaaggagagcaagtttcatttcagctacactgagtttttaatgtcaaaagatgtctaaagagatttaaactgtacaatcagaaataaggtcctagagtttagaagtcagtgcagcaagatataaatttgttcattatctgtatgtattatatttgaaaacactgaagtgaatgagtgtcaaatgaatgagaatgtcaaaaaagaggatgtgggctgggtacggtggctcacgcctgtgatcccagcactttgggaggccgaggcgggtggatcacctgaggtcaggaatttgagaccagcctggccaacatagtgaaaccccgtctctactaaaaatacaaaaaattagctgggcatggtgctgggcgcctgtaatcccagctactcgggaggctgaggcaggagaattgcttgaacccaggaggcggaggttgccgtgagccgagatcgtgctattgcactccagcctgggcaacaagagcgaaactctgtctcaaaaaaaaagaggatgtaaatagatttaaatttttagatggcagacatttaataaatacaattggtagattcattctgatctcatagcattaaataccatttataaaaattccaaaatctgtgtctccatctcattgaattcgaaattcatatgtacaatttcctactttactttcacttacatatctaa

SEQ ID NO: 20213 - DNA, 1147 bp, Homo sapiens
gatttgatcattacacattgtatgcaggtatcaaaatatcacatggaccccataaatatgtacaactatataccaataaaaaacgaaacaggtagttggagctaaattagaaaagtagaagcataatttgatagtcagtgggggagtcactgaaggtaactgattagggcagtgacatggccaacattatgggcactgaagattaattaagctgtgatctataggtaagctgaaaaatggaaaacaccaattaggatgatattgtaacagtccaggtgaacagtaagactgaaatataatggtttcaatgaaaatagaaaataaaaataaatatttaagagagagaactgataaaacttaatgactagttgaatgtagtcacagtcacagagagaagttaaaattgttaccatgctccaaaccttaaaagccagaataatggagataccatcagggacgtcagaaggagagcaagtttcatttcagctacactgagtttttaatgtcaaaagatgtctaaagagatttaaactgtacaatcagaaataaggtcctagagtttagaagtcagtgcagcaagatataaatttgttcattatctgtatgtattatatttgaaaacactgaagtgaatgagtgtcaaatgaatgagaatgtcaaaaaagaggatgtgggctgggtacggtggctcacgcctgtgatcccagcactttgggaggccgaggcgggtggatcacctgaggtcaggaatttgagaccagcctggccaacatagtgaraccccgtctctactaaaaatacaaaaaattagctgggcatggtgctgggcgcctgtaatcccagctactcgggaggctgaggcaggagaattgcttgaacccaggaggcggaggttgccgtgagccgagatcgtgctattgcactccagcctgggcaacaagagcgaaactctgtctcaaaaaaaaagaggatgtaaatagatttaaatttttagatggcagacatttaataaatacaattggtagattcattctgatctcatagcattaaataccatttataaaaattccaaaatctgtgtctccatctcattgaattcgaaattcatatgtacaatttcctactttactttcacttacatatctaa

SEQ ID NO: 20214 - DNA, 550 bp, Homo sapiens
atgaaaactgtaccctattgatgtwaggtgttaaaacaggggaaaccaggcgtgtctgcgcatctgtgtgctgtgtctgtgtctgtgtttctgtggatctgtctgtgtttccacgtgtttacgtgtacaggagacagctggaaatgaggctggggctgaaaggtatctgtataaagatacctatcaacacagatatcaacagacatctgtatccagggagatggcaaggccagggccggcttcatgggcatctgacccgtgcagtcacacagggcccgacacacagaagtacgccgagcttggtttcatgctctgctgttgctgtcttgaaatcctttatacatttttgacacattttcattttgcactgggcccagaaggtgacacaaccagtcctgggagcttgtttttaaacattcatgatgaaaactcctagcccctacacctgactagttggggttaaacatgggaacctgtatttttctcttccaatatatttccaggaggttctgacaacagctgggtttgagcaccacctcggacagatgtg

SEQ ID NO: 20215 - DNA, 550 bp, Homo sapiens
atgaaaactgtaccctattgatgttaggtgttaaaacakgggaaaccaggcgtgtctgcgcatctgtgtgctgtgtctgtgtctgtgtttctgtggatctgtctgtgtttccacgtgtttacgtgtacaggagacagctggaaatgaggctggggctgaaaggtatctgtataaagatacctatcaacacagatatcaacagacatctgtatccagggagatggcaaggccagggccggcttcatgggcatctgacccgtgcagtcacacagggcccgacacacagaagtacgccgagcttggtttcatgctctgctgttgctgtcttgaaatcctttatacatttttgacacattttcattttgcactgggcccagaaggtgacacaaccagtcctgggagcttgtttttaaacattcatgatgaaaactcctagcccctacacctgactagttggggttaaacatgggaacctgtatttttctcttccaatatatttccaggaggttctgacaacagctgggtttgagcaccacctcggacagatgtg

SEQ ID NO: 20216 - DNA, 550 bp, Homo sapiens
atgaaaactgtaccctattgatgttaggtgttaaaacaggggaaaccaggcgtgtctgcgcatctgtgtgctgtgtctgtgtctgtgtttctgtggatctgtctgtgtttccacrtgtttacgtgtacaggagacagctggaaatgaggctggggctgaaaggtatctgtataaagatacctatcaacacagatatcaacagacatctgtatccagggagatggcaaggccagggccggcttcatgggcatctgacccgtgcagtcacacagggcccgacacacagaagtacgccgagcttggtttcatgctctgctgttgctgtcttgaaatcctttatacatttttgacacattttcattttgcactgggcccagaaggtgacacaaccagtcctgggagcttgtttttaaacattcatgatgaaaactcctagcccctacacctgactagttggggttaaacatgggaacctgtatttttctcttccaatatatttccaggaggttctgacaacagctgggtttgagcaccacctcggacagatgtg

SEQ ID NO: 20217 - DNA, 550 bp, Homo sapiens
atgaaaactgtaccctattgatgttaggtgttaaaacaggggaaaccaggcgtgtctgcgcatctgtgtgctgtgtctgtgtctgtgtttctgtggatctgtctgtgtttccacgtgtttacgtgtacaggagacagctggaaatgaggctggggctgaaaggtatctgtataaagatacctatcaacacagatatcaacagacatctgtatccagggagatggcaaggccagggccggcttcatgggcatctgacccgtgcagtcacacagggcccracacacagaagtacgccgagcttggtttcatgctctgctgttgctgtcttgaaatcctttatacatttttgacacattttcattttgcactgggcccagaaggtgacacaaccagtcctgggagcttgtttttaaacattcatgatgaaaactcctagcccctacacctgactagttggggttaaacatgggaacctgtatttttctcttccaatatatttccaggaggttctgacaacagctgggtttgagcaccacctcggacagatgtg

SEQ ID NO: 20218 - DNA, 524 bp, Homo sapiens
gctaactaaccactctaggagttacaggagagtcactttatatacacacacyacatggtttaggctggaatgtttaaaaaataaattcctacagagtcaatattacagcatcttagtctgggccttgttccttggacagcactatgggagggaaaggggaacttggaactggccagagctcagtttaagctttatcacttaagtggtggtgggaccttggggcagttgcttaaggtttctgaattaattccatgtttgtaaaataatgatgataataattctggcctcttagggttgttgaaatgattaaatgagatagtatgttgtctggcatgcagcaagtgatctataaatggaagcttttgttatttattctttgaacaaatattggctggagtttacgagagatcttgtaaatctctgtttacaagattgcaatggataagcagatggcttgagagacaggaataactctaggagagctggtgaaatggttgacaattcatcttcccttgtacgagcct

SEQ ID NO: 20219 - DNA, 577 bp, Homo sapiens
ccttccttccttccttccatccttcctttctttgagacagggtcttgctctgttgcccaggctgaagtgcagtggcacaatctcagctcactgctcactgcagcctttacttcctaggctcaagcaatcctcccaccccagcctcccaagtagctgggactacagacgcgagctgccacacctggctaatttttgtatttgttgtagagacggggtttcaccatcttgtccaggctggtcttgaactcctaggctcaagtgatctgcccacctcagcctcccaaagtgttggattacaggcatgagccactgtgctcagcctcttttactttttttttcttttctttattaccaagcttctgctttgcttcttccattcttctttcctgttttctaagggattactgaagtgttttatttttttctctttttcttttttctcctcatactggtttggaaattatatattttctttgcattctttcagtagttgccattraaatatttttagttgaatatttcattatattcccattccatctttgtttttatatttagattttatttcaccaaaaat

SEQ ID NO: 20220 - DNA, 607 bp, Homo sapiens
aaaacgaatgcatgccttgtgccaaaattgcaggaaacctcaccaggagaaacaattttatatgagggaatgtactctctcctttgcattttccctcaaatctatatttttagcccctcacttgtctctacagagcctcagttgcttaatctaattgctgactgaacatctccaggaaactgtgtgtacgtgtttgtattcatagtatatttatttattatctgtttacttccatgggatatagtctccataagagagtagtcatcattgtatttgttgatgcttaataaataatcattgaatgggccgggtgtggtggctcatgcctgtaatcccagcacttttggaggccgaggtgggcagatcacaaggtcaggagattgagaccatcctggctaacatggtgaaaccctgtctctactaaaaatacaaaaaattagctsggtgtggtggtgggtgcctgtagtcccagctactcaggaggctgaggcaggggaatggcttgaacccaggaggcggagcttgcagtgagccgagattgcgccactgtgctccagcctgggtgacagagcgagactctgtctcaaaaaaaataaaaaaataaaaa

SEQ ID NO: 20221 - DNA, 609 bp, Homo sapiens
atataaaattactcaatcacatggctgacagttgatgttggctcttggctagaaattgtgtcttgggcgtctcaggaaatggaggctggattctaaaaaagagcatcccaacagcatgtgtttcaacagatacagatgaagttgcaaggtttcttgtgatctaacctggaagtttcagaatgtttcttgtgtcacattttattggtcaagtagtcactaaagtctgctgaggtttaatgggtaggttaattagataacacttcttggtaacacttcttggcaagggtgtaccacattcacattctaaagcagtaaatgmgatgagaaatatcactggatctatctttggaaaatacaagctaccataatatggaatggcagaaaagctgtgtgtttgaaaagtggtaccattggctattaaaggattatacatctgtgctttgtaaacctgaagcataaacattaatgatattaactataattgtatactgctttctgtgtttcaggcaccactttaagttctttctaggcaccaagtcatttaatcctcaaaacagcttaatagacattatcagaaatttatagaagaggaaactgaggcaaagaaag

SEQ ID NO: 20222 - DNA, 612 bp, Homo sapiens
gtgttaagtgttgcacasaaaaaatggcaaatacctgcaactgtaatataatacgccctacaccccacctacttattctactaattgcttgatgaaaggaaaatcatatttctaaaacccaaatgtttatctcagtgttgcttggtgggtttggaagtcaagcagacctaggttcaagctctgattttactccttgcttctatggacagggcagctactttgttcaactctaggaacacattcacatcagaatctatatgaatggcaccctctggattagggaccaacactactttatgtaagtgaaagtgtagagccactttcctagacctcagttggaacacactcctgaggttgtccaaggcagctggtgaggctgtgggtaaattacttaatctctgagcctcaccttttaaatatgtagaactggagagtgataatatagtacctaatttattgggctgttttgagaattacaggggagaacgttgtagtaaagcatttagtatagtgccttaacgtagtaagtcttcaatatgcattaactcctattataattttcccaaaatgtatacttctcagaagaagaattaaaaagattgattcttttgc

SEQ ID NO: 20223 - DNA, 539 bp, Homo sapiens
aaagtcctcaccctcccgggtctttgtgccaaaccagcactgtggctggggcttctcctaggccgggtccttctctggggcttccaggagtctaaggtgctctgaggttgagacacagggctgcgcaaccccttccctcttcccccagaagcctccagatgctactgtcctcattcatgcatcctgtggattcaatcattcattcaacaatgatttttttgcatacttactgtgtgccaggctttgctatgagggctgggaacacaacagtgaacaaaagcccttgccctcacagagctcacgttctagtggggaagacagacagtaaatcaacaaacaagctggggcgcggtggctcacgcctataatcccagcactttgggaggaggtcaggagtttgagaccagttcacttgaggtcaggagttcgagaccagcctgggcaaygtggtgaaaccccatctctactaaaaatacaaaaattagccagatgtggtggcgggcaccataatcccagctacttgggaggctgaggcacga

SEQ ID NO: 20224 - DNA, 509 bp, Homo sapiens
tcagctgggcgtggtggcacacgcctgtagtcccagctacttggcaggccgaggcagaagaatcacttgaactcgggaggcggaggttgcagtgagccaagatcgtgccgttgcactccagcctgggcgacagagtgagacttcgtctcaaaaaaaaaaaaaaaaaattacttgagtatgtagttaatattaaaacatcattagtggggtagtttacattcttttttttaatactaagtctctcaaattttagaacatattttacgtatatgacacaactcatttggcttaaccatacccyaggttctcaatagccatgtgtgccagtggccatcatatgcacaacacaatttcagattttgcctgagatggaagggttaaatccccagccattcagagaatgctgccattcataagaattaattccttaaggattatagatggctggggttttattatagtagttttcagttatgaatacttggtttgtatgtttggaaaactactgg

SEQ ID NO: 20225 - DNA, 902 bp, Homo sapiens
ggtaaaaccccatctctgctttaaaaaaaaaaaaaaaaaatggccaggcacagtggctcacacctataatctcagcactttgggaggccaaagcaaggcagatcgcctgcactcaggagttcgagaccagcctggccaacatggcaaaaccctctctctactaaaaatacaaaaattagccaggcgtggtggcacgcatctgtagtcccagctactcgggaggctgaggcaggagaatcacttgaacctgggagtcagaggttgcagtgagccaagattgtgccactgcactccagcctgggtgacagagtgagactccaccttaaaaaaaaaagaggtgtgagtcccctgtgagtgcagaacgggtctgacatctgacacaggcgaggctccctagcagtcatgggaaatggggttgaacttaacaaattaaaatcttttaccagttaggtttaaagcaatcatcattctaatttttaatcactgtgttcattttcagatgcttcaaagtattattaaaaacatatggatccccatgaagccctactacaccaaagtttaccaggagatttggataggaatggggctgatgggcttcatcgtttataaaatccgggctgctggtacgtttccttatgtttgatttttctgaggtcaggaagaaaattattttcaaaaagaatcacaattcacattgtaaaggaactatgggttctaactaggtatgaacattagagctacctacagtccttcgtaaaaaatacagggagcacatgtcagctataaaagacatttggggacagtggggaattttttttttcttttcttttyttttttttttttttttttttggagacagtctctcactctgacgcccaggctggagtgcaatggcacgatca

SEQ ID NO: 20226 - DNA, 556 bp, Homo sapiens
ctcaatttctggtagacctggaggctgggctcagcctcagtctccctccacctctccaccatgtgtgtcaggcaaagaggctgggcttccccgctattttcctgccctgagctgagcatcaagctgggcctcagagatccttcctttctccccatgctcccctctctccaggaggggrgggactctcctccaatctccaatatatggtacatatacatatatatataccaaaacaaagatgtagctgctgtcactgctgaccagaacacccttccggtgtgccttcccacctgagctgtgcctgcactcaccagcccccttgggcagattgccactgtctttaggagccaggcttatacccacctctccccacatgcctacccaactctcaggtcccaacatgcccagcagttgagccaacacaagttgatctaagttcatcagaaggtgagtgtttgactgattctatactcgccacacaggcccaccctcgtctcatgcaagtgacagccccaactccactcctcatctcccagcctgtgaaccgaggcagcca

SEQ ID NO: 20227 - DNA, 603 bp, Homo sapiens
agtcagatgataagagaaaaaggcatcaaaagccaatgccatctgtatggagattcaaatcatgaatttcacctcatttttttgaaactagaggctctatataatgtttttatagttatataacactaattaaatgccaactgtaaagtaggctctgaatggaatattaagaagaagtgacagtctctgcccggtgggttggcaacttaaataaggcaaacaaaacagtaagtaaattgcaaggggaatagctcacatggatagaaggtmgtattaactgattcctcttttcaccatgagtccttacacttttcagactgttttttccccaccctccatcagtcacctccatggtatgtgtgtgcactccaacctcactccttgtatattgcatagcgaacaagtgcttcagaagaaagtggcactattcaagcctgctgggtcttgaagtgctgacatcagctttctagggaacacattttgtattgataaatgtcaaaccccaaagaacaaatttaatttcaggcaagtccaaatttgactttcccagacagtggcacagcacctaacatcaccaaagagtgtgcagatggagcctaatta

SEQ ID NO: 20228 - DNA, 603 bp, Homo sapiens
agtcagatgataagagaaaaaggcatcaaaagccaatgccatctgtatggagattcaaatcatgaatttcacctcatttttttgaaactagaggctctatataatgtttttatagttatataacactaattaaatgccaactgtaaagtaggctctgaatggaatattaagaagaagtgacagtctctgcccggtgggttggcaacttaaataaggcaaacaaaacagtaagtaaattgcaaggggaatagctcacatggatagaaggtcgtattaactgattcctcttttcaccatgagtccttacacttttcagactgttttttccccaccctccrtcagtcacctccatggtatgtgtgtgcactccaacctcactccttgtatattgcatagcgaacaagtgcttcagaagaaagtggcactattcaagcctgctgggtcttgaagtgctgacatcagctttctagggaacacattttgtattgataaatgtcaaaccccaaagaacaaatttaatttcaggcaagtccaaatttgactttcccagacagtggcacagcacctaacatcaccaaagagtgtgcagatggagcctaatta

SEQ ID NO: 20229 - DNA, 603 bp, Homo sapiens
agtcagatgataagagaaaaaggcatcaaaagccaatgccatctgtatggagattcaaatcatgaatttcacctcatttttttgaaactagaggctctatataatgtttttatagttatataacactaattaaatgccaactgtaaagtaggctctgaatggaatattaagaagaagtgacagtctctgcccggtgggttggcaacttaaataaggcaaacaaaacagtaagtaaattgcaaggggaatagctcacatggatagaaggtcgtattaactgattcctcttttcaccatgagtccttacacttttcagactgttttttccccaccctccatcagtcacctccatggtatgtgtgtgcactccaacctcactccttgtatattgcatagcgarcaagtgcttcagaagaaagtggcactattcaagcctgctgggtcttgaagtgctgacatcagctttctagggaacacattttgtattgataaatgtcaaaccccaaagaacaaatttaatttcaggcaagtccaaatttgactttcccagacagtggcacagcacctaacatcaccaaagagtgtgcagatggagcctaatta

SEQ ID NO: 20230 - DNA, 524 bp, Homo sapiens
tctcttcccagaatgcttcctctggacttaagtgggttcttttatctgtttttctctttttggtttttaaaaaagtaaagttggacttgcaaacactagcaacaatttccttagaaaagcaattctgaaaaatcaggagtccctgttcaaagaatgctctccaaaagctatcgggggcagaggaattaaggagcagatcgtaaaacaaaatacatcaaacatataaagcatccaagtaggaggctttggatctccatgaacagttggacacatcagccatagcagagcagtactgggcaattggatatatgcagagaaatgggggcaggcatccaagaggccttgctcaagaaggtggtcggggtcagcaagaaccaagcatgggtcacagatggcatctgagaaggtacagatttctcctgggaatctactatctgsgctaactaatgagagcaaaacagggtccttctctgcagcaccagagctagtgtagcaggctaattattcaggtttgttcttaggca

SEQ ID NO: 20231 - DNA, 499 bp, Homo sapiens
tgatactttagatgatcaggaaaaaggctctgatgtcacttcctaccccttgtgtcacttacattcacttatttatattgggtggaaagatctctttgaataaaataaatgtcttaaacctgatcactaatgaatttcaagtgtatgctcacatatcaaatagactgctataactctaatgaaggccttttcaggagagaaaataggacccttgagatagatttcattataaagargagtcaaatagtgagccagaaaaagtgggttgaagggagaaaggcagtagtgattctgatatagctagatggcaggtaccagaaatcatttaaattcagccatacatgggatgagaaatgaggcggtggtggggcatacctgggagaaaatagttatacatatgtacaagttgaaaaaactgaattgaactcagaacactcagatatctttgttggaaacacattgtaaagaaatataaaagagagcttccagacggtccctc

SEQ ID NO: 20232 - DNA, 544 bp, Homo sapiens
ctggtcttatttaacgtttatatacatacattttgatacactgtattgaaattgctaatgcatatccagtgttagcaacttggcctgaccctgatgcatatttatatttgataatccaaaaggaacctcacattgctatagagaaacaagaggttgcttctcaacatgtggaaagtgctgaagatttttaaaaacgtttgattgttctgcttagtacaggtacctctgacgttgtaagcccagttaagttgcaagttaagagctcagtaagagctcaatatgagctcttaacttggaagactcacagatgcatagagggagaaagcttcatttctgtttctcatagctttcttyttctattaagaacaagggatgaggccagtcaagctatacattttactgaacatgatttcttcataaagattttgaaattagtttaactccagtttaacagaaatatattgtagaagtgtcttagtcactatgtctgtcaaaactccaacttttgtgctccttaccaaagatctgaggtgaggaccaatgt

SEQ ID NO: 20233 - DNA, 543 bp, Homo sapiens
aacttttcattgtttacttagaattaatattttattatttcaatgggaacatttagccctcccatttacactatagttatgcttacatactatgtcttcataaattgagaatgtctttatttcaccttcattcctgagggatatttttgctggataatgacctggattaccagttctttgctttcaacactttaaaaatgctgtgccagtagttcctgctcaagtcaatatcattgaaggcttgtaggtgagggatttttcagaagcattttgggaaaaggagtggggctgcctaggcaatgggtgcttgctgccgataggccgcagcagagattaaatcatagcaggtcaaagctgtcctcttgagctgaatagctcattggtggggccacagkgggggtttggtgggtcgaggtggagccatcagtgtcagacatgcaaaaaacttaaaaagatatctcaaaaggccaatgtacaatagtgatgttatctgcaggagtaattggagaagttgcctatcttgtgaccagtctacaccttagc

SEQ ID NO: 20234 - DNA, 612 bp, Homo sapiens
ccttcatttgcatggggtgtaaccaaataaccaatgcaaaacctatagagggtatttaaacccctcaaaaattctgtagccagcactcttgagccacttgctccagcctgctgcaactctgactgtggagtattacttttgtttcaataaatctatgcttttgttgattcattcttttgttgctttcgtggtgcattttgtccaattctttgtttaaaatgccaagaacctggacaaccactggtaagacattcacactttatttcctgaagatgaagcttaaataagggcaattccttcatttgactttcccaggtgctactagttagaatgaatctctctctctctctggttttctcactgtacattttgtcttggcattactctcacttctccttttagagtgtgccccactgcagggcagttgtatgactttattcatcctaatatccttcagtaaggtctccacccagcraattacacaaagtaagtctcaaaataagattgctttataggccaggagctgtggctcatacctgtaatcccaacactttgggaggccaaggcgggcggatcacctaaggtcagaagttcgaggccagcctagccaac

SEQ ID NO: 20235 - DNA, 558 bp, Homo sapiens
taagaggccttcctgctttggctgtttttaaatccacctcctggtgacctgctggtatatcaaatcacttcctttccttttgggacagtaagagagctttaggatcgtgacgggaaataaggagatggattagaacaccaggaaagtgggcaaaatctaaggtagcggggacagggacagaggccaaagccatctctcaaagaggatgctggctctttccatatgggccacctgcactcggctgagggtggtttgagactcaaggccttctataacaaacagtagggacccgttctgggccccaggaggcacagcygccttccctaccatggcccattcgtgttttcccacagtctgtctacggtccattcaccatctgtgagtgccaacacgtccacacagctgcagctgcgtcccttctcccacaaaggagtggcttctatagggaccccatgattttaagaaggctcctggctctccttgactgtgtaaggtagaaagggaggtggtggggggtggatcagagaaatattttacccttaggctttgccatccctc

SEQ ID NO: 20236 - DNA, 317 bp, Homo sapiens
tttcctaactaaatttctgataatttgtttttcagcactaaacaactaatatatcattctaaaacataggggaaatgtgtgccaggtatataggcgttttaggaccttatttaaaatgtttaaatggattttgtgatatgtatgttttttttcagacttttagaatttaatttttttcacatattcaaattgtcaattaatgatttattcgtttttatgtagtaaataggctctgaaaaaagtggctgaaacagtgagttgctaagaatattgtctgcttcttcactatgaagaaawtactcaaaattatgtttaca

SEQ ID NO: 20237 - DNA, 644 bp, Homo sapiens
ctgtcaaaattttagtcaacctctaaagcccagatcaaagttgcctcctatgtgaaacctttactaatatcccttagcaaaatttaatcatttcctgcaacttcttttttataattctgtgagaagtttaaacaacttggtttatattacagttaggagtgataggcaacctggttaaaygatggttcttggagtcagaaaagctggtttcagatcccagctctgccacgggcttgttatgtgacgtttggttaagttaccgaactctgagccttggtttctcaattttccagtataaatctcaaaaagtttgatgtgaatatgaaataaaatatatgcaaactgctttacatctacctggaacatattcaacatattataaagttattaaaatgtcaattatcttcaccttccttcccacccctactcgaccctatatcatatgtttattcatctttgataaactcagtgcttagtgaagtgtctggcactgggtagacagccaataaatactttctgaattaaattctagttgtgaaaatattattgctataatattctcctagtgtcagttgtcaataatcatgattaatatgtaaatcccttttgctattggcctcaatcatgttgtatagagttgccca

SEQ ID NO: 20238 - DNA, 552 bp, Homo sapiens
tttgggaggccaaggcaggcaggtcacttgggcccaggagtttgagactggcctgggcaacatggcaaaacctcattcctacaaaaaaacaaacaaacaaacaagcaaaaaacaacaacaacaacaccaacaaattagccgggcatggtggcacacgcttgcgtcccagctactcaggaggctgagatgggagctactcaggaggctgcagtgtgctgtgatcataccagtgaactccagtctgggcgacagagcaagaccctgtttcaaaaaaaaaaaaagaagaagaagaagaagtagtagttgataattgctagttcattttatctggcaacagagcaaccaaaacagcagtatatgggcaatcttttgcctctaggagtgctaggaattttttcaaataaaactttacattctgcagaaaacagaaaaatctgctgaagaagcccaaattttcagtcattatccatttccaaaaatatttttatggtttttgtttttaaaaatcagaatgacatccttyttctctctgaatgacatatttttagcaga

SEQ ID NO: 20239 - DNA, 548 bp, Homo sapiens
gcagaaaacctatttatacttatgtatagataaactttctaaaaatattttctctgtggctatatccacattatttgcatttgaactaagcagatctctaaagagtctatgaagaatagtaaatgaaatgtagaggtaggcatcaagaaacctggattctaattagccttgagatttaggaaatatcagttcacctctctgggccctgtattttttctgcgaaatgggtatgttagatatyattataaaagaaaaaaatggtttaataaaattcatttacccctacagagttaagttcaaatcaattacagaggggaagcacatggtgacctgctaagagctgcaaatggaagataaaataattgggatggggtcaacaacctgtgacccaccaggattatttagaggtgtacagctaggtgaggcaggtctggttctgtacttgtccacctccttcatctgtatccactttgccccctaagggatgtgtcatttcctcaggcattggcctacctcctcaagtgccttaagtgatctctctggtgttg

SEQ ID NO: 20240 - DNA, 548 bp, Homo sapiens
gcagaaaacctatttatacttatgtatagataaactttctaaaaatattttctctgtggctatatccacattatttgcatttgaactaagcagatctctaaagagtctatgaagaatagtaaatgaaatgtagaggtaggcatcaagaaacctggattctaattagccttgagatttaggaaatatcagttcacctctctgggccctgtattttttctgcgaaatgggtatgttagatattattataaaagaaaaaaatggtttaataaaattcatttacccctrcagagttaagttcaaatcaattacagaggggaagcacatggtgacctgctaagagctgcaaatggaagataaaataattgggatggggtcaacaacctgtgacccaccaggattatttagaggtgtacagctaggtgaggcaggtctggttctgtacttgtccacctccttcatctgtatccactttgccccctaagggatgtgtcatttcctcaggcattggcctacctcctcaagtgccttaagtgatctctctggtgttg

SEQ ID NO: 20241 - DNA, 781 bp, Homo sapiens
tatttttactaaacaattctaaaawttcatatttaggacaatcaaggaacttggaaacaatagattatattaagaaagtattgctaattttgctgtactagttgaatggtgcttatataaaaaataaaattgtctggttagagttgcattcgttttaagatactctagactgtaacagccaacagatggggaggaagaaagagagagagagaatatgtgcgagatgatgagacaagaatagcaaaataataataactactaaacctttctgaagggcgtgtgacagtttattattctgtcctatcctgtgcatgtttagaaattaaaaattcactaataacaataatctagcatgatattagtactttaaaaacatttaccaaaaaaaaatttagaaatgaagttaatttcaaacttcaaatttttcacattatacataaggaaccctttacattataatgtctgtttgtctcacattctgtttgtctcacagtcaaattttataggccacagtgtttttaacctcctctatataaactattatgacaaccttgtgaaatattatcacatgatttctaatttatttattttttaaactatttccatactctcatttgatagtttagtttagaattataattaggagcactgaagtttaagctagattcagaagctcatttctgcctgccatctccaagtttgtcatggaattctgcttccaaatttatatggaattcagctttaactttacatgtaaaacaaatgttcaagcagcaattaa

SEQ ID NO: 20242 - DNA, 760 bp, Homo sapiens
ccagctgtaaacacgcaggtgtcacaggtcttcggccacagaggaagcagtccccacccgtgctggggctctggcctcagaaaccagtgacactactgggcacagccccgcatagagccctgctctgcccatgcactgcaggacacagggaaaccaggaaacacagctcttgttggtccttcttttctcactccctctcctgcttcttttccttcttttctttctctcttcaacaaatataagtgtttagttgccgttgcaggccctgggacacagcaaaatgtcataatcccccagataatttccttttactctactttcattgcttgagtagccaagccccatgttaggccgggaggatgtagtaacgagaaggggatacactctctgccctcctggagcttggagtaataccacaaataaatacatggggattcacggccatgacacgcaaaaaggcagaaaacaggatggacctacgggaaaaacagtaccaacagcaacagcaatcaaacccagacaggctccctgaggctgggcatttgaatccacagaggaaggatgagtggggaggtaactgggtagaacccaaggcctggcctgggtrcaggaagggggcatattccaggcaggagagagtaacggcaaaggcccagaggtagacaggatatagcaggcagtaggtctaagaattgaataatatgccaagtaaacacataactgggctccttctcctggattccatgcttccagcaatggt

SEQ ID NO: 20243 - DNA, 760 bp, Homo sapiens
ccagctgtaaacacgcaggtgtcacaggtcttcggccacagaggaagcagtccccacccgtgctggggctctggcctcagaaaccagtgacactactgggcacagccccgcatagagccctgctctgcccatgcactgcaggacacagggaaaccaggaaacacagctcttgttggtccttcttttctcactccctctcctgcttcttttccttcttttctttctctcttcaacaaatataagtgtttagttgccgttgcaggccctgggacacagcaaaatgtcataatcccccagataatttccttttactctactttcattgcttgagtagccaagccccatgttaggccgggaggatgtagtaacgagaaggggatacactctctgccctcctggagcttggagtaataccacaaataaatacatggggattcacggccatgacacgcaaaaaggcagaaaacaggatggacctacgggaaaaacagtaccaacagcaacagcaatcaaacccagacaggctccctgaggctgggcatttgaatccacagaggaaggatgagtggggaggtaactgggtagaacccaaggcctggcctgggtacaggaagggggcatattccaggcaggagagagtaacggcaaaggcccwgaggtagacaggatatagcaggcagtaggtctaagaattgaataatatgccaagtaaacacataactgggctccttctcctggattccatgcttccagcaatggt

SEQ ID NO: 20244 - DNA, 2110 bp, Homo sapiens
ggaggggtgagtacagagaactgtgaataattccaagaagatctggcactgtgccaagaatgaaagatactggtggaactatttgagtatattttgcaactaagaagaaaaacagtccaatggcgtgttataagacaatggattagtcagatgtccaaaagacaactgttcactgctcaggcttgatcgttcatctcctagaaaatggatcctctgtmttaccccactaattataatgagatattaattaggcaaaatgattaagagtaggtttggctgtaacagtaaaacccaaaataagaatagcttaaacaaaataggaaatcatttttgtctcacatagaaaaatctgtaaataagagtccagggatggatggcagccttatgatcatttgaaagcccagtcttctgtcttgttctaccatccttagcttgccacctcatgacccaagacggctccctgagctccagacattacatcagcctaacaggaaggaggaaggaagaaacaacacatctctttccttgaaagaagctttctgaaatatgcaccaatatttctgattgtgtctcagtagaatttagtcacccgggctcaccaagccagggagcttggctaggagctacagtgtttattccaggcagccatgtccagccagaagttgggagttttataacaaggaagaaggggaaattagctattggggaagacaactagaagttgttttttattgttgttttttgaggcagagtcatgctctgtcgaccaggccggagtgcagtggtgcaatttcagctcactgcaacctccacctcctgggttcaagcaatgctcatgcctcagcctcccgagtagctgggattacaggtgcgagccaccacacccagctaattttttgtatttttagtaaagatggggtttcgccatgttgtccaggctggtatcaaactcctggcctcacgtgatctgattacaggtgtgagctaccacatctggccacaaagtactaccaacttggtggcttaaaacaactgtttattacctcacagtttctgtgggtcagaagtccaacaaaacgtgactggcttctctgctcagggtttcacaagatcaaaagcaaagtataagcagggcagccttccttactggaggggaagaatccacttctaaactcatttaaagttcagttccttacggttgtaggacttaggtcctagccccctccattctcaagccaacaactgcaagccaagtccttctcacactttaaatctctcaggcctacctttctaccacatctctctgacttcagtgtagaaagttctctgagtttagggactcgtgtgattaggcccacccagataagccaggataatctccctattttaaggtccacaacctgaattgcatatttgaagttcgttttgccatgtaacataacatattcacaggttccagggattaaggcatggacatcttcaggacatctgcatatcagagtcactaaactcaaagatggcatcatgtagagaaaaggcatgcagctacaataccactgcatggaaaacgtatgggcttgaaaatttcccatgatatatacaagataaataccagctcagattttaatcattttagaaggtgaaccaattcccaggtcccaaccaaaaattcattgattaataatccaaaacttgatctacattgagatatatttttattttagatatctaaattcaaaaattgccctgagctgagataatgtctctcaggtctaccacccatttttatagtggatttaagcataggtgttataaactttataatccttataatggtatgtgtcccttaccaaaatgaagcttttagagaaactgacatattagtgattcagttgaaatatttaggaggatttgattgtttttaatcaacgtttaaatcatttaacttgttaaatgtatagattttgatttgctggttatagaaatcgtgttcaaatatttagacaatttttccttcagtaggtttgtgaatagattaaacaataaataaagcacaggtgatggtgtgtggtcctctccaggtaccaaaagctcctcagactttaaggat

SEQ ID NO: 20245 - DNA, 2110 bp, Homo sapiens
ggaggggtgagtacagagaactgtgaataattccaagaagatctggcactgtgccaagaatgaaagatactggtggaactatttgagtatattttgcaactaagaagaaaaacagtccaatggcgtgttataagacaatggattagtcagatgtccaaaagacaactgttcactgctcaggcttgatcgttcatctcctagaaaatggatcctctgtattaccccactaattataatgagatattaattaggcaaaatgattaagagtaggtttggctgtaacagtaaaacccaaaataagaatagcttaaacaaaataggaaatcatttttgtctcacatagaaaaatctgtaaataagagtccagggatggatggcagccttatgatcatttgaaagcccagtcttctgtcttgttctaccatccttagcttgccacctcatgacccaagacggctccctgagctccagacattacatcagcctaacaggaaggaggaaggaagaaacaacacatctctttccttgaaagaagctttctgaaatatgcaccaatatttctgattgtgtctcagtagaatttagtcacccgggctcaccaagccagggagcttggctaggagctacagtgtttattccaggcagccatgtccagccagaagttgggagttttataacaaggaagaaggggaaattagctattggggaagacaactagaagttgttttttattgttgttttttgaggcagagtcatgctctgtcgaccaggccggagtgcagtggtgcaatttcagctcactgcaacctccacctcctgggttcaagcaatgctcatgcctcagcctcccgagtagctgggattacaggtgcgagccaccacacccagctaattttttgtatttttagtaaagatggggtttcgccatgttgtccaggctggtatcaaactcctggcctcacgtgatctgattacaggtgtgagctaccacatctggccacaaagtactaccaacttggtggcttaaaacaactgtttattacctcacagtttctgtgggtcagaagtccaacaaaacgtgactggcttctctgctcagggtttcacaagatcaaaagcaaagtataagcagggcagccttccttactggaggggaagaatccacttctaaactcatttaaagttcagttccttacggttgtaggacttaggtcctagccccctccattctcaagccaacaactgcaagccaagtccttctcacactttaaatctctcaggcctacctttctaccacatctctctgacttcagtgtagaaagttctctgagtttagggactcgtgtgattaggcccacccagataagccaggataatctccctattttaaggtccacaacctgaattgcatatttgaagttcgttttgccatgtaacataacatattcacaggttccagggattaaggcatggacatyttcaggacatctgcatatcagagtcactaaactcaaagatggcatcatgtagagaaaaggcatgcagctacaataccactgcatggaaaacgtatgggcttgaaaatttcccatgatatatacaagataaataccagctcagattttaatcattttagaaggtgaaccaattcccaggtcccaaccaaaaattcattgattaataatccaaaacttgatctacattgagatatatttttattttagatatctaaattcaaaaattgccctgagctgagataatgtctctcaggtctaccacccatttttatagtggatttaagcataggtgttataaactttataatccttataatggtatgtgtcccttaccaaaatgaagcttttagagaaactgacatattagtgattcagttgaaatatttaggaggatttgattgtttttaatcaacgtttaaatcatttaacttgttaaatgtatagattttgatttgctggttatagaaatcgtgttcaaatatttagacaatttttccttcagtaggtttgtgaatagattaaacaataaataaagcacaggtgatggtgtgtggtcctctccaggtaccaaaagctcctcagactttaaggat

SEQ ID NO: 20246 - DNA, 522 bp, Homo sapiens
atttttatacaataatgtcaaactaccttccggaaatgatgctcactttactttccctccaagactgtgtgaaaatgcccattttcctaaatgcttactatgactggtttccaactacattttaattcttgttcaatctgataggcaaaaaatgatatttaatttttatttgattgataatgaccttgaacgtgcccattagccttttgcatgtattcttttatgaaacatctgttcctatccttcgtcaatgttcctcttcatatgttaacttttcttattgatttgttagagcactttgtatattgtgaatattagcttttgtgatcagaattatggaattgttgttgtctttagttttgcttatcaagtttaaagccattcagagatgttgtaaatgtgtatgttgttaaatttatgtcttattttgtgttttctgatgctcatatgtttagaatggtcaagcaatcccaacttatgattacwtaaatattctcccatatttgctcttagcattttttt

SEQ ID NO: 20247 - DNA, 555 bp, Homo sapiens
ccagcttttattgttacactcactgggagagacagggtagagccctgccttacccagggttcttgcctggttcacttttaatacaaaacctatccatgcccaatgtaaagtcaagctcaaatgacacagaagtaagtagagtaacaggaaaaaaagaggtcattttttgccatctcgccccctaaggatagggcctgttgatgcttttgtatgattttccagacttttctctcatgcacatgctggcatccttgcagggagcagtctggcctctgatggtcaggggtgcaggctgtaaacaccagaacggcaggttcctgaatcagtgcctrtaactctggcaaacaacctaacttcaccaagtccaaattcccactgatgtaaagtgggaatcataatgcctgcccctcaaggaagttctgagggtaagaggagcaaaggcacattgtagttgcctaatgaatgtctccatgtcatctgatctatacatagagagagcacatgctcatttctgggtatggagacagacatcgcttgctgcgataaaaccacaga

SEQ ID NO: 20248 - DNA, 555 bp, Homo sapiens
ccagcttttattgttacactcactgggagagacagggtagagccctgccttacccagggttcttgcctggttcacttttaatacaaaacctatccatgcccaatgtaaagtcaagctcaaatgacacagaagtaagtagagtaacaggaaaaaaagaggtcattttttgccatctcgccccctaaggatagggcctgttgatgcttttgtatgattttccagacttttctctcatgcacatgctggcatccttgcagggagcagtctggcctctgatggtcaggggtgcaggctgtaaacaccagaacggcaggttcctgaatcagtgcctataactctggcaaacaacctaacttcaccaagtccaaattcccactgatgtaaagtgggaatcataatgcctgcccctcaaggaagttctgagggtragaggagcaaaggcacattgtagttgcctaatgaatgtctccatgtcatctgatctatacatagagagagcacatgctcatttctgggtatggagacagacatcgcttgctgcgataaaaccacaga

SEQ ID NO: 20249 - DNA, 559 bp, Homo sapiens
cagccagctcacttgcagactgaacactgaagctgtgtgtgtgacctccaggayagccccaatttctatgcccatgaccatgtgttgcatatagtttctttcttcttcattatcaggagctactttctatctggctcgacaggacaatgtgcccgatcatgtggagatcaaacatgttccccgaatgttgagtatgcagtgtgtgcacacacacaacccatgccttagatatatgacttgtcttcgtgaatcgtgaaagcataccttttcttccctcagcttgcctttccagaataacaataaggtaaagcccacatggctcccaaataggatctttggggattataattatctaataattgacaccaaagtgatcctcccgacttgaagtgggaggaaatttggatttctaaactagggcaaacgcttcttatgaagcatcaatgtgtgttgtgttccctattctctttgctttaaaaaataaagagaattatatttctttttcttcaggcaactttgcagactatcaaaagacatagatatctgaaaactgtatctg

SEQ ID NO: 20250 - DNA, 912 bp, Homo sapiens
ccaggccccacctccaacattggggattacatttcaatatgagatttgggtggggacacagatacaaattatatcagaatatgtcaagaaggagctgagcagagaagccagcgtgtccaaagccccaagaggaactgaaattgattcagaatggctaaagtatgggagtaatcaggggaatatgacaagagaagagcctagaaggcaggttcagctggtcatgaaggaccttctgaaccaagttaaggaagtttggactttaatctataggcactgagcagctattaatgtgtattaaaagagatcatgatactatctgattttatagaataggtggcataaccagtgattcttgggggaaagcaacgtttagtttctgattcrtttgcatgagagattctagacttgtggtcacaggtaaagaatgaagaaacctacctagagaaactgggaactagagaagagaaaggggaagggatccaggagaaaggtactcagttacatttatactattcggcagattccaccttcgaaatgtcccgcctcctcctttcttttccattctcttgaaaaacactaggcaagcccctttttcacgtctgcataattgcaacagcaccttaactagtcttccagaggctcatttcaccagatggctagcagacttgattttctaaagcactacctcttacatatctgtcattcatagaaacttccagggctccctgttgtctttaagatgaagcctggactcctctggctggcatttaaagaccctccataagctggcccaactgccccaccttatcccttcacagtctccccccaggtctgactggtctatggacagcaccctcaccccaggttgggctttctcagtccctgaccttgtcgggactttttctggctgct

SEQ ID NO: 20251 - DNA, 637 bp, Homo sapiens
tgactcagacctcggcacgggctaacacagagctgtgtaggcatggcgctgggacagctgcagggtgttagagggaggggcggccggcgggtccgrgaccctgctgcccaggaggggaaggctttgaagaagtaaggacgcttctgttacatgaggaagggcactgtgcggcaggggctctgcccacatcacagaatgtagtaactgcgcatccctgaaggacggagcttgtcattaactatttcagctggagagatcagtctcagaaaactaaataacttcagacccaggccgcctggcctgcgagcagtcggttcagaatcggagccccgagctgcctgggttcatactccaggcccctgcagccttgatttcttcctgtcattatcaagtcacatgctacaaagagggctaagggactaaggctaagatgctgtcatggagatctggaagtccccggggacttttgagagcacagttttcaaacagcttgtggccaggcgcagtggctcacacctgtaatcccagcactctgggaggccagtgcgacggtcaggagttcaagaccagcctgcgaaacatggtgaaaccctgtctctactaaaaatacatataatatttatatatatgtatatat

SEQ ID NO: 20252 - DNA, 1290 bp, Homo sapiens
tcaagaaaacattaaatattatcatttttgtagagccaaagtgcaaggtatggcaacaccaatgttttaagttgtagaataaagtaagttaaaactgagtggctagcctttgctagttattctggaaagtcaactaaaaaaaattgaccattaattgtaaactygcaagcagatgcaataactaactaaggtcagcccacagaatgtagaccatatagaaaactttcacttaacaatgaggacacattccaagaaatgcatcgttaggcagttttgtcactgtgggaacatcatagcatgcacacacacaaacatagatgataatagcctactacatacctagactatatgggatagcctattgctcctaggcttgcatattactctacttaatactgtaggccattgtaacataatgataaatatttgtctatctaagcatagaaaatgtacagtaaaaatatagcattataatcttatgggaccatcagggtatatgtaatctgtgattggatgaaactttgttatgtggcacacgactatatcaaagaaatagtcttaaaagagtgcctatatttttttctgtcatcccatcacaatgataccaaataattaaagataatgtccactttaaagcaataattctaacaactcagtgaacttcatagtcttgcattctttaatagaaatagagatctcagcatttataattaacaagacttggttttctattcactattttggcaaaacaagattcacaataaggctgtacacaagtacttcctagaatttagttttgattggaacataatgggtcagacaattaaaggagaatgaaagtgaaataaatataagcatttctagaaatggatagtgagttaaaagaatagcataatttgaatgaattcaattatgtgtaaaatacagtgtttttcatgctcttatctgatatcatagagtattttttctttagaaactatcaatctcttcctataggcagaactgtgtgggaaacctaaattattattacaaagtcgcttggagacaggtaatcaaataaatgggatgaggttttatttaatatttaatggaagcaggaagatagcctgagctatccttcttagggaagaattggttttataaatggaaccagaatactggaggtcctttgagtattgctccctctgtcctagaagaagcttggaaaagttatgtttggctgcttgatccttctttctagttttgctttgttttgctttcacccatcccacatattctttgtttaggatg

SEQ ID NO: 20253 - DNA, 481 bp, Homo sapiens
tgatttggatrttatgctcatgggcattctcgccaatattatgagaaagaagtgatttacaatcagcaaacttgtttcaggactataatttttcttttaatagcaagactaagatattaacatacactaagttcaattcctcttcactgaggatggaagttattctatacatttaattgaattgctcatatttttaatttcatggcctaaaacaggaagtatatattggttaatgctgaattgatcagactagtgagtcagctagaagatttaaattctgtaaacattctaaatcattggatttgtattatcctagccaaatttattgctctatcaacaatctgtttttgagaaataaaagatgaatattagggatttatgtctcaggtatgatcaatgcccactaattctaccagacaatgcctcagtgttttattttcctttgcccgtgaagaatgtgtgtgtgtgtgtgtgtgtgtgt

SEQ ID NO: 20254 - DNA, 1438 bp, Homo sapiens
atccctcgcatgcgcagttcacaataggatttgagctcctgtgagaatccastgccgcccctgacacaacaggaggcggagctcaggtggtaatgctctcccacctgctggctcacctcctgctatttagcccagttcctaacaggccacggaccagtaccagtctatggcccagggggtggggacccctggtgtaggggatgggagtgtgcttgactggctaaggggggttggctctagttcccctttgtaagtacaaatgctgggctttgcacacaatggtaagaggttgctgcccccacatccactgtgcgtgtatggagttatttatccagacgtgacgggcagagtggaggaggcacagtggggattgcactgattcatcacatgcttctgtcgggtccagctcacagccaaggtacaaagcaaagattgacctcgttgccttgccagccaccagcaggggcatgagaagtgctggcatgctggcacagcctctggggaaagcagtttggccacatgtattcagttctaccaattttactacactctgacctgggaattccatttcttgagactgtctaaagaatctatcctgggcgtgaggagtggcagcggccaggcagcccagtttcgcaaaggctgtcagcatgccgcggcccgcagacacctggcacgcgccctccctgccgccaggatgcccaaggggaaggtcagctctgctgaaggagccgccaaggaaaagcccaagaggagatcggcgcggttgtcagttaaacctcctgcaaaagtggaagcgaagccgaaaaacgtagcagtgaaggataaatcttcagaccaaaaagtgtaaacaaaagggaaaaagggagcaaagggaaaacaggccgaagtggctaactaagaaactaaagatttacctgcagaaaacggggaaatgaaaactgaggagagtccagcctctgatgaagcaggagagaaagaagccgagtctgattaataccatataccatgtcttatcagtggtccctgtctcccttcttgtacaatccagaggaatattttttatcaactattttgtaaatgcaagctttttagtagctctagaaacatttttaagaaggagggaatcccacctcatcccattttttaagtgtaaatgcttttttttaagaggtgaaatcatttgctgattgtttattttttggtacaaccagaaaatagtgtgggatattgaattatgggaggctttgactgtctcgggtgtcagcttaacattccatagatgggggggttagtttttatatcctataatacaaagcatattaaatggcaatatggagtcagtcctgcatttaatatcttgaacattttaaattacttctgttgccatgttgttttttagtagaattgtttcctaaagaaaaccactctttgatca

SEQ ID NO: 20255 - DNA, 643 bp, Homo sapiens
tttgcaccgaaatgtcttgttttgttgcgacataggaaaataaccaagcacaaagttatattccatcctttttactgatttttttttcttctatctgttccatctgctgtattcatttctccaatctcatgtccattttggtgtgggagtcggggtagggggtactcttgtcaaaaggcacattggtgcatgtgtgtttgctagctcacttgtccatgaaaatattttatgatattaaagaaaatcttttgaaatggctgttttttaaggaagagaatttatgtggcttctcatttttaaatcccctcagaggtgtgactagtctctttatcagcacacacttaaaaaatttttaatattgtctattaaaaataggacaaacttggagagtatggacaactttgatattgcttggcacagatggtattaaaaaaaccacactcctatgacagctctttgcctgctccttgcttgatgttttctggaagtgtgtgtggggtcaaggatggtgtggggcacctgtatctactmctaatgtttttgaccctgctgtgttcaatcttcttacacttcagtttcttcattttaaaaaggaaaaggtaatttcttcacagtctcctatgagttggacagaaagtcatgg

SEQ ID NO: 20256 - DNA, 678 bp, Homo sapiens
ccttgggaggctgccttagctgctggacttgatctcctaagccttaaaagcgccattcatggagaggggagaaggaagcttccaagttctgagagcccaaaaaggccagaatagctgggcccagcaggagatgtaaggcttcctgttgtctcagatgcaggagccagagggcagcccagctccaggtaggcaccagccacagaactggaaagcccttgggaggctgaggtcctgccttctctatagcttatcttggcccctctctgtgtgtcagcctccctcctctccctgcagcccagctttgggtgcacacctccccatggtggcagaggtcaattccacagtgcctagtgttgacattttcttgacacgagactagtcccaattccaaatgtccaggaggcacttggcccagtctgacctggtgtgataaagtgatgcctgtcagtggataaggctggggccrttgctcatgggctagattgggtatcacctttaggataacccaaaaggtggcctcataagaactgtctcagttcatcaattttcacattttagcatctctgatattgagatagagcatacaattgatctcactttaggattaatggtgtcttacaattgctgttggccagatagcagtcatgacttagtgtcattgcctgcctatttgagaca

SEQ ID NO: 20257 - DNA, 565 bp, Homo sapiens
ttccttagaggtgctgagaaagggcccgggcttaggaccgttcaagcagaggacagcagggatgttgtaataagaattccagcagtgggcttgaggttcagctgatgacctccaaggttccttccagctctaagattggawgattctatatctgtaattttccatttccctattaagaagaaattttccacagtgaaaattgttttagtatttgataaaagctgtgggatgatttttgcttttgttgactttaacagggggcttactactctgccccagtggcgtaacaagacacaaacacatcagtgatatttattgggcaggggagagaggcgtttattgttgggtgggaaagtcctgcttgcttacatggggactggcatggaggtgttgggaactccaaatctttcctcacattgtttctgaaattcctctgcccaaaggacctgggcattttaccccagtcctgcctagtgggtgcagcagaggtgtctggagcctgaccgacatttcaccaatcaccttggtagttctcatagcatcctcccaatcccctacaattctg

SEQ ID NO: 20258 - DNA, 565 bp, Homo sapiens
ttccttagaggtgctgagaaagggcccgggcttaggaccgttcaagcagaggacagcagggatgttgtaataagaattccagcagtgggcttgaggttcagctgatgacctccaaggttccttccagctctaagattggatgattctatatctgtaattttccatttccctattaagaagaaattttccacagtgaaaattgttttagtatttgataaaagctgtgggatgatttttgcttttgttgactttaacagggggcttactactctgccccagtggcgtaacaagacacaaacacatcagtgatatttattgggcaggggagagaggcgtttattgttgggtgggaaagtcctgcttgcttacatggggactggcatggaggtgttgggaactccaaatcttkcctcacattgtttctgaaattcctctgcccaaaggacctgggcattttaccccagtcctgcctagtgggtgcagcagaggtgtctggagcctgaccgacatttcaccaatcaccttggtagttctcatagcatcctcccaatcccctacaattctg

SEQ ID NO: 20259 - DNA, 526 bp, Homo sapiens
tgtatgaattacaacacaataaatctgctacctttacaaaaagtcagtgtgcaagttcctctggctgaagaacaaacttggaaattggtttgaatgttactgagttkttttttttaacattcatcatcattgcaataaagcaaaattcagttctagtgtctttacagcaaaacatttcaagagcacataacacacaaattagactaccatcgtcatcaaaaaggctatccagatatatgtaagtttgacctcaggtgatttagacatgaggttgacactgacagcagaataaaaacctcatggtcaataatcgaatgtgcttttgttcggtgttttaatttgaataaaagacaagagttatggaccaaaaaaaggcccctcaaacatggcaggaaacgcaaactaaaggatggtcttcaaaaataggtagagacaggacacaatttttagctacataatgccatccaccatccatctatcattcattcatctgttcattttaaaaatgagtatttcaagtaaatat

SEQ ID NO: 20260 - DNA, 526 bp, Homo sapiens
tgtatgaattacaacacaataaatctgctacctttacaaaaagtcagtgtgcaagttcctctggctgaagaacaaacttggaaattggtttgaatgttactgagttgttttttttaacattcatcatcattgcaataaagcraaattcagttctagtgtctttacagcaaaacatttcaagagcacataacacacaaattagactaccatcgtcatcaaaaaggctatccagatatatgtaagtttgacctcaggtgatttagacatgaggttgacactgacagcagaataaaaacctcatggtcaataatcgaatgtgcttttgttcggtgttttaatttgaataaaagacaagagttatggaccaaaaaaaggcccctcaaacatggcaggaaacgcaaactaaaggatggtcttcaaaaataggtagagacaggacacaatttttagctacataatgccatccaccatccatctatcattcattcatctgttcattttaaaaatgagtatttcaagtaaatat

SEQ ID NO: 20261 - DNA, 526 bp, Homo sapiens
tgtatgaattacaacacaataaatctgctacctttacaaaaagtcagtgtgcaagttcctctggctgaagaacaaacttggaaattggtttgaatgttactgagttgttttttttaacattcatcatcattgcaataaagcaaaattcagttctagtgtctttacagcaaaacatttcaagagcacataacacacaaattagactaccatcgtcatcaaaaaggctatccagatatatgtaagtttgacctcaggtgatttagacatgaggttgacactgacagcagaataaaaacctcatggtcaataatcgaatgtgcttttgttcggtgttttamtttgaataaaagacaagagttatggaccaaaaaaaggcccctcaaacatggcaggaaacgcaaactaaaggatggtcttcaaaaataggtagagacaggacacaatttttagctacataatgccatccaccatccatctatcattcattcatctgttcattttaaaaatgagtatttcaagtaaatat

SEQ ID NO: 20262 - DNA, 1930 bp, Homo sapiens
gaagctctcccatgcttcatacaaaagatactacttaattaatatagttaaatacaaatgtaagtccacatagaacagttgaggaaatccaaaattcaaatctgaaataccatgccaagagacaagaaacccatttcaaagctttatttcctcgtgtgtataaaagcagaattattcaagcataaaacaataaagacggagaaacttacaagtgtgtacttacgtatgtatgtgtgtatacatatgtgtatacatacatatgtgtatgtrtgtatgtgtgtatgaacagttttgagtatatgactccaaaatcaaaacttggagaacagtaatgcagagagtttaaaaaggacagcgaacgtgtctgggaagcttaacactttcagaacagaaaagtatttaaaaacattattggccgggtgcagtggctcacgcctgtaatcccagcactttgggaggccaaggcaggcaaatcacgaggtcaggagatcgagaccatcctggctaacacggtgaaaccccgtctctactaaaaatacaaaaaattagccgggcgtggtggcaggcgcctgtagtcccagctactcgggaggctgaggcaggagaatggcatggacctgggaggcggagcttgcagtgagccgagatcttgccactgtccagcctgggtgacagagcaagactccgtctcaaaaaaaacaaacaaacaaacaaaaaaaacactatttacaacatgttccttctatgctgctggtttcctagccacaaaacatccgtctccaagggtaagacagtcactgaaacctaaagatatgcatgcttacagtgcaattctaagcacagcctttttctgaattttgatataattcagcattctatgtctaatactgtaacccagagtttagctaaacatgccatggggtagtacaaacattttctcttcagattgtactgaaaatgactttccctttcagaaaacatattatataactctatcttccacttaaggagccagaccacatatgagaaataagagttgaccttaataagtataataaagttaaaactaagctcggcaactaggtccactatctcaaaagtctgtcagttataattctggaaaaacatcacagaaacgtttaagatgtcaaatgaattcgatttctttcagcataattgggaacttgaaaaagaaatgtaagcccattctgcattcttccagatggctgaggttgtccttggggtcacacacacacagactttgaaatcaggggacctgggttccaatcaggctccagctgggcaattttgggcagtatagtgtgacagctaagacgatgggctacagagttagactgcctggagtccaaggtcagctttgccacttcctagctggaaaagcttaggtgagtctctagcccttagtttcctcatctataaatgagggtataataacagcacctaccccacagagtttacttaagaattaagtgagtacataaaaataaaaacacatagaagagtatctgggacacatttggtgctcaataaactttaactgctaaattaatgttgttgttaaaaagcactgctgagccttagtatcttttacaaaatgagcctaaaaacagtagctttgtcacagtgatagcacgagcgtttaagacacagaatgtttactgaatattttccatattctaggcattgtgtgaaacacaatgccagtcttttttttcaaaaatgaacaatataaattgttgatacatatagatctcccctccctttttggtatgtctggttgtgtaagcatatttgaagaaaataatattgaccttgacctactaatataatacccagtgaaataacttcaaaataaagttgtaacttgattagaggaaaggtaagatgctgactcaataggtgagatgag

SEQ ID NO: 20263 - DNA, 1930 bp, Homo sapiens
gaagctctcccatgcttcatacaaaagatactacttaattaatatagttaaatacaaatgtaagtccacatagaacagttgaggaaatccaaaattcaaatctgaaataccatgccaagagacaagaaacccatttcaaagctttatttcctcgtgtgtataaaagcagaattattcaagcataaaacaataaagacggagaaacttacaagtgtgtacttacgtatgtatgtgtgtatacatatgtgtatacatacatatgtgtatgtatgtatgtgtgtatgaacagttttgagtatatgactccaaaatcaaaacttggagaacagtaatgcagagagtttaaaaaggacagcgaacgtgtctgggaagcttaacactttcagaacagaaaagtatttaaaaacattattggccgggtgcagtggctcacgcctgtaatcccagcactttgggaggccaaggcaggcaaatcacgaggtcaggagatcgagaccatcctggctaacacggtgaaaccccgtctctactaaaaatacaaaaaattagccgggcgtggtggcrggcgcctgtagtcccagctactcgggaggctgaggcaggagaatggcatggacctgggaggcggagcttgcagtgagccgagatcttgccactgtccagcctgggtgacagagcaagactccgtctcaaaaaaaacaaacaaacaaacaaaaaaaacactatttacaacatgttccttctatgctgctggtttcctagccacaaaacatccgtctccaagggtaagacagtcactgaaacctaaagatatgcatgcttacagtgcaattctaagcacagcctttttctgaattttgatataattcagcattctatgtctaatactgtaacccagagtttagctaaacatgccatggggtagtacaaacattttctcttcagattgtactgaaaatgactttccctttcagaaaacatattatataactctatcttccacttaaggagccagaccacatatgagaaataagagttgaccttaataagtataataaagttaaaactaagctcggcaactaggtccactatctcaaaagtctgtcagttataattctggaaaaacatcacagaaacgtttaagatgtcaaatgaattcgatttctttcagcataattgggaacttgaaaaagaaatgtaagcccattctgcattcttccagatggctgaggttgtccttggggtcacacacacacagactttgaaatcaggggacctgggttccaatcaggctccagctgggcaattttgggcagtatagtgtgacagctaagacgatgggctacagagttagactgcctggagtccaaggtcagctttgccacttcctagctggaaaagcttaggtgagtctctagcccttagtttcctcatctataaatgagggtataataacagcacctaccccacagagtttacttaagaattaagtgagtacataaaaataaaaacacatagaagagtatctgggacacatttggtgctcaataaactttaactgctaaattaatgttgttgttaaaaagcactgctgagccttagtatcttttacaaaatgagcctaaaaacagtagctttgtcacagtgatagcacgagcgtttaagacacagaatgtttactgaatattttccatattctaggcattgtgtgaaacacaatgccagtcttttttttcaaaaatgaacaatataaattgttgatacatatagatctcccctccctttttggtatgtctggttgtgtaagcatatttgaagaaaataatattgaccttgacctactaatataatacccagtgaaataacttcaaaataaagttgtaacttgattagaggaaaggtaagatgctgactcaataggtgagatgag

SEQ ID NO: 20264 - DNA, 632 bp, Homo sapiens
tctttgtcaggatgttagacgaaatctacartcactttttctcagattgcccccttcccaaccatcccaaaaatgtataaaaagtaaatacctttcctatataccaggaataaatgtttagaaaattatgtaagtacagcacaatagcaacaaaaatatagataggaatcgttctaactggaaatattgacccatgtgaaggaaagtaaaaaacttgactgcgagacctcctgctgctagatggaagtgctgactattgtaaagtcagttcttttccaaactaatgtgtagacttaaagtcattctagtcaaaatactaaaaaaaaaaaaatgtgtttttaaaacttagaattgccaagcaacagaccttagcatatataagaatttaatatatgataaaattagcaccacgtatcaatgggaaaataattctagggagaaaataactatgtaggaaaaaatattctttgtcttacatcttacaacaaaataaaatctaagaggcttcacaaggtaattaaaaatatatatatatttaaaaagagctagaagaaggaaaaagagacagaaaataaaatagtttagttgaaaaacagatctccacatggagatccactttctaaagaacaaca

SEQ ID NO: 20265 - DNA, 504 bp, Homo sapiens
ggcccctcttttcccagggaagggtcctggccagcagtctttcctgcgtctatgaatggagcctttagcaaatagaaagggcaggttctggaccaggtgtggtggctcatgcctgtaatcccagaattttgggaggcacaggcaggaggattgcttgagcccaagagttcaagaccagcctgggcaacatagtgtagacctcatatctaaaaaaaaaaaaaaagaaaaaraagaaaaaagaaagagaaagagagaaagagaaagaaaaagaaagaaaggaaggaaggaagaaagaaagaaagagaaagaaagaaagaaagagaaagaaaagaaaagaaaagaaaagaaaagggagggagggagagaggccaggcgcggtgactcatgtctgtaatcctagcactttgggaggctgaggcaggcagatcacgaggtgggtggatcacgaggtcaggagttcgagaccagcctgaccaacatggtgaaactccggctctaccaaaa

SEQ ID NO: 20266 - DNA, 504 bp, Homo sapiens
ggcccctcttttcccagggaagggtcctggccagcagtctttcctgcgtctatgaatggagcctttagcaaatagaaagggcaggttctggaccaggtgtggtggctcatgcctgtaatcccagaattttgggaggcacaggcaggaggattgcttgagcccaagagttcaagaccagcctgggcaacatagtgtagacctcatatctaaaaaaaaaaaaaaagaaaaagaagaaaaaagaaagagaaagagagaaagagaaagaaaaagaaagaaaggaaggaaggaagaaagaaagaaagrgaaagaaagaaagaaagagaaagaaaagaaaagaaaagaaaagaaaagggagggagggagagaggccaggcgcggtgactcatgtctgtaatcctagcactttgggaggctgaggcaggcagatcacgaggtgggtggatcacgaggtcaggagttcgagaccagcctgaccaacatggtgaaactccggctctaccaaaa

SEQ ID NO: 20267 - DNA, 504 bp, Homo sapiens
ggcccctcttttcccagggaagggtcctggccagcagtctttcctgcgtctatgaatggagcctttagcaaatagaaagggcaggttctggaccaggtgtggtggctcatgcctgtaatcccagaattttgggaggcacaggcaggaggattgcttgagcccaagagttcaagaccagcctgggcaacatagtgtagacctcatatctaaaaaaaaaaaaaaagaaaaagaagaaaaaagaaagagaaagagagaaagagaaagaaaaagaaagaaaggaaggaaggaagaaagaaagaaagagaaagaaagaaagaaagagaaagaaragaaaagaaaagaaaagaaaagggagggagggagagaggccaggcgcggtgactcatgtctgtaatcctagcactttgggaggctgaggcaggcagatcacgaggtgggtggatcacgaggtcaggagttcgagaccagcctgaccaacatggtgaaactccggctctaccaaaa

SEQ ID NO: 20268 - DNA, 504 bp, Homo sapiens
ggcccctcttttcccagggaagggtcctggccagcagtctttcctgcgtctatgaatggagcctttagcaaatagaaagggcaggttctggaccaggtgtggtggctcatgcctgtaatcccagaattttgggaggcacaggcaggaggattgcttgagcccaagagttcaagaccagcctgggcaacatagtgtagacctcatatctaaaaaaaaaaaaaaagaaaaagaagaaaaaagaaagagaaagagagaaagagaaagaaaaagaaagaaaggaaggaaggaagaaagaaagaaagagaaagaaagaaagaaagagaaagaaaagaaaagaaaagaaaagaaaagggagggagggagagaggccaggcgcggtgactcatgtctgtaatcctagcactttgggaggctgaggcaggcagatcacgaggtgggtggatcacgaggtcagkagttcgagaccagcctgaccaacatggtgaaactccggctctaccaaaa

SEQ ID NO: 20269 - DNA, 504 bp, Homo sapiens
ggcccctcttttcccagggaagggtcctggccagcagtctttcctgcgtctatgaatggagcctttagcaaatagaaagggcaggttctggaccaggtgtggtggctcatgcctgtaatcccagaattttgggaggcacaggcaggaggattgcttgagcccaagagttcaagaccagcctgggcaacatagtgtagacctcatatctaaaaaaaaaaaaaaagaaaaagaagaaaaaagaaagagaaagagagaaagagaaagaaaaagaaagaaaggaaggaaggaagaaagaaagaaagagaaagaaagaaagaaagagaaagaaaagaaaagaaaagaaaagaaaagggagggagggagagaggccaggcgcggtgactcatgtctgtaatcctagcactttgggaggctgaggcaggcagatcacgaggtgggtggatcacgaggtcaggagttcgagaccagcctgaccaacatggtgaaacyccggctctaccaaaa

SEQ ID NO: 20270 - DNA, 750 bp, Homo sapiens
ttatgtaattgtagtcattgctggatgtcttggaggttttctgattttgtagacaactcttgagatgaacatctttatgcatcaatttttagttcctgaaggtggaattagagccaattttcttgtgcaaagttcatgtcagtttctttaacacacctttacctacactgggcattatttggttgccattttgataagtaaaaatggtacttttccttacttctgaggcataatcagattggcatttaatcaaactattacatacatgtggtagaattcattttttttaaatttaactttgttgttgttgagagggagtcttgctctgccgcccaggctggagtacagtggtgcartctcagctcactgcaacctctgcctcctggtttcaagcaattctcctgcctcagcctcctgagtagctgggattacaggcaccttccaccatgcttggctaatttttgtatttttagtagagacagtttcaccatgttggccacgttggtatagtggtgagcatagctgctttccaatttactttatttatttatttatttatttatttatttatttatttatttatttgagacggagtctaactctcctacccaggctgtagtgcattggcacgatctcagctcactgcaacctccatctcccaggttcaagcaattctcctgtctcagcctcccaagtagctgggactacaggtgcacaccaccatgccgagctaattttttgtatttttta

SEQ ID NO: 20271 - DNA, 615 bp, Homo sapiens
ttgggctgcagctggagcatcttctcatcttgcgtttgggcgtggtggggtcttccagtgtgggatccatgtccgtggggttccctctgccccgaccccgaaagmccagtcagtttctcttcaggatctgccccccgggtggctcagcccagctcctgcctaggaaagccttagtgttgggagggaccctgatgactgaggagcctggtagctccaggtcgcccacactttcaggtctcttgcaccagaaggtggcgggatccattgggaggaaacaggtcgccttggaaggcatccctgggcccccatccccaggggtaggggccgtagggggcccactctgctgccttgaccagactcctgggcttcgaaggctcccgggcccagtaagaaggaggtgggtgccaaggttgaggaggaagcatccgagtatgtgtaggaggaggacagggtgggaccatagactttgccaaaagctgcaggtggatcgggggaccctgggggctcaggatccagcaaggggcagcaggagtaaaggaggaaggaatgacaggtgcaaataccttcccaccaaagcccttgttgccctgtggctcctccccagagttgtcccca

SEQ ID NO: 20272 - DNA, 615 bp, Homo sapiens
ttgggctgcagctggagcatcttctcatcttgcgtttgggcgtggtggggtcttccagtgtgggatccatgtccgtggggttccctctgccccgaccccgaaagaccagtcagtttctcttcaggatctgccccccgggtggctcagcccagctcctgcctaggaaagccttagtgttgggagggaccctgatgactgaggagcctggtagctccaggtcgcccacactttcaggtctcttgcaccagaaggtggcgggatccattgggaggaaacaggtcrccttggaaggcatccctgggcccccatccccaggggtaggggccgtagggggcccactctgctgccttgaccagactcctgggcttcgaaggctcccgggcccagtaagaaggaggtgggtgccaaggttgaggaggaagcatccgagtatgtgtaggaggaggacagggtgggaccatagactttgccaaaagctgcaggtggatcgggggaccctgggggctcaggatccagcaaggggcagcaggagtaaaggaggaaggaatgacaggtgcaaataccttcccaccaaagcccttgttgccctgtggctcctccccagagttgtcccca

SEQ ID NO: 20273 - DNA, 576 bp, Homo sapiens
agcatgtaataaattctccatatcttgacaaatttttaaacaaagtattttagctcttcttccagctttcaaaatatgcattaaaaccagaagacaaagacttaaatccaaatgcagtatcatcatatggcaatgtcacataattgcatgaaaaarttgattctaaattataaaattcattataaataaaaggtgagaatgcagtgatatatagtgtagtggtaccagacaacatgagttgaaatcctaaattaaccgcttaatagatgcataaccttgtcatatttcttaacatatgtgtgcttcattttctttgtctgtaaataagaataatggtaactactttataggatagttgcaaaaattctatggattaataatgcctggcacatagtaagcgccaaaaattgtgtttgtcattattagtagtattgctagtactattactcctatgaataaaagactccatgagcaattaggaaaataaagtgatgcttaccaggagtcaatatgtattcagcatgaattctctttcattttatacaataaccagtgtaaaagatgtagaaatcttgt

SEQ ID NO: 20274 - DNA, 562 bp, Homo sapiens
tgaggaggaccaccaggaccagtgccgcgcgctggtaggatggggagcagtggcagctaactcgggggtcttgagggtcaagggttcatcacatttggagcctggggtcagcagccatcttggctgcccctggggcaagaaatccttccacccttcagctccatcccagggggtcctggacagtccttgcccaccaatgtcagcatgtagggctgacggtcagctggtatgccaacagccctgcttgctctgccacactgacggctgtcctaggcccccaagtggtcccacctcctccctgggcctaacacacagggctactgcctcccacagcagggtgcttcctagacccagctctgctgggaccctcatccygcagtgctttcacctttggtcattaccctgccacactggtttctaaatattctgagtattgcccatgtctaggtcccttctcagaaagggatctactgccacctggactgggcttgtctcctctgtcacacagcaggacaagccactgctcagactcccactttattcttagcatctgtgggggcag

SEQ ID NO: 20275 - DNA, 512 bp, Homo sapiens
tgcaacatggttttgtttttgttttttgttttaaagctgagcagcaggatcacagaacctgcaggtttgctgtctgctcagcaggacaaagagagcagagagaggaacatgaaaaccaagcggaccagaagaaaggaaaacatgaaggaggctcatttaaagggggaggagactttgcttaagatgctggcttgggggagggtgactgcaccaarcatgtgctgtttccagggtccagatggtgtcatttgccctgcaaaacaagtaatagacaacatgattttgatgctcagaaataaatctgtgagtaagtcatttgggggaaatgatgcccatggctgttatactcacaacagaagagattcaactacatttgaaaacaactgccctgccttgctggcctctagttcatttaaatgctgtatttacattgttaccagctgtatttgcacagctagaacttccacctgcttgataatttacttaaggtacatattgtatttacatgatat

SEQ ID NO: 20276 - DNA, 545 bp, Homo sapiens
tgcttcgccttcgcctttcaccaagattgtaagtgtcctgagccccccaccccggccgcccccagccatgctgaactctgagtcaattaaatctctctcctttataaattacccagtcttgggcagttctttaaagcagcrtgagaacgaactaatacaggaaggaagtctatgcaggatgtgttctcaggtagatgaccaccttgggcaaaagaagattaattccactagagaactctgagagccagaacagaactgcataattatccccctcaaggggtgagagagctggggtagttagacacccactttcatcagccatgggttgaggtatggcattttcagttggctttgctggcagaccgcagagatggaagttggttggcatgccctgaaatggtgaggctccaggagacatgggtgggaccccttcaagaactgctacaaactcctgctctgaaatcagactacctggattcaaacctccgatgttccttcctatttgttatgtgaccttgggcaagtcacttaagccctttagtctt

SEQ ID NO: 20277 - DNA, 546 bp, Homo sapiens
cagcccaaacacttgccctccccaggctgcccttctctgggcccttctgcccagatgcttggctgctgtgcccaccaggtcctgcttgcacagagcttatatcctagtgggcggcaggacaaagaacaagcacacaggcacacaaacacaatgattccaygctatgaaggaaatgcagagtgagactgttgggaagagcatggcggggtgtggagaggcaaggggagtctctctaggaaggtaatatttgagctgggacctgaagaatgcaacaaagccagaagaacaagagaaagggcattccagatagaggcaagagcaagtgcaagagccctgagatcacagagcaattggaaactaggaagcagccagcctggctggacatggacattttgggtattgatggtgaagagcctggaattgttttctaaatttgatctccaaacacttttaagcaagaggtgatatgatatgacatattttagcagacaatgaatatttcctgaattaaaattgaagacccttctagttccaatagttccatgc

SEQ ID NO: 20278 - DNA, 531 bp, Homo sapiens
acacactcttgaaaaaatatccatatatggttggcatttcagatgcactttgtgaagtcaaggacactaggctgggtactcagaaacaggaagcacctagaaggtcttggaaaaatcagtgagcaatgggatccaagttctctttcaggtccgccctcactcttctgggttcatgcagctgtggaccaagggagaactgaagcacctggcatgtggcctcagtccccatccctctccctgccatgcaaacccctctcaatggagaattctaggcagagggagtatcaagaaaatagacggtggaggcccggagcacggaagaatcaagggactaaaagcagagagcagagaggaggacggcaggcgggggatgggccgggctggtgagctgggacaaaacttagaggagtttggaagccaaggacatgagcctcttcattatcccgagagcccccagatgcttggtgrgagtgaagctggggggcgggggtcagggggactgtgttcatctcctaaggctgccctaaaaca

SEQ ID NO: 20279 - DNA, 520 bp, Homo sapiens
gggggaaaagaaatcaaatgcttgctaacgtttgagatattggaatatctcacatgaaagcctggatttccatcttctctaggtaaaccggaaggcatagtcaaacttggctatagttggctggagctgaggagcagcccctcttagataagtgtgtatactctagtttaccacagtctccgccactctgtcccgctaccccaacccactttattcatttatcccattatgtgtttggcctaagtaagcatttacctttgcaagtcctgtgttttacaacaacaaattccctgagcacagtcactgaagaaccggatatttctttttctaacyttgtgcccttaagcaagttactttctctttctaaaccttcttttatctgcaacatagggatgagatgcttactttatttaaccaatccttatgagcacctattattctgaacactgagtttacatcagtgagcaaatagactaagtccctgatctcatcgggcttaaaatctagtgtgggggaaaca

SEQ ID NO: 20280 - DNA, 523 bp, Homo sapiens
atatcttctttggagtaatgtctattcaaatattttccccccaaaatgaacaagattaattttaaagaacaaccatttgatataaacaaaaaatcccggtgtgcaaagtggtgtgtgagtgtatttttctgyaactgcacgtgttaaatcatctcctctgggcactgtctcctacaaacagccactgtctttcaccttagatgttgatgcttctgcggtagatttgtgactaactggttttcagatggtcggtgactttagccactgtggtgcgctggcaaacatcaacactttgtgctaggtcatgttcatcatcaacttgcttgagaaacagaaatgtgatactcaagtttctactaaatacgcatggaaatgtttttgagctcgttgtggcctgaagggtttattgaaaaatgtaaaaatcatcaacaaacaatacaatgaataaggggagtggcaccatgtgataaatgacaatgcaactgtagcaaaagcactcagtcttctctctatatagcacccc

SEQ ID NO: 20281 - DNA, 523 bp, Homo sapiens
atatcttctttggagtaatgtctattcaaatattttccccccaaaatgaacaagattaattttaaagaacaaccatttgatataaacaaaaaatcccggtgtgcaaagtggtgtgtgagtgtatttttctgcaactgcacgtgttaaatcatctcctctgggcactgtctcctacaaacagccactgtctttcaccttagatgttgatgcttctgcggtagatttgtgactaactggttttcagatggtcggtgactttagccactgtggtgcgctggcaaacatcaacactttgtgctaggtcaygttcatcatcaacttgcttgagaaacagaaatgtgatactcaagtttctactaaatacgcatggaaatgtttttgagctcgttgtggcctgaagggtttattgaaaaatgtaaaaatcatcaacaaacaatacaatgaataaggggagtggcaccatgtgataaatgacaatgcaactgtagcaaaagcactcagtcttctctctatatagcacccc

SEQ ID NO: 20282 - DNA, 523 bp, Homo sapiens
atatcttctttggagtaatgtctattcaaatattttccccccaaaatgaacaagattaattttaaagaacaaccatttgatataaacaaaaaatcccggtgtgcaaagtggtgtgtgagtgtatttttctgcaactgcacgtgttaaatcatctcctctgggcactgtctcctacaaacagccactgtctttcaccttagatgttgatgcttctgcggtagatttgtgactaactggttttcagatggtcggtgactttagccactgtggtgcgctggcaaacatcaacactttgtgctaggtcatgttcatyatcaacttgcttgagaaacagaaatgtgatactcaagtttctactaaatacgcatggaaatgtttttgagctcgttgtggcctgaagggtttattgaaaaatgtaaaaatcatcaacaaacaatacaatgaataaggggagtggcaccatgtgataaatgacaatgcaactgtagcaaaagcactcagtcttctctctatatagcacccc

SEQ ID NO: 20283 - DNA, 523 bp, Homo sapiens
atatcttctttggagtaatgtctattcaaatattttccccccaaaatgaacaagattaattttaaagaacaaccatttgatataaacaaaaaatcccggtgtgcaaagtggtgtgtgagtgtatttttctgcaactgcacgtgttaaatcatctcctctgggcactgtctcctacaaacagccactgtctttcaccttagatgttgatgcttctgcggtagatttgtgactaactggttttcagatggtcggtgactttagccactgtggtgcgctggcaaacatcaacactttgtgctaggtcatgttcatcatcaacttrcttgagaaacagaaatgtgatactcaagtttctactaaatacgcatggaaatgtttttgagctcgttgtggcctgaagggtttattgaaaaatgtaaaaatcatcaacaaacaatacaatgaataaggggagtggcaccatgtgataaatgacaatgcaactgtagcaaaagcactcagtcttctctctatatagcacccc

SEQ ID NO: 20284 - DNA, 523 bp, Homo sapiens
atatcttctttggagtaatgtctattcaaatattttccccccaaaatgaacaagattaattttaaagaacaaccatttgatataaacaaaaaatcccggtgtgcaaagtggtgtgtgagtgtatttttctgcaactgcacgtgttaaatcatctcctctgggcactgtctcctacaaacagccactgtctttcaccttagatgttgatgcttctgcggtagatttgtgactaactggttttcagatggtcggtgactttagccactgtggtgcgctggcaaacatcaacactttgtgctaggtcatgttcatcatcaacttgcttgagaaacagaaatgtgatactcragtttctactaaatacgcatggaaatgtttttgagctcgttgtggcctgaagggtttattgaaaaatgtaaaaatcatcaacaaacaatacaatgaataaggggagtggcaccatgtgataaatgacaatgcaactgtagcaaaagcactcagtcttctctctatatagcacccc

SEQ ID NO: 20285 - DNA, 545 bp, Homo sapiens
tgaagaggcagctcagaggccaagttctggagtcagactgcctggggcccagcccagccctactgtttagcagctgtgtgaacctggataagttactcaattgctgtttcctctgctgtaaaacaataagagaatatgccttatatgatastatgtagagttgccagattaaatttaaattcattacatttgaattttagattactaatattttgtttagtataactatgtcctaagtttaactgggcattctggatttttgtttgctaaatctggctaccctgctggcatggaggttaagacagtgcctggcatatagtaagttttatagagttaactgttgttaagatgctttgactgcaaggaacagaagccatgtagcagaagacaaggagattgtgggtgtgtgggctcagagttcttccctctgtttcgcaggtgacttctggcctctatctccttgtctctcagaggccatggggaccttcacagtcaggttccttccaccccatctttctccaggcttgccttcccactaatatctg

SEQ ID NO: 20286 - DNA, 545 bp, Homo sapiens
tgaagaggcagctcagaggccaagttctggagtcagactgcctggggcccagcccagccctactgtttagcagctgtgtgaacctggataagttactcaattgctgtttcctctgctgtaaaacaataagagaatatgccttatatgatagtatgtagagttgccagattaaatttaaattcattacatttgaattttagattacwaatattttgtttagtataactatgtcctaagtttaactgggcattctggatttttgtttgctaaatctggctaccctgctggcatggaggttaagacagtgcctggcatatagtaagttttatagagttaactgttgttaagatgctttgactgcaaggaacagaagccatgtagcagaagacaaggagattgtgggtgtgtgggctcagagttcttccctctgtttcgcaggtgacttctggcctctatctccttgtctctcagaggccatggggaccttcacagtcaggttccttccaccccatctttctccaggcttgccttcccactaatatctg

SEQ ID NO: 20287 - DNA, 514 bp, Homo sapiens
ccccctgccccaagagcaagcttctttaaattgcaaaaatggagatgatacctagccttaggagatgtactaaagacagaatgaggcaattaataattgttaacatatattaaggtgctgtgtgccacactctactactttgcacggttcacatcatttagtcctcacatgaccctaggaagtgctatgatgaccatccccatatattcgacatgctaagatataaagtgactggcctgatccacacagaaagtggtggccctggcatttgaagcccctgactccagagcctgcactcttaggactacatctacagagttagtatttattttttgcctcccagcatccattcttccaccttttggtaatagatccttaaattcytagagtccccctatctgtgtctaatcctggtaagactaacaatcaggatgttcatctctctagccatgacaaaagccaggctggatttccctcgtgacattatacatggagggacctgattcattccctc

SEQ ID NO: 20288 - DNA, 1444 bp, Homo sapiens
tgagaaaaacaaagttcatacagactgttatttgttctcagttctctgatggttagtgacatagctatgataagaactcatacctcctaatgtctcaaaacatttatctgctaaattaaacttcactcccaaataataattaggtttgtgtgtaaatgattaattaaaaatcagagcatggagcttctgagctggttctaatatttaggatatttaagaattatttttaaggggccggrcattgtggcttacgcctgtaatcccagcactttgggaggctgtggcacacagatcatgaggtcaggagatcaagaccagcctagccaacatggtgaaacattgtctttactaaaaatacaaaaattagctgggaatgatggtgcgcgcctgtagtcccagctactcgggaggctgaggcaggagaatcatttgaacccgggaggtggaggttacagtaagccgagatttcgccactgccctccaacctgggcaacagaacgagactccgtctcaaaaaaaaaattatttttaaatgatggcaatgaagtaaaatatttttagttgaaaaaaatctgcttttgggctaagtgtggcggttcatgcctgtaattccagtgctttggcaggccaaggcaggtggatcacttgagactagcctgggcaacaaggcaaaaccctgtctctactaataatacaaaaattagccaggcgtggtggtgtgcacctgtaatcctagctactcaggaggctgaggcatgagaatcgcttgaacctgggaggtgaaggttgcagtgagccgagatcacgccactgcactccatcctgtgcgacagagcgagaatctatctcagaaaaataaaaagagaagaaaataacctgtttttgataatttaaaaaatacatagaataatgtgcattttacagaattttcttactgttttccttttactcatgtgttttcactcccctgaagaatttgtaatatcctatgataggagattaaagggcagcatatttcactaaatatccatagtattctagtcacgtctaattactagattaccaaactaaactgagactcattgtgtttggttatctctctagtatgagcaggtagcaactttataatcacttttatgaagagtaggtcagctttagctgtcgatgtttttcttgcagtattaactgaataagaattaataaggctgggtgtggtggctcacgcctgtaatcccagcactttgggaggcaggtggatcacatgaggtcaggagttcaagaccagcctggccaacatggtgaaaccccatctctactaaagatacaaaaatctagccaggcgtggtggtaggtgcctgtaatctcagctactcaggaggcttgaggtgggagaattgctggaacctggaaggcggaggttgcagtgagccaagatctgccattg

SEQ ID NO: 20289 - DNA, 631 bp, Homo sapiens
atgggtataaaagtccagccttcatcctagaaggtttaatgtgagtaccacttcgaatgatgtgtatgagtggtcttagataaggtatggacctcaaattagtcccattagctgggcagagggtggatatttcaccataaattcattaatgtggaccttgaagaccttccatctttatgcaaatgttccttcagtgaaatgcaaatatcccctggatacaatcagaccttgtgctgtcaacaactaacatagtttggatattctttaacaggtaacctctttcttctggcatcataccagaaagtatgatgccagaagaaagaggataatcatttgctcacattagatttcacccacttcacagttttccagatgaggactaactstctgctttctctttatgcatttgcttaagaaatcttctgtctcaatttatctctctctctctctcccctcccccttctgccccaccccacccttatgggactctaattacacatatttttttctctctttgattcagtttggataaatctattgatctgtcttcaagtttactgattttttactgtatccaggctgccaagcccattaattctttatctcttgatgttgtggggagatttgtcag

SEQ ID NO: 20290 - DNA, 1197 bp, Homo sapiens
ttttctaagtctgattcatatgcaaacaatgggtaagtggtctaagctgcattcataaagctggctcaagggaagctgcattgcttgttttgttttgttttaattttctaacctcttcaaagagtggaacgaaggttgaggaaacctgtccacacagtctaccacacaccttccacgaaaggttccccaacacctccaacaaaataatgtaaacacatgctggaacctatattactctcacaccataacacttcccacacttcccacaatactttttctcttcatgggaatatccttccaaaacatgctgatatctcctaagcattattcatctgtcgaattttcccacctattgtaaggtcttccaattgttaggttcttaataaacacattttaaattattaaaattctgaactaatgggtaatcagctgtacaamccgaattgctgatttgcatacagctgaagtccctcctcaaaacttctgtaatacatgaaacttaggcaaatggttgggtcattaccatatattactttgtatttttatttatcagtatatgtgattacagttatgcttatgtttattgatacgtatatgttaacttttatacatatgtacattgtattattttgttacatagcacagcgttttgtactcaaaaagtgaccaattataataagctgcatactttgggaagcattgcaggctagtcatacagttttattttttttttccctgcagcctgacaacctctttagtcattcactaaacctctctcagcttcagtttcttcatctgcaacatatagcaaataataaaacttaactcagatggttctagtgtgaaataatacagagtaaatgtgtcaccaaatacaaaccaatggcttgattgacataactcattgctaattttcttgaaatgattcaaagtattttccagacaagcacacactgagggaattcgtcaccactaaacgagtcctatgagaaatactcaaaggtgtcccaaacacaaaatgaaaggtcaacattcatcatcgtcaaaacacatgaaagtagcaaactcataggtcttgtaaaacagtcacacaaagtaggaagagaaatcaaatagcaacacaacagatttccaccaaaccacaaagacaaagagacagacagaaagaaaaacaaaaaacaacaacaaaataacccc

SEQ ID NO: 20291 - DNA, 458 bp, Homo sapiens
caagaatcaagttctgattttcgtttcttttgatttcttccagatataacacaaagccattgaaattcagccttttcctgcctaaaacgcttcataattgttgtttgctcagtcggaatatcaaaggtragatttgatagaggaaagccatgatcagaagaaaacctgagagcggtgcactcaacattttttcacaggggtccttagctggcgtggtgtcttactcctgtactcacaactccagaggctgaggcacgaggatcgcttgaacttgggagttagcgattgtagggagctatgattgctccactaccctcgagcccggacaatggagtgagaaaagcaagcaagcaagcaagcaagagaaagtgggagtgagggacggagggagggaaagagggaaggaaggggggaaggaagggagaaaggaaggaaggaaggagaaagagggaggaagg

SEQ ID NO: 20292 - DNA, 458 bp, Homo sapiens
caagaatcaagttctgattttcgtttcttttgatttcttccagatataacacaaagccattgaaattcagccttttcctgcctaaaacgcttcataattgttgtttgctcagtcggaatatcaaaggtaagatttgatagaggaaagccatgatcagaagaaaacctgagagcggtgcactcaacattttttcacaggggtccttagctggcgtggtgtcttactcctgtactcacaactccagaggctgaggcacgaggatcgcttgaactygggagttagcgattgtagggagctatgattgctccactaccctcgagcccggacaatggagtgagaaaagcaagcaagcaagcaagcaagagaaagtgggagtgagggacggagggagggaaagagggaaggaaggggggaaggaagggagaaaggaaggaaggaaggagaaagagggaggaagg

SEQ ID NO: 20293 - DNA, 458 bp, Homo sapiens
caagaatcaagttctgattttcgtttcttttgatttcttccagatataacacaaagccattgaaattcagccttttcctgcctaaaacgcttcataattgttgtttgctcagtcggaatatcaaaggtaagatttgatagaggaaagccatgatcagaagaaaacctgagagcggtgcactcaacattttttcacaggggtccttagctggcgtggtgtcttactcctgtactcacaactccagaggctgaggcacgaggatcgcttgaacttgggagttagcgattgtagggagctatgattgcwccactaccctcgagcccggacaatggagtgagaaaagcaagcaagcaagcaagcaagagaaagtgggagtgagggacggagggagggaaagagggaaggaaggggggaaggaagggagaaaggaaggaaggaaggagaaagagggaggaagg

SEQ ID NO: 20294 - DNA, 647 bp, Homo sapiens
ctttctattctaatttatattatctataaatgcacaaacttaaacacacatttttctttttattgtatataatttttcaaaccacctcaaatcccttacttaaaaaaagtcttgtttagtctctaaaggacttagtagagaaattctcaacctcttaagtagcatttcaccaagaaatagcacactgaaaaacacaagttttaattcctatcttttcccccatctcttaacttgcaatcctgtgggacttgcaatcctgaaggcagcccataggaagragaaaaaagagaagaaaatgacactgataatccacaaagaggactaatacaaatgtaagtttccttgcttattagcaattgttaggtgatgtttaggacaaaaggggacctaaggttttggtaaatacccaggaagaaacattccattttgcttctggttaccaatctactactgaaaaatgactgagctacacttgacaactttctggtgctcacttttctgagaaagcttctttccatgttccccaaattatttgatcataacaggtaccaccctcagtcagggaaaacacctggagacttggcaaagctacccagctcacattgaattatgtaagcctcaaagttttcattgtgtagtcagtattg

SEQ ID NO: 20295 - DNA, 552 bp, Homo sapiens
gaaaaggttttcctccgtggaaccagagttctcattggtatgttgtggtaacaatacagagctactaaacagaaatttggttacaggaacagctttattgcctttgtcttacatttaaaaatagacatttaaatcatttattttctcctttttgttttttgggcttttttaactcttcaaaatatacttcaagrattctcattggtctaattttctactttacatgtttgtttacaatctcttggaagtctttctgttgttgtttgtttgtttgtttgtttgagacagagtctccctctgtcgcccaggctagagtgcagtggggcaatcttggatcactgcaatctctgcctcctggattcaagtgattcttgaactctagctgggactataggcatgcgccattacacccggttaatttttgtatttttagtagagatggggtttcaccatgttagccaggctggtcttgaactctttgcctcaggtgatctgcctgcctcggcctcccaaagttctgggattacaggtgtgaaccactgcacccaatct

SEQ ID NO: 20296 - DNA, 577 bp, Homo sapiens
ctggcactttgatcttggacttcccagcttccagaactgttaaaaatacatttctgttctttataagccactcagtttatgatatcttgttgcagcaactggagcacactaagacagggacaatgggatttttactattttaagtattgatatgctgaagaactattttaaatactataataaaacaaaacaacagcaacaagaaactttgctggcattctgtgctggaaatatcttgtttgctgcaagactcacagaacttgcaagctrgcatttcttcttgccgtgagatttttatgttaactgcttgatccacaggcttcttttcttcccagtatctgccacaagattcctactgcaggctctgtttgtgacctgtgattggtgggggctgtggttgttgtgggcagagaaaaggagtccttgtttattgctttttaaacttgaataatttccagaattacctagaagagcttataaaaattcacatttctgtcttaaccattctgattttctaagtccagtgtgaatcttaggagtacatgtttttataaagcttcttaggtgattctattta

SEQ ID NO: 20297 - DNA, 525 bp, Homo sapiens
catggtgctgctgtccctctgggtcggcatctcctcactcccccgcctcaacgctggaggccgggggtgcggggagggggcttcggacgccgtgggagaccccgccgcccgcgcctgtcggagaaccgcggccatccgcccacctacctgcccacctcacccgcaacgccgacccaagggtcgcctcgcccaagcagcccaaagatggcacgttaaatcagtgagctaaagaggggattatttgataattagcattaggacaatttgctagccatttggaagaaaataattccgtatggaccaaaaatttaaatataaaaggaaacataaaaattagaagaaaatacagatctccctaagcaggacacaaacctcaaaaatgtaaagaaaaaaggtggtaaattttacacatctacaaccatctgatccttgacaaacctgagaaaaacaagcaatggggaaaggatcccctatttaataaatggtgctgggaaaaytggctagccatatgtagaaagctgaaac

SEQ ID NO: 20298 - DNA, 557 bp, Homo sapiens
gtaggaaattttacatgagtgaaggggagaagtcagtgtctacagaatttccacattgacttgaaaatttgttcaaataattcgacaaagatttattggattcttaattagtgtcagttactgttctaggtaccagggatagaggatgaacaaggcaggcacagaccttggtccaatgtccttctagtgagaaaagatagacaaaaacaagtaacagagactaaatcattacagtattagtgagtaccatggctttgtgtgtctgtgtgcatgacaggcaggtagataaaagtggcaaaggaagatgtctctaaaraggcaacatctaatcatggacctgaaggagaacaaggaaacacacatgggaagagtcaagggaaggacatcccagggaaagagaacagtagaggcaaagaccttgaggaaggaagagactggcgcactctagcaagcgtgcctgcagagtggtgggtaggggcaagtgtgggagaagaacgccaacctgctggaaggctgtgaacatatggtgtcagcagaggccatcccacgtgtcactg

SEQ ID NO: 20299 - DNA, 544 bp, Homo sapiens
catagcagggcacaaaaaatgtgatagtgaaggatctttaataacctggaaacatagccatcttaaacaaagcagaatttgaatgycaatacactaactcacttcacacacgaagaaaaaagttggggtatgaggatgctatgctgcaggaaaatgtattcctgagattagagcttccataactcttccctagttctctaaagagctggctgcttctgttccatcatctcagctgaagttccatccctttagaatcctctgcaccaccccgactaatgcaaatccaaactgcccactctcagttatgccccaccagagaactcttgattttattccaagcactagtgataatttgtagttactgtgtttgtcactttatttacctctttatttgctttttattactaaaatattaattcatgagtttagaagccttgtccatgttgttcatgatttccccagtgtctagcagagtgtggggggcacagtagctattcattaaaggtcgattgaatgaatcaaggcagggatgatgccggagagg

SEQ ID NO: 20300 - DNA, 544 bp, Homo sapiens
catagcagggcacaaaaaatgtgatagtgaaggatctttaataacctggaaacatagccatcttaaacaaagcagaatttgaatgccaatacactaactcacttcacacacgaagaaaaaagttggggtatgaggatgctatgctgcaggaaaatgtaktcctgagattagagcttccataactcttccctagttctctaaagagctggctgcttctgttccatcatctcagctgaagttccatccctttagaatcctctgcaccaccccgactaatgcaaatccaaactgcccactctcagttatgccccaccagagaactcttgattttattccaagcactagtgataatttgtagttactgtgtttgtcactttatttacctctttatttgctttttattactaaaatattaattcatgagtttagaagccttgtccatgttgttcatgatttccccagtgtctagcagagtgtggggggcacagtagctattcattaaaggtcgattgaatgaatcaaggcagggatgatgccggagagg

SEQ ID NO: 20301 - DNA, 625 bp, Homo sapiens
atacatttttatctaaaatactatttcagcccataatataaaaatttgttaatgaggtattttacattatttttgcaaaatcttctgaatctggggtgtaattatacagcacacctctgttcctactagctatatttcaagtgcccagtggccacatgcagttagtggcttcttattggatatgcacagatatagaatgtcccatgatgaggacagggagcatgttaccttttaaatcttagaacccactgggtatggggagcctgttgtgagacaacctccctcagccagggtggttccatagtatgcattggtcatgcccagcaggtagccggaatcagtgtttggtggaacgtggggctttggaatrccactgtggttggtttcacctcagagggagcagctggattcctatagagccctgaataaagggaattgttcctcagaaagcaagtttttgagcaataagtataggatttcctgggtaatagccaaacctgggcaggttttctatagattggttggcacgtttttttcccccacttcctggagatgtcctagaattagaagataaaagacggccctgtgttaccgtggggaaccataaatggtagcgtttatccaa

SEQ ID NO: 20302 - DNA, 476 bp, Homo sapiens
acacagttctaagtatatgattttttaattaaataattgttaattgaaatgaaatgacaacattttctacttcattgtgtttcctgcctgtctctaggtaggatccccagttatgagaattcatgaggatttcatgaacattttttactagtatttacaatggaagtgttttgaatattcctcctgcctatgtggatttaggtagtttttaataaaacacacaccctgaacatacaggaaaagtcagatggtgtatggatagccttgcctttcgaagtctttccaaaatggagaaaggagttccaccrtacatttcgtgtaagccttctgatggaggcttactgttttagggtcagaacagtgtgtttgttgactgaacacatgcttgatctttggcatgttgtgttgggtatgtgcttggagaacaagattgaagtgtgctcctagatgactgtctcacttccatacactgtaca

SEQ ID NO: 20303 - DNA, 476 bp, Homo sapiens
acacagttctaagtatatgattttttaattaaataattgttaattgaaatgaaatgacaacattttctacttcattgtgtttcctgcctgtctctaggtaggatccccagttatgagaattcatgaggatttcatgaacattttttactagtatttacaatggaagtgttttgaatattcctcctgcctatgtggatttaggtagtttttaataaaacacacaccctgaacatacaggaaaagtcagatggtgtatggatagccttgcctttcgaagtctttccaaaatggagaaaggagttccaccgtacatttmgtgtaagccttctgatggaggcttactgttttagggtcagaacagtgtgtttgttgactgaacacatgcttgatctttggcatgttgtgttgggtatgtgcttggagaacaagattgaagtgtgctcctagatgactgtctcacttccatacactgtaca

SEQ ID NO: 20304 - DNA, 515 bp, Homo sapiens
agtaaagctggtgttctcctgaagccaacatttatggtatcaccttgctgatccaggcaaaatggcaaamgtgtagtgaacataaagccaggggctgagattgtggatgtcctctgtaccaagtttcttattatggtaagggtagaagttcaccaggtcagtaatgtgattttgtccaaagagccatttctggagatctagcctaaacattgctcctccaactcttcccataatttgttaacaattgaataattgttctgtttaaaatagtttggatgttttatgttttctgcaactttactgttatcataacaaagacataaataaagatctaaataaagtcagaaatacactcttacagaaaaggtttactattaaaaggatataggtgcttttcaaatgagttgatatattgtttcccctgaaattttattgattctaaaatgtatgcagaaatattatattaacaattattaacataatatgaaataattatggtaaaaaaaatgtattga

SEQ ID NO: 20305 - DNA, 515 bp, Homo sapiens
agtaaagctggtgttctcctgaagccaacatttatggtatcaccttgctgatccaggcaaaatggcaaaagtgtagtgaacataaagccaggggctgagattgtggatgtcctctgtaccaagtttcttattatggtaagggtagaagttcaccaggtcagtaatgtgattttgtccaaagagccatttctggagatctagcctaaacattgctcctccaactcttcccataatttgttaacaattgaataattgttctgtttaaaatagtttggatrttttatgttttctgcaactttactgttatcataacaaagacataaataaagatctaaataaagtcagaaatacactcttacagaaaaggtttactattaaaaggatataggtgcttttcaaatgagttgatatattgtttcccctgaaattttattgattctaaaatgtatgcagaaatattatattaacaattattaacataatatgaaataattatggtaaaaaaaatgtattga

SEQ ID NO: 20306 - DNA, 515 bp, Homo sapiens
agtaaagctggtgttctcctgaagccaacatttatggtatcaccttgctgatccaggcaaaatggcaaaagtgtagtgaacataaagccaggggctgagattgtggatgtcctctgtaccaagtttcttattatggtaagggtagaagttcaccaggtcagtaatgtgattttgtccaaagagccatttctggagatctagcctaaacattgctcctccaactcttcccataatttgttaacaattgaataattgttctgtttaaaatagtttggatgttttatgttttctgcaactttactgttatcataacaaagacataaataaagatctaaataaagtcrgaaatacactcttacagaaaaggtttactattaaaaggatataggtgcttttcaaatgagttgatatattgtttcccctgaaattttattgattctaaaatgtatgcagaaatattatattaacaattattaacataatatgaaataattatggtaaaaaaaatgtattga

SEQ ID NO: 20307 - DNA, 551 bp, Homo sapiens
tcctcaaaagcaatttttaaatctttcctattccctagctatatagttggatagtgctctaatttagattgtcaactttaactctatggattgtgtgtaaatcatgattctgttttgcttccattttagaccatttaaatatcaagagacactgttaagaaagatagaaagtactaatcttaaaatatttaactggtcctacaaaattggcaattttatgtcggcaattgtaatatgtaggccaaaaaaaactcctattctttggaatatatatatatatatatatatatatatatatatayacacacacacacacacacacatatatacacacacacacatatatatggaatatatatacacatatatatacatatatatggattatatatatacacatatatatacatatatatggattatatatatacacatatatatacatatatatggattatacatatacatatatatggaatattatatatatataatacaaatgaaaaataaagcctaataaactggagtaggacttagttaacaaatcaaat

SEQ ID NO: 20308 - DNA, 608 bp, Homo sapiens
attttccctattcacarcagataaaactgtgaaataattatatattaattctctgaaataatttatacattaattaagagcagagatgaagaccatttatatttactattttatccataatacttaacacacaatctactaaatagtaggtacccaatttattgacccacactgaatagtcagtaaatggttagacaaatacattgagatgtcaaggaagaagaagagatatggacttagaagtcactagcacatggactatgtgatcaagtttagaagatgtttttaaacatctcttgtcatctctgcaataaaaataatgacaatttagaataactatatttcctagacttccaaagtagctaggtggaactatatgattaagtaattgccaatgttaggtaaagtgaagttccccacatcagcttctggaaatcggccttaaaagatggctggggtatgcccactgtcccttcttgtgcttcctcctctctgaaatgtagatgcactagttgtggctgaagcagccactgcaaaccataaagtggccttggaaactaaggccatgcattgcagaatataaaataactctgtggagcagaactacc

SEQ ID NO: 20309 - DNA, 608 bp, Homo sapiens
attttccctattcacaacagataaaactgtgaaataattatatattaattctctgaaataatttatacattaattaagagcagagatgaagaccatttatatttactattttatccataatacttaacacacaatctactaaatagtaggtacccaatttattgacccacactgaatagtcagtaaatggttagacaaatacattgagatgtcaaggaagaagaagagatatggacttagaagtcactagcacatggactatgtgatcaagtttagaagatgtttttaaacatctcttgtcatctctgcaataaaaataatgacaatttagaataactatatttcctagacttccaaagtagctaggtggaactatatgattaagtaattgccaatgttaggtaaagtgaagttccccrcatcagcttctggaaatcggccttaaaagatggctggggtatgcccactgtcccttcttgtgcttcctcctctctgaaatgtagatgcactagttgtggctgaagcagccactgcaaaccataaagtggccttggaaactaaggccatgcattgcagaatataaaataactctgtggagcagaactacc

SEQ ID NO: 20310 - DNA, 581 bp, Homo sapiens
ggacttaatgtggtctagtctgtaagggttgacagatcattgtggcagatcccagacatgctyattatgttagcagtaggggccctgaggtcaaaaggcttaggacagctatcctgcctcccagacctgggaggaaaagagagagaaagaggggctccagggcagttgtcagagttaggaaggtgctgagtcgccacaggcatcagaggaggattttctgaatgggtacagtgaggacccagtggtgctctctcctcaaacctacctgttgggaaccagatcagcccagcaggctggtagcagagccatggcctgggaacctgggtcagcctcactgtcttagctccagactcacccactccctttgcaatgctgtgctgtgtagtggtaaagcctgcacacgctaggtcccattcctgcgccattcttcctgcttgtgtgacctcaggcaagccccaaacagccttgtgactcaatgttctcatctgtacaatagggattatggcacctatcgcatagggtccttgtgaggatcaaatgtttatttatgaaaagcatttatagactggtcacggtggctc

SEQ ID NO: 20311 - DNA, 581 bp, Homo sapiens
ggacttaatgtggtctagtctgtaagggttgacagatcattgtggcagatcccagacatgcttattatgttagcagtaggggccctgaggtcaaaaggcttaggacagctatcctgcctcccagacctgggaggaaaagagagagaaagaggggctccagggcagttgtcagagttaggaaggtgctgagtcgccacaggcatcagaggaggattttctgaatgggtacagtgaggacccagtggtgctctctcctcaaacctacctgttgggaaccagatcagcccagcaggctggtagcagagccatggcctgggaacctgggtcagcctcactgtcttagctccagactcacccactccctttgcaatgctgtgctgtgtagtggtaaagcctgcacacgctaggtcccattcctgcgccattcttcctgcttgtgtgacctcaggcaagccccmaacagccttgtgactcaatgttctcatctgtacaatagggattatggcacctatcgcatagggtccttgtgaggatcaaatgtttatttatgaaaagcatttatagactggtcacggtggctc

SEQ ID NO: 20312 - DNA, 2028 bp, Homo sapiens
tctcctccatgaagttgtttcaatataaatggatatgactcttgttaaaacgtgtctcttcctttaccctcggccacactttttaaattgtatctcttcctcaaaaaaatagttgcattatgcatgatgggataaaaaacacattttcttcccttttccttttataaaaagaactggattataggtatttttaggttccccaaatctcataacgccaacattttgaacattttaaaatatattgctatctcaagaagctgtaaagtttttaaccaagtcctaataattaaacttggtttggaatgaattactaggttggtgcaaaagtaattgcgatttttgccattacttttgcaccaacctaatattagtatagttatttaaatgccatttggaaaaattgcagaatgcttttcaaacttcatatgcatctaagtattagctctctggatatttgcacagatcacattgagtacaagggactaatatatctcccacagaaatgtatacctcaacaagcaagagcatgggattaattcgagttaagcatgctattactgaccatgttcatagatcccaaactgatttcttaaacttttccagtgatgcttttcctttatctttttgcaaaatttcatacttacattttttatcctatatcttagagtaaaaaagttttgaaattatgctaatgtattaaagttataatcctaaacatgcaaaagttctggctctcaaagaacattttctagtccctaagagcttgaaagtagctcagaggaccagcagtagggggaatgttgcccgtgatcacctttcacttttaagcatgctttttccagttcaattttgccctttcttttcattctagttatttggggccttttctaagtactgtcaaataggaaattaccacaaagacaagtggaagaaaaaacattttaaaaataacttcacacaccacctgcaattctagtaaatgcctcactctcagagtgtgcgggcatttggagatttccctcaaatcagctgtgctgccccaccacagggatcggtcggtgttcccttttcagctcagtaatcaaatagctttgactggtccgtgtctgcttttgtccacttctgacctacgtgttcctgtgagggacatctttgtctcacttttctttggtcactgagttcatgtacctcaataggctaagtcttgcagtccattaatgagaattctcagctcagctctaggccacccagaaaccccggttgcatgttctcgctgaatggcttcactggtggcccattcaaatgtgctaatgtcagaaaaaaaggttgaatggggcaccaatgtacaccattgccgaagcaaagtgactgcggcttccaacaaagcttccgctgtggcgatgttaagcagagttatcaatggtgcggaggctgagcaaggactaatgctccaatcatgccatccacaggtggcacagatgcagccacttcaatatgaaatcacagtgcaaagttcactggcaattcaatcctgcctccagcttccaatctccagatacattgtgtagatatgcctccttctctttctggttctgaggctctttgaataagtttgcagaagacattttgggtgagagatgaagtgagcgtttgttccaatttttcttagagttacacctccagttgagaagctttcttaaagccgtttatttcctcatggatgtacagaagcagataaagcattttctcggggcttatcccagaagcactaaaagggcatttgagctcagcaaaggaatgttttgattgtgcaaaacagatgtcacattatggccgcatattgctacttctcataagagaacatcttgaatcacaactaaattatgaagaggtgatgaccaaaccaattctgtagcccctcttcccctaatcacggcaaatgaaagaaaraagatgatggaccagctcccaagttttccttctaaacagatatttctgggaagacacataaaaggaactgaaaagtta

SEQ ID NO: 20313 - DNA, 553 bp, Homo sapiens
aatgaattcagagttggttcactgccctgggttcacatacaaatacatttagagtaggatttacgggaacattggctgcgaagtacggtccacrctctccctgcagccatcagcccctctttcactaaatggatgaatgcaaaatgcaaaccaaaagatgaaaggaaaagtgaagaagaaacagaagaaaagtatgaaaagggaactaaaataagaacatagaaggggcacaaagacagctggtcccaaacctgtgcactgtcgttttccaggctataccatctgacattgtacttcctcactttttcaggctactgtcatttgtcagggaggttgctatttacttagaatctaagttaggtctaagcaacagttgtcagggggattcattcttcttaaattattgggacttcattcaaaatatcctacaagtttgtataagagtctgtggaaattttctcaactgtgaagttgatcatcttgtagtcttctgattctagactaagataactactactgtagtaatgaaagtaagtattagttcatgtgccca

SEQ ID NO: 20314 - DNA, 309 bp, Homo sapiens
tttcatattattaatactttgtaattattttctccccaacagtattttccagtagattctaatcatgtggtagggcagaaggaaatgtgttttttgttgttcatttgtttcttgtcaatagtcctgattawtttagctttgctatactgacttatatctggaagtatataaccaagataagaaaataggttttaatatgatcatcttaagctaattgtaatgaaaagaactaatggactgtcaatattcagaaaaccaaaaataaaaaatacggaaaactattcaaagagtaagtttgatctgcatttc

SEQ ID NO: 20315 - DNA, 521 bp, Homo sapiens
acagatccccacctcctacatggtggggatatggtacttaatataacagtttctatcgtaactgtgatggtgacaaatccctaaggaatttactcataatgatcagcttgcacacagcttctggagtctaggccaaatttctaacacgtgggcccaatagttccagttgccttcttgaacgttggcgggtccagccttttccagtgataacacccagtatctcttctagtacttatctctgaagtatcttgtgagttaatcgcctttcttttactgtcctactcccccmccccctgttatttgttgtaagtacttattttacctttacatgacatatttttaaaattcattagcattaaaatgtgacagagaacttccaaaaagttttttaatcaaaactggctaataattcagaactaaaatcccaataggaaaggaaatgggacttagtgtggagacgagatggccgataataactcaataaccagctctaactttagagggcagtgtcaggtgagtta

SEQ ID NO: 20316 - DNA, 549 bp, Homo sapiens
gaactgtgatggcaaatactatggtttttaccttatatccctgattcagggttctctgaaatctaagtcattggagaagagaatctactaagagtagaaaaatgtaacaaggaaataagcttgctccttacacaagaattgaaagtattctaagagtcttaaagtttttgtggcagcagagatgcgtgagctgacatttccagcaatcaatggaatttgcaagtgcgmgatgaattttccttaattaaaatctaccagattaatcatattttaagtacaagtaaaatgaatgtataactaattagttatgctgttaggaataaatgacattaggttcatgtttacatttagggaggcagacatttgaaagtaaactacaaagactgctgctatggtctgaatatgggtgttctcacaaatttatgcattagaacttaattcccaacatgatagtattaagagatagggcctttgggaagcaattaagtcataaaggctttgctgtcgaatgggattagtgctcttatggacagttgaagggagttgcct

SEQ ID NO: 20317 - DNA, 527 bp, Homo sapiens
tatcctaggtgagggatggcccgaaggggataatttttcataatttctgtttttgtacagggtacggttttgttttgttgttgcttttgagactgggtctgttgcccagctggagtgcaatggtgtgatctcggcgcactgtaacctctgcctcytgggttcaagcggtcctcccacctcagcctcctgagtagctgagactacaggtgcatgccaccatgcctggctaatttttgtttgtttgtttgtttgttgtagagatggggttttgatgtgttgcccaggctggtcttgaactcctgagcttaagtgatgtgtccgcctgggcctcccaaagtgctggaattacagacatgaggtactgtgcctgacccagggtatgtttactttgagaaaattcatcaaactttataagatcattcactgcagccttgactgtaatggcaaaagactgaaaacaatcgaaatgtctaccgagaggggacccgcgtcatttcctaatggagacacactgtaggactaattcc

SEQ ID NO: 20318 - DNA, 543 bp, Homo sapiens
cattttgttcatattagacaaaaagtaggaggacagggaggcagttgctcctccggagatttttttcttttctttaacagtccattttccgatatgtttggaattaggctaaattgtgttaggtagacagtttgaaagctgtcactttgaaagagcgagctgccaagtttctagctacmgtatttaaaaaaaaaaaaaaaaaaaaggcggcttagcaatgagctgttccattttgccaggaactaggcttggacaggggaagcaaattcatttcctgtttgtggcaaacggagtctggatgatgataagactttttccatctaaactgccttgttaacccagtaaacaaagcaaaaatcaatatgctagattcatcaatgcttgctggaacacactccatggcaagggacatttcctaggcaaaatggacaatggaatgaacaatgatatttttatgtctatgttcatattttatacagtcatcttcagagtctttgatactatcagctgttataagaaccaaatacttggttgacctgtgtg

SEQ ID NO: 20319 - DNA, 543 bp, Homo sapiens
cattttgttcatattagacaaaaagtaggaggacagggaggcagttgctcctccggagatttttttcttttctttaacagtccattttccgatatgtttggaattaggctaaattgtgttaggtagacagtttgaaagctgtcactttgaaagagcgagctgccaagtttctagctaccgtatttaaaaaaaaaaaaaaaaaaaaggcggcttagcaatgarctgttccattttgccaggaactaggcttggacaggggaagcaaattcatttcctgtttgtggcaaacggagtctggatgatgataagactttttccatctaaactgccttgttaacccagtaaacaaagcaaaaatcaatatgctagattcatcaatgcttgctggaacacactccatggcaagggacatttcctaggcaaaatggacaatggaatgaacaatgatatttttatgtctatgttcatattttatacagtcatcttcagagtctttgatactatcagctgttataagaaccaaatacttggttgacctgtgtg

SEQ ID NO: 20320 - DNA, 543 bp, Homo sapiens
cattttgttcatattagacaaaaagtaggaggacagggaggcagttgctcctccggagatttttttcttttctttaacagtccattttccgatatgtttggaattaggctaaattgtgttaggtagacagtttgaaagctgtcactttgaaagagcgagctgccaagtttctagctaccgtatttaaaaaaaaaaaaaaaaaaaaggcggcttagcaatgagctgttccattttgccaggaactaggcttggacaggggaagcaaattcatttcctgtttgtggcaaacggagtctggatgatgataagactttttccatctaaactgccttgtkaacccagtaaacaaagcaaaaatcaatatgctagattcatcaatgcttgctggaacacactccatggcaagggacatttcctaggcaaaatggacaatggaatgaacaatgatatttttatgtctatgttcatattttatacagtcatcttcagagtctttgatactatcagctgttataagaaccaaatacttggttgacctgtgtg

SEQ ID NO: 20321 - DNA, 553 bp, Homo sapiens
ccattccagccagggcgacagagcgagactccgtctcaaaaaaaaaaaaaaaaagaactgaaaagtcctaaatttacagagatggagtgtaaaactgtgggtcttcatgtctaacatctatctatcttctccttgaaattgtcaattcatttcacctgttgaaagtaaaagggcagaggtggggtaggcggattgatatgagcattgtaagtcagctaaagttagaggccattattatttgtgatgttatccccgaggttgcttcattttctttagcagagatcagcagattaagtgtttaagtggaaaacccagaaacatctcaaaattttcataacagaaggtatttcttgaaaagttatttcccagaatgtccgaattggagagaaaaagagcagctatatctgaaaraggaaggaggataatataatggtttttcttcacaagccatcacttgatctgtgtaggtcatcctttagttcagagtttcctttatctggttcttaatcttcccaggccccatgaaccaatacttcacagaacatgacagacc

SEQ ID NO: 20322 - DNA, 562 bp, Homo sapiens
accactgtttgcaattaaactatcaatcagtcattgctcttattctctagaagaagtttatactacagcagaagagtagctctaccaggatattgcagactkcaagaggatatagaaaggtggggagaatagaagttcagcttaaatggttctaaaactggaaatgatttccataataatgtggcttaatcctttctcttcttccagcatctgctgagcaccacctcagccacagcactgcttctcactgtctgcgatgaaggctcactgaattgagaaaagtctctcaaaagtcacatgacctattgtgcctcacagcttcctggaatgcttcatgacctttcttatgccctttactagcaactcctacattcatctctggagttcctttcctgtcttttcctcatttgcccctcaggaataagctccctattttttctgcaattataatgtctcaaggttcaatttgagtcttctctgctctgagaagctgtcactgaccaccccaacttgtgatttcctagaacatactgaaaaaggaactggctttggagcaacttgg

SEQ ID NO: 20323 - DNA, 562 bp, Homo sapiens
accactgtttgcaattaaactatcaatcagtcattgctcttattctctagaagaagtttatactacagcagaagagtagctctaccaggatattgcagacttcaagaggatatagaaaggtggggagaatagaagttcagcttaaatggttctaaaactggaaatgatttccataataatgtggcttaatcctttctcttcttccagcatctgctgagcaccacctcagccacagcactgcttctcactgtctgcgatgaaggctcactgaattgagaaaagtctctcaaaagtcacatgacctattgtgcctcacagcttcctggaatgcttcatgacctttcttatgccctttactagcaactcctacattcatctctggagttcctttcctgtcttttcctcatttgcccctcaggaataagctccctattttttctgcaattataatgtctcaaggttcaatttgagtcttcyctgctctgagaagctgtcactgaccaccccaacttgtgatttcctagaacatactgaaaaaggaactggctttggagcaacttgg

SEQ ID NO: 20324 - DNA, 559 bp, Homo sapiens
tttttgagctcactgtttgctaaaaggatttattgcaaaattaaagtatagccaaacaggctgggtgcggtggctcttgcctgtaattccatcactttgggaggccgaggtaggtggatcacctgaggtcaggagctcgagaccagcctggccaacatggcgaaactgtgtctttactaaaaatacaaaaaattagccagttaygctggcgggcgcctgtaatcccagtgctcaggaagctgaggcaggagaatcgcttgaacctgagaggcggaggttgtggtgagccaagatggtgcgactgcattccagcctgagtgacacagtgagactctgtctcaaaataataaaattaagtaaaaaagtatagtcaaacaataaaataaatggctgtagattttcctatataatgaataacaaaaccactgtagcaagagagtttgggcttatatctataataatttatagcctctatttcctctatttaaatatgcctctatttttatatagcctctatttaaatatgcctaaattatagtttaaactgtgtacctaaact

SEQ ID NO: 20325 - DNA, 1549 bp, Homo sapiens
cccctttggtctccagaattcctcattcctggacagtccggaggcagacctgccactttgttttgagcaaactgttctggtgtggattcccttgggctwcctatggctcctggccccctggcagcttctccacgtgtataaatccaggaccaagagatcctctaccaccaaactctatcttgctaagcaggtaaagttaacaccactgtttctgaactctaattccttggtgcacagtagagacattttcttggtggttagtgttctcttccttgtctttaagcagctgtcccaggtgccattgtctcaggtagagccaggctcaaggtttccctcacgggtcccttgctgcatttcttaaatcaaagtggctttgatttttgcataagaatggtgactcttaattcttgtggatattgggttccctaaacacaaagggcatataatcaatcaaattatctttatagcatttgagaaatgaacactggatcacctgtctttaaacagctctaataaatcagtggactgtaattcagttggcatctacctcgtgaaaatgagctagataatggatctcctgccccactgaggcaatccaactatcactcatcttcaaaaacttgggtccgaaataaggtttccattttccccgcatatttgatgagtcaggatgatcactcacagtagaaggaggaggggtaagtgtgcacagtgacaagcacgagtagggaaataatggaaaggacaggtctgcgggagaggcccaggaggggccaggaggggaggagccctcagccagctgcaccaactcactcagggaagggtcttgtgggaacccaagaccctcattcgaggttgtaaaattatctcataaaatcttccatctgcttcttttcactatttttttttctatctctccttattatcattattactaccattttaaatggagtctcactctgttgcccaggctggagtgcagtggcactatctcggctcactgcaacctccacctcctgggttcaagcaattcttatgcctcaacccctcccgagtagctgggattacaggagcacgccaccatgtccagctaatttttgtatttttagtagggcgggatttcgccatgttggccagactggtctcgaactcctgacctcaagtgatccctcctgccttggcctcccaaagtgctgcgattacaagcctgagccacctgcacagcctctgtcagtccttatctttcaacaggtttttagaaaggcaaactagattccattgttctactagcatacctaacaatgactcaggttacctggaatcttaaaggaggaaagagcttggccaaaggaagtggatttcaccttgacactttgaggttggggttgatcgtgggttttattagattctgattcaaaaaagaacagtctcagagcttgggacagtgtcactgtctcccttgttgacctgagtgcccatcacaggacctagcatgtttcaaacactcccactggaatacaacatttgttgaatgttggtgttaaatgca

SEQ ID NO: 20326 - DNA, 460 bp, Homo sapiens
  misc_feature (1)...(460): n = A,T,C or G
gcactgtggcattgtagttaaaaatatggaaccctgagtgagaagaatctgggttcaggttatgaactgtggccttgagygcattatgcaacctcctgagcttcagtttcctcgtcaataaaatgggcatagtgattcctagcccagaattattgtaggaattgaaacagataaggcatgtagacatgcaaaaagcccttaataagtagtaaacatcaccttgtaccccataaatatatataaattgttcattaaaaattaaataaaatatgtagtaatatctctattattttgacaaaatataatcctctattatcctatgtgcttgatttgtgggaagacacaattatactctatacnnnnnnnnnnnnnnnnnnnnnnnnnnnnnnnnnnnnnnnnnnnnnnnnnnnnnnnnnnnnnnnnnnnnnnnnnnnnnnnnnnnnnnnnnnnnnnnnnnnnt

SEQ ID NO: 20327 - DNA, 591 bp, Homo sapiens
tgcccacctttagcttcataacttgctgsctcatgggagcatttactggtgtggcctccagcctagggtagtttccctccaaattccacacttctttttatgcttgtcatacttactcctacttgtcctctgtctgccttctttctaagatgttaagctccatgagggaaatgtctggcttgttaaccactgtttcctaaccttgacacataatgagtattcaataaatattttttgaatgatgttgatgatgcaaaattctgtacatgtgacataaaaagaattcaaaggaaggagattattttttctgtggagatttcaaagtttgtgtcttgagaaatgggtcatgttttgggacaaatagctcaaacatacttgactcttcccccctacagtactttcttaaagataagtgagacagtgccagcactagcacagtgcctggcacatagtaagtcctcaagaaattatctctcctctactgatggatgatgatgatgaattcaaacattgaacatgaaaatatcaaaagacctaggttctagataaagttgagaggtcaaactttttggaaagcaaaatggaatccat

SEQ ID NO: 20328 - DNA, 591 bp, Homo sapiens
tgcccacctttagcttcataacttgctgcctcatgggagcatttactggtgtggcctccagcctwgggtagtttccctccaaattccacacttctttttatgcttgtcatacttactcctacttgtcctctgtctgccttctttctaagatgttaagctccatgagggaaatgtctggcttgttaaccactgtttcctaaccttgacacataatgagtattcaataaatattttttgaatgatgttgatgatgcaaaattctgtacatgtgacataaaaagaattcaaaggaaggagattattttttctgtggagatttcaaagtttgtgtcttgagaaatgggtcatgttttgggacaaatagctcaaacatacttgactcttcccccctacagtactttcttaaagataagtgagacagtgccagcactagcacagtgcctggcacatagtaagtcctcaagaaattatctctcctctactgatggatgatgatgatgaattcaaacattgaacatgaaaatatcaaaagacctaggttctagataaagttgagaggtcaaactttttggaaagcaaaatggaatccat

SEQ ID NO: 20329 - DNA, 534 bp, Homo sapiens
ttttttttttagacagagtcttgctctgtcaccgaggctgggtgcrtgatctcgactccctgcaacctctgcctctcgggttcaataatccactattgtacaacctggtgacaatagtctctaatattctcctggtttctcaagccatttagttggcttctaaatcacttctttataccattaggtaatgtttgtgaaaggaatgcactgccaagtctggctaatttttgtatttttagtagagacggggttttgccatgttggccaggctggtctgtgacccctaacctcaagtgattcgcctgcctcagcctcccaaagtgctgagattacagatgtgagccactacgcctgacctgtatagcatatattttaaataattattacttattaagtgtttacatttgccaggcaccatgctatgtatctactttcattactacttttaactctttttttttttgagacagtctcactgttgtcaccagggctagaatgcaatggcgccatcttggctcactgcaaactctgctt

SEQ ID NO: 20330 - DNA, 260 bp, Homo sapiens
aggtatagcattttattacagatgatagctttgtggacgcctggatattctgatcacaagcaaccagactcattattttattatctttctaacatttgaatttggaaacagtggtggatgctgtgacatgctacccagatccctttycccccacattcaggactgaatgattcatttgcccagctgctgggcatgttgataagtgacagctcttaactatattccccccaaccccaagccttgccctgtaccgagggcca

SEQ ID NO: 20331 - DNA, 542 bp, Homo sapiens
tttgtatgaaaagctgaatgaaaagtcagaaaaatacaaagcttgtttcctgcataaaagatttagaattttattcaggagatgagaacacacatgagggggccttggagacctttagactgctcttcaggaaggggatatggtatgtcaaaggtgtgcactctggggaagaactaacgcagcatcactgcacctcaaacaacctacatcaccccagtcacatgtaaggaaaatttcatgaggcttttaagtccatttgttccagaatataaaaacactgagcaatatattttaaatagaagtgcaacaggcacattggctatgataaacagaaatttgttttacaggcagtttcttagggttgctctattctaaatggtgaaatacacctacttatgtatttagcataaagaagctaaaggaagtaagactccacctttttttttcatccactccattttattatagctcacctgcatttcaacwttccaccataatcttggcaccttgatatcctcctacttcctgcattctttttagaa

SEQ ID NO: 20332 - DNA, 930 bp, Homo sapiens
tatatatatatatatgtagttttttggcatcattcatgtttcccagtaagcccatgtcatggattgagaaagaaatacatgagaattcccactcagaaagcactcatgaatatgagcattccatggattttattttagaaacaaatctgtggtcttcaatctcagagaaacaagagagggtagttcacaaagctattagaatccctttaacaactgccagcctttgaaacaaaaatccaagtcaattgaatccttttttccaaagcccagacttcaaaagtcttgtatactaacttccttacttgcttctttcaccatgtaaagcatcgaaaaattgcctaggaatgtggtcagccccatagcatcttgcagagtagacaaggcttctcaggaatgcccctctttacaaaagacatataacttcttttcacaaccagaacctgaacagaattctgcacccctcaggggactgcagaattcacatccaagtaaggctaggctcacttcccaagaaaactgagccaaggagccaggtaggaaagaggttaaagtcttctgtgtgtcttcttgagaaggaggaaaaggctatcacacagctggaaagagaactgaataaaagggtcaaggctttcacygagattctgctcatgaggtggaatcttgtgtgaaagcattttcatcagaactctgcagcagattgcacatctgctcatctctccccaggaagcttaaccccaactctcagccaatctctttctcagcagtcacggaacagtagcctgttcctcatctgattcacctgccttgcaagcctcttccttctcagatggactgataggaccccaaatcctccccatcaccgctgtgcttggccctgataacatagacttgaccagcttcaggtcagcaacgatagagtcgtttaaggcc

SEQ ID NO: 20333 - DNA, 557 bp, Homo sapiens
atccctgtggcattttagtggaggccccatctgaaagaatgaagtacctcccaatatccctctaatcctaccagagaggtgacctccagttccattccctgttggacaggctctgggggccaaagagagaaggtggatgcaaacatcttctgtatcaagtgtttctgacttcagttctggagatcaggacaaayggatttttgtctagaattgaccacgctcatctctcccatttcccatgccaagtcctgaaccaaggaactgagtggagaaatgacttcccaaactttacacactttcctccagcatttgaattcatggctacctgtgccctgatcctgcaagggccacgagcctctttcaagtgtctcattgctcctgggccagactcaggtcgtctgtccctcaccaggtaactctgcccactccctgaggctcccgcctacctctcggaggcctgttccaagtattatggtgatgtcagtggcttctggctccctgcctgaagcccacgctttcctctacaacaaaaatgcttcaattcttctgccctcatc

SEQ ID NO: 20334 - DNA, 553 bp, Homo sapiens
tcaaacattgttaacaatgagagaggagtaggagtgcaggttttgcaaccagatacctgcataatgtgtaataaatagggaacacagatgagatggccttttattatttttytaatctatgctgtcaggtttcacttatgaaatgggggagagacaaagcagacatttctctccggggtcctcagcatgttgcccttggtgggcctggggctactcctcccctgaggactcacagtgtagactaggcttggccactcgggtgctgaaagataatctctcccaaacccacaagtgttggtcttatggaaagagcgctatatgaagagttaagaaatgaggagtgtttatctcaacacagcttcatacctgctatgtgatcctgagttaacaatttgtctttccaatgcctggattttctcttgcctggaatgaagaaattgaactggatgggtgattttcaaatagtactccatgcattcccagggatcaccataactatgtttcaggacatcttcacccagaaaaatagtgtctgtcaaacaatgaatgttga

SEQ ID NO: 20335 - DNA, 553 bp, Homo sapiens
tcaaacattgttaacaatgagagaggagtaggagtgcaggttttgcaaccagatacctgcataatgtgtaataaatagggaacacagatgagatggccttttattatttttctaatctatgctgtcagrtttcacttatgaaatgggggagagacaaagcagacatttctctccggggtcctcagcatgttgcccttggtgggcctggggctactcctcccctgaggactcacagtgtagactaggcttggccactcgggtgctgaaagataatctctcccaaacccacaagtgttggtcttatggaaagagcgctatatgaagagttaagaaatgaggagtgtttatctcaacacagcttcatacctgctatgtgatcctgagttaacaatttgtctttccaatgcctggattttctcttgcctggaatgaagaaattgaactggatgggtgattttcaaatagtactccatgcattcccagggatcaccataactatgtttcaggacatcttcacccagaaaaatagtgtctgtcaaacaatgaatgttga

SEQ ID NO: 20336 - DNA, 553 bp, Homo sapiens
tcaaacattgttaacaatgagagaggagtaggagtgcaggttttgcaaccagatacctgcataatgtgtaataaatagggaacacagatgagatggccttttattatttttctaatctatgctgtcaggtttcacttatgaaatgggggagagacaaagcagacatttctctccggggtcctcagcatgttgcccttggtgggcctggggctactcctcccctgaggactcacagtgtagactaggcttggccactcgggtgctgaaagataatctctcccaaacccacaagtgttggtcttatggaaagagcgctatatgaagagttaagaaatgaggagtgtttatctcaacacagcttcatacctgctatgtgatcctgagttaacaatttgtctttccaatgcctggattttctcttgcctggaatgaagaaattgaactggatgggtgattttcaaatartactccatgcattcccagggatcaccataactatgtttcaggacatcttcacccagaaaaatagtgtctgtcaaacaatgaatgttga

SEQ ID NO: 20337 - DNA, 524 bp, Homo sapiens
tgcaaaacattttaatgtgcattaaatgattagattttttccaataatcacataacgtagcctttgttatctactaatggggaaaactttaggtacrgaagtacagaagggccacatgacttccaactcaaatcccaaattcttctcccttcagcagtccgtttttgttttggttgatgcctaccccaacgtcaacagaacaagtatcagccagcaagagctgcgtatgtagttagagcatcttaaccttgaatgtacatacaaatctcctagggtcttgttaaaatgcagttcctggttcaggaggtctggggtgaagcccaagagtcaacccttctaacaagatcccagttgatgccaatgctacctgtccatggatctagaatgcaattttttaccatttgtgagttggttatgctctcaccagctgaatttccagactaaaagaaaatgtgcctggagctttctgcagctgattcacattcaaatggggcctgaggctgacccctgaccctctctttcct

SEQ ID NO: 20338 - DNA, 573 bp, Homo sapiens
aactctccctctgtgccggagatgcttatctacattatacagtccaatcttccaggctgctctttgttaaaagagaagtgatttatttggactgcctgtggttagaatggaagtaatttctgagctgttttttgtcagaagaaaagcttttgtcagggactctttcaccctatctacctacctaaattatttctatctcctgtattgcctctacccatcttagttctctggctgaggtcctgtaaattagactggccaaagacaggtttgtagccacagacaaaacccctcagacaccgagttgtagaaggaagggctttattcagctgggagcatcagcagactcacgtctccaaaaaccgagctccccaagtgagcaattcctttccctcttaagggcttacaactctaagggggtccacatgagagtgtcatgatcgattgagcaagcagtgggtatgtgattgggggctgcatgcactggyaattacaatggaacagaacaggacagggattttcaccgtgtttttctttttctataaaatgtctgtaatctataggtaacataaccga

SEQ ID NO: 20339 - DNA, 573 bp, Homo sapiens
tttcggattcccgtttccttcctccrggcgcgtccttcaccgtggccaaatcagcctctcaactgctggagcccggcctcggacacttctcggcttacgccgcatacagtggcgcaccccgaaaccccggaaccgacagctcggctggccttgcgcacccacactctccaaggcagggctcggtccgggggctggttttgccaaggcgaggggcgaggggcagcccaggcggccggatggataccaagagggcgcgtcagctccggcgggacggggcttccaggacccgggaggggtccaggactcccccgccggcgcctggctgtcggcggagggccgcggggcaggagggagtggagactgcggccccagttcgggcagcgcggagcccacccaacgccctcctcggccctcggctcttcctggggccatcccgcccctgcacctcggcctggcacctttccggttagcctcggaggccgtggcccgagcagggtgcgttcgcctggctggggggcctcagaacgttatttccgggtgacaacctgcagggccttccgcccctcgcgacct

SEQ ID NO: 20340 - DNA, 573 bp, Homo sapiens
tttcggattcccgtttccttcctccaggcgcgtccttcaccgtggccaaatcagcctctcaactgctggagcccggcctcggacacttctcggcttacgccgcatacagtggcgcaccccgaaaccccggaaccgacagctcggctggccttgcgcacccacactctccaaggcagggctcggtccgggggctggttttgccaaggcgaggggcgaggggcagcccaggcggccggatggataccaagagggcgcgtcagctccggcgggacggggcttccaggrcccgggaggggtccaggactcccccgccggcgcctggctgtcggcggagggccgcggggcaggagggagtggagactgcggccccagttcgggcagcgcggagcccacccaacgccctcctcggccctcggctcttcctggggccatcccgcccctgcacctcggcctggcacctttccggttagcctcggaggccgtggcccgagcagggtgcgttcgcctggctggggggcctcagaacgttatttccgggtgacaacctgcagggccttccgcccctcgcgacct

SEQ ID NO: 20341 - DNA, 555 bp, Homo sapiens
gatccagtcatttgcaacaacatggatggaactagagatactcatattaagtgaaataagtcaagcacagaaaaacaaatatcacatgttatcacttatttgtgagacctaaaaatcaaaacaattaaactcatggacacagagagtaaaacgatagcttccagaggctgggaagggtagttggagggctcacaggggaggtgggaatagctaataggtaaaaaaaaaaaaaaaaaaaaaaaaaaatagaaataatatataaagcatgctatttgataacacaattgggtgattaytgtcaataatagcttaattgtacattttaaaataatttaaagagtgtaattggattgtttgttgtaactcaaaggataaatgctggaggggatgattacacctttctccattgcatgcctatatcaaaacatttcatgtacaccataaatgtatacaccaactatatactcacaaaaataataaataaacagcacatacattcctgggttgcttgaaccatcaaattttatttagccccatctgaacactttctaaatt

SEQ ID NO: 20342 - DNA, 612 bp, Homo sapiens
atgagggcagttgaagcatgaattagttttgggagagtgtgatatatttcaagacccctaaattaaggtccctaagggagcactctgattctttcgcatagcagattcctgttcttcagcaacttgtctcaccacttttgacctcacccatttccttcccagaccatgttccagccagctattgccagcccagcctcacttctgaaaagagaacatcacagtcacaaaacatattttactacaggtttgagtgtagaggagttaaatttattgaataataagtaaactaatgatctcataaaatcaatgagcctccccaaaggatatcaagtcctcccaaataaagcactacattatccaagaaatatgcttgctgctccactggccaacaattttcatctcggttatasatattataatattacatacaccctttggagaactagagacagactaaggaaattttgaatactttgaaggaaatgatattataatgtactgataggcctttctctgtgtattttaaatccccatggctctctccgttgaagcagcaaggttcttccatcataacgaactcagggaaaagttcttatgctggcatgactggga

SEQ ID NO: 20343 - DNA, 422 bp, Homo sapiens
atcacgaggtcaggagatcgagaccatcctagctaacacggtgaaacaccatctctactaaaaatgcaaaaaattagccaggtgaggtggcgggcrcctgtattcccagctacgcgggaggctgaggcaggagaatggcgtgacccgggaggcagagcttgcagtgagctgagatggcaccactgcactccagcctctgcgacagcgagactctgtctcaaaaaaaaaaaaaaaaaaaaaagattatttaaaagtattaatataattgtatatactacagctatttccctttcagtaaaaacagttaattttaaaagattttcataattcttcatcatattgtgttatttaaacagtctcatattaacgaatcctaccattgttttcaattgtgtgtcagaaggagagggtgtataaataaa

SEQ ID NO: 20344 - DNA, 660 bp, Homo sapiens
atgttcacagtttcttataattcttataaaaaggaattgtataaggtttaaataaaatgcaaagtgaggtttttttttcttttcttttctttttttttctacaayacattcccttgctgtttgtttgaactcactacatataatctgggcactaaaccgacacccccatcccatctctaaattatctcctgtctttgggggatgagtagagacagagggacactcttagctgtcattgaggacctaaggggcttcattgtcattcttttctttacaaatcataaaatttgtaaagggtaaaatttgtaaaccctaagccaagggttgcaaaagaaagatgctctcagaagatgagagagaaataatagaaccacagaaagcactaaaatgttttacaataagactaatgaagacaagttaaagaaactgagataatggaatttggagacgacaaaggaactattacataataatcttcaagttctacaggagaagtttcttgaaaagagagcagccacctgttcatgaactctgggaagaaaaaaaagtgaacaaagtgaacatgaaattaacatgtagcgtaaaagatttaatgggcatatcagaggaaaaatgttctgatattaagagttgttaaaaaacacttgtatgacatatgga

SEQ ID NO: 20345 - DNA, 535 bp, Homo sapiens
gcaaggtgttctcagtctccatcttcagaccccaccaccatttctacagtagccactgtggatctccctactccaggttctgcctcttccatgtaatgagccaaacttggccaaggcagtcaacaagcagcatgcatgttagagccaggaacagctgggtccatatccttcctctgctacccacttcattcaggttgctaagccactcaagcctctgatacttcatctatgaaatgggggtgacggtctctagtttatggagttgttgggaggtgttagtgagataccctatgaaaaatgcctgacatggcataggggctccccacatattaggcaacctttacctccaaccccactgacagccacacacctgcccatcagggagtgaggttgagaatatcaaaatatatatttgcaacagaaaatgatagagataaatagyaattgcattggggttacaagggtaggaatgatggattctgcctgggagagggaactagtctgagaacataactattgaccagggtatttcaag

SEQ ID NO: 20346 - DNA, 586 bp, Homo sapiens
ttttgagtgttgtttttcttagaaaagaactttaatagagcctacmtaaattagagttaatgataaatttaaagtggtcatgtaattttgactattttataaataatctttccacaagatgatactacagtggagtttccaatctggtcattttctaatacataagcttactagcattatcaaattaagatgaaaagctttctaatgttaaaatgaaccctgtacttcacctgtaagagtaatacattcatagtgtcaaatctgaatactaaaagtatacactttcatatcatttacttggtacacagacaattgttattagtaattatacatctttgtgttcctttttataataattattgctgatggcattggttgctaactgcttgggaatactagtttattctgactgaaagaaagttcacctatcactgaaaatatatctcatttgaacctaaaaaataaattcacatagtcctggagactatttcaaaaaggttcttgtaaaccagttgataatctgccattaaaaataatcctctctaatcagtcacaatagtcagcacataccagctgatcagtattt

SEQ ID NO: 20347 - DNA, 722 bp, Homo sapiens
tgcttggcaccttgtaagtgcattctatatgggcaggggctttgttcactgttgtatcyctgtgcccacggcaggacctggcccacagtaactatgtgttgaatgcttgaatatgtaaagaactgaatggataaatgctcactgaatgggactttttcttccctgtgtattaagaaacaggacaaccaaaagttgctgtctacagctgaattcagaccctctcttggggttgttattcttagcttttaagtatctaaagaactaggttgggcattttctgccccccaccccacatgttcatctcagtttccagagaggctataacactctcccagagggtagtactttctgcttgtctcttcagtggatgcgcaactaatttctaaacaccaaggccacatctgccaccagcaggtgaaaaggagcaggctgtttaagtggtcctggaatctggggtctagattctaactcaaagtacatctttttggagtctagctgtagcaataagatacttgttgaggttttcataagctgttgggaacaggaaagctaaagttccatttattatccccctatttttttaaccaatatcatttttcaatttaaataggaatatttcctgtcttgggcagagaaaaatctgttgattcacagggacctaaagcatgtgaatggacatgctttaggtctatgtgaatcaatagattttttttgatctttaa

SEQ ID NO: 20348 - DNA, 1325 bp, Homo sapiens
acgtgctataaagatcaggtgcagggtacctagctgaggtataggaggagggaatgttctgcctccaggtgcgaagatgacactgctgattctctgtcagtgacacatcatgagctgcttgattagggctgagtgtttggaacaacacgtcctcacttatgtgtgcctattatgcacttaccctcactctcctactttagctccctctttgaccaagagcatatggttgcaagatggtcagctgggaccaggactggctgctatgtgacagaactcaattctactgggattaagcctgttgtcctggtttcattagcacctggytttaactaactgagcgacacggtaggcacagtcatacataacccattctttgctgaagcaggctggctgctggtaataatagcaaagtctgggttcctcaagttctccccacctttgccaatcagatgttattcccaggtcctgcttatttgcactgttcttaggttaggggactcagattgtttaagaaagtccttgtgttgtgagccagttctacatggcagctggctggcctgcaaaggtagaaacttctgtcatgttctgtttgcataccctgcagtgtccaactcaagtcatcacgggtttcccttaaatgtatgttgaattaaattaactcaccaagggtttagctagccatatagctaattgtgtgaaataattcaaagaatcaattcatagcattaacagtttttctagactcttgaggcagcatgatgaagtggaaagagcactggctttagagttgggggagctagattttggtgcctggatttagcttgtgtgtctcaggtaagcttcatttaaaaaaaattttttaaatgtcaatagcttttgggggtacaagtagtttttggttacatggatgaattatatagtggtgaattctgagattttagtgtacctgtcatcaggtaagctttttaatctctgtttcatcatttccacctgacgatgacaaatgctgacctggttgggctgttaggagccaatgagataatatctataaaagggcctagcatagggcccagcacatactaggacttcaataaatgtgaattcccttctcctggggcaagaggcccttgcctaaccaagcctcatccacaccctgaaggatgtcaggtgaagcgcttagggccgagatgtagaaagatgagtctgttcttcctgccagaccaagcccagcagcctcagtgtccctccccgcttgcttaagccattagcttagcctaggagaaactgactagcctgtggagaaactgacttctctcatagttttc

SEQ ID NO: 20349 - DNA, 694 bp, Homo sapiens
tccctaaagaggctctcatttattcctgaagaagagtccttaatatattgtgaatgctcattgattctgatagcaagttgactccccattactgcaactgtttttataatgtagaaagagygctaagtgtcaagcactttacctttccatagctaaggaaatccttaaaaatataatggggttccaaatcatagagtcattttagtactttaataagaccacgatttgtttaatgtgagcagaaaaacattgtaatcagaattatccttacctgtaggaggtacagactctggtgaattatgagggatgctggaatgcgtttctgacccaattgatcttgcaattagtactgaccatgaagtttatttggtgattacttcatttacttaaggcagtaattatgggaagaaaggattgggtaaatgttggtcaaaatatacaaaatttcagttcggggaagaagttctagagatctactgtacagtatggtgactatagttaataacagtgtattaactagttaatgtataattaatatataatatattttaggtattctcaccacaaaaactgataagtatgtgtggtaatgcatatgttaattatatttacctaaaccaacaatatatacatattttaaagcatcatgtcataaaccataaatatatacaattcttttttgtcaattaaaaat

SEQ ID NO: 20350 - DNA, 694 bp, Homo sapiens
tccctaaagaggctctcatttattcctgaagaagagtccttaatatattgtgaatgctcattgattctgatagcaagttgactccccattactgcaactgtttttataatgtagaaagagcgctaagtgtcaagcactttacctttccatagctaaggaaatccttaaaaatataatggggttccaaatcatagagtcattttagtactttaataagaccacratttgtttaatgtgagcagaaaaacattgtaatcagaattatccttacctgtaggaggtacagactctggtgaattatgagggatgctggaatgcgtttctgacccaattgatcttgcaattagtactgaccatgaagtttatttggtgattacttcatttacttaaggcagtaattatgggaagaaaggattgggtaaatgttggtcaaaatatacaaaatttcagttcggggaagaagttctagagatctactgtacagtatggtgactatagttaataacagtgtattaactagttaatgtataattaatatataatatattttaggtattctcaccacaaaaactgataagtatgtgtggtaatgcatatgttaattatatttacctaaaccaacaatatatacatattttaaagcatcatgtcataaaccataaatatatacaattcttttttgtcaattaaaaat

SEQ ID NO: 20351 - DNA, 694 bp, Homo sapiens
tccctaaagaggctctcatttattcctgaagaagagtccttaatatattgtgaatgctcattgattctgatagcaagttgactccccattactgcaactgtttttataatgtagaaagagcgctaagtgtcaagcactttacctttccatagctaaggaaatccttaaaaatataatggggttccaaatcatagagtcattttagtactttaataagaccacgatttgtttaatgtgagcagaaaaacattgtaatcagaattatccttacctgtaggaggtacagactctggtgaattatgagggatgctggaatgcgtttctgacccaattgatcttgcaattagtactgaccatgaagtttatttggtgattacttcatttacttaaggcagtaattatgggaagaaaggattgggtaaatgttggtcaaaatatacaaaatttcagttsggggaagaagttctagagatctactgtacagtatggtgactatagttaataacagtgtattaactagttaatgtataattaatatataatatattttaggtattctcaccacaaaaactgataagtatgtgtggtaatgcatatgttaattatatttacctaaaccaacaatatatacatattttaaagcatcatgtcataaaccataaatatatacaattcttttttgtcaattaaaaat

SEQ ID NO: 20352 - DNA, 531 bp, Homo sapiens
tttttatttactttttgtgtgtgatggcttactgcaacctcaacctcctgggctcaaacgatcctcccacctcagcctcccagtagctgggaytgcaggtgcacgccaccacatctggctaatttttctattcttcttagagaccaggtctctctatgttgcccaggctggctttaaactcctgggctcaagcagtcctcccacctcggcctcccaaagtactaggattacaggaatgagccaccaagctcggccttaatattgttttttgtttgtttgtttattttgtttgtttgtttgcaacatgagattataagggaaaccataatactttctatattcatttccacattgtataattgttctgaaagaatatattactcttataaatgaacaactataaagttggcttgagagctaatcaaaagccaaaaagtcctaagggctggatacaagagaccactgagatccttcccagctgctacaacctgggaacacccatcttcttccccagattgggatcaaggtcca

SEQ ID NO: 20353 - DNA, 545 bp, Homo sapiens
ttaatccatgctggagactttctcttcccagcttacaaactgatattacctataaagctcttttttactgtttagccatctggtggtcttctggatgacaaagccatgccatatctcatggagatgatctaagaagcatccaaaagaacttcagatcctatgtggcccttggtactgccattgtggggttgcctattcaccacacagaaacacagccaagaaggatgctggcaccagagggtcccctgagagccaccctcagccctcccattggtgtgccaggcttctcacagttatgttcagagaaggacccagtgactcaggctacaatgatgcttttttgcctcttttaacaaaaatattgaaatatatcacaagcttagaaacatataaaagatataaatgtgcacaatttatttaaaaattctaaacatctatgtgagcaccactcaaatcaagacatatatgtcgcctgagactccccatgtgatccaccccaatcatgycccttcctccccctgaaataaaacactatggtcaaccat

SEQ ID NO: 20354 - DNA, 522 bp, Homo sapiens
tgcttcatctataattcccaaaaagaacaaagcatgttggttcttcctgaagtttgttttttattttttatttttgagtactgttctaagtgtcattyagaatccacagttggcccaaagggtcaagaagaaatagagattctgccagtcctgggaatgatttccatttctcccttgttttccaacctccacttctattcctgcattttaagctcatctccactctgaactattcttctgaaatgatgcaaagctttttctgagatggcaagtaggctttgttttgcaaataaaccagaatacctattgcttgcatacatttttattctctctgaaatgggagattctatttttagaccatgctgtgagatccaccctctgggtctctgttagatgccagggacaaatgaagagctcttttgaggaatgcaagacagtctcagcggtcagcatgagagacagtcagagctcttgcatgaaggtcagcttctgatttcaaatctcagtgtgagcatttgctgc

SEQ ID NO: 20355 - DNA, 522 bp, Homo sapiens
tgcttcatctataattcccaaaaagaacaaagcatgttggttcttcctgaagtttgttttttattttttatttttgagtactgttctaagtgtcatttagaatccacagttggcccaaagggtcaagaagaaatagagattctgccagtcctgggaatgatttccatttctcccttgttttccaacctccacttctattcctgcattttaagctcatctccactctgaactattcttctgaaatgatgcaaagctttttctgagatggcaagtaggctttgttttgcaaataaaccagaatacctattgcttgcatacatttttattctctctgaaatgggagattctatttttagaccatgctgtgagatccaccctctgggtctctgttagatgccagggacaaatgaagagctcttttgaggaatgcaagacagtcycagcggtcagcatgagagacagtcagagctcttgcatgaaggtcagcttctgatttcaaatctcagtgtgagcatttgctgc

SEQ ID NO: 20356 - DNA, 525 bp, Homo sapiens
aatctaattttcttgtctctcacataagatacaaactgggtctgtactttgcctactagtaagcccctgaatagcatcaattggaatgcaaaattgagtgctaatggtgttctttattaacatacayttttgtaatgaatctcattttagatatgcaaatacatgagttagctgacttgctccatgacatagtcaagaacccacatcttgatagccaagaacacagaagagtcattcctctagaaagcttcatgaaaatcccctaaatttaatgcagactgcactcagaatttaaagaaatgctttactcttcatccctgttcgggtctaattggcacacacatacgaaaaggcagaagccctgctcttcatggccagggttccccagtggctggcacagggccgagctcattccagaccttcaacaacttcttcctggctgattaaggatggattgattggattgacttaggaaggggaagaaggatggaggaaaaaaggttagagctgcccttaatttaacag

SEQ ID NO: 20357 - DNA, 917 bp, Homo sapiens
tgcctcgccctgcttcagctcacgctcagtgtgctgcacccactgtcctgcacccactgtctgacaagccccagtgagatgaacctgatacctcagttggaaaggcagaaatcacccatcttctgcgttgctcacacggggagctgtagactggagctgttcctattcggccatcttggtgaacagtgcttttaaaagagtcacagggtttgaagaatggaaatgagatccagaacttgctaaaagagtgtctaatgaaccttctttctttggttccagacagtgttccctcctaggagcagagtgaactggaagtggatggccctcacagaaactaaagctcagcttcaaattagttcaatgcgtaaagttggaacaatatgaagaagccagacgaaagtaaatgtaaatccactctagaagattacatcttcctggaactccaattgtttctgtaattttgcaaattcaaagtctggcataataataataataataataataataataataataataataataataaacagttccatgaaaggaccgcccaacatgaatgaaaactagcagaaaaaaaaaamaaaaaacagtcctacaggggactcagatagtggcattatcagacacggactcagtacgtgctgaaaaagaaacaaaagactttgatctctggagctatgcaggtgagaaagggacaggattactggaatatcaaactgctgcttctagatacaagccaacccagaacatgtctcctcttccctagtccctctttagaaccactcggcataaacccaaacattagaggaagcccctcccttctaccccaggctaaaagctctatgattccttccaggttcattccctctttctggcagcaaactaaacaaataagcctaattttaactacaagc

SEQ ID NO: 20358 - DNA, 576 bp, Homo sapiens
tcccactcctttgatmtccacattccttcctgcagagggcttgggtctggctgggttgacagggcagtgatcacaggaggtaagggcaggggctctgactcagactgcctgcgtttgaatcctggctctgtcatttacaggctgatgtactggggcaagtcactgaaccctctaagcctcagtttcctgacccataaaatggggataaggagagtggcttgtactcagcgttgttctgaggagtcaatgtaatggggtttacaaaatccaatgccaggcacaaggtaaactctcaataaatacacaatgacaatagcttcatagctggagaaatttacttttaactgggtgaggaaactggagcacagagaaaagcagtttttccagctgtgccgataagaaatgtttaaattaccttcctgactataagctccttgaggctaaggaacacatatataacatccctttgggaaatatttggttaattaaattgatgtttataatggtactgtcttgtatggcaatagcagcaagtcgtacaggccctatccacctctctgtcctgtggtctcctcc

SEQ ID NO: 20359 - DNA, 621 bp, Homo sapiens
agtgttatatgtttgacccaatagtaagcagactgagatcactaaagatttttagttccatgcctgattgaactttataaatggcctaaaaggttgtatggcaatggggtttaaaactctacgttggctgggcacaatggctcacgcctgtaatcccagcacttttggaggccgaggcgggtggatcacctgaggtcgggagtttgagaccagcctgatcaacattctttactaaaaatacaaaattagccaggcgtggtggcgcatgcctgtaatcccaactactcgggagactgaggcaagagactcacttgaacctgggaggcagaggttgtggtgagctgagatcgcgccattgcactccagcccgggcaacaagagcgaaactccatctcaaaaaaaaaaaaaaagggtttcactacatcacttttttcaaactccttaaagacaaattttcctaagcttatacattagtatggagttcattsaaagaaataaagcccgggcacggtggctcacctctgtaatcccagcactttggaaggccagggcaggaggatcgctggagcccaggagtttgagaccagcctgggcaacatagtgagatcccgtgttaaaaaa

SEQ ID NO: 20360 - DNA, 553 bp, Homo sapiens
ttgcatcacgagaacaatcctggccagagttggctcctagggtaatcacaaacacatggattcaaaaatgtcacccagaacatataaatcacaagcccggcttaccttctgttgctttgttgacagctaaaagagtactcagtaccttggagaaattgacccctgaataaaggtcatcaggatcaaatatctatgagaaaggaaaattgaaaccgtaagacactacaagtattcaactcaacaaacaaaactatcaaaaggccacttcctccagctctccrgaaaaaaaaaaaaaaaaaaaaagtgtagaagccaagacacaaacctccatatacctttgggagaaatgagagcagcagttgagccgcctaatgacatgtggcaggccatcagtgagtcagagcaaagcagtaatgggaaatgagagccaagctgagaaggcagcgcccaccaggaaataaacagtgcatactcagacccactcttctggcctgaatgtatcaatagtttcagcccagttacaggaagctcatatgcatgggttacaatcaat

SEQ ID NO: 20361 - DNA, 544 bp, Homo sapiens
aataaaatattctgaaacagatataacctggtcctagggctaactttaggaaaaatggtgaaggaagcaaagtttatctggggcaaagctaccagcattgctaataataatatctaccatgcagagaatacttactacattccgggcactcttctggggcctttacatatatgaattccttgaaatgtcacatgattctatcagacattcaaagaaaaattggtaccaatccttctaaaactatcccaaaagacagagagagataatcctccctaaatcattctatgaagccagtattaccctcaaaccaaaaccagaaacagacatgacaaaaaaagaaaactacagaccagtayccctgatgaacatagatgcaaaaattctcaacaaaatactaggtaactgaatccaataccatatcaaaaagataatacaccatgatcaaatgggtttcataccagggatgcaggtttggtttaacacatgcaagtcaataaatgtgatacaccacataaacagaattaaaaacaaaaatcacatgatc

SEQ ID NO: 20362 - DNA, 557 bp, Homo sapiens
ggtcgtgacatcatgacatctacaaaaacggtagaaaaacccaggtttggtgcggggagtgggggcattgtaattacgtctccaaatgctaacagctgtggcagcgcatgctctcttagcctctgaagaggtctctgggcgctcacacttgaaaaaccatgaggttggaacaatcatgttaatgcgcctttttggttttggtgaaaatttcagacagtgtgacattaattatttgtctttgcacagaatgatgatgctaaagccagccccatacagtcctgatgctcagtacttccagcatgggctctgtccaccctgctctctgggtctacatccagcccttcagttttcactaggcaaatctgaggtgagtcaactgagtttgcaaaatgtgcttattagcaggtgtgggatgttctactaccttcttcagagccacagcattcctgttccttcccacatcatttcactaagggtctgaccaactcatctcccaaccattcaagacacaggagaattaactgcaggcyttcacacatggaagtcagtcacagtgc

SEQ ID NO: 20363 - DNA, 557 bp, Homo sapiens
ggtcgtgacatcatgacatctacaaaaacggtagaaaaacccaggtttggtgcggggagtgggggcattgtaattacgtctccaaatgctaacagctgtggcagcgcatgctctcttagcctctgaagaggtctctgggcgctcacacttgaaaaaccatgaggttggaacaatcatgttaatgcgcctttttggttttggtgaaaatttcagacagtgtgacattaattatttgtctttgcacagaatgatgatgctaaagccagccccatacagtcctgatgctcagtacttccagcatgggctctgtccaccctgctctctgggtctacatccagcccttcagttttcactaggcaaatctgaggtgagtcaactgagtttgcaaaatgtgcttattagcaggtgtgggatgttctactaccttcttcagagccacagcattcctgttccttcccacatcatttcactaagggtctgaccaactcatctcccaaccattcaagacacaggagaattaactgcaggccytcacacatggaagtcagtcacagtgc

SEQ ID NO: 20364 - DNA, 543 bp, Homo sapiens
caatctaattccacagtctggagataacacctgacccctttttttacaatttgatcgtcagaagcctggtatccaccgcttctaaccacctgtttagagaatgctaggctaggccaagcacagtggctgatgcctataatcccagcactttgggaggccaaggcaggaggatcatttgagcataggaatttgagaccagcctgggcggcaacatagggagaccctgtctctamaaaaaaaaaaaaaaaaaaaaaaaaaatagctgggtgtggtggggcatgcctgtggtcccagctactcaggaggctgaggtggaacgatcactcgagcccagaaagtggaggttgcagtgagccatgatcacgccactgcactccagcctgggtgatagagcgagaccctgtctcaaaataaaattttaaaaaagagaatgctaggctaacaaatggatgctctggtctccaaagacccagccaaggcgctcctgagtctggtaaagcatcccacctaaaactaaatctccttcaaagggaaaaagttagg

SEQ ID NO: 20365 - DNA, 543 bp, Homo sapiens
caatctaattccacagtctggagataacacctgacccctttttttacaatttgatcgtcagaagcctggtatccaccgcttctaaccacctgtttagagaatgctaggctaggccaagcacagtggctgatgcctataatcccagcactttgggaggccaaggcaggaggatcatttgagcataggaatttgagaccagcctgggcggcaacatagggagaccctgtctctacaaaaaaaaaaaaaaaaaaaaaaaaaatagctgggtgtggtggggcatgcctgtggtcccagctactcaggaggctgaggtggaasgatcactcgagcccagaaagtggaggttgcagtgagccatgatcacgccactgcactccagcctgggtgatagagcgagaccctgtctcaaaataaaattttaaaaaagagaatgctaggctaacaaatggatgctctggtctccaaagacccagccaaggcgctcctgagtctggtaaagcatcccacctaaaactaaatctccttcaaagggaaaaagttagg

SEQ ID NO: 20366 - DNA, 1038 bp, Homo sapiens
taaatgtattatataatcttttatttattagttcactcattatactaaaaaatayattaaaaaggaaaaatgtaagcagggattactgggtagtgacataagagactattcatttttttctcctttgtatttatctatataaaaataagctaacaatattttttaaaagaatatctccataatggtgctggaaagcaagaacattttcagaaatgttgagaaatttctgaaagagagaaagcagatgggatcaaaatgatggtaaaacctgtaggagtttctgtagaagaaactacaacctaaagcagactctagggaggactattctgcctataagaatgccggagaagctccaagcttggaaataatttaatacctacccacgtaacaacaaatggtgcccctccattccaatacacacagaggtggcagtgtttgtccccagccaaattttctccaaagtggcaaatctcttgggggaagcttttattctaggggatggggtctgaaagagaagagctgatatcgaggcaattctgcacttcgacagcagacaagaaagaaagaaaaaatagaaggcagtaccactgagacctgaagtatgacaccatgcttcgtcccagagtaaacctttgttctctggcaattgtggggttcttcagcctgcttcttgctcatccaccctaaagggaagctcttgtgttggcacatgttgcacattccaaaaggcccacagactgcacagaaaatccatgccagctcctcaagatagtcaacctggttcttcatcatacatttgaacaggcaaccaagggctaccagacatttgagggaaaccaacagcgtaatagataaggataaaggtgcataaagagaacatctggaacgggagataataaaggtaatgcagaacagaagaaaagaatgcagcccaagcgatgagaaccttccttccctattcccagatgtatctctgaagggagacacatgcccctcatgtgccagcatgttttctctatctggcttgcagttttagct

SEQ ID NO: 20367 - DNA, 537 bp, Homo sapiens
tgtctcataattgcaggaattcctgaatatatgtgggacactgcgtttgaagagatagtgattatcctctctgcacagcacagaggagatgcaatcttgcactagaatagcccttggtatccagtatttctagtcctcatgatgacccaaggargggtcatcaacaggtttgcatgcccactgcatagtatagaccaattacactaagacagcagggatgcagcaaagaaagagtttaatgatcacaggccacccagcaaggaagtggaaggaaaccctcaaatctgtctcccaagaagttctggcctggggctttaagaggattgtggagagtgaggggctggaaaattggggttgctggtcggttggggcaagggggataaaatcatcgcaaagtggaaactgtattttttgatgaggtagctcctcggggagtccttcaggacagctgcatcagtgtggtccttcagctgacatcagtagtttcttccatatcaggacctgaaggaatatctcaaagtgaaaacaacatttcat

SEQ ID NO: 20368 - DNA, 549 bp, Homo sapiens
tttttttagtagagacagggtttcaccatgttggtcaggctggtctcgaactcctgacctcgtgatctgcccccgcttgggctcccaaagtgctgggattacaggtgtgagccactgcgcccrgccacagtcagcccagattcaaggggtgcgtcaatagactctacctcttcgtggaaggagctgcaaactattgtgatcacgtttgcagtctaccacaaatgtattgctatatgttagcgctattctaatagctttatatgtgtgaactcacttaattgttacagcaacccagagaggtgagttactatttctaattatttctcagatgaggaagcagctactgagacgttgagtaacttgcccaaggttatataggtagtggcagagctgaatttgagtccacgcagtctggttccagaggctatactcccaaataataagctataccgcctcaaaagcaaggcggaagaactttatcacttgtttggagcagactgaataaggcttcagacttgtaaacattaagacaatttgctcatttggcaa

SEQ ID NO: 20369 - DNA, 549 bp, Homo sapiens
tttttttagtagagacagggtttcaccatgttggtcaggctggtctcgaactcctgacctcgtgatctgcccccgcttgggctcccaaagtgctgggattacaggtgtgagccactgcgcccagccacagtcagcccagattcaaggggtgcgtcaatagactctacctcttcgtggaaggagctgcaaactattgtgatcacgtttgcagtctaccacaaatgtattgctatatgttagcgctattctaatagytttatatgtgtgaactcacttaattgttacagcaacccagagaggtgagttactatttctaattatttctcagatgaggaagcagctactgagacgttgagtaacttgcccaaggttatataggtagtggcagagctgaatttgagtccacgcagtctggttccagaggctatactcccaaataataagctataccgcctcaaaagcaaggcggaagaactttatcacttgtttggagcagactgaataaggcttcagacttgtaaacattaagacaatttgctcatttggcaa

SEQ ID NO: 20370 - DNA, 549 bp, Homo sapiens
tttttttagtagagacagggtttcaccatgttggtcaggctggtctcgaactcctgacctcgtgatctgcccccgcttgggctcccaaagtgctgggattacaggtgtgagccactgcgcccagccacagtcagcccagattcaaggggtgcgtcaatagactctacctcttcgtggaaggagctgcaaactattgtgatcacgtttgcagtctaccacaaatgtattgctatatgttagcgctattctaatagctttatatgygtgaactcacttaattgttacagcaacccagagaggtgagttactatttctaattatttctcagatgaggaagcagctactgagacgttgagtaacttgcccaaggttatataggtagtggcagagctgaatttgagtccacgcagtctggttccagaggctatactcccaaataataagctataccgcctcaaaagcaaggcggaagaactttatcacttgtttggagcagactgaataaggcttcagacttgtaaacattaagacaatttgctcatttggcaa

SEQ ID NO: 20371 - DNA, 559 bp, Homo sapiens
tctatattaattagaaaaggagtattctgccctatattagatttacagctggagtctttccagtagctggtctgattgtatgaagtcacaggtggtaaaaaacttgagatttcttttagttccataatggaagagttgtcattcaaartggtggttttgtcttcctgcactgtctctcctaatcctaaatactgataatattcattatgttcttgaatgacagagtctaaatcagaagctgaactttgagaagacaaggtactaatctgattcctattttcctgaggtgacgaaatttgcggtgattttgttatggaagaagaaccaatcttgaatagggaagtgatgctacaaaaatgctaaaaaatgaattaatataatgcaaatgtcagtttagtaaatataaataatgatgcttatctatatggaaagaaggcaaaatataaataggtagtctattcatagatattacattgatccaggtattaagaacatgaaatcattaggctctattaaaagaaaaattcattgtaattcatacttattttctaatcacttg

SEQ ID NO: 20372 - DNA, 556 bp, Homo sapiens
tctaccttttgctgttctagcctttcaaactcttatgactaatttactgtattaactacctgccccttctcatttgaaacacctagaatagttttccttttaatgaatagaccataatgaatacttacacagcattctttttcattttatttttggatatagtcmtgagaaagttttacatgctattcagttaattaataacctgtctaacttcatcttctctctttcataaataaccagttgactatattagggcatgaagtccaacaatgatggcttggctaaatttgaaactttctaggcctctaattttctaatcaattacatgaaggaattcctaatgtagcatattttttataagccatgtattgctcatcatttgcctacagacactgtgatatacataataaatttgatttctcaaagattacacttaaaatatacaggaatatatatatataaatgtaggcacgtatttctatttaaagacatatttcaccaaaagaccctatcatctgccaaatcattcaaacagaaactaaaattattcataaat

SEQ ID NO: 20373 - DNA, 538 bp, Homo sapiens
gatgcagtctgtaacgatgctacaaaacgaggccaaggaggagaaggcaggaagagaaagaccccaaaggagaaaccccgcttgcttcctcctccctcccccatccccagtctgtccagcaccctcagggaagaggaagctgtcatgtgacrggaggaccaggtcagtttctcccatagctttccactgaccctccctcaggccactgcaacggaagaatcgctctgtgggcttcctgtgccgtttccacatagctcgtttctgaaatcttccagcccagtgcgcagtggacctggagatgtgccacacgtctttcaagtcccaggcatccgccctccaccctcagtatgcttggggcgtcaactaattaattcactgagatatgagtgctgtgatgtgttgtgcagctgtgtcagagccaggcgttccacgagggaaaaggcaaagtccacgctcttgtggagtcatgatgaacaagccagaaatgagcaagatcagtctagagagtggcaagaagcaagaaaataagatagagtga

SEQ ID NO: 20374 - DNA, 333 bp, Homo sapiens
attgccttcgaacatgttatttcttctgtcccagatgttctccctctgctcatccgtttgcatcctgctcatccttcaattttcaatctcaagtatgcctggtcacctttccagataaaccagatttgaccatcttctttgcctttacacctgacatacattttctrttatgtatttatatgtcttccccactagaccataaacccctaaaatagtttagccactcttgatcccaaaggatgttctctctcctattgttagctagcttttaagagataaggtcccctcttgtgatatttaactcatctgctcccctctagactgaatgtttgc

SEQ ID NO: 20375 - DNA, 593 bp, Homo sapiens
gcagaaagcttaatggaaaggggaaatctaggagaaaaggccgtctttgggagcaaagagaagtgtgttccaaggaggcgatggttggtcaactgctacctagaggtcaagtatgatatgattgggcaaaatcactggatttgacagtatggggaatttcagggtgacagggccagaagctagctttcagtgggtaggagagtaaatttaagctaaaaagaagaggtgagagccactgtagactttttcttcctttccaactatcttcatttagattttctccaaaagcagaccctagaccagtacttgggtacagctaatttaattgggaagtaaaccccaaaattccaagtgaagtgttggtaagagagataagaagaaagaaaaggcagtgaaacagggcacttatgggcaagactcatgtgcacaaacaaccaaggcacagcccttctggggctcccaggaaactgtgaaccaggactcartagttcccatggaccacatattcactgactcgatgccttgttgatagacggctgtggctggagcatccttcctgacaacacccatcccctcacagtttgcccagcaag

SEQ ID NO: 20376 - DNA, 532 bp, Homo sapiens
tggcaagttcctcaaaaagttactcctgcctgttttaccacacggttgcccaatccagatacataggaattatgcttggctcctgcttcccctcagttctcctcatcaaatgactcagaaagtctttttaattccctctcaaaaatagatatggatttgaaatctgttccacctgctgctgtctctgccactgctgtgacatgggtacccatcatctcttgcccggacctctgaacctcctcctgggaatggatttctgatcttttcacaagctgacagtgatcctcttctcctcttggagtcctcccacycttacctgttccccaaccaaagctttctgggatttgctgaggtttgggaactccaagtccttcaatttgagttacacgggacacccacacactctccaactcccatagctccagctcctgagattaggccagagaagtgactcattttcactgggtactgtccccagaaatgctctgccaccatggcactttagggtctgatgctggaggctggcatgctg

SEQ ID NO: 20377 - DNA, 561 bp, Homo sapiens
ctgaggcagagaatttcttgaacccgggatgcagaggttgcagtgagccgagatcgtgccactgtactctagcctgggcgacacagtgagactcagtctcaaaaaataaataaataaataaaatgaagatgataaaagctacttcagtttatggaattcatgaatgtgaagttttgttatctatatgtaagtataatttctaggtcatacatataggtttaacttttaaaatgtgtcttttaagacatgatattgacatgttctttcctcaaatacggctgaattctgaatgagaaggagcttaaaaaataaaaaaaattggatgatcaatttaaatcactgtgatcattatgagatggctaaatatgatttaaaccacacgcggtgaaatagggattaaatacaattcctctcttcccttcactaccaatcatgamctcttggcggctccacttctgctattggcgtggtaggccttagccttcagaaaataaagggtttccttcccatgttcgttttgtgtttaccttacggatttcctcttttaggaagataagaaaa

SEQ ID NO: 20378 - DNA, 571 bp, Homo sapiens
ctcatagattgcagaaactgacatcatatgaaacagtatgttgagttgtaatgatctctatggtaatattttggaatttcttcttcaggactatcagacctggttagatttgcgagagctggaatgcaaaatcggggagcgctacatcacccatgaaagtgatgacctgaggtgggagaagtatgcaggcgagcaggggctgcagtaccccacacacctgatcaatccaagtgctagccacagtgacactcctgagactgaagaaacagaaatgaaagccctcggtgagcgtgtcagcatcctmtgagttccatctcctataatctgtcaaaacactgtggaactaataaatacatacggtcaggtttaacatttgccttgcagaactgccattattttctgtcagatgagaacaaagctgttaaactgttagcactgttgatgtatctgagttgccaagacaaatcaacagaagcatttgtattttgtgtgaccaactgtgttgtattaacaaaagttccctgaaacacgaaacttgttattgtgaatgattcatgttatatttaatgca

SEQ ID NO: 20379 - DNA, 540 bp, Homo sapiens
ctctttcaaaataaatcctgcccctcaaggatatctatatccaaagatactatgccgtaatgtagactataatagcccttctgtgctaagaagaacagggatagaaatagatactgtatgactaaatgctgattgacagctccatcacaggcttggtgcttctttagctaagctgcaataaagagacttcatatcataccattcaacagataataaaatagcataaacagatgtaaccttatggagaaaaaaattctacttgattataatgataaaaaattgaatctttttaagtrtcttacgtagagatcacaaaactaagtgtcgattcacaagaataattttcctctcaattatcctttaagcattatctcaaatagaaaataccacagtatctgggtatataggaaggcaaaatattgtcttaatatatcagtttttaaaaatgtaaacactgattgaaatgtccctgtgttacaggttggaaacagcttaaaagattctacaaaatgtaatttcactttcaaatctttcaaagtt

SEQ ID NO: 20380 - DNA, 516 bp, Homo sapiens
tgtggtacatatacaccatggaatactatgcaactataaaaaataatgaaattatgtcctttacagggacatggatgaagctggaagccatcatcctcagcaaaccaacacaggaacaggaaaccaaacactgcatgttctcactcatgagtgggagttgaacagtgataacacatggacacaggcaggggaacgacacacaccagggccagtcagagggtggaggctgaggggagggaaagcattaggacaaatagctaatgcatgcagggcttaaaacctaggtgacaagttgataggtgcagcaaaccaccatggcacacgtatayctatgtaacaaacctacatgttctgcaattgtatcccagaacttcaagtaaaataaaacaaaaacccacaattcccttatctatttatctaatcctgttagattgcatttacttttacaaacagcctcaaattccttggtgagaaaaacatgacatgtacacatgaatgaaagaatagaggaccctg

SEQ ID NO: 20381 - DNA, 551 bp, Homo sapiens
aaatagtggttaccagaggctggcgggggatggggcagaagaggatgaggagaagctagtcaatgggtacaaagttacagttaggaggaataagttctgatttctattgcacagtagggtgactacagttaacaataatacaatctatattacaaaatagctagaagagagaattttgaatcttctcactacaaaggaatgacaaatgtttgtgactgatttgctaactgtcctgatttgatcattacacaattatgcacatattgaaatatcacatggtaccccataaatatgtatattatttstcaattacaagtaaaactttcaagaattaaataaataaatgtaagccctatgaaaaccacaaagaaacaaactatgtccctgtctgacagctttgaagagagtagtggttctcccagaacttaacttgagatctgagaatgggcagactgcctcctcaagtgggtccctgacccccaagtagcctaactgggaggaaccccccagtaggggcggactgacacctcacacggccaggtactcctctg

SEQ ID NO: 20382 - DNA, 551 bp, Homo sapiens
aaatagtggttaccagaggctggcgggggatggggcagaagaggatgaggagaagctagtcaatgggtacaaagttacagttaggaggaataagttctgatttctattgcacagtagggtgactacagttaacaataatacaatctatattacaaaatagctagaagagagaattttgaatcttctcactacaaaggaatgacaaatgtttgtgactgatttgctaactgtcctgatttgatcattacacaattatgcacatattgaaatatcacatggtaccccataaatatgtatattatttgtcaattacaagtaaaactttcaagaattaaataaataaatgtaagccctatgaaaaccacaaagaaacaaactatgtccctgtctgacagctttgaagagagtagtggttctcccagmacttaacttgagatctgagaatgggcagactgcctcctcaagtgggtccctgacccccaagtagcctaactgggaggaaccccccagtaggggcggactgacacctcacacggccaggtactcctctg

SEQ ID NO: 20383 - DNA, 514 bp, Homo sapiens
attctatcctattccctaatcaaaactgtctctacaaagtgaagggtcaaggcttagtctattgcaatgaactgttttgtagaactagaaaaatccttttgatgtaagaagatcttaaatctagggggaaatttttcaccactaggtagttgagacacttgcctatttcacttaactttctatattcttaatatattctaatgaatgtcaagtgcaataaaagtggttaaagaaagaaagaacacatgtggcaaggtaaatgtagcagaaaaaaatacagttctttaatttggcagataaattctatctcaaagagcaatgtcatgtactttgtgcagtactgtaattataagtcatttttctatctttgtgaccatggcatggctacaaatctcttgcagggggctgtggtagtccgggaaagagacagtrtatgtattacagctggcaaaaagtgtgatgctgagagaggttaggtttgtaaattagtatttcaaaactgaaaacattaaac

SEQ ID NO: 20384 - DNA, 548 bp, Homo sapiens
ttaccaagctggcggtcttgtgctctgggctgtacaaatagtttttctctgcactgatttccttccagttgggctcggcatgggcaggcaccaaatctttcccatgttatgggctccagtgacaagttcacttccctcacttccttcttgagaggaagacatggcactatgtttcacttactttgtagaggtggtattttcgttcaccagttgtttaggatttatggggtgtggaaatggagctgctaatagatgttttttatttctattagataaggaaaacttaactaatgttcaagtggtatataaaatcctgggaatgaccagggataagatgaacagcatagttgtcccttggtattcactggggattggttccaggacccctgaggataccaaaatccacgsatgctcaagtccatggtataaaatggtgtagataacctacacacattctcctgtatactttccatcatctctagattgcttgtaatgcccaataggcctagacatcacttcatttaagtgcattcagtgtagtactcagt

SEQ ID NO: 20385 - DNA, 561 bp, Homo sapiens
gcctgtaccaataatatcaataaggaaatatgggtgatatctcttctcatgaaagagcatcaatggattatgagttcatgactaaaacaaatatatattaaggcaaaccatatgaagttactgcttgtcagattaaaaacagccaaatatccacaattatatatggttcaacttaatagattttgtcccattttaaagcagcgtgactgaagaatttaattttcttaacaagtggtaaaggagatgggaacagttactggaaatgaactagaaagctattgttttatggcatagtttagttcctacagtaaatttcatcaaattttaataaactctcccttacatagtcatttaactcatttctcttgtatgtcctatatttacttatgggttttaatattataagaatagaggatattcattcatagatattccaaagagtctttgaacgactgcctattcgaatgtttaatattataatagtaacacagtaacctagagctttacctaacactttctagtttacagactatgtaaatatctktttgaaaacacacttcc

SEQ ID NO: 20386 - DNA, 550 bp, Homo sapiens
tttccccttgcattaacaataataggtataaaaatctacagtggagaatttagttccatgaacagtgacacttggyaaccttaaaaacctacggatgaaaacaaacccacaaagaactgaagggaactcaaggaaacacaggcacctaagatttcattctgtgttacatgaaacaattcaaaatggcggacttactattacttacatttaagaaatttccgcaataagggcactaaatacatactgttagattttactcgaaaacactcaatatttaccaacgtgcaatttttaaaaaaagtttttggagtacaaatcttcacaaagcacccgcatccaatgttccagtcagtagtcagttaatgctcctgcaaacgtatcatttcctctttggtttttccttttcaaaaacaacctaaatccaagtgcgttcttccccgttcttttcaaaatccttaattttaattcatgaatttacatcaccgataccaaagcaaaaacgatccccgacgcctgcccggtacaaagcagttcggcttgcggagcgcga

SEQ ID NO: 20387 - DNA, 579 bp, Homo sapiens
tcataaactacctggactggtgagcagggtgagtgggcaggaagccacaaaaatctccaagtgcttactcatgaggagccatcattacagcagtgctatggagccagtttatcctgaaggggccttctcagcatcttcccccgctggaagatgcaatcattcttggttaagtttcataaagagttgcaggagtccaagccaggtctttgctacaggctggattcaccaacctaccatgcagcaaattcctccttggtctccatgaggggaacagtgaatcaccaaagtggaattgycataggatgaaggtcagcagtgtactccttaccactaggggctagctcaacactccctcagcacagccaccccatgatgggtccagatcagttaatgacattacctgggattatgaaagtgttcactataaccacagggataggtgaactcccaagacagtgacgtagagcagcaggcaatgatttgagtacagggcataactactcatgaaagagggaacatctgagaaagtaagttgtcagaaggaatggctttacattgttttgcaaaagtgtctcaaaa

SEQ ID NO: 20388 - DNA, 525 bp, Homo sapiens
gtcttgctttgtcacttaggctcaagtgcagtggtgcagtcatggctcactgcagcctcaaagtcctcgactcaagtgatcctcccacttcaggcttccgagtacctgagactataggcatatactaccacacccagctacatttattttaattttagtagagacaaggcctcgctatgttgcacaggctggcctcaaactcctggccccaagggatccttctgccttggcttcccaacgtgttgggattgcaggagtgagctacagctcctggccctttttgagttttaattgaaaagcagsgttggttttttgtgacctgatttcaagtagagtatctttgtagttagtgatgtttgttttaaaacgctggccagcactactgatttttactaacaacatatctggtaatattatatgagtaaggggtgttagaatgtaggtaggagaaaatgtttttaaggtggaagaatgtcaaaatttgctccattttctcagaggtaattaagtataaaagtatgatat

SEQ ID NO: 20389 - DNA, 525 bp, Homo sapiens
gtcttgctttgtcacttaggctcaagtgcagtggtgcagtcatggctcactgcagcctcaaagtcctcgactcaagtgatcctcccacttcaggcttccgagtacctgagactataggcatatactaccacacccagctacatttattttaattttagtagagacaaggcctcgctatgttgcacaggctggcctcaaactcctggccccaagggatccttctgccttggcttcccaacgtgttgggattgcaggagtgagctacagctcctggccctttttgagttttaattgaaaagcagcgttggttttttgtgacctgatttcaagtagagtatctttgtagtyagtgatgtttgttttaaaacgctggccagcactactgatttttactaacaacatatctggtaatattatatgagtaaggggtgttagaatgtaggtaggagaaaatgtttttaaggtggaagaatgtcaaaatttgctccattttctcagaggtaattaagtataaaagtatgatat

SEQ ID NO: 20390 - DNA, 548 bp, Homo sapiens
ttggaaaacagcagtgctcattttttgaaaacatattgtctgtggcttttttaaatgacaatgtcagagycgaatagttttgagagaactgtatgccctgaaaaggataagatacttggtatctggacctttagaaaaagaagtttgccaaactctactcaaaaccagaattaatctcaataagctaagcattcaaattccaataatgccatatcttaataattggcttcaaatttccgcttcaaaatgtttccatgcattcagtgcactgggcagttgaataagtccatcagcttgtgctggttaccacttgttatgactgcttacatgctgaaaatctgacatcacaaagagttacaacacgtagtgatatgcttccttgattcattgtcccagctagataaacatcaactttccagcatacacacagacagttttacaaatgtgattttctgattaaagtattggcaggaacttgcaggttcattatagcagtattagagtccattcatctcaaaggagcaatgatatttactgacagggaacat

SEQ ID NO: 20391 - DNA, 561 bp, Homo sapiens
tgaaagaactgtattccataggtgtaaaagctctttgttcagaattggaattggagaattgttcagttacactcgggtgtttttttaagctgtaagttagaggaagccataaactttataaaatctgcattctagctatacctgatagagctgacacgtgcatgctcaagttgctaattactttaaaggcaataaatagtaatggtatttttttctaaaatacaaggggaatgcaatacctaatgggaacacacatcccccacttcatcccctaaatcctcactaaatgaggattcttttttacactgtctccactgtgcttagttttttatcaacaaccttgaccattttagctttgactatgytttcatcttctagattgagattgttctgtagtttttcctacattaggaaaaaactagcagccctttttttgttttcttatgttagatatatgaacgctgcatccttagttcttggggttgtgtaggagttggcaggctttgagatataaatagaagctgatttcagaggcccctgttgactaggctttatgtgaga

SEQ ID NO: 20392 - DNA, 561 bp, Homo sapiens
accaggtaattgaggggataaggtgctttctcagcagaaaagacatagtaggcaaagtctttaagataaaagcayagtgaaagctcaaaactaaaaggaggcttgggtgtctggactccagagacaggaagagtttagagagtctagcagagatagcagagaagactttatcttttttttctttctttcttttttttttctgtagcaaccatctttcctgtgaaaaattccctctcgtactttagttctgtggatccaaaatttatagcattcttctaccaccacaggggtgagtatataataaaaaatgtcagttattcgagtatgtaagaaacttgaaagtcatcactcccatccttacaacaagaaaaatgctgaacaaacagactatcaacaactcattttagatccattagaggactgaggtcacagaaaaactgctgcccccaccctaaatccccactaaattagagagatgggaaaatgcaaagaattatagcctagtggagcaaaagcccaggagcccccacaggagttagtaatggagtagaaaactttaat

SEQ ID NO: 20393 - DNA, 561 bp, Homo sapiens
accaggtaattgaggggataaggtgctttctcagcagaaaagacatagtaggcaaagtctttaagataaaagcacagtgaaagctcaaaactaaaaggaggcttgggtgtctggactccagagacaggaagagtttagagagtctagcagagatagcagagaagactttatcttttttttctttctttcttttttttttctgtagcaaccatctttcctgtgaaaaattccctctcgtactttagttctgtggatccaaaatttatagcattcttctaccaccacaggggtgagtatataataaaaaatgtcagttattcragtatgtaagaaacttgaaagtcatcactcccatccttacaacaagaaaaatgctgaacaaacagactatcaacaactcattttagatccattagaggactgaggtcacagaaaaactgctgcccccaccctaaatccccactaaattagagagatgggaaaatgcaaagaattatagcctagtggagcaaaagcccaggagcccccacaggagttagtaatggagtagaaaactttaat

SEQ ID NO: 20394 - DNA, 561 bp, Homo sapiens
accaggtaattgaggggataaggtgctttctcagcagaaaagacatagtaggcaaagtctttaagataaaagcacagtgaaagctcaaaactaaaaggaggcttgggtgtctggactccagagacaggaagagtttagagagtctagcagagatagcagagaagactttatcttttttttctttctttcttttttttttctgtagcaaccatctttcctgtgaaaaattccctctcgtactttagttctgtggatccaaaatttatagcattcttctaccaccacaggggtgagtatataataaaaaatgtcagttattcgagtatgtaagaaacttgaaagtcatcactcccatccttacaacaagaaaaatgctgwacaaacagactatcaacaactcattttagatccattagaggactgaggtcacagaaaaactgctgcccccaccctaaatccccactaaattagagagatgggaaaatgcaaagaattatagcctagtggagcaaaagcccaggagcccccacaggagttagtaatggagtagaaaactttaat

SEQ ID NO: 20395 - DNA, 561 bp, Homo sapiens
accaggtaattgaggggataaggtgctttctcagcagaaaagacatagtaggcaaagtctttaagataaaagcacagtgaaagctcaaaactaaaaggaggcttgggtgtctggactccagagacaggaagagtttagagagtctagcagagatagcagagaagactttatcttttttttctttctttcttttttttttctgtagcaaccatctttcctgtgaaaaattccctctcgtactttagttctgtggatccaaaatttatagcattcttctaccaccacaggggtgagtatataataaaaaatgtcagttattcgagtatgtaagaaacttgaaagtcatcactcccatccttacaacaagaaaaatgctgaacaaacagactatcaacaactcattttagatccattagaggactgaggtcacagaaaaactgctgcscccaccctaaatccccactaaattagagagatgggaaaatgcaaagaattatagcctagtggagcaaaagcccaggagcccccacaggagttagtaatggagtagaaaactttaat

SEQ ID NO: 20396 - DNA, 545 bp, Homo sapiens
ttttttattcaaacaaatatattgtcagcttaaaggccactagtttcttacctattaaaatytgcttttcagtttgatgcttgaattttttctatggcatcacaagtaagttattggttatacatgaacaaatgcatgaatggaattattattactttcattgacaaatgtttttacatatgtaaaattttcatctttgaaagttattttacgtgtttttacagaactatcctctcttccatgatacatctttgttaattctgtttctttaagtaacattgaagatatttatttttctgttttcatatatcacattcttattccactaaaatacctacattttcttcagttatgtatgattggatttttttaaccatccagatgcatgtcttttgacataatagaatcttttttattcttaggatgaaagagctacaccatagtacaaaaaacttattaatttactatatcacagctactatggtgtggtatgtaaattaagtttatgaaaatttatgattattcagattaagtcctgcatatgt

SEQ ID NO: 20397 - DNA, 545 bp, Homo sapiens
ttttttattcaaacaaatatattgtcagcttaaaggccactagtttcttacctattaaaatttgcttttcagtttgatgcttgaattttttctatggcatcacaagtaagttattggttatacatgaacaaatgcatgaatggaattattattactttcattgacaaatgyttttacatatgtaaaattttcatctttgaaagttattttacgtgtttttacagaactatcctctcttccatgatacatctttgttaattctgtttctttaagtaacattgaagatatttatttttctgttttcatatatcacattcttattccactaaaatacctacattttcttcagttatgtatgattggatttttttaaccatccagatgcatgtcttttgacataatagaatcttttttattcttaggatgaaagagctacaccatagtacaaaaaacttattaatttactatatcacagctactatggtgtggtatgtaaattaagtttatgaaaatttatgattattcagattaagtcctgcatatgt

SEQ ID NO: 20398 - DNA, 545 bp, Homo sapiens
ttttttattcaaacaaatatattgtcagcttaaaggccactagtttcttacctattaaaatttgcttttcagtttgatgcttgaattttttctatggcatcacaagtaagttattggttatacatgaacaaatgcatgaatggaattattattactttcattgacaaatgtttttacatatgtaaaattttcatctttgaaagttattttaygtgtttttacagaactatcctctcttccatgatacatctttgttaattctgtttctttaagtaacattgaagatatttatttttctgttttcatatatcacattcttattccactaaaatacctacattttcttcagttatgtatgattggatttttttaaccatccagatgcatgtcttttgacataatagaatcttttttattcttaggatgaaagagctacaccatagtacaaaaaacttattaatttactatatcacagctactatggtgtggtatgtaaattaagtttatgaaaatttatgattattcagattaagtcctgcatatgt

SEQ ID NO: 20399 - DNA, 1092 bp, Homo sapiens
aagcatccaaatgtttggtctataaaacactgaaaacattcagacatttggtattgggagaataaggtgccatctaagcatgtgagtgtcataaagtcaactggccctgccattgggatctttggccttaatccagttgcctaggagaaataaccctggctttgtggtttaactcattttttttcctcttctttaggaaaatttgaatttttatcctcactccagaaggttaaaaagaagattkctctgaaattagttgatttgcaggggctggctaagattcttataaattataaaaaagatgactttataaggattcagatttggatgttggctccttatttcaaccaaacttgttccaaaggaaattctgaatttaccttaaagaaaaaagaaaataaattatttgttttcaagattagtttttttaaagccaggtcttatttagttctttcacctacatgttaacccaaaaaacatttttcatattccttagaatatgggtttattttcaatgctgtttgcaaatggatgccataatgttaaatatttcccttaaaaaagtgaaagtcttgccaccaatgtttcctgcacccatggaggaagaaagggtgttgggcatatgagatccatgtgtctagggtagatttgcttacatcaatggcctcagttgactcctggctcagccatgtggcttgatttggcagtgggatgttagcacatgtgatgtgtgacatataagtttgaacaatgcttctatgttggggcttgttctcctactgctcttgtaataacctggagaacatgcttgagctagcttgtttggattgttacacatgaaacagagtcccattttccctgatcccagccaaggccatcatgaaccagctgacagacctgagcgccccactgagaatagccccaaacctatggctaaccaactgcatggggaggactgaccaaaaccagcagaaggcccaggtgatccacaaactcaggagcaatgagaaatagctgttgtcagctcctgacttttagggagttttgttacagagcatgattgtggtcattggcaactgatacattgctgtg

SEQ ID NO: 20400 - DNA, 1092 bp, Homo sapiens
aagcatccaaatgtttggtctataaaacactgaaaacattcagacatttggtattgggagaataaggtgccatctaagcatgtgagtgtcataaagtcaactggccctgccattgggatctttggccttaatccagttgcctaggagaaataaccctggctttgtggtttaactcattttttttcctcttctttaggaaaatttgaatttttatcctcactccagaaggttaaaaagaagatttctctgaaattagttgatttgcaggggctggctaagattcttataaattataaaaaagatgactttataaggattcagatttggatgttggctccttatttcaaccaaacttgttccaaaggaaattctgaatttaccttaaagaaaaaagaaaataaattatttgttttcaagattagtttttttaaagccaggtcttatttagttctttcacctacatgttaacccaaaaaacatttttcatattccttagaatatgggtttattttcaatgctgtttgcaaatggatgccataatgttaaatatttcccttaaaaaartgaaagtcttgccaccaatgtttcctgcacccatggaggaagaaagggtgttgggcatatgagatccatgtgtctagggtagatttgcttacatcaatggcctcagttgactcctggctcagccatgtggcttgatttggcagtgggatgttagcacatgtgatgtgtgacatataagtttgaacaatgcttctatgttggggcttgttctcctactgctcttgtaataacctggagaacatgcttgagctagcttgtttggattgttacacatgaaacagagtcccattttccctgatcccagccaaggccatcatgaaccagctgacagacctgagcgccccactgagaatagccccaaacctatggctaaccaactgcatggggaggactgaccaaaaccagcagaaggcccaggtgatccacaaactcaggagcaatgagaaatagctgttgtcagctcctgacttttagggagttttgttacagagcatgattgtggtcattggcaactgatacattgctgtg

SEQ ID NO: 20401 - DNA, 1092 bp, Homo sapiens
aagcatccaaatgtttggtctataaaacactgaaaacattcagacatttggtattgggagaataaggtgccatctaagcatgtgagtgtcataaagtcaactggccctgccattgggatctttggccttaatccagttgcctaggagaaataaccctggctttgtggtttaactcattttttttcctcttctttaggaaaatttgaatttttatcctcactccagaaggttaaaaagaagatttctctgaaattagttgatttgcaggggctggctaagattcttataaattataaaaaagatgactttataaggattcagatttggatgttggctccttatttcaaccaaacttgttccaaaggaaattctgaatttaccttaaagaaaaaagaaaataaattatttgttttcaagattagtttttttaaagccaggtcttatttagttctttcacctacatgttaacccaaaaaacatttttcatattccttagaatatgggtttattttcaatgctgtttgcaaatggatgccataatgttaaatatttcccttaaaaaagtgaaagtcttgccaccaatgtttcctgcacccatggaggaagaaagggtgttgggcatatgagatccatgtgtctagggtagatttgcttacatcaatggcctcagttgactcctggctcagccatgtggcttgatttggcagtgggatgttagcacatgtgatgtgtgacatrtaagtttgaacaatgcttctatgttggggcttgttctcctactgctcttgtaataacctggagaacatgcttgagctagcttgtttggattgttacacatgaaacagagtcccattttccctgatcccagccaaggccatcatgaaccagctgacagacctgagcgccccactgagaatagccccaaacctatggctaaccaactgcatggggaggactgaccaaaaccagcagaaggcccaggtgatccacaaactcaggagcaatgagaaatagctgttgtcagctcctgacttttagggagttttgttacagagcatgattgtggtcattggcaactgatacattgctgtg

SEQ ID NO: 20402 - DNA, 1092 bp, Homo sapiens
aagcatccaaatgtttggtctataaaacactgaaaacattcagacatttggtattgggagaataaggtgccatctaagcatgtgagtgtcataaagtcaactggccctgccattgggatctttggccttaatccagttgcctaggagaaataaccctggctttgtggtttaactcattttttttcctcttctttaggaaaatttgaatttttatcctcactccagaaggttaaaaagaagatttctctgaaattagttgatttgcaggggctggctaagattcttataaattataaaaaagatgactttataaggattcagatttggatgttggctccttatttcaaccaaacttgttccaaaggaaattctgaatttaccttaaagaaaaaagaaaataaattatttgttttcaagattagtttttttaaagccaggtcttatttagttctttcacctacatgttaacccaaaaaacatttttcatattccttagaatatgggtttattttcaatgctgtttgcaaatggatgccataatgttaaatatttcccttaaaaaagtgaaagtcttgccaccaatgtttcctgcacccatggaggaagaaagggtgttgggcatatgagatccatgtgtctagggtagatttgcttacatcaatggcctcagttgactcctggctcagccatgtggcttgatttggcagtgggatgttagcacatgtgatgtgtgacatataagtttgaacaatgcttctatgttggggcttgttctcctactgctcttgtaataacctggagaacatgcttgagctagcttgtttggattgttacacatgaaacagagtcccattttccctgatcccagccaaggccatcatgaaccagctgacagacctgagcgccycactgagaatagccccaaacctatggctaaccaactgcatggggaggactgaccaaaaccagcagaaggcccaggtgatccacaaactcaggagcaatgagaaatagctgttgtcagctcctgacttttagggagttttgttacagagcatgattgtggtcattggcaactgatacattgctgtg

SEQ ID NO: 20403 - DNA, 1092 bp, Homo sapiens
aagcatccaaatgtttggtctataaaacactgaaaacattcagacatttggtattgggagaataaggtgccatctaagcatgtgagtgtcataaagtcaactggccctgccattgggatctttggccttaatccagttgcctaggagaaataaccctggctttgtggtttaactcattttttttcctcttctttaggaaaatttgaatttttatcctcactccagaaggttaaaaagaagatttctctgaaattagttgatttgcaggggctggctaagattcttataaattataaaaaagatgactttataaggattcagatttggatgttggctccttatttcaaccaaacttgttccaaaggaaattctgaatttaccttaaagaaaaaagaaaataaattatttgttttcaagattagtttttttaaagccaggtcttatttagttctttcacctacatgttaacccaaaaaacatttttcatattccttagaatatgggtttattttcaatgctgtttgcaaatggatgccataatgttaaatatttcccttaaaaaagtgaaagtcttgccaccaatgtttcctgcacccatggaggaagaaagggtgttgggcatatgagatccatgtgtctagggtagatttgcttacatcaatggcctcagttgactcctggctcagccatgtggcttgatttggcagtgggatgttagcacatgtgatgtgtgacatataagtttgaacaatgcttctatgttggggcttgttctcctactgctcttgtaataacctggagaacatgcttgagctagcttgtttggattgttacacatgaaacagagtcccattttccctgatcccagccaaggccatcatgaaccagctgacagacctgagcgccccactgagaatagccccaaacctatggctaaccaactgcatggggaggactgaccaaaaccagcagaaggcccaggtgatccacaaactcaggagcaatgagaaatagctgttgtcagctcctgacttttagggwgttttgttacagagcatgattgtggtcattggcaactgatacattgctgtg

SEQ ID NO: 20404 - DNA, 1081 bp, Homo sapiens
taattcacctgtttccttttagtttactcttttattctttccccaactgatttatttccagttgttttcgacgtcaatgtttaatttaattcttttattaataaaaatatttcgcatttactattatagcttctcttctgaatgaatgctgctttagtggcaaaccattaattctcatatgtagagttttcagggtcatgatttgattttgtaattttgctttagcccaagagtttttaatggattaaacaaaaaactccagatgaatgaaactttttgaaaaatttttgttgctaatttccatttttattgtcttcatttaaagaacactattttgtaatgtttctcttttagtaattaagtttttttattgtggtctagtatacagtcaactttaagcaatgttgctggtgtacttaaaaggaaagtctgtcctctattagtggggaaaaagtttaatattgtacgcataaagtctatcttattaattacattgtttagatcgtctgtatactttatttgtttggtttgcgtaggtctttgaaaggcagttaaaatctgttagtagggtgcctttgactgttttccttttcatttcctatagtttgctttaaaaaattgcagggctgggcacagtggctcacccctgtagtcccagcactttgaaaggcccaggcgggtggatcacaaggtcaggagactgagaccatcgtggctaacacggtgaaaccccgtctccactaaaaatacaaaaaattagccaggcgtggtgacatgcgcctgtagttccagctacttgggaggtggaggcaggagaattgcttgaatctgggaggcagagtttgcrgggagcagagattgcaccattgcactccagcctgggcaacagagcaagactccatcaaaaaaaaaaaattgcagatgtgtaacttgatacataggtaggtatcaatagctgtcttatgttcatgatgaattgtggcttttaacattatgaagactaatttttgaacttcaccaatcctgacatggccagctagcttactgactgaggtaaagacctaatttgggttagaatggc

SEQ ID NO: 20405 - DNA, 1081 bp, Homo sapiens
taattcacctgtttccttttagtttactcttttattctttccccaactgatttatttccagttgttttcgacgtcaatgtttaatttaattcttttattaataaaaatatttcgcatttactattatagcttctcttctgaatgaatgctgctttagtggcaaaccattaattctcatatgtagagttttcagggtcatgatttgattttgtaattttgctttagcccaagagtttttaatggattaaacaaaaaactccagatgaatgaaactttttgaaaaatttttgttgctaatttccatttttattgtcttcatttaaagaacactattttgtaatgtttctcttttagtaattaagtttttttattgtggtctagtatacagtcaactttaagcaatgttgctggtgtacttaaaaggaaagtctgtcctctattagtggggaaaaagtttaatattgtacgcataaagtctatcttattaattacattgtttagatcgtctgtatactttatttgtttggtttgcgtaggtctttgaaaggcagttaaaatctgttagtagggtgcctttgactgttttccttttcatttcctatagtttgctttaaaaaattgcagggctgggcacagtggctcacccctgtagtcccagcactttgaaaggcccaggcgggtggatcacaaggtcaggagactgagaccatcgtggctaacacggtgaaaccccgtctccactaaaaatacaaaaaattagccaggcgtggtgacatgcgcctgtagttccagctacttgggaggtggaggcaggagaattgcttgaatctgggaggcagagtttgcagggagcagagattgcaccattgcactccagcctgggcaacagagcaagactccatcaaaaaaaaaaaattgcagatgtgtaacttgatacataggtaggtatcaatagctgtcttatgttcatgatgaattgtggcttttaacattatgaagactaatttttgaacttcaccaatcctgacatggccagctagctwactgactgaggtaaagacctaatttgggttagaatggc

SEQ ID NO: 20406 - DNA, 493 bp, Homo sapiens
tttttttttgagacagagtctctgtcacccaggctagagtgcagtgacatgatctcagctcactgtaacctctgcctcccaggttcaagcgattcttgtgcctcagccttccaagtagctgggactacaggcacctgccaccatgcctggctawtttttttttttttttttgagacagagtctcactgtgtttctgttgcccaggctggaatgcagtgacatgatctcagcttactgcagcttctgcctcccaggttcaagtgattctcctgcatcagcctttcaagtagctgggaccacaggtgcacgccaccacacccggctaatttttgtatttttagcagagatggggtttcaccatgttagccaggctggtcttgaactcctggcctcaagtgatctgcccgccttggcctcccaaagtgctgggattacaggtttgagccacacgcctgtactcaaatgatttttaaatacgttggtttttattttt

SEQ ID NO: 20407 - DNA, 567 bp, Homo sapiens
tcagctcagggcactggagagctgagaacagtttggcaacacgcataaaaatgcactgattttttttccttttaagtttagactgaatataggctatgaatatacctaggatcttggtaaaatgtgagaattcactttaatgaagaaaatggagcgatttcaaagggtgttcagcagtttagtcaacatttcataagttcttatctaaaatatacacagaaggacaagctcttttaatagtagaagtagagataaatgagattttgtgatacaaaattacatgcaaatgtaatttctcccttgctgcaggtcaggaagccagaagcmgcttaactgggtggctctgaggttaaaagcaggatgtcagctctggactgcagtcacctgaaggcatgactgggactaaaggatctgcctccaggagtctcactcacatacctgttagctagaggtctctgtccttgtcatttggccttgttccttgtcataagacttggcctctgtttcttgtcgtaaggaacagctggtttcccccaaggcaaatgatctaaggatgtgacagctggc

SEQ ID NO: 20408 - DNA, 1242 bp, Homo sapiens
ggtttagactcctttcagatataattccacctatccctgagagtagaacttaccatcatttttattggcattatataaaacctttttcctcttctttttattcttctttgcacaccacagttttcctgttgagcaatcataaacataactataaatgtgttcccgtgaacaaaaccacrtaactcaaattgaagaactctatttattcattcatttattctttaaatttttttgcagaaacgagatctccatatgttggccacgcttgtcttgaactcctggcctcaagtgatcctcccgcctcagtctcccaaagtgctgggattacaggtgcaaaccaccacacccagcttgtttttaatttacttttataaatacttattacactgtttgtataaagactatttttcaggaaagcatttacaattttcaattaactacacagtatagacagataatctttaatacttaaatcttatcctttctttacagttctgagataatcagttttgcctcttgtatcactctttccctgagtacttcttcacggttctaatatgcagattcacacatggctccagatgaagacccaagaaaccatttacttatgtcaaatacaagtgtctaacctgatttttctggctccttatcttcttctatggtttgtttcatggcttccctttgctgctgaaagcttttcccttaatagcagaaagaaaaagaagggtaaaatatttaagataaaaggataagaattttttttttaatcaagaagggaaaacactagacatatctcttcacttatattcccttccaaatccttttgccaacacaggagtaatgtcagctatgatgtgtaagcctccaaatttttaaaatattaactctgctcaatcaatcccatatgtattattagaatacatatcatctactaaaatatttaaaaatttaatagttcaactttttaaaaggtttcattgagcatttactttgtggaaaagtactatcctggatcttacaatggttctaggtcctttagaattatctcaaattaaggatatcaattctaggaattaacttttccaaaacaacatgtgcgcattcatcacatattcaattccatattcaattccaagaaaccattcagtatattcccttgcatgcattattctcaattcctcttcttttgtgtatgtatatgtgttagccattttttatttccacccttaagttaccaattat

SEQ ID NO: 20409 - DNA, 1242 bp, Homo sapiens
ggtttagactcctttcagatataattccacctatccctgagagtagaacttaccatcatttttattggcattatataaaacctttttcctcttctttttattcttctttgcacaccacagttttcctgttgagcaatcataaacataactataaatgtgttcccgtgaacaaaaccacataactcaaattgaagaactctatttattcattcatttattctttaaatttttttgcagaaacgagrtctccatatgttggccacgcttgtcttgaactcctggcctcaagtgatcctcccgcctcagtctcccaaagtgctgggattacaggtgcaaaccaccacacccagcttgtttttaatttacttttataaatacttattacactgtttgtataaagactatttttcaggaaagcatttacaattttcaattaactacacagtatagacagataatctttaatacttaaatcttatcctttctttacagttctgagataatcagttttgcctcttgtatcactctttccctgagtacttcttcacggttctaatatgcagattcacacatggctccagatgaagacccaagaaaccatttacttatgtcaaatacaagtgtctaacctgatttttctggctccttatcttcttctatggtttgtttcatggcttccctttgctgctgaaagcttttcccttaatagcagaaagaaaaagaagggtaaaatatttaagataaaaggataagaattttttttttaatcaagaagggaaaacactagacatatctcttcacttatattcccttccaaatccttttgccaacacaggagtaatgtcagctatgatgtgtaagcctccaaatttttaaaatattaactctgctcaatcaatcccatatgtattattagaatacatatcatctactaaaatatttaaaaatttaatagttcaactttttaaaaggtttcattgagcatttactttgtggaaaagtactatcctggatcttacaatggttctaggtcctttagaattatctcaaattaaggatatcaattctaggaattaacttttccaaaacaacatgtgcgcattcatcacatattcaattccatattcaattccaagaaaccattcagtatattcccttgcatgcattattctcaattcctcttcttttgtgtatgtatatgtgttagccattttttatttccacccttaagttaccaattat

SEQ ID NO: 20410 - DNA, 559 bp, Homo sapiens
tttttctggagttctgccaacatgaagcatacagagttccacccaccatgtatggggattgctttgtgggggaggagacctgcctcagtaccccgggaaatgttgctgatgcaccctgatttgtgcagcctgggggttcagggcagaggtttcagtctttggatctccccacatttgaccaaaggcaggcacagttgggatcattctcttcaaagcaagttttagagattagtagtcattttgagagccccaggcctgcccagagtcagtcctcgccctagtcacgccctcatgcagtgattcattaggcgaagaaactggccttggaaggcaatgagctcatgaatatgcacagcgggtcctcataaattatgcattccatacggaggcttctggggagaggctgaggagcaccgagtcgctcagccctgcaacagaaggcttgctcacaaggactttctgtaaagygcatattcctgccctcctgccctgtccatcacaatgaacttgtgggcagcactctagttctgataaaacatcggactctgggtttgcaaag

SEQ ID NO: 20411 - DNA, 1104 bp, Homo sapiens
ggccgtctttatcacacagtgttgtttctcggccagtgcctctcccccattccagcccatccaggccggatgacacacgggaaaacaaggagctggcttcaccaggctgacaaggtctcaccttcataagataagctgtagaactgcatccctgtgtgaggctcccagccaggggcatggccaaggagctcacagactgagtggaaagacatttccaacagcaggaatctcacaaccaaagccccaggggcagactattgtggggtgtttgggaaatggaaaagcagagggattgacaggggccaaagaactggaagaactagaggagccatgaaggaccctgaaagccagtctgcatggttaggacttcgctatgtaggcttcttttttttttctttttcttttcttttttttcaaatggagtwtcactcttgttgccccgtctggagtgcaatggcatgatctcggctcactgcaacctccacctcccaggttcaagcaattctcctgcctcagtctccccagtagctgggattacagacacacgccaccatgactggctattttttgtatttttagtagagatggggtttcaccatgttggccaggctggtctcgaactcctgacctcaggtgatccacctgccttggcctcccaaagtgttgggattacaggcgttacacccgcgcccagcctcctttttctctaataaggagaataatcttaacactggaagggatagaagaaacatccctggggagaaattgccaagagcctaagaaaggcaagagatggcaagagactgttcagttactgtgaatacattctccaggcctcagtaagccagctctaattttgccagatgggagtcgcagaaaactgggaagggataaaaggtcataagtttccaaaaagcagaaaaagttggattctggaaaatacagatgatacgtttgatattaatatcggttctgagcaaaaattttcacagatctttgaagagctagcatgtaaacacttggaaggaaaagtggcgcctaagagccaaaccaacctcgttccctgtttttctgtgttaccagaccgaatttacaaagcaacgg

SEQ ID NO: 20412 - DNA, 535 bp, Homo sapiens
ctcagcacatgtaggtacattgtaagtaaataccaatgtttccagcacaaatactcgttcttactatgctcagtgcagtccaaaattgtctattccatttcatgttaaaaactgtgttagaatatacacaacagccaggcatggtggtgtgtgtctgtagtttcagctgcttgggaggctgaggagggaggatcgtttgagcccaggagttggaggctctagtgtgctctgattgcacttgtgaatagccactgcactccaacctgggcaacacatggagactgtaaaatatctccctaatatgtgtgtgtgtgtgtgtgtatgtgtacacacacgacataaaagttaccattgtaaccatctttaagtgcccagttataaagcatgaggagattcacattgttctgctacccacaccaccattcatctgcagaactttctcatcattccaaasggaaactttgcgcccattaagcactcacttactattccttcctctccccagcccttggcaaccaccattccactctctgtc

SEQ ID NO: 20413 - DNA, 513 bp, Homo sapiens
gcgtggtggcatgctcctgtaatcccagctacttgggaggctgaggcaggagaatggcgtgaacccgggaggcggagcttgaaagtgagcggagatcgcgccactgcactccagcctgggcgacagagcgagaccctgtctcaaataataataataataataataataataataataataataataaagtaaaaaataaaataaaataaaaattctgtgtctccttgggttatttgayggatttactgataattgtgaagaagtttgtttctgcttcgcttttatacaggagctgtttctgctcagcttcttgttaaaacacccttagaaacccgtaagtaaatgttgcaattgcattcttagctttattctcactgataagagacataagtgatttttaaaaggcagaactaactaatcaatcaaaacaagcagctgtaatctgattttagagcaatctgcatgataagagttggccaaggagaaataatttcctatcgcagtgggataatg

SEQ ID NO: 20414 - DNA, 682 bp, Homo sapiens
gaaaaacattctgtgagaattaaatcactatatggattttacaataaagatattgtacattttattatttatcattacacattttatatttttattatttataaactatgttgataacaaacttaaatacatgcatacattttttagagagtgagttgtcaaatatttaccagcaattcaggaacttaatttgaagatttctccctctgacaatctgttataacttatctaaactcttcccttggtctatgtttatctcactcctctggctgtatttttttatttattctttttttctkgtgggtatagtgctaatattagggttcttatttatttagtataattttagtgcagttttgaaagcacaaacagaaataaaaatatttgtttgcagctatattttactaagactccgggaaccaatttaattttaacacagctcatttatttagttatttgacaaatatttattgagtacccaatgcagatttgtaaaacacagaatctgtcctcaataaattcaaagtagagaaaggatgaagatatgtaaattactatgatacaaggtagaaaactgatacatggcataaaatatacaaattctgtgtcataagaaactcagagaaggtaacttttatcagctggggggatcactaaacatctcctataggatattcgcacg

SEQ ID NO: 20415 - DNA, 558 bp, Homo sapiens
tgcatgtgaagggcttagtatcatgcctggcccactgtggtacttactaaatggaaactcttactcttctgcagagcctcccacagagacactctcatccccagtcacacacgttctcacctgttcacacatgctttgtgtggcacatgcacattttttatctcctctcatattctcacacacttgtacatatatgcacacaaactctcattctttctcacctatccatttattcagcagaaggtggcaggaccgggtactgtcctcgtggaatttaaaatctagcccccagagtttctcatgttcactatcatctacacatgtgtatgaacatgcacacacctttctatttctgtggcccttgtccttgacttctccctgcctgccttgcactctgagacacagagaggtgaartaactcacctaaggccacccagccaggaagtggaaaagtcaggatgtaaactaggccacactgatataccaaggctgtggaaaggagtgtgtgccaaggtgtgggcctgggaaagccagcaggcccagccagagctaacagtt

SEQ ID NO: 20416 - DNA, 514 bp, Homo sapiens
tggaaaccactgaactaccagattctgctaaagacgagagactcctcgcctaaggttaggaactgcgtgacaagtactgaaactgcatcttttcactgcatagcctaaacagcctgcaggtggtcacagatgtaggccccctagtaaactggcagggaagaacattgctatttgtcatccagtactagaggtcyggtcttttgtattaggcagaaatttgtgcctaagaaaattttgttttttacttacaggctatttgtaaagaatagcaatgccctatccccaccccaatggtgcgttgggcagaagtactaaaatactttctaaatacttttaaataacaaagatttgaagtaattccttcttttttaagtgccattgaaatgtcattgtgctccagagagaaatgcattgaatttatccacactatagtcttttgagttagagcaatacattctgttgtttatagatactaggcttatgatcttgttgagtaagtggtggcagtggaaat

SEQ ID NO: 20417 - DNA, 514 bp, Homo sapiens
tggaaaccactgaactaccagattctgctaaagacgagagactcctcgcctaaggttaggaactgcgtgacaagtactgaaactgcatcttttcactgcatagcctaaacagcctgcaggtggtcacagatgtaggccccctagtaaactggcagggaagaacattgctatttgtcatccagtactagaggtccggtcttttgtattaggcagaaatttgtgcctaagaaaattttgttttttacttayaggctatttgtaaagaatagcaatgccctatccccaccccaatggtgcgttgggcagaagtactaaaatactttctaaatacttttaaataacaaagatttgaagtaattccttcttttttaagtgccattgaaatgtcattgtgctccagagagaaatgcattgaatttatccacactatagtcttttgagttagagcaatacattctgttgtttatagatactaggcttatgatcttgttgagtaagtggtggcagtggaaat

SEQ ID NO: 20418 - DNA, 514 bp, Homo sapiens
tggaaaccactgaactaccagattctgctaaagacgagagactcctcgcctaaggttaggaactgcgtgacaagtactgaaactgcatcttttcactgcatagcctaaacagcctgcaggtggtcacagatgtaggccccctagtaaactggcagggaagaacattgctatttgtcatccagtactagaggtccggtcttttgtattaggcagaaatttgtgcctaagaaaattttgttttttacttacaggctatttgtaaagaatagcaatgccctatccccaccccaatggtgcgttgggcagaagtactaaaatactttctaaatacttttaaataacaaagatttgaagtaattccttcttttttaagtgcyattgaaatgtcattgtgctccagagagaaatgcattgaatttatccacactatagtcttttgagttagagcaatacattctgttgtttatagatactaggcttatgatcttgttgagtaagtggtggcagtggaaat

SEQ ID NO: 20419 - DNA, 504 bp, Homo sapiens
gaaacaactatgctaagaacggtggccacttgctgctttagttttctgggttcatcatgccttctacttcagaaaagatcctgcattacttcagtaatacttttttttttttttaactatgagacacagtgccctgccgctgactcatttaacccacgactatgtggcttctgtgaaaacggaggacatacattgttttctaggctactccaagctactttggtgattcacagatcattattaatttacatttaaaaaattaaaatacagatctgatcacactggagacaataccacaagcttacgccacagtcaggtttgctgttatttgccaaaacacccttgctgattmatattgctttgcctttttgatgattaaatgcaaggctctctattaggcagactgcagcttgaaagaagcctaagagtcagacacccaggaaacataacagacacccaggaaacatagagtgaaaatgtgatactctatgtggctgttgaaaa

SEQ ID NO: 20420 - DNA, 531 bp, Homo sapiens
tggtcttgaactcctgggctcaagtgatccactagccttggcctcccacagtgctggaattacaggcatgagcctctggacccagccttagagcctgacttttttaagtcttggaattctatcagttgaactagtcaaagaaatatactaaatagggaaaaaaatacataggccagttgcaatatttacttcatcttttccaagaaaacttaatgtggacagttggtctaacaccaatgtggaccaaaatattagaaataggccaggcatggtggctcatgcctgtaatcccaacactttgggaggccgaggcgggaggagtgcttgaccagactgagaaacatggcaaaactctgtctttaccaaaaaaaatacaaaaattagccaggcatggtggtgcatgcctgtagtcccagctatttacaaggctgagcccaggaggtggaggttgcagtggggtaagactgcaccactccactccagcctggrtgacagagcgagcctctgtcttaaaaaaaaaaaaaaaaaaaa

SEQ ID NO: 20421 - DNA, 1203 bp, Homo sapiens
gtggatcacctgagctagaccagcctcagcaacatggtgaaaccccatcgctaccaaaaatacaaaaaattagccaggcatggtggttcacacctgtattcttagctactcaggaggctgaggtgggaggatcacttaagcccaggaggtagaggctgcagtaagctgagatcgtgccactgcactccagcctgggtgacagagtgagaccctgtctcgaaaaaaaaaaaaaaaagtaataagaattttaaaatgctgaataactctccataaatttataaataattatgatattatttcccacactgtattgtaatacatatgtacatttccatctctctttctaaacttgtatttgctaaaagaccacacatcatcgttatgcaggagaatgccactgagctactacacagtagtgaggaattatagaatcagttaagagcattttaggtgtttataaataagcccatttgatacatcataaaacaaatgcaataagttgttcttatcaatatattctaattatatgtttccttaactatctgttcttcaatgttggaatcatgttttatgcatccctaggatcaaggaaaatgtcaggcatatgaacaatgctcactggaatgaaatcaaatggtaatagagtggacttcagtaattgtctagatctacaaatacagctgctggggactttttcttcccctccactattgcatggataatgaggtctacatctctcacgtcgattccagcactctgtggtggtagcaagcaaaaggaaagtaatcccagcattagggcacctcaaatcagggctctttaaaactaaccattatataaatcactttgatatctttttaattatagattatggttctcttagagtgaggcctaagttayttcatccctaactgctatgtgattacattcttgttgcctgtcaaacatattttgagttgtaaggatttaattactgggaacttcgacatagggcacaaggtgagttcttgatttctggccatcctttgaatcagagatcctagggtacatcttgataattgcgcataaacaaattcatcacctgatgtatcacttactgctgataccacccaagatatcaagtgaaataaccacttgacctaaggggccacttaataggaaataattcttatgtggaccaattatttcaaggttttcagaaaa

SEQ ID NO: 20422 - DNA, 1203 bp, Homo sapiens
gtggatcacctgagctagaccagcctcagcaacatggtgaaaccccatcgctaccaaaaatacaaaaaattagccaggcatggtggttcacacctgtattcttagctactcaggaggctgaggtgggaggatcacttaagcccaggaggtagaggctgcagtaagctgagatcgtgccactgcactccagcctgggtgacagagtgagaccctgtctcgaaaaaaaaaaaaaaaagtaataagaattttaaaatgctgaataactctccataaatttataaataattatgatattatttcccacactgtattgtaatacatatgtacatttccatctctctttctaaacttgtatttgctaaaagaccacacatcatcgttatgcaggagaatgccactgagctactacacagtagtgaggaattatagaatcagttaagagcattttaggtgtttataaataagcccatttgatacatcataaaacaaatgcaataagttgttcttatcaatatattctaattatatgtttccttaactatctgttcttcaatgttggaatcatgttttatgcatccctaggatcaaggaaaatgtcaggcatatgaacaatgctcactggaatgaaatcaaatggtaatagagtggacttcagtaattgtctagatctacaaatacagctgctggggactttttcttcccctccactattgcatggataatgaggtctacatctctcacgtcgattccagcactctgtggtggtagcaagcaaaaggaaagtaatcccagcattagggcacctcaaatcagggctctttaaaactaaccattatataaatcactttgatatctttttaattatagattatggttctcttagagtgaggcctaagttatttcatccctaactgctatgtgattacattcttgttgcctgtcaaacatattttgagttgtaaggatttaattactgggaacttcgacatagggcacaaggtragttcttgatttctggccatcctttgaatcagagatcctagggtacatcttgataattgcgcataaacaaattcatcacctgatgtatcacttactgctgataccacccaagatatcaagtgaaataaccacttgacctaaggggccacttaataggaaataattcttatgtggaccaattatttcaaggttttcagaaaa

SEQ ID NO: 20423 - DNA, 1203 bp, Homo sapiens
gtggatcacctgagctagaccagcctcagcaacatggtgaaaccccatcgctaccaaaaatacaaaaaattagccaggcatggtggttcacacctgtattcttagctactcaggaggctgaggtgggaggatcacttaagcccaggaggtagaggctgcagtaagctgagatcgtgccactgcactccagcctgggtgacagagtgagaccctgtctcgaaaaaaaaaaaaaaaagtaataagaattttaaaatgctgaataactctccataaatttataaataattatgatattatttcccacactgtattgtaatacatatgtacatttccatctctctttctaaacttgtatttgctaaaagaccacacatcatcgttatgcaggagaatgccactgagctactacacagtagtgaggaattatagaatcagttaagagcattttaggtgtttataaataagcccatttgatacatcataaaacaaatgcaataagttgttcttatcaatatattctaattatatgtttccttaactatctgttcttcaatgttggaatcatgttttatgcatccctaggatcaaggaaaatgtcaggcatatgaacaatgctcactggaatgaaatcaaatggtaatagagtggacttcagtaattgtctagatctacaaatacagctgctggggactttttcttcccctccactattgcatggataatgaggtctacatctctcacgtcgattccagcactctgtggtggtagcaagcaaaaggaaagtaatcccagcattagggcacctcaaatcagggctctttaaaactaaccattatataaatcactttgatatctttttaattatagattatggttctcttagagtgaggcctaagttatttcatccctaactgctatgtgattacattcttgttgcctgtcaaacatattttgagttgtaaggatttaattactgggaacttcgacatagggcacaaggtgagttcttgatttctggccatcctttgaatcagagatcctagggtacatcttgataattgcgcataaacaaattcatcacctgatgtatcacttactgctgataccacccaagatatcaagtgaaataaccacttgacctaaggggccacttaataggaaataattcttaygtggaccaattatttcaaggttttcagaaaa

SEQ ID NO: 20424 - DNA, 613 bp, Homo sapiens
gatggccctttaaagcctcagttcaaatacggtgtatgttatgtcctttgataccccattgaccaaagcaaatccctgactttgaggactccctgtagctgtctgggtaaattaggttagcacccgaggccctttgtgagagtttaaaataaggagatatgcacatacagagaaaaagagagaccgaggcaaagaaagagaatttatgtgtatttctacatgcatggtgtgtgtatgactttttttttttttttgagatggagtttcgctcttgttgcccaggctggagtgcaatggcatgatctcagctcactgcaacctccacctctcgggttcaagtgattctcctgcctcagccttccaagtagctgggcttacaggcgcccatgaccacgcacagctaattttctgtatttttagtagagacggggttttactatgttggccaggctggtctcgaactcctgacctcaggtccacctgcctcggcctcccaaagtgctgggattacaggcatgagccacygcacccggctggtgtataacgttcttaaggcaacttcatttctgtgtggaaggttgaaggtcagtcccaacctgagatataggaccag

SEQ ID NO: 20425 - DNA, 570 bp, Homo sapiens
tttatccctaattacaaagttattagtttaaaatttaaatatgaaaaytttaaattttcaaaatgaagtcatcaggatgtggggcctggtggaggctggggtgactgacatcccccagttgacagtggtgggtgggaataaggtgtgggaagatgggcttattccaaggggaggggggtttggcgttggcttgagatggatctgcctgtgggcatcctgtgccgacagccactcgccatgcagagtggaggctgaagaaagcagctcgctgcaaagaggccagcggggtacaaagaagtactaactgcagggcaccgagccctgcgcaggaaagagcgggttgtctgggaggcaggaggaactctgtccccgaagtcacaggaggtgcccaggccttgagaggaagcagcaggaatctctgtggggcgtccctgagctccagtgaagcctcagccccgtgtgggcagaagttgggggaacatctggaaagcatgaccaaggggacgcctgcaggagctgccagaagcagtatggcagggacagggtcagagggaggaggctgcagggtcc

SEQ ID NO: 20426 - DNA, 570 bp, Homo sapiens
tttatccctaattacaaagttattagtttaaaatttaaatatgaaaattttaaattttcaaaatgaagtcatcaggatgtggggcctggtggaggctggggtgactgacatcccccagttgacagtggtgggtgggaataaggtgtgggaagatgggcttattccaaggggaggggggtttggcgttggcttgagatggatctgcctgtgggcatcctgtgccgacagccactcgccatgcagagtggaggctgaagaaagsagctcgctgcaaagaggccagcggggtacaaagaagtactaactgcagggcaccgagccctgcgcaggaaagagcgggttgtctgggaggcaggaggaactctgtccccgaagtcacaggaggtgcccaggccttgagaggaagcagcaggaatctctgtggggcgtccctgagctccagtgaagcctcagccccgtgtgggcagaagttgggggaacatctggaaagcatgaccaaggggacgcctgcaggagctgccagaagcagtatggcagggacagggtcagagggaggaggctgcagggtcc

SEQ ID NO: 20427 - DNA, 570 bp, Homo sapiens
tttatccctaattacaaagttattagtttaaaatttaaatatgaaaattttaaattttcaaaatgaagtcatcaggatgtggggcctggtggaggctggggtgactgacatcccccagttgacagtggtgggtgggaataaggtgtgggaagatgggcttattccaaggggaggggggtttggcgttggcttgagatggatctgcctgtgggcatcctgtgccgacagccactcgccatgcagagtggaggctgaagaaagcagctcgctgcaaagaggccagcggggtacaaagaagtactaactgcagggcaccgagccctgcgcaggaaagagcgggttgtctgggaggcaggaggaactctgtccccgaagtcacaggaggtgcccaggccttgagaggaagcagcaggaatctctgtggggcrtccctgagctccagtgaagcctcagccccgtgtgggcagaagttgggggaacatctggaaagcatgaccaaggggacgcctgcaggagctgccagaagcagtatggcagggacagggtcagagggaggaggctgcagggtcc

SEQ ID NO: 20428 - DNA, 549 bp, Homo sapiens
aatttttgcatattttagtaactgtggcattctattacatacaacagatggttacaggcattgtcttcatagagagcaaaataaaactctaagaccaatacaacaatatatgtttaacaaagaggaaagagcctaaagtctaaatgcgagactttggggcycctgtgggccagtgggaaagaacaggcctcttgtttgtaggtgtccatgtgcttcagacaccatgtcttggtttcttggtcagcccattttctaccaagcttgagacctccgttctgggcctgaggctgaaggactgttcgtttatttcatttatttattggctctttctcttccttgccacgcaggaggatgagtaaaaacagagtgagatacttcggagcaacctcgtgagttaagagcttgtgagctttctcagagacgctggctccatcttaatttaattaatgcagaaatgaagactcgaacatttgagaatctttaaaaatcatattttagccaaaagatttatctcacagaagataatttccaacacagccaaaagcagca

SEQ ID NO: 20429 - DNA, 549 bp, Homo sapiens
aatttttgcatattttagtaactgtggcattctattacatacaacagatggttacaggcattgtcttcatagagagcaaaataaaactctaagaccaatacaacaatatatgtttaacaaagaggaaagagcctaaagtctaaatgcgagactttggggcccctgtgggccagtgggaaagaacaggcctcttgtttgtaggtgtccatgtgcttcagacaccatgtcttggtttcttggtcagcccattttctaccaagcttgagacctccgttctgggcctgaggctgaaggactgttcgtttatttcatttatttattggctctttctcttccttgccacgcaggaggatgagtaaaaacagagtgagatacttyggagcaacctcgtgagttaagagcttgtgagctttctcagagacgctggctccatcttaatttaattaatgcagaaatgaagactcgaacatttgagaatctttaaaaatcatattttagccaaaagatttatctcacagaagataatttccaacacagccaaaagcagca

SEQ ID NO: 20430 - DNA, 563 bp, Homo sapiens
ctgggatcattggagtaagccaccactcccagcctgcttaactttcttgagtttaagtttggtcagcttgaaattcagtttgaaacttgagttttagttatgtagtgaaagcagaaaataacctgctcacagtgacattttgaggattaagatagtgcaggtgaaygcatttctaagctttgaaatgttaaccaacataacacattattttgcattattattttctaaaataatctacatttacattgaaaagtataaagtcctgtggatatgttgagtggaactacatgaatttagaacagatccgggcagggagtagaagactactgctctggcaaaaccggagtatgcaattccagtcagtcacatacagtcagtctatataataatgatagtacaaataatacatccatctcctgtcatcttcctaacaaccatacaagcccagtcctatgtacccattttgcacatgaggctcagtaaggctatgggacttccatagagctccagagctgcagacctgaaccacggcaaagctgcacgcctctttcccgctctctctc

SEQ ID NO: 20431 - DNA, 563 bp, Homo sapiens
ctgggatcattggagtaagccaccactcccagcctgcttaactttcttgagtttaagtttggtcagcttgaaattcagtttgaaacttgagttttagttatgtagtgaaagcagaaaataacctgctcacagtgacattttgaggattaagatagtgcaggtgaacgcatttctaagctttgaaatgttaaccaacataacacattattttgcattattattttctaaaataatctacatttacattgaaaagtataaagtcctgtggatatgttgagtggaactacatgaatttagaacagatccgggcagggagtagaagactactgctctggcaaaaccggagtatgcaattccagtcagtcacatacagtcagtctatataataatgayagtacaaataatacatccatctcctgtcatcttcctaacaaccatacaagcccagtcctatgtacccattttgcacatgaggctcagtaaggctatgggacttccatagagctccagagctgcagacctgaaccacggcaaagctgcacgcctctttcccgctctctctc

SEQ ID NO: 20432 - DNA, 563 bp, Homo sapiens
ctgggatcattggagtaagccaccactcccagcctgcttaactttcttgagtttaagtttggtcagcttgaaattcagtttgaaacttgagttttagttatgtagtgaaagcagaaaataacctgctcacagtgacattttgaggattaagatagtgcaggtgaacgcatttctaagctttgaaatgttaaccaacataacacattattttgcattattattttctaaaataatctacatttacattgaaaagtataaagtcctgtggatatgttgagtggaactacatgaatttagaacagatccgggcagggagtagaagactactgctctggcaaaaccggagtatgcaattccagtcagtcacatacagtcagtctatataataatgatagtacaaataatacatccatctcctgtcatcttcctaacaaccatacaagcccagtcctatgtacccattttgcacatgaggctcagtaaggctatgggacttccatagagctccagagctgcagacctgaaccacrgcaaagctgcacgcctctttcccgctctctctc

SEQ ID NO: 20433 - DNA, 889 bp, Homo sapiens
catcattaacttcatcatttccaaaaagtgcaaattaggaagagtgatgagagtcataakaagagagccaagaaagttaagaaagtctgaactaatgccgtcaatatgtgtgctctctggaaaagcctaactttacacagatatggatattttaattgatttgaaagtgatactttggattcatgaaccaatggacttacaaacagcttttaagatccttatgtgtcatcaagacaaaagtgccgacagcaaacatttatactgtgaaccttctttaaaaagagattctcttaacatatttatataagggatgctgctctgtgactccaggaaggttgaaagcctctgaaatattttaaaagttacatcaaaccggccgggcacggtggctcacacctgtaatcctagcactttgggaggccaaggtgggcagattgcccgggctcagaaattcgagaccagcctgggcaacaccgtgaaaccccatctctactaaaacacaaaaaattagccaggcgtggtggcatgtgcctgtaatcccagagacttgggaggctgaggcagtagaatcacttgaacctgggaggcagaggttgcagtaagccgagattgtgccactgcactacagcctgggcgacagagtgagaccccatctccaaaaaaaataataataactaaaagttacatcaaacatgaattttgaaggcaagattagttgagaaaaaaacaattttatcactaattaagagagggaccagagaaaaggtattttggtatggtgataaaactatatgggatttgtaatcagaaggcctggactttaatcttagctctgttatttatatctaccttaccttgggcaagtcttgtaacatttatgtgtttaatt

SEQ ID NO: 20434 - DNA, 889 bp, Homo sapiens
catcattaacttcatcatttccaaaaagtgcaaattaggaagagtgatgagagtcataagaagagagccaagaaagttaagaaagtctgaactaatgccgtcaatatgtgtgytctctggaaaagcctaactttacacagatatggatattttaattgatttgaaagtgatactttggattcatgaaccaatggacttacaaacagcttttaagatccttatgtgtcatcaagacaaaagtgccgacagcaaacatttatactgtgaaccttctttaaaaagagattctcttaacatatttatataagggatgctgctctgtgactccaggaaggttgaaagcctctgaaatattttaaaagttacatcaaaccggccgggcacggtggctcacacctgtaatcctagcactttgggaggccaaggtgggcagattgcccgggctcagaaattcgagaccagcctgggcaacaccgtgaaaccccatctctactaaaacacaaaaaattagccaggcgtggtggcatgtgcctgtaatcccagagacttgggaggctgaggcagtagaatcacttgaacctgggaggcagaggttgcagtaagccgagattgtgccactgcactacagcctgggcgacagagtgagaccccatctccaaaaaaaataataataactaaaagttacatcaaacatgaattttgaaggcaagattagttgagaaaaaaacaattttatcactaattaagagagggaccagagaaaaggtattttggtatggtgataaaactatatgggatttgtaatcagaaggcctggactttaatcttagctctgttatttatatctaccttaccttgggcaagtcttgtaacatttatgtgtttaatt

SEQ ID NO: 20435 - DNA, 541 bp, Homo sapiens
ccggcagcacaggctgggctatgtcccagccttctagcctcatttcctagcactaagtctccactctgtctcacctcctccagacacagcagcgagaagctgagccagaaacaggttaaatatttaaaatcaattatgaaaacataaagccgggcacggtggctcacgcctgtaatcccagcactttgggaggttgaggtgggcaaatgacatgaggtcaggagtttgagaccagcctggccaacatggtgaaaccccgtctctactaaaaatacaaaaattagctgggcttggtggcacacgcctgtaatcccagctactagggaggctgaggcaggagaattgcttgagcctggggggcggaggttgcagtgagccgagatcgcaacactgcactccaacctgggcgacagagtaagactccatctcagaaaaataaataaataaataaataaataaataaataaataaataaataaataaawaaaacctggtcactggagctttttgtgaaatgctcaaaaactgttacaaagcgttt

SEQ ID NO: 20436 - DNA, 565 bp, Homo sapiens
ttactgcatgttttatgcagtttggtgaaagtattcattataaggctatttttttaatgcaacatatttggtaatacataaagaccccatttctttaattaaagaatttcgcattattgaaaagcaaataacaataatcactgaaaacataaaattaaatgagtataagccactcagatgaaataaaattaaagtataaaatttggatgtgagtcrtatttaaatattacggagctgagttccttaccagaatagtggggcatcctatttgaactgaattgagagaattgctgaaagaagtgattctaaaaaactcaaattcccctcaaagaacaaatcgctattaaatgagaggagtcacagcagttggttatcaatgaattgtaaagaattctattaacaatataaaataggccaggtgccgtggctcatgtcaagcgggcggattgcttgagcccacgtgttggagaccagactgggcaacatagcaaaaccctgtctctaccaaaaaaataaaaaattgctagccagtcttggtggcgtgcgcatgtagtcccagctactc

SEQ ID NO: 20437 - DNA, 942 bp, Homo sapiens
aggagggtgaccccacaaatctacctttcctaaatatgcagcaagaagtatgatgaaaacactggttagcagtaaccaggggagaggggcagtaagtgggagggaagaccaaggcccagggagagagggaggaccctttcacacttcaagaagtagggcagggtgagggtcacatggagagaaggagagcttcgaggaggccaagttttgcaggggaaggagtagcatttctgaaatggacaaaattgtacccaagggtgagaactggcaagcccctcacccctgccccctaaaggctaccatttaggggcttaaacatttccattcatgttttcttacttccatgtataaacacaggcatactttggagagaggagaaaaataaaccaaactgctgagtaatacccttttgaaaagaaatacatactttcaaaaaggaccaaaacaacttgtggaagctttggaagggagttttctcatttttaaaagctcaagggttttgatgaaattagtgttgttttctcagactccaaaacagattaacatatgggcagcttcagcttgtggctcagagagacaaaagaaaccacaaaaatagctttctaataattgtccccaaatatgtctgtcgagcgctggttagtgccaactcccctttgctaatcaaaactcgaggcggaggcgccgactcccccsgccgccatttgatgtccctctggttactgtatttactctccttctcactcccaatttcttcccgaagctttcatctgttccaacgccctgctctgcccgtctcggccaccaccgctggggtttaaggcaaaccttgcatctggtttctctttgcttcttttcgcctttgtctttgtttactttcatgaggaggcagacagttgctttattaaccccctgctttgttttctttaggtttttcagttg

SEQ ID NO: 20438 - DNA, 516 bp, Homo sapiens
ggtttcaaaggggctcatgatctcaatgtgaccttatgcctatataacgacatgcatataatcaaacacttaagatctgtgcatttcactgtatgtacattttactttggaagaaagtaatcaggtactgtttttacctccccagagtgatctggtgctaatgtcattctctccaagtggattctagggcacttgaacctgtttctgaagtttggtgttgaccccgtggtcataaatccagggattgctggytgtgaactgactctcccctgacatcttcctttgggctgctggccaattgaaagcagctccagggggaacttgtgtgaaggatatgtgtgcagagggatgcattcagatgcctgtgatgttgcagaggagtatgtttcatatcctaattacatgaagcttgttaagctgaaagtgttcagatgtgcctggttatgtcggttaagtgtcatcggggcatcacacagagcggggatacagaatgtggaatctcaggatgtggagagt

SEQ ID NO: 20439 - DNA, 569 bp, Homo sapiens
ccaaaatgctaggaatataggcatgagcctctgtgcctgacaacctcatttctttataaattacccagcctcaggtatttatttatagcaatgcaaaaatggcctaatacattaactatatttatgcttgtatggaaaactaagtaattttttaaaatcaaaattatacagcagtctcatgacatataccaaaaaagttaataaaacgaaacattaactgttcaaaataacattaaaagaatatgttattttgtgaattcaaagctgagtattataaagcaaattgaggcagacaaaaawatggaatatgattagaacatatatgaaagaaaaataagtgcctaaagcaaatcactaataaaaagatgtatttttccctaaatattaaaaaaggcacaaagaggcaatttctaacagaaatagggcaaagttaatgtagtccggagaggctggatacagttgtggtaagaaataactccgaaattgcaatggattcaagaacgaagggtttatttcttgctcacattgcacgtaatggcttaaagcaaaaaggggcttatttcttgctt

SEQ ID NO: 20440 - DNA, 615 bp, Homo sapiens
agggttattccattagttgggagtggtttccaaggaacacttgctgtcagattccctattgtcagtgactcatttatgtgacaacccagcatgctcctggcagcgacaaagtcctcggggtagcagtgctttggggctcacctcttaccaacaggtgtgggcaatagcagaatccatcttgcaaattaaatgcgcttaggtatttttcaattttactgttatcactgtaagtggcagagaggggaattgaaccattattcttttaaaaactattacraaatatgtattattactaatcaataaataggattttccactgcttcagttactccaggagaacaaggcagggagtttaggcatcttcctctgctccttcaaacccccaaagttgtcttccgtcctgtaaaagacaacttgaacttactaaccacacaaagcctggcagtatgaaaggttcatgcactttctcaaaagggcctgccctgtgccaggggcttgttgagggttcacatctttttttccatcttttaatgaatcttactataagcaaagcaatgggctctgagcctggaaggggagacacaaataagaaataagacacaaactttgcagcaa

SEQ ID NO: 20441 - DNA, 595 bp, Homo sapiens
tttttcccttacggtatttgcacagtgcagcctgccttctgtgacctacagaagcacattgcatttaacctgaggcttatttgatattacactttttttctttccttcaaatatccacaatctaaattgtgttcagaaagttccgaagagctgtaatcccagcactttgggaggccgaggcgggcggatcacgaggtcaggagatcgagaccatcccggctaaarcggtgaaaccccgtctctactaaaaatacaaaaaaattagccgggcgtagtggcgggcgcctgtagtcccagctactcgggaggctgaggcaggagaatggcgtgaacccgggaggcggagcttgcagtgagccgagatcccgccactgcactccagcctgggcgacagagcgagactccgtctcaaaaaaaaaaaaaaaaaaagaaagttccgaagagttgccagggctctatttaatccattgctcttcttagcaatgcaaattctgtgcacaatgagtttattctccttgagaagataaattcagtttggctccagtggctaaactttgttggacaagtttattcctgtgtgacacctacctggcca

SEQ ID NO: 20442 - DNA, 595 bp, Homo sapiens
tttttcccttacggtatttgcacagtgcagcctgccttctgtgacctacagaagcacattgcatttaacctgaggcttatttgatattacactttttttctttccttcaaatatccacaatctaaattgtgttcagaaagttccgaagagctgtaatcccagcactttgggaggccgaggcgggcggatcacgaggtcaggagatcgagaccatcccggctaaagcggtgaaaccccgtctctactaaaaatacaaaaaaattagccgggcgtagtggcgggcgcctgtagtcccagctactygggaggctgaggcaggagaatggcgtgaacccgggaggcggagcttgcagtgagccgagatcccgccactgcactccagcctgggcgacagagcgagactccgtctcaaaaaaaaaaaaaaaaaaagaaagttccgaagagttgccagggctctatttaatccattgctcttcttagcaatgcaaattctgtgcacaatgagtttattctccttgagaagataaattcagtttggctccagtggctaaactttgttggacaagtttattcctgtgtgacacctacctggcca

SEQ ID NO: 20443 - DNA, 450 bp, Homo sapiens
aaaaaaatgtatgtgtcatgtggttcttttgtaaggttatttctctccatttgcttgaaaactttcttattactcctaactccttttattgatttaatgaaaccaaatgctcctgaaagtttgaccctgatctagtgatacctgcactctctaggtccctaaaagacmccacagtctgatgctttggctgcagatggagtcacagagatgattcagctttaaagtgtctacatcatagattggaaaatgcctttctagggctgaagttgtagctgtttcctagacttctgtttattttccatttctttacccactcctgtttgaaattctgctgttgtttgcatactgtttgcctttgtgtccctctttccatctgttcttaaaaaaaaaaaatcaactgagttttattttaaaccaatccagatgacaggcacacagtcttcacaatgc

SEQ ID NO: 20444 - DNA, 550 bp, Homo sapiens
ggaacatggtctttgcagatgtgattaaattaagratcttgatgtagagaggttatcctgggtgacctgggatatccaatcacaagtatccttataagagacaggcaggagatcatcttcacagagcacatgtaagacagaggcacagattggagtgatgtggccacaagccaaggaatgccagagaatgccagcagccaccacaagctagaagaggcaaggaacagattccacaaacagattctacccctgagccttcaaggggaacgtggccctgcagagagcatgagggagtaagtttatgttgttttaagccacagagtttgtgataatttgtcctagcagccctaagaaattaatacaggctgtaaattttctgagaggtggggtgatgtgttccctgttcctgtcttctgcacagtatgcatgtttctgcacagaacaggcactcaaatacccgagtgcttgaactgacttgacttcttcactggttcagaaattcagagcctaaagatttggatataaaattttattggaagaacagtgagac

SEQ ID NO: 20445 - DNA, 550 bp, Homo sapiens
ggaacatggtctttgcagatgtgattaaattaagaatcttgatgtagagaggttatcctgggtgacctgggatatccaatcacaagtatccytataagagacaggcaggagatcatcttcacagagcacatgtaagacagaggcacagattggagtgatgtggccacaagccaaggaatgccagagaatgccagcagccaccacaagctagaagaggcaaggaacagattccacaaacagattctacccctgagccttcaaggggaacgtggccctgcagagagcatgagggagtaagtttatgttgttttaagccacagagtttgtgataatttgtcctagcagccctaagaaattaatacaggctgtaaattttctgagaggtggggtgatgtgttccctgttcctgtcttctgcacagtatgcatgtttctgcacagaacaggcactcaaatacccgagtgcttgaactgacttgacttcttcactggttcagaaattcagagcctaaagatttggatataaaattttattggaagaacagtgagac

SEQ ID NO: 20446 - DNA, 517 bp, Homo sapiens
ggtttcaccatattggccaggctggtcttgaactcttgacctcatgatccacccacctcagcttcccaaagtgctgggattacaggtgtgagccaccgcgcctggccacattttttattttttatttttatttttaaaatttctagagacagggtctcactgtgttgcccagactggagtgcagtggcatgatcttggctaactgcagcctcgacttcccaggcttcagtgattctcccacctcagcgtcccaagtagctaggaccacaggcacgcaccaccacacccagctaactttttgtatttttagtagagatgggatttcaycatgttggccaggctggtctcgaacgcctgacctcaagtgatccacctccacctcggcctcccaaagtgctgggattaaaggcatgagccaccgtgcccagcaagcctacatttttttttaatgcctacttaatggcgaaacaaagctgctccttttttaaaacaaattttccacttataaatgctattg

SEQ ID NO: 20447 - DNA, 621 bp, Homo sapiens
tgatctttaacagaaaaactaaccatataataaagaagatatacagaaaattacagaatatctcagagatgacttgcttaatgaaggagaaacattgtgggaggctttgaactgacatgcctcagctaaatattgaccaactcagagaaattagtgctttaccacatttaccattagcacttgctgtttgtgtttgcttacattcggcaaggaaggaaattaatgtttggaatctctatgcaacatcttgttactagccaggttatctcttcagyatcatcaatgtcaaatctttattgaagcctgctctattcaaagcattctgctaggtgctagtcttctttctaggagagttctcttgccaagaggatgaaatgggagaaaacagtgtgcttatagtacttaccacacctagacttatataatatttaaacattcaatagtgggtgaaaatatattaataactcctttatgctttgcagaatgtcatgcgagctcttccccaaaattttatgatccaaaaagaattaaaggaatgttcacagtagcatcatttcaaataaaaattcagaaacaacataaatatctagcaccatgaaaatggataaattgtgctctaat

SEQ ID NO: 20448 - DNA, 621 bp, Homo sapiens
tgatctttaacagaaaaactaaccatataataaagaagatatacagaaaattacagaatatctcagagatgacttgcttaatgaaggagaaacattgtgggaggctttgaactgacatgcctcagctaaatattgaccaactcagagaaattagtgctttaccacatttaccattagcacttgctgtttgtgtttgcttacattcggcaaggaaggaaattaatgtttggaatctctatgcaacatcttgttactagccaggttatctcttcagtatcatcaatgtcaaatctttattgaarcctgctctattcaaagcattctgctaggtgctagtcttctttctaggagagttctcttgccaagaggatgaaatgggagaaaacagtgtgcttatagtacttaccacacctagacttatataatatttaaacattcaatagtgggtgaaaatatattaataactcctttatgctttgcagaatgtcatgcgagctcttccccaaaattttatgatccaaaaagaattaaaggaatgttcacagtagcatcatttcaaataaaaattcagaaacaacataaatatctagcaccatgaaaatggataaattgtgctctaat

SEQ ID NO: 20449 - DNA, 613 bp, Homo sapiens
cttctattaattttttttctgttaagctccccttccccagtcctaaaaaaaaataataataataatctattgaaatacttaatgtggaccctgactcatacaatgaccatgtgtcaggaactgcagatttataacayaggtagataaggaggtagaggcatagcagacatgcatatatacatattagaatatttccatatacatatgtgttatatataaaatgcagatatatacacatgtaagtacatatgtatttcttacatgagctatatttagacctatgtgtacatatatataaaatttcctgccaggtgtggtggctcacgcctgtaaccccagcactttgggaggccgaggcagatggatcacctgaggtcaggagttcgagaccagcctgactgatatgttgaaaccccgtctctactaaaaaaaaacacacaaaaattagatgggcggcatggtggcgggcacctgcagtcccagctacttgggaggtgagacaggagaattgattgcatccaggaggcagaggtgagccaagtttgtgccactgcactccagcctgggcgatggagcgagactctgtagcaaaacaaacaaacaaacaaacaaa

SEQ ID NO: 20450 - DNA, 613 bp, Homo sapiens
cttctattaattttttttctgttaagctccccttccccagtcctaaaaaaaaataataataataatctattgaaatacttaatgtggaccctgactcatacaatgaccatgtgtcaggaactgcagatttataacacaggtagataaggaggtagaggcatagcagacatgcatatatacatattagaatatttccatatacatatgtgttatatataaaatgcagatatatacacatgtaagtacatatgtatttcttacatgagctatatttagacctatgtgtacatatatataaaatttcctgccaggygtggtggctcacgcctgtaaccccagcactttgggaggccgaggcagatggatcacctgaggtcaggagttcgagaccagcctgactgatatgttgaaaccccgtctctactaaaaaaaaacacacaaaaattagatgggcggcatggtggcgggcacctgcagtcccagctacttgggaggtgagacaggagaattgattgcatccaggaggcagaggtgagccaagtttgtgccactgcactccagcctgggcgatggagcgagactctgtagcaaaacaaacaaacaaacaaacaaa

SEQ ID NO: 20451 - DNA, 613 bp, Homo sapiens
cttctattaattttttttctgttaagctccccttccccagtcctaaaaaaaaataataataataatctattgaaatacttaatgtggaccctgactcatacaatgaccatgtgtcaggaactgcagatttataacacaggtagataaggaggtagaggcatagcagacatgcatatatacatattagaatatttccatatacatatgtgttatatataaaatgcagatatatacacatgtaagtacatatgtatttcttacatgagctatatttagacctatgtgtacatatatataaaatttcctgccaggtgtggtggctcacgcctgtaaccccagcactttgggaggccgaggcagatggatcacctgaggtcaggagttcgagaccagcctgactgatatgttgaaaccccgtctctactraaaaaaaacacacaaaaattagatgggcggcatggtggcgggcacctgcagtcccagctacttgggaggtgagacaggagaattgattgcatccaggaggcagaggtgagccaagtttgtgccactgcactccagcctgggcgatggagcgagactctgtagcaaaacaaacaaacaaacaaacaaa

SEQ ID NO: 20452 - DNA, 613 bp, Homo sapiens
cttctattaattttttttctgttaagctccccttccccagtcctaaaaaaaaataataataataatctattgaaatacttaatgtggaccctgactcatacaatgaccatgtgtcaggaactgcagatttataacacaggtagataaggaggtagaggcatagcagacatgcatatatacatattagaatatttccatatacatatgtgttatatataaaatgcagatatatacacatgtaagtacatatgtatttcttacatgagctatatttagacctatgtgtacatatatataaaatttcctgccaggtgtggtggctcacgcctgtaaccccagcactttgggaggccgaggcagatggatcacctgaggtcaggagttcgagaccagcctgactgatatgttgaaaccccgtctctactaaaaaaaaacacacaaaaattagatgggcggcatggtggcgggcacctgcagtcccagctacttgggaggtgagacaggagaattgattgcatccaggaggcagaggtgagcsaagtttgtgccactgcactccagcctgggcgatggagcgagactctgtagcaaaacaaacaaacaaacaaacaaa

SEQ ID NO: 20453 - DNA, 613 bp, Homo sapiens
cttctattaattttttttctgttaagctccccttccccagtcctaaaaaaaaataataataataatctattgaaatacttaatgtggaccctgactcatacaatgaccatgtgtcaggaactgcagatttataacacaggtagataaggaggtagaggcatagcagacatgcatatatacatattagaatatttccatatacatatgtgttatatataaaatgcagatatatacacatgtaagtacatatgtatttcttacatgagctatatttagacctatgtgtacatatatataaaatttcctgccaggtgtggtggctcacgcctgtaaccccagcactttgggaggccgaggcagatggatcacctgaggtcaggagttcgagaccagcctgactgatatgttgaaaccccgtctctactaaaaaaaaacacacaaaaattagatgggcggcatggtggcgggcacctgcagtcccagctacttgggaggtgagacaggagaattgattgcatccaggaggcagaggtgagccaagtttgtgccactgcactccagcctgggcgayggagcgagactctgtagcaaaacaaacaaacaaacaaacaaa

SEQ ID NO: 20454 - DNA, 487 bp, Homo sapiens
tttttctttctgagataagagtctcactctgtcgcccaggctggagtgcagtggtgtgatcttggctcactacagcctgttctaaactcacgaatgcaccaatcacsactgcaccatacgcttgaaatgggggaactgtgggatatgtggattatacctcaacaaagatttctcttcagtgtctgtgcttttatgtatgtgtgtatgtatgtatgtttgtatatatttatttgagacagggtcttgtcctgttgcccaggcctgagtgcagtggtgtgatctcggctttctgcaacctctgtcccctgggttcaagcaattctcctgcttcagcctcccaagtagctgggactacaggcacccgccaccacgcccagctaatttttgtatttttagtagagatggggtttcaccatgttggtcaggctggtctcgaactcctgacgtcaggtgatcctcttgcctcagcctcccaaagtgctgggat

SEQ ID NO: 20455 - DNA, 1111 bp, Homo sapiens
ttttccaagagtcaataaatgttctatttgatgaggataattcttggcaatttgttcctaagtaccaaataagaagttaatttaagtactgaatatttaattctccagcatctatctcttgaggattaccttgctaaacatagcttaaccttttcaaaatatatctgtctgctgagcctacaagttcggagaaatgtataatttttttctgcactaccaagcgttctcaagaaaggtaactgtaaacaaaatgaataccttttcatttgatggctttttgcatttttttgtgcaatgatcagttaacttcaaaggtagtaatagttgtggttgtgtagttttaatgtttcccaattttgttaatcattatttatggcaaacaccaagaatattttaatggaattggaagggtatatacttaagtttatttgaacagcggtgtagtgttcaaacttacgcttattttgctaaacagtaattatgatgagaactatacaaatatcttgtattggccttatttttgctttaaaaatgatttgtatattatagagagaagtttgtagacatttagttcaaatttttggtatgaaattttatatttcaggctttaaagtaggcaaaatgattaaaggtatttaaagacttagattaatgttaacaacttggtgaatagcctttcrgacatctcttgtatatgtatgtgtttaaaccacccatgacattctatagcctgagtttcttcattcaagattgtttgtgaacatttaaattatttcatgatatttactactttatacaaaaattttttaatagagacagggtcttgctctgtttcctaggctggtgcgcaatggcataataatagcttactgtaaccttgaactcctgggctcctcccacttcagcctcctgagtagcactaggctaattattatatttttttgtagacatagagtctcactatgttgaccaggctggtctcgaactcctagccttaagtgatcctcctgcaccagcctcctaaaataataggattacagatgtgatccactgtgcctggccagatagttactattataaccaagctatggtgacactatttatgccaatt

SEQ ID NO: 20456 - DNA, 604 bp, Homo sapiens
agttgattcttgtagatagtgtgagataagggtccaatttctttcttctgcatgtggatatacaatttccttactacaatttatttaagttatttatttatttaatcccattgtgtgctcttggcaactttgttgaagatcaactgacagtaaatgatttgatttatttctggactatctactctgttccactggtttatgtttctatttttatgccagttccatactgttttgattactatggttttgtagtatattttgcaatcaggtagtgtggtgcctctagctttgtttttcttgctcaagattgctttgtctattctgggtcttttgtggttccttttcactgtgtcttgtgtcttctatatgtcttaccctctgtttcatatttcccatccttttgttttaccatgtctcattctgaatatgttcttttgtcatttgtctaactttcatraattttctctttatttatgtctataccattgttaaaccgtttcttttatgttccggaagacaattgtagaagaatttctaaattcctctgtgtattttttaaaaaaataacctgtttatttttgaacagttttattttagatttaca

SEQ ID NO: 20457 - DNA, 604 bp, Homo sapiens
agttgattcttgtagatagtgtgagataagggtccaatttctttcttctgcatgtggatatacaatttccttactacaatttatttaagttatttatttatttaatcccattgtgtgctcttggcaactttgttgaagatcaactgacagtaaatgatttgatttatttctggactatctactctgttccactggtttatgtttctatttttatgccagttccatactgttttgattactatggttttgtagtatattttgcaatcaggtagtgtggtgcctctagctttgtttttcttgctcaagattgctttgtctattctgggtcttttgtggttccttttcactgtgtcttgtgtcttctatatgtcttaccctctgtttcatatttcccatccttttgttttaccatgtctcattctgaatatgttcttttgtcatttgtctaactttcataaattttctctttatttatgtctataccattgttaaaccgtttcwtttatgttccggaagacaattgtagaagaatttctaaattcctctgtgtattttttaaaaaaataacctgtttatttttgaacagttttattttagatttaca

SEQ ID NO: 20458 - DNA, 604 bp, Homo sapiens
agttgattcttgtagatagtgtgagataagggtccaatttctttcttctgcatgtggatatacaatttccttactacaatttatttaagttatttatttatttaatcccattgtgtgctcttggcaactttgttgaagatcaactgacagtaaatgatttgatttatttctggactatctactctgttccactggtttatgtttctatttttatgccagttccatactgttttgattactatggttttgtagtatattttgcaatcaggtagtgtggtgcctctagctttgtttttcttgctcaagattgctttgtctattctgggtcttttgtggttccttttcactgtgtcttgtgtcttctatatgtcttaccctctgtttcatatttcccatccttttgttttaccatgtctcattctgaatatgttcttttgtcatttgtctaactttcataaattttctctttatttatgtctataccattgttaaaccgtttcttttatgttccggaagacaattgtagaagaatttctaaattcctctgtgtattttttwaaaaaataacctgtttatttttgaacagttttattttagatttaca

SEQ ID NO: 20459 - DNA, 538 bp, Homo sapiens
gtacttttttctcaagccctcttttctttactcactagcctctaaaataataagaatactaatatgttatctcattggatctaagtaagatgccttgtgattttgtggaccattaggaaagagacactggtgccggttaaaatatgaaacactctcaattaaagatgtgaaaatgtgaaaaaaaaatgcatgttagaatgaatgcaatagagaattttcgcaaatatttgtatagtttttatgtgttagcatttttagagtgtttatgtacacgaattcatttaatcctcacaacactctgtgaggaaatgygtcagccagaacaggctagcttttgttgtggaaacaacacccaaatttcagtggcttaactcaacaaatgtttatttcttgtgtgtgtgaagtcattcgtgggtctcagagactgtccaagactaagtggaggcttagctttctaggctgtttccatcttatgtcacctcaaaatgaacttcagctttcaagattatttctcttcaggaagaaacctggagaattg

SEQ ID NO: 20460 - DNA, 1449 bp, Homo sapiens
ctggtccttctttccattttgcttctattggtgaccaatgatagtatgtagttagaatactgaatttaattttggggacggatggcacaaggagactggtaagatggaatggaggcttgttctttgaaatgacattaacctttcagggtgtcagggaactatttagtgcattgatccttcagtttttgaattgttctcattttctgtttccacattttgatctggtgagtaaagatcagagtgaagagggggaagatgggatgtgattggagatgggaaagatggatggaaagatggcatggggaaagtagatctagtctctctgggtcctggcaagctcacagatagatgtgggcctatatatggctgagagagcctgatttagtttatcactattagaggtagttgactgaggtagccaggaaacgttattcatagctctcagtaaagtgaataatttactccccttccctctgatagaatgaaatctgtaaagcctttgggactctttgggtaaagtgctctacaaacgtgtcagatgagttttggttttattacagagaagcctgggatggaaaatgggagttaagttaaacataaggatttgtttcctgagggagcctcttttaacataattattttttaaaaaaacaaatacgtgataaaagagttgaaatcatctacatattataaatttggtatagttatattttgaatgcaggtgcaactcattttttggtaaataattaatattgtatctgtagacttgcaaaatcccatattatcacttgaatgcaatgattcttacgcatggtctcttgctgaacctgtagttactgggtcttacaggtgtgcacagcaggcacactgtaccagtcactgagctttactggaaaatggaaaagcaagtggtgtgcatgtgtgagtgagtatgagtgtgactgctacgggaggaaggagaagtaagggcagtggtggagagggagcaaagggaaaaagagaaagaattgggattctttagaggaactgtctccaagttctccrtttcttccttaagctgaggtgctcaaattgaacatggtgttaagagtatgaccattgttattggcaacagtgactcatattgaggtgcccatgtattgttgaatggatgggaacatgatgaggagctaacaaagcactttgtactctttgaagaatggcattatgttaatgtcatccaaaatagaagtgatattcaaaagaaggaaatgagaaaaggcaaaatgatatttaataataggagatggctttgaatgagtttagcattgtggcctggtagcataattttaagtaggtcagtaagatttcttttctttcttttttcaaaattgctgttttcttatagttgctacaattgattgttagtgtaattgaccaaaaggtattcttggacactgcatcagagtc

SEQ ID NO: 20461 - DNA, 1449 bp, Homo sapiens
ctggtccttctttccattttgcttctattggtgaccaatgatagtatgtagttagaatactgaatttaattttggggacggatggcacaaggagactggtaagatggaatggaggcttgttctttgaaatgacattaacctttcagggtgtcagggaactatttagtgcattgatccttcagtttttgaattgttctcattttctgtttccacattttgatctggtgagtaaagatcagagtgaagagggggaagatgggatgtgattggagatgggaaagatggatggaaagatggcatggggaaagtagatctagtctctctgggtcctggcaagctcacagatagatgtgggcctatatatggctgagagagcctgatttagtttatcactattagaggtagttgactgaggtagccaggaaacgttattcatagctctcagtaaagtgaataatttactccccttccctctgatagaatgaaatctgtaaagcctttgggactctttgggtaaagtgctctacaaacgtgtcagatgagttttggttttattacagagaagcctgggatggaaaatgggagttaagttaaacataaggatttgtttcctgagggagcctcttttaacataattattttttaaaaaaacaaatacgtgataaaagagttgaaatcatctacatattataaatttggtatagttatattttgaatgcaggtgcaactcattttttggtaaataattaatattgtatctgtagacttgcaaaatcccatattatcacttgaatgcaatgattcttacgcatggtctcttgctgaacctgtagttactgggtcttacaggtgtgcacagcaggcacactgtaccagtcactgagctttactggaaaatggaaaagcaagtggtgtgcatgtgtgagtgagtatgagtgtgactgctacgggaggaaggagaagtaagggcagtggtggagagggagcaaagggaaaaagagaaagaattgggattctttagaggaactgtctccaagttctccatttcttccttaagctgaggtgctcaaattgaacatggtgttaagagtatgaccattgttattggcaacagtgactcatattgaggtgcccatgtattgttgaatggatgggaacatgatgaggagctaacaaagcactttgtactctttgaagaatggcattatgttaatgtcatccaaaatagaagtgatattcaaaagaaggaaatgagaaaaggcaaaatgatatttaataataggagatggctttgaatgagtttagcattgtggcctggtagcataattttaagtaggtcagtaagatttcttttctttcttttttcaaaattgctgttttcttatagttgctacaattgattgttagtgtaattgaccaaaagrtattcttggacactgcatcagagtc

SEQ ID NO: 20462 - DNA, 550 bp, Homo sapiens
accacacagatatgygttgtaaatcctatggtagtcattaaacaagtaggaaaataatgtaaaactaaactttaataaaggagaaaatgcaataagtatacatgactcatgaaaaaggaaagaaagaactaatgaaaagaatataatagaggcagttcaaatagaaaacacttagtaaaatgtatacataaactaaaaaattgaaatttgaaatatgaaatgttacattaagcatgaatacaaaaaatgctcattatcatagatacaaaattattaaaacaatatcagaaaatcactactagataacatattatggccaaatataataaccaagtgttattctaggaatgcagaggtggtataactggtaaatcaatcaattcaccaccttaacaaaataagggatgtcaacattgtcaaaaataccacaagtgtctgaaaaacaatgttaagcaaagtgagactatcacaaaagaaaagttcatggatgtttcttatttatgatggtgaacaacaatgaaaatgaatttagggtgttagaagttagaat

SEQ ID NO: 20463 - DNA, 550 bp, Homo sapiens
accacacagatatgtgttgtaaatcctatggtagtcattaaacaagtaggaaaataatgtaaaactaaactttaataaaggagaaaatgcaataagtatacatgactcatgaaaaaggaaagaaagaactaatgaaaagaatataatagaggcagttcaaatagaaaacacktagtaaaatgtatacataaactaaaaaattgaaatttgaaatatgaaatgttacattaagcatgaatacaaaaaatgctcattatcatagatacaaaattattaaaacaatatcagaaaatcactactagataacatattatggccaaatataataaccaagtgttattctaggaatgcagaggtggtataactggtaaatcaatcaattcaccaccttaacaaaataagggatgtcaacattgtcaaaaataccacaagtgtctgaaaaacaatgttaagcaaagtgagactatcacaaaagaaaagttcatggatgtttcttatttatgatggtgaacaacaatgaaaatgaatttagggtgttagaagttagaat

SEQ ID NO: 20464 - DNA, 550 bp, Homo sapiens
accacacagatatgtgttgtaaatcctatggtagtcattaaacaagtaggaaaataatgtaaaactaaactttaataaaggagaaaatgcaataagtatacatgactcatgaaaaaggaaagaaagaactaatgaaaagaatataatagaggcagttcaaatagaaaacacttagtaaaatgtatacataaactaaaaaattgaaatttgaaatatgaaatgttacattaagcatgaatacaaaaaatgctcattatcatagatacaaaattattaaaacaatatcagaaaatcactactagataacatattatggccaaatataataaccaagtgttattctaggaatgcagaggtggtataactggtaaatcaatcaattcaccaccttaacaaaataagggatgtcaacattgtcaaaaataccacaagtgtctgaaaaacaatgttaagcaaagtgagactatcacaaaagaaaagttcatggatgtttcttatttatgatggtsaacaacaatgaaaatgaatttagggtgttagaagttagaat

SEQ ID NO: 20465 - DNA, 537 bp, Homo sapiens
gcatccttaggaatgttgaccagattgtgggggacacaaacagttcctttcagtagaaagtaaatagattaagaaaccaaccagatggcttaacacactttttattctttctcttctttcccttttcttttcatggtataaaagactagtcaggtatgcattgcaaatgcagagatttacctcaccttactgctgcccaagattgcctcttatgaaatatcctgctgaataaatctttgactatctatcaacatggaatggtttgctttgccctctgcttgcgagagtcattcttggttctggtagggaattttcctgacacgtatcaaaatattatttgatatcttgatttttatgtgtgcataattgctcatctcgtgtgtataccattgctgaagctggtattgactttggcttttactcttaacaaaaaccatgctatagcttattctgtgtgtactctatattggccttttgtcaatagttaagaatataatttgcatttmaacgccactgtgtgtgtgagaatcagagttg

SEQ ID NO: 20466 - DNA, 566 bp, Homo sapiens
ttatcatatgttttaaatgatttaacagtgacattttattgtattttcttttttattgagattcatttcctatcttgtctaatattctcctattctcctgatagtttacacacaattatcacaaaacactagcagttccattaattttgtcttcactatcctcagagactttctgaggaaataataatattgtttcttttatctttatctctggagcttagtagggtaccttgcccattgtagttgagaaatgataaataggaatgactgaaaaaaaatacatttgaaarcagcttgaacataagaagaagcttgagatatttataatatggacacttgtttttttcctaaagcaaagctattactattagttagagattatgtagattttaatttctttatagaagacaaaataaaactagtagattaaaaaagttagttcctgccactattcttcccccaacaagatatctggggactgagtgccaaaatgagcaaagaaagattcaaggaccaagactggtggaatcctctcactccagtattcttagagtcttgcttaggct

SEQ ID NO: 20467 - DNA, 566 bp, Homo sapiens
ttatcatatgttttaaatgatttaacagtgacattttattgtattttcttttttattgagattcatttcctatcttgtctaatattctcctattctcctgatagtttacacacaattatcacaaaacactagcagttccattaattttgtcttcactatcctcagagactttctgaggaaataataatattgtttcttttatctttatctctggagcttagtagggtaccttgcccattgtagttgagaaatgataaataggaatgactgaaaaaaaatacatttgaaagcagcttgaacataagaagaagcttgagatatttataatatggacacttgtttttttcctaaagcaaagctattactattagttagagattatgtagattttaatttctttatagaagacaaaataaaactagtagattaaaaaagttagttyctgccactattcttcccccaacaagatatctggggactgagtgccaaaatgagcaaagaaagattcaaggaccaagactggtggaatcctctcactccagtattcttagagtcttgcttaggct

SEQ ID NO: 20468 - DNA, 496 bp, Homo sapiens
tctgtgctgtcatttattaattcagtcaaaatttgcttcaaaaacacatagttgtcagaatatgtaagtgccttacaagagtgcaatctataagtaaaataattctgaatattcatctgaaatagtttgaaaaggttttgaaaatctactgtctctcttatttcttgtaatcaacatatttctcaataggaaaattcaccatttgccatcaaaatgtattgtctgaaacttccactggaaccttcatatggcaaaatatttaggcattctgaggagatscaaagtttgctaagcagaataaatgtgttttaatatttaataattataaatgatatttggaaaattataaagatgttcttagttcaattaatagagtaagatttatatatctattaagagtgctgggccagacagggtggctcacgcctgtaaccccagcactttggaagcccgagacgggaggatcacctgaggtcaggagtttgagaccagcctg

SEQ ID NO: 20469 - DNA, 496 bp, Homo sapiens
tctgtgctgtcatttattaattcagtcaaaatttgcttcaaaaacacatagttgtcagaatatgtaagtgccttacaagagtgcaatctataagtaaaataattctgaatattcatctgaaatagtttgaaaaggttttgaaaatctactgtctctcttatttcttgtaatcaacatatttctcaataggaaaattcaccatttgccatcaaaatgtattgtctgaaacttccactggaaccttcatatggcaaaatatttaggcattctgaggagatgcaaagtttgytaagcagaataaatgtgttttaatatttaataattataaatgatatttggaaaattataaagatgttcttagttcaattaatagagtaagatttatatatctattaagagtgctgggccagacagggtggctcacgcctgtaaccccagcactttggaagcccgagacgggaggatcacctgaggtcaggagtttgagaccagcctg

SEQ ID NO: 20470 - DNA, 496 bp, Homo sapiens
tctgtgctgtcatttattaattcagtcaaaatttgcttcaaaaacacatagttgtcagaatatgtaagtgccttacaagagtgcaatctataagtaaaataattctgaatattcatctgaaatagtttgaaaaggttttgaaaatctactgtctctcttatttcttgtaatcaacatatttctcaataggaaaattcaccatttgccatcaaaatgtattgtctgaaacttccactggaaccttcatatggcaaaatatttaggcattctgaggagatgcaaagtttgctaagcagaataaatgtgttttaatatttaataattataaatgatatttggaaaattataaagatgttcttagttcaattaatagagtaagatttatatatctattaagagtgctgggccagacagggtggctcacgcctrtaaccccagcactttggaagcccgagacgggaggatcacctgaggtcaggagtttgagaccagcctg

SEQ ID NO: 20471 - DNA, 496 bp, Homo sapiens
tctgtgctgtcatttattaattcagtcaaaatttgcttcaaaaacacatagttgtcagaatatgtaagtgccttacaagagtgcaatctataagtaaaataattctgaatattcatctgaaatagtttgaaaaggttttgaaaatctactgtctctcttatttcttgtaatcaacatatttctcaataggaaaattcaccatttgccatcaaaatgtattgtctgaaacttccactggaaccttcatatggcaaaatatttaggcattctgaggagatgcaaagtttgctaagcagaataaatgtgttttaatatttaataattataaatgatatttggaaaattataaagatgttcttagttcaattaatagagtaagatttatatatctattaagagtgctgggccagacagggtggctcacgcctgtaaccccagcactttggaagcccgagrcgggaggatcacctgaggtcaggagtttgagaccagcctg

SEQ ID NO: 20472 - DNA, 651 bp, Homo sapiens
ccaagtgtacaacaggcaaatatccctgcttgcgtggagctgacagcaatgaaatgtaataagtaagtacatttgtataagcgaaggtaccagctcctatgggaaaaaacagagcaaggagaggggaattgggagtgcaggggctggagatggggtgtgatttcaaatagggcagtcagagtaatccttgttgagaaggtggccttggagcaaagccatgaaggagatgagagtgggctgtatgttaactgcagaaagcctctcagatggagggaatagtcaccagaggactctcagcatgtttgaagaaagcaaagaaagtcagtgtgaggccaggtgcagtggctcacacctgtaatcccaaycttttgggaggccgaggtgggtggatcacctgaggtcaggagttcaagaacagcctggcgaacatggcgaaaccccatttctactaaaaatacaaaaaaaaaaaaaaaaaaaacaaacaactaattagctgggcatggtagtgtgtgcctgtaatcctgtaatcccagctactcaggaggctgaggcaagagaatcgcttgaacccgggagaaggaggttgcagtgaaccaagatcttgccattgcactccagcctgggcaacagaactggattccatctcaaaaa

SEQ ID NO: 20473 - DNA, 651 bp, Homo sapiens
ccaagtgtacaacaggcaaatatccctgcttgcgtggagctgacagcaatgaaatgtaataagtaagtacatttgtataagcgaaggtaccagctcctatgggaaaaaacagagcaaggagaggggaattgggagtgcaggggctggagatggggtgtgatttcaaatagggcagtcagagtaatccttgttgagaaggtggccttggagcaaagccatgaaggagatgagagtgggctgtatgttaactgcagaaagcctctcagatggagggaatagtcaccagaggactctcagcatgtttgaagaaagcaaagaaagtcagtgtgaggccaggtgcagtggctcacacctgtaatcccaatcttttgggaggccgaggygggtggatcacctgaggtcaggagttcaagaacagcctggcgaacatggcgaaaccccatttctactaaaaatacaaaaaaaaaaaaaaaaaaaacaaacaactaattagctgggcatggtagtgtgtgcctgtaatcctgtaatcccagctactcaggaggctgaggcaagagaatcgcttgaacccgggagaaggaggttgcagtgaaccaagatcttgccattgcactccagcctgggcaacagaactggattccatctcaaaaa

SEQ ID NO: 20474 - DNA, 651 bp, Homo sapiens
ccaagtgtacaacaggcaaatatccctgcttgcgtggagctgacagcaatgaaatgtaataagtaagtacatttgtataagcgaaggtaccagctcctatgggaaaaaacagagcaaggagaggggaattgggagtgcaggggctggagatggggtgtgatttcaaatagggcagtcagagtaatccttgttgagaaggtggccttggagcaaagccatgaaggagatgagagtgggctgtatgttaactgcagaaagcctctcagatggagggaatagtcaccagaggactctcagcatgtttgaagaaagcaaagaaagtcagtgtgaggccaggtgcagtggctcacacctgtaatcccaatcttttgggaggccgaggtgggtggatcacctgaggtcaggagttcaagaacagcctggcgaacatggcgaaaccccatttctactaaaaatacaaaaaaaaaaaaaaaaaaaacaaacaactaattagctgggcatggtagtgtgtgcctgtaatcctgtaatcccagctactcaggaggctgaggcaagagaatcgcttgaacccgggagaaggagrttgcagtgaaccaagatcttgccattgcactccagcctgggcaacagaactggattccatctcaaaaa

SEQ ID NO: 20475 - DNA, 627 bp, Homo sapiens
ggtgatctttagtaagttgtattgctttccaaagaagtgataggaattatacttgccaccccaacagtgaaagaattgcaatttaatttcaatgtaaaagaggatgctactgttgctattatattttctattataatgaaaaccgttaaagatttaaatcaagctggattgtctttcaggagctgctgttaaatgaacaccttgatattttcgttcttggagagaaatgagccaaggaggaagaccatctaaaaaaaaccactagacaatttgtgctcactggagtggtctctgctgggcaaaaggtctttagaatgaytcgtggattttctggcaagtggcaaaccatacaagtgctatgtcaggccagggagacaggtgcagccctgtcagtgtcaaagaagaacactggtagcagaagagctaagagtgaatgaaaattgaattatctttatttctaggacttgtctattgagaaacaacagtgctggcaaccatttactaccaacaagaggcagttccaagagaagaatataaaatatgctctgctcaatcccacgaaactcagagtgtctcacaatggccaatttcttatttttaccctgtccagagacaaggaaggatgca

SEQ ID NO: 20476 - DNA, 758 bp, Homo sapiens
  misc_feature (1)...(758): n = A,T,C or G
cctccgtatttcctcatgggttgcagctatgcttcctctcaatgttttgaaagtcagtgtaggctcctctcccacttgagtgctcactgcagatcttggcttggtgcatccaggctgcacaccatagttctgaaatgatcataggctttatgttacttccccagcttggaagcagcagaggagaccctgtggctcaacgtcttttcttgtcacttggggctccattgcagaaagatgcagaactgcaatcaattagcatgatcagcctgrcatggggcagctgcactgtgagcccacgctggggggatcctgtctggtgactagcagagaatgtgggtaggacccgtgggagacagactggcctcctctcattnnnnnnnnnnnnnnnnnnnnnnnnnnnnnnnnnnnnnnnnnnnnnnnnnnnnnnnnnnnnnnnnnnnnnnnnnnnnnnnnnnnnnnnnnnnnnnnnnnnntcagacctcggagtctttgctccttccctagttcaagggtaaacagggaagttaaactggagaggcagtggcagagggacttttggttgcccctgggagctccatctctgagaaatgtggagctgctgctactgggagtgttcagccagagggtgaagcagctgcactgcttgcctgagctagaggctctgcttgttggggaacagggggtcaagggcccatagcagcaagaaatggggcttttctctaaatggtggctgtggtgtgctgtacgcatggggagaa

SEQ ID NO: 20477 - DNA, 758 bp, Homo sapiens
  misc_feature (1)...(758): n = A,T,C or G
cctccgtatttcctcatgggttgcagctatgcttcctctcaatgttttgaaagtcagtgtaggctcctctcccacttgagtgctcactgcagatcttggcttggtgcatccaggctgcacaccatagttctgaaatgatcataggctttatgttacttccccagcttggaagcagcagaggagaccctgtggctcaacgtcttttcttgtcacttggggctccattgcagaaagatgcagaactgcaatcaattagcatgatcagcctgacatggggcagctgcactgtgagcccacgctggggggatcctgtctggtgactagcagagaatgtgggtaggacccgtgggagacagactggcctcctctcmttnnnnnnnnnnnnnnnnnnnnnnnnnnnnnnnnnnnnnnnnnnnnnnnnnnnnnnnnnnnnnnnnnnnnnnnnnnnnnnnnnnnnnnnnnnnnnnnnnnnntcagacctcggagtctttgctccttccctagttcaagggtaaacagggaagttaaactggagaggcagtggcagagggacttttggttgcccctgggagctccatctctgagaaatgtggagctgctgctactgggagtgttcagccagagggtgaagcagctgcactgcttgcctgagctagaggctctgcttgttggggaacagggggtcaagggcccatagcagcaagaaatggggcttttctctaaatggtggctgtggtgtgctgtacgcatggggagaa

SEQ ID NO: 20478 - DNA, 583 bp, Homo sapiens
cattctcaattctatattctgccagttttgttaagatcacctgaatgatacaaaagttactaatttatactgacttaaaatcaatcacacaagcacaccattctatggatcaggactgcaagattggatctgtaatgaacaaaattagcctcgtgaaatatttttcagtaagcacttttaacttatcctaattttctcatactataatggaaacatttgagggcattccagagaaatactttcatttctttgggataaacaattaaaataaaaaagccagagaatctattggggagaaaatatatcaatgagtaagctttcacttctattatgggaaatagcttgaagcatatggcagaagtaatggcaagtggcttgattttcctctgtctttaaatacaactttttactttaaagttaacattataytgaaagcacaatttttgtaagcctctgtaattactaaagatatcttatttgaaaggacagtaaaattttaaaattagatgcacatacatcatcacaaatttggaaaaatttggggggaaataatggaattaaaatatacagtgcatactgagaa

SEQ ID NO: 20479 - DNA, 1123 bp, Homo sapiens
tctctgtttcttttaccagaatggatcactgttctcyatctggggtctacgcccctgcactgcagtctggaaagttccttcaagcagaaacctgggttggatatatggttcattatatgtttttctttctttcaaggatcatagccttgcctttctgttgcccaatttttttttaagtgttgtcttgcatattttattccattttaagatagtattctgtggcaaggtgggcaagtccaataaaagttactccatttctggaagtggaagttgaaacatatatgttgttggatgttatttctaacattgtgagtcactacaactctcatttacataaaatctcagtgaggatttatctaaaaaacggatgtccaatcttttggcttccctgggccacattggaagaaaaattgtcttcggccacacataaaataacactaatgatagctgatgagctaaaaaaaaaaatgcaaacaagtctcatgatgttttaagaaaatttaggaatttgtgttgagcaacattcaaagccttcctccacattgatccaaaggatctgttccccttttttgactaaaaccttattctcattacctttaaaaattacagcaaattttatttcactacatcttggtaagtggctgagtgctgtttgatgtgcatatctcttctctgttccagttcattcaagttgatctttccttgtttatttgaaatgataactgagtatggcctttgagcataaaaatagcaaggacaaggcataaaaataaatgcaaatgaaagaaaataaagctctcatgagagacttgattctacaaaaacaaaattacataaactccacataacatgtaagagaatacacagttgaaataaaatagttcaaagagaattctgtttttttcttgaatcaactttcagtctgacatatttataatgcctgcaaaaggcagcagcgggtattagaatggtaaattaaattaaatgttgtgttctagtgcgggtattttatttatgtatttgttcattcattcattcattcacacattcagtttaaaaataaactcacttagcatggcaggtgtagactaagtatcaattcagaaattgcaagtttatttca

SEQ ID NO: 20480 - DNA, 1123 bp, Homo sapiens
tctctgtttcttttaccagaatggatcactgttctccatctggggtctacgcccctgcactgcagtctggaaagttccttcaagcagaaacctgggttggatatatggttcattatatgtttttctttctttcaaggrtcatagccttgcctttctgttgcccaatttttttttaagtgttgtcttgcatattttattccattttaagatagtattctgtggcaaggtgggcaagtccaataaaagttactccatttctggaagtggaagttgaaacatatatgttgttggatgttatttctaacattgtgagtcactacaactctcatttacataaaatctcagtgaggatttatctaaaaaacggatgtccaatcttttggcttccctgggccacattggaagaaaaattgtcttcggccacacataaaataacactaatgatagctgatgagctaaaaaaaaaaatgcaaacaagtctcatgatgttttaagaaaatttaggaatttgtgttgagcaacattcaaagccttcctccacattgatccaaaggatctgttccccttttttgactaaaaccttattctcattacctttaaaaattacagcaaattttatttcactacatcttggtaagtggctgagtgctgtttgatgtgcatatctcttctctgttccagttcattcaagttgatctttccttgtttatttgaaatgataactgagtatggcctttgagcataaaaatagcaaggacaaggcataaaaataaatgcaaatgaaagaaaataaagctctcatgagagacttgattctacaaaaacaaaattacataaactccacataacatgtaagagaatacacagttgaaataaaatagttcaaagagaattctgtttttttcttgaatcaactttcagtctgacatatttataatgcctgcaaaaggcagcagcgggtattagaatggtaaattaaattaaatgttgtgttctagtgcgggtattttatttatgtatttgttcattcattcattcattcacacattcagtttaaaaataaactcacttagcatggcaggtgtagactaagtatcaattcagaaattgcaagtttatttca

SEQ ID NO: 20481 - DNA, 1123 bp, Homo sapiens
tctctgtttcttttaccagaatggatcactgttctccatctggggtctacgcccctgcactgcagtctggaaagttccttcaagcagaaacctgggttggatatatggttcattatatgtttttctttctttcaaggatcatagccttgcctttctgttgcccaatttttttttaagtgttgtcttgcatattttattccattttaagatagtattctgtggcaaggtgggcaagtccaataaaagttactccatttctggaagtggaagttgaaacatatatgttgttggatgttatttctaacattgtgagtcactacaactctcatttacataaaatctcagtgaggatttatctaaaaaacggatgtccaatcttttggcttccctgggccacattggaagaaaaattgtcttcggccacacataaaataacactaatgatagctgatgagctaaaaaaaaaaatgcaaacaagtctcatgatgttttaagaaaatttaggaatttgtgttgagcaacattcaaagccttcctccacattgatccaaaggatctgttccccttttttgactaaaaccttattctcattacctttaaaaattacagcaaattttatttcactacatcttggtaagtggctgagtgctgtttgatgtgcatatctcttctctgttccagttcattcaagttgatctttccttgtttatttgaaatgataactgagtatggcctttgagcataaaaatagcaaggacaaggcataaaaataaatgcaaatgaaagaaaataaagctctcatgagagacttgattctacaaaaacaaaattacataaactccacataacatgtaagagaatacacagttgaaataaaatagttcaaagagaattctgtttttttcttgaatcaactttcagtctgacatatttataatgcctgcaaaaggcagcagmgggtattagaatggtaaattaaattaaatgttgtgttctagtgcgggtattttatttatgtatttgttcattcattcattcattcacacattcagtttaaaaataaactcacttagcatggcaggtgtagactaagtatcaattcagaaattgcaagtttatttca

SEQ ID NO: 20482 - DNA, 1123 bp, Homo sapiens
tctctgtttcttttaccagaatggatcactgttctccatctggggtctacgcccctgcactgcagtctggaaagttccttcaagcagaaacctgggttggatatatggttcattatatgtttttctttctttcaaggatcatagccttgcctttctgttgcccaatttttttttaagtgttgtcttgcatattttattccattttaagatagtattctgtggcaaggtgggcaagtccaataaaagttactccatttctggaagtggaagttgaaacatatatgttgttggatgttatttctaacattgtgagtcactacaactctcatttacataaaatctcagtgaggatttatctaaaaaacggatgtccaatcttttggcttccctgggccacattggaagaaaaattgtcttcggccacacataaaataacactaatgatagctgatgagctaaaaaaaaaaatgcaaacaagtctcatgatgttttaagaaaatttaggaatttgtgttgagcaacattcaaagccttcctccacattgatccaaaggatctgttccccttttttgactaaaaccttattctcattacctttaaaaattacagcaaattttatttcactacatcttggtaagtggctgagtgctgtttgatgtgcatatctcttctctgttccagttcattcaagttgatctttccttgtttatttgaaatgataactgagtatggcctttgagcataaaaatagcaaggacaaggcataaaaataaatgcaaatgaaagaaaataaagctctcatgagagacttgattctacaaaaacaaaattacataaactccacataacatgtaagagaatacacagttgaaataaaatagttcaaagagaattctgtttttttcttgaatcaactttcagtctgacatatttataatgcctgcaaaaggcagcagcgggtattagaatggtaaattaaattaaatgttgtgttctagtgcgggtattttatttatgtatttgttcattcattcattcattcacacattcagtttaaaaataaactcacttagcatggcaggtgtagactaagtatcawttcagaaattgcaagtttatttca

SEQ ID NO: 20483 - DNA, 1288 bp, Homo sapiens
tatttatataaaatatatattatattcttatttatataaaaatatatattatattcttatttatatattctttcttcttaaagaatttacatattcttatttatatattaatatatatatatatattcttcattcaaatgcacagcaactttatgaagtcagttttaaaactgtttgtagcttcgacacaaggagactgaatcagagtacgaagtaccttgttcaaactcctaccaccagaattccaacctgagagtctaacttaaagcttgacatgtaaacactacctacgtgtggaacacagccaggtctgttcatcccaggccttatgtatatctcatgttctctgaattatttctttctaaggataatggtttgtttttcatagaattttatactttgtttgatattttccgtaggcactacatcatgaaaacaggcatcaaaattctcttgctgctataactcattccaccaaagcctttccttgactgtataactcatcaaagaaactaatgtgagaaaagttattaacagcttataatcggataacctataatttccctactttgccctcacttctgtgttacatttaaaaagagcttttacctaaaccaaaacaaaatagctatggaaaagttaggctccataataggactgagggtgaatatagttctgactctgctgatctcaaattacaccatcttcacaaacatctctgctatctatgaagaaggtctcctaaaagcattcaacttatgccctctaaggggacataacaccattccatgatgtcgcacctggattttttcctgtaccagaatacccttcttatctgtagcgagctaacaccaccctctgaatgccatgccattcttctgaggaataattctttccacactctgcactacaagctttcagtcagggtaactatggatttatctgatactgcctgcctagccaaccagattgggattggtgatcagcctacatctcctcatcaatcagaaccttgacctaagatgttggaattagggtccattatgagccactcttaatcccattctgtttgcaaagctggaagatgtgtgttttcrtagctatgtggtcacaatattataatcatccaatgggttcctcctgcccactgcacagaaaaaaaaaaaaattcactgagactacggtattgcagtacagaaagtgtttaattaacacagagctggtcaagtgtttggactggagttattactcaaatcagttccccaagaactcagaggctagggttttt

SEQ ID NO: 20484 - DNA, 524 bp, Homo sapiens
ggtacagcttgctgatagatactggtggaactgaactaaaaatgttcctcatacttttctcctcctctagatagtttttactattatttaatgcctgcaattatagcccacattaagtttaaaaatataaggtatacccttgtataatcataaattgtagacaattgagtatcactaaattaaaacagcaactatatatttgcaaacaattacatcaacagcatagggcactattaatgacttayggagcagccaacaatagtggcacaattactgccttctcaatagactttcttttttatttttaatttttttatttcaataggttttcggggaacacgtggtgtttagttacatgaatacattttttagtggtgattaaagagtttttggtgcacccatcacccaagcagtgaacactgtacccaatgtgtagtctattatcccttgccaccccccaccctttcccccaagtccccaaagtccaatgtatcattcttatgcctttgtgtcctcatagctta

SEQ ID NO: 20485 - DNA, 501 bp, Homo sapiens
ctgtgtccccacccaaatctcatcttgaattgtacccccataattcccacgtgttgtgggagggacccggtggaagataatttgaatcatgggggtggtttccccatactgttctcatgatagtgartaagtctcatcagatctgatggttttatcaggggtttccgcttttgcatctttctcattttctcttgccacagtcacgttagaagtgcctctcacctcccgccatgattccaaggcctccccaaccatgtggaactgtaagtccaattaaacctctttttcttcccagtctcaggtatgtctttttcagcagcatgaaaatggaataatacacagtactattcattatttcaattcttttaaaattattactattttatttttttaattggcagataaaattttatgtattcattcacacacaacatgatgttttgaagtatacatacattgtggattaattaattttagctaatcaacttatggattacctca

SEQ ID NO: 20486 - DNA, 501 bp, Homo sapiens
ctgtgtccccacccaaatctcatcttgaattgtacccccataattcccacgtgttgtgggagggacccggtggaagataatttgaatcatgggggtggtttccccatactgttctcatgatagtgagtaagtctcatcagatctgatggttttatcaggggtttccgcttttgcatctttctcattttctcttgccacagtcacgttagaagtgcctctcacctcccgccatgattccaaggcctccccaaccatrtggaactgtaagtccaattaaacctctttttcttcccagtctcaggtatgtctttttcagcagcatgaaaatggaataatacacagtactattcattatttcaattcttttaaaattattactattttatttttttaattggcagataaaattttatgtattcattcacacacaacatgatgttttgaagtatacatacattgtggattaattaattttagctaatcaacttatggattacctca

SEQ ID NO: 20487 - DNA, 543 bp, Homo sapiens
agaccctgtctccaaaaatgaaaaaacaaaacaagagtccaatatggaagtcagtcagrgggcctgaattcttagactcaaatgtgcttctgacagacacgctgggtgagtctggtcaacccacttaccctctctgggtttcaattttctcattagactgccttttgtctacattttcttccactgagtctatttgacaccacaggtaataagtgtgaactgcctgtattggtttttgttgttgttgttgttgttttgagacggagtctcgctctgccgcccaggctggagtgcagtcgtgcgatctcggctcgctgcaagctctgcctcccgggttcacgccattctcctgcttcagcctcccgagtagctgggattataggcacccgccatcacgcccggctaatttttttgtaattttagtagagacggggtttcactagttagccaggatggtctcgatctcctgacctcgtgatccgccctcctcggcctcccaaagtgctgggattacaggcgtgagccaccgtgccgggccaactg

SEQ ID NO: 20488 - DNA, 581 bp, Homo sapiens
tcatctctaaggctaactattgcagtttcaacatacttttggtatggtaagagctcctcataatggcagttagcttggtaattgataagctgtgtggctgaaaacagtaattattaacacaatattcaaatttgtagattcaccctaggtaatagcagatcacaaaacttagccaggtgtttmcctcaggccctcacacactcacctttcattattcttgtcttcttgaccattctttattcctcattaaggccacctcacaaatgaaactcacccttgagttaggtaaaaacgctcataagcataattttcatccctgtgtttctgtgagtccaaagagttttgtaaagactgaattaagtggagaaggttttatgagccaccataatcttttctctacttctactccaggctacattaaaatctacattccaaaagcataagtactgaatgtagtttaaaatatttcctgtataagcaagccctctcaccatttaactctaactctaagacactccctcatttatgcctggattatagatgtcaaccattgaatattgcctgatattttctgtctatca

SEQ ID NO: 20489 - DNA, 581 bp, Homo sapiens
tcatctctaaggctaactattgcagtttcaacatacttttggtatggtaagagctcctcataatggcagttagcttggtaattgataagctgtgtggctgaaaacagtaattattaacacaatattcaaatttgtagattcaccctaggtaatagcagatcacaaaacttagccaggtgtttccctcaggccctcacacactcacctttcattattcttgtcttcttgaccattctttattcctcattaaggccaccycacaaatgaaactcacccttgagttaggtaaaaacgctcataagcataattttcatccctgtgtttctgtgagtccaaagagttttgtaaagactgaattaagtggagaaggttttatgagccaccataatcttttctctacttctactccaggctacattaaaatctacattccaaaagcataagtactgaatgtagtttaaaatatttcctgtataagcaagccctctcaccatttaactctaactctaagacactccctcatttatgcctggattatagatgtcaaccattgaatattgcctgatattttctgtctatca

SEQ ID NO: 20490 - DNA, 581 bp, Homo sapiens
tcatctctaaggctaactattgcagtttcaacatacttttggtatggtaagagctcctcataatggcagttagcttggtaattgataagctgtgtggctgaaaacagtaattattaacacaatattcaaatttgtagattcaccctaggtaatagcagatcacaaaacttagccaggtgtttccctcaggccctcacacactcacctttcattattcttgtcttcttgaccattctttattcctcattaaggccacctcacaaatgaaactcacccttgagttaggtaaaaacgctcataagcataattttcatccctgtgtttctgtgagtccaaagagttttgtaaagactgaattaagtggagaaggttttatgagccaccataatcttttctctacttctactccagkctacattaaaatctacattccaaaagcataagtactgaatgtagtttaaaatatttcctgtataagcaagccctctcaccatttaactctaactctaagacactccctcatttatgcctggattatagatgtcaaccattgaatattgcctgatattttctgtctatca

SEQ ID NO: 20491 - DNA, 539 bp, Homo sapiens
taatataatttaaaacatgttagtgatccttccggtgactcactgatgccttgcctcaccacagtcatatatttattatttaggttggtgcaaaagcaatttttgccattaaaagtgatggcactatcaaagctaacatttttggcaatggaatgatataccaaaacttctaattttaccatgttatcatckttcttatttatacatggtctgccagcatgtttaattgttagactcttcaagaacttttggaggaagctttttgtatttgacttgtcaaaaggcacattctgggaaattgatctgggccctaaataggcattcagcaagttattggcaaaataagtctgcttgtcaaactgtgggtgacctactagtgagttgcagccaagacttaataaagtaaatttgaatagaattggatagagaatatcagtgtacagacatagtaaggttacgtattgtgtaaaatttctttcaattatattcattaattcaacaaatattgagcacctactgcataccaagcactgttctag

SEQ ID NO: 20492 - DNA, 539 bp, Homo sapiens
taatataatttaaaacatgttagtgatccttccggtgactcactgatgccttgcctcaccacagtcatatatttattatttaggttggtgcaaaagcaatttttgccattaaaagtgatggcactatcaaagctaacatttttggcaatggaatgatataccaaaacttctaattttaccatgttatcatctttcttatttatacatggtctgccagcatgtttaattgttagactcttcaagaacttttggaggaagctttttgtatttgacttgtcaaaaggcacattctgggaaattgatctgggccctaaataggcattcagcaagttattggcaaaataagtctgcttgtcaaactgtgggtgacctactagtgagttgcagccaagacttaataaagtaaatttgaatagaattggatagagaatatcagtgtacagacrtagtaaggttacgtattgtgtaaaatttctttcaattatattcattaattcaacaaatattgagcacctactgcataccaagcactgttctag

SEQ ID NO: 20493 - DNA, 599 bp, Homo sapiens
gaaagttcagtgggtggggaggagggggaagacaacaacatttgaaaacacggagatgtgaaaaagtctggtctgtttgggcattgattctggtgtgatgtgactgtagaagtatgcagggatgcaggcgaaacaactagaaggaaaaattgggatcagrtaatgaaacatcttgaattccatgctcaactgttcagaacattctgtaggaaactgggggttgttaaagtgtctgacttgcatttatgggatgatatgtcctgacatgcattttaataaaacaatgattttgatttagtaagaaaattattcctctttagcgattaaagagtatattaaagaggcaaaagaatgaggaaaggagaccttttagaagacaaatgatgaagacttttacttgtggtatggcagaaaaaatggagactggtagataactttgagatctacatctgtatagaagctgccagattaagtgattgattataggaagtacaggagagggagaagtcaaagtagattgcttaatccagagtcataggacaagtaatggtgttattggtagctgagaaaacacaaggagagttaaaaagaaagttata

SEQ ID NO: 20494 - DNA, 333 bp, Homo sapiens
tcccttccttccttccttgtagaaattgataaactaatactaaaatgcatgtggagatgcaaggggcctggaatagccaagcagcagcagaacgttgtctgttctactctcaatgggctttgggtagtttccacaaatagtgctgctgtgactacccctgtgtgtgtctccaggtgaacatatgtatgcttttctgctgtgtgtacttcataaaaaaagaacaaaggccaggcacagtggcttatgcctataatcccaacactttgggaggctgaggtgggaggagctcttgagcccaggaggtcgaggctacggwgagctgtgtttacatca

SEQ ID NO: 20495 - DNA, 578 bp, Homo sapiens
tgcccccctaaggccagcccttcacctcaagtctgaatctctgcggtagctcccagctgctatctccatgtcttagtcttccggtatattctatacacacagcagggggccccagcagtactttgctattgttttccatgttaacaagttaaagaccccggagtggstcttaatgcactttgaatgctccttattttccaccagcactggtactcaccttcaggatcctgggccgcctccagacctaggggattatttctccaaagaggcatggtcaccctgttcaacttctcatcaaaatggttgtactgtggccacctctttcagcagtttggtgttttcagcactgagttctgaaatcctcgaatctgcctttggagctctaattctgaggcctctctcacaggccctttccctcagtctgaaatttctccattagtattctctgtctgaaaattacttccaaaagaagcttctagctttacacagcacctcataccctacctgtgaaaccagtgaagctctactcctgacaggagctaggatgcaacaatctattccatcctggaaacttataa

SEQ ID NO: 20496 - DNA, 540 bp, Homo sapiens
aacagaaggaatgcagtgatataaaactagttcaagaataggatgtgatttttaaaaaacaacagctttactgaactacacataccataagattcatccctttaaagtgtacaattcagtggttctttagtccattagtaaagatgggcaaccatcaccactatctaattccagaacattcatcaccaaagaaaaccagtgttcttcagtcaccctccattcctctctctccccggtacaaatctatttttgtccttatggatttgcctataatgggcaattcatataaatggaataatataatakgtattgagttctttcacttgccataatgttttcagggttcatccatcttgcagcatgaattatcactttatttcttttttactgctgaaccatatttcattgtgtagatgtgccacattttgttatcccattatcagttgatggacatttggaaacatatttggctattaggaataatgttgctatgaacgtttgtgtacaagtttttatgtggctgtaggttttccattctcg

SEQ ID NO: 20497 - DNA, 664 bp, Homo sapiens
tcctaatgcatgctctgccttgttcagattccattatcctgttagaaatgcttgttccccagtgccacaaagaaatcacactygaacataaacttaattctctcagcaaggccatttttactttctgcagaaagggtgctcctcgtgttgtgggaagtcaggaaccctgaacggagggaccagctgaagccatggcagaagaacatggattgtgaagatttcatggacatttattagtcccccaaattaatacttgtataatttcttatgtctgtctttactgcagtctctgaacataaattgtgaagatttcatggacacttatcacttccccaatcaatacccttgtgatttcctatgtgtgtctttaatctattaatcctgtcatctcataagctgaggaggatgtatgtcgcctcaggaccctgtgatgattgcattaactgcacaaattgtagaaccatgtgtgtttgaaaaatatgaaatctgggcacgttgaaaaaggaacaggataacagcaatgttcagggaacaagagagataaccttaaactctgaccgccggtgagccaggcagaacagagccatatttctcttctttcaaaagcaaataggagaaatattgctgaattctttttctcagcaaggaacatccctgagaaaga

SEQ ID NO: 20498 - DNA, 527 bp, Homo sapiens
tgtcctcataccactgtctccaagcacaggacacaggagccaccagaggccccaccagagccccatccttacattgcctccaagcatgggctacaggggccaccatgggggccccacagcgatgccagctctgggcacagctcgcctgccagtcaggccagcaagctgatgtctggaccacaccatccctctacccamttaattctgctctgtgttcaagtcttacataagtgattctgacaggctagtcattttcagaacccttgctgccaggggatgatttttcagctttctagtatcagcaggacaggaaaagacacagacgggagattggaatggatgttaaatgattgaatctaccttatctgccatctcatctcaaaataacaacagcttaattttagtgaggtgagtaacaaatgttctgggaatgcttgctgcaagtatctatctatcttatctatctccatcatccatccatccatccatccatccatccacccatccacccatccacccatccaccc

SEQ ID NO: 20499 - DNA, 1028 bp, Homo sapiens
atatcagcctacagcattagagaagctaataaatttaagaattcaacgtacctaagatcaaaggcatctaattgctgaaatacaagagaccaagcatctaattcataactgtacagtctacgtaatttttactggccagctcttctcccaggccctgagtctcacagaggcaggggttgtgctgggctgtgctgatcttgtccaccacggtagctgctagctaccctggggagctgctmgctccccaggacccagaacatggcacgttgtttgtcaggaaacatatttgcgacacatatgctcaatattcattcagcacacacacagatggatttcaaagtcatctcaagaacacgaagtgacctgcatttgaaataatccttaggagacttgtgaattgactagaatcgcctcagaaaaaagtactaagttataaacaacaaaaacttatgaatcactaactactagattcaagaaagacttttctagactcctgactgagaatctcggtacaaggcaatgagagctttctggttttttcctgcagaacgtctacatgaaagctgtagcaccaaaaataatgctgattggctgcagggttttgaaaagtgggctaatataaatttgttctaaatcaatatcctttcatgcacacataaaagcaagtttgaagagcataatgcatataaactggtgaaaaattctaaatcaataaaacttgcctcttagccctatcagaaaaaaacagacgtagtgggaacgatgacatttgttacacagagttgtaaaaaatgcctttcaagttagaaatagaagatgcgatttctgctttctaaaacttacagcaagactgaaatatggagtgggctaacaaagttgagaatttagtaaaagagaagcgtacatcattttgggaaaggggagaattctatacaatgagcactatctacatttttagggattaaattgctaaacttaaactgagacaagataaatcaagttaatctcaggatagttttaatggaaga

SEQ ID NO: 20500 - DNA, 1028 bp, Homo sapiens
atatcagcctacagcattagagaagctaataaatttaagaattcaacgtacctaagatcaaaggcatctaattgctgaaatacaagagaccaagcatctaattcataactgtacagtctacgtaatttttactggccagctcttctcccaggccctgagtctcacagaggcaggggttgtgctgggctgtgctgatcttgtccaccacggtagctgctagctaccctggggagctgctagctccccaggacccagaacatggcacgttgtttgtcaggaaacatatttgcgacacatatgctcaatattcattcagcacacacacagatggatttcaaagtcatckcaagaacacgaagtgacctgcatttgaaataatccttaggagacttgtgaattgactagaatcgcctcagaaaaaagtactaagttataaacaacaaaaacttatgaatcactaactactagattcaagaaagacttttctagactcctgactgagaatctcggtacaaggcaatgagagctttctggttttttcctgcagaacgtctacatgaaagctgtagcaccaaaaataatgctgattggctgcagggttttgaaaagtgggctaatataaatttgttctaaatcaatatcctttcatgcacacataaaagcaagtttgaagagcataatgcatataaactggtgaaaaattctaaatcaataaaacttgcctcttagccctatcagaaaaaaacagacgtagtgggaacgatgacatttgttacacagagttgtaaaaaatgcctttcaagttagaaatagaagatgcgatttctgctttctaaaacttacagcaagactgaaatatggagtgggctaacaaagttgagaatttagtaaaagagaagcgtacatcattttgggaaaggggagaattctatacaatgagcactatctacatttttagggattaaattgctaaacttaaactgagacaagataaatcaagttaatctcaggatagttttaatggaaga

SEQ ID NO: 20501 - DNA, 660 bp, Homo sapiens
ggcccatagtctaacttggtccatgatctagactaatgatctgactagcaggaaaatagaagtggctttgacagatagttggagggatgctttcaaatctcatacgacaaggcaaatatcaaaaactagtcttgttattaggaaaaaacttcagaggagccctggtgatatttcaaaggtcagagatgttttaggttatgagcacttgatctcacaaagatgatgaatgtctggaggaaatgtatggtttactgcatcccttaaatgtttgaatgagccttaaagctgtaacgaactacacttttgcgtgttcccttatggagtgtgtgagaacctcccattaatgaaaacagcacacgttgatgggaaacatagaacagaccccgaaatgttgtaagtcactgcttggccttgatgctttctttttcatttctgtctctggctcatttagtgtacatttctctttcacatgccgggaagtctcctaagatgcatcccagattcacagaggagagcacrctgtgtaagtttggaggaatgtcatgtgtggatacccttcggttcatgtcacatgacatcttaaagatgtatagagccagaaaaggttgcatggatgctctgcttgtattccttgtgagcaggctggccatctgaagatca

SEQ ID NO: 20502 - DNA, 660 bp, Homo sapiens
ggcccatagtctaacttggtccatgatctagactaatgatctgactagcaggaaaatagaagtggctttgacagatagttggagggatgctttcaaatctcatacgacaaggcaaatatcaaaaactagtcttgttattaggaaaaaacttcagaggagccctggtgatatttcaaaggtcagagatgttttaggttatgagcacttgatctcacaaagatgatgaatgtctggaggaaatgtatggtttactgcatcccttaaatgtttgaatgagccttaaagctgtaacgaactacacttttgcgtgttcccttatggagtgtgtgagaacctcccattaatgaaaacagcacacgttgatgggaaacatagaacagaccccgaaatgttgtaagtcactgcttggccttgatgctttctttttcatttctgtctctggctcatttagtgtacatttctctttcacatgccgggaagtctcctaagatgcatcccagattcacagaggagagcacgctgtgtaagtttggaggaatgtcatgtgtrgatacccttcggttcatgtcacatgacatcttaaagatgtatagagccagaaaaggttgcatggatgctctgcttgtattccttgtgagcaggctggccatctgaagatca

SEQ ID NO: 20503 - DNA, 572 bp, Homo sapiens
ccattctagctatgtagctaaatctcattgctttaatttttgcttccctcatgacaaatgatactcagaatccctgtacttatttacagaaactcctgtattttctttggccaagtatctgttgaaatctttagctcatttatttgaattgattgtcttcttactatttaatttcttattattatacaacaaatttcttcttactacttaataatttattattaaattttgacatttgttatatgatttacatattatgaatataagttgtttatcagatatatactttgcaatatattctcctagtctatggcttgtctcttcattttgttaatattatctttcaaagacagaagttttaaattttgattaggtctaacatatcaaytgtataagctatatttaaatatgacatcagttgatacattgtgagttaatttttgtatattgtttaaaatatgcatccaatttctttctcttttctttccttacttcttcttctccctctcctcccctacttctcttttttatacatatggatatctaattattccaggaacactttttaaaaa

SEQ ID NO: 20504 - DNA, 530 bp, Homo sapiens
attctaaatcaaacgcaaacagcagaatcatatggcatagacacttagcaaatctgcaaggaagaataaagacaaagttgtaaaaacaatatttttttaaaagcttattgtatgcataatttataattcatgggacttagtctttgggagagaatacacacgcagatttatgtagctacagattgaatgtaaattcaatacccagtcccttaaggagctgagattgtttgtctcctaaccacagaagttttgtattctagttattttccagcactaactaaatacgygaacttggaaaagtcacactgaatatctgggacggaatttcctgatcttaatagtcagaaatatacctaaactattcctagggtcccttccagtttaatggtggatattaattatttgaaaacattttagagaaccttaactgaagaaagaactaagggcatcttctgattggtagactctcctgttacaagagatgttcaatgtattttggaagacaagaaagtttaccattttgtttccaa

SEQ ID NO: 20505 - DNA, 530 bp, Homo sapiens
attctaaatcaaacgcaaacagcagaatcatatggcatagacacttagcaaatctgcaaggaagaataaagacaaagttgtaaaaacaatatttttttaaaagcttattgtatgcataatttataattcatgggacttagtctttgggagagaatacacacgcagatttatgtagctacagattgaatgtaaattcaatacccagtcccttaaggagctgagattgtttgtctcctaaccacagaagttttgtattctagttattttccagcactaactaaatacgcgaacttggaaaagtcacactgaatatctgggmcggaatttcctgatcttaatagtcagaaatatacctaaactattcctagggtcccttccagtttaatggtggatattaattatttgaaaacattttagagaaccttaactgaagaaagaactaagggcatcttctgattggtagactctcctgttacaagagatgttcaatgtattttggaagacaagaaagtttaccattttgtttccaa

SEQ ID NO: 20506 - DNA, 530 bp, Homo sapiens
attctaaatcaaacgcaaacagcagaatcatatggcatagacacttagcaaatctgcaaggaagaataaagacaaagttgtaaaaacaatatttttttaaaagcttattgtatgcataatttataattcatgggacttagtctttgggagagaatacacacgcagatttatgtagctacagattgaatgtaaattcaatacccagtcccttaaggagctgagattgtttgtctcctaaccacagaagttttgtattctagttattttccagcactaactaaatacgcgaacttggaaaagtcacactgaatatctgggacggaatttcctgatctkaatagtcagaaatatacctaaactattcctagggtcccttccagtttaatggtggatattaattatttgaaaacattttagagaaccttaactgaagaaagaactaagggcatcttctgattggtagactctcctgttacaagagatgttcaatgtattttggaagacaagaaagtttaccattttgtttccaa

SEQ ID NO: 20507 - DNA, 568 bp, Homo sapiens
tgctctttgttttcagaacgttagaactttttaacttgtactttcattctaagtcagtcaaggaattaattatgttactggagaaagagttgtagatgttagaaaaaaattagttaaacctggagttaccaggcaaccttaagtaaaatgcttaataactttgacttcaataacctcatcttaaaatgggtcaaatagtttctcctctgtctcagcatggatgattttagatttcaaagagaaaagtcgtatcttgaagatagtctgaaaatggtttacatgaatgtgcattatttgacccttactctataaattatatatatataatatatatgaatatatcatttatctactaacatgattggtgttaccatatcttagatccytaaagagtcagcttaacttggttctaaagtgaatatttccattagagatttagatagaattaggtgatcaagaatgataatcgcatttgccgtaattctgatctgtggtttcacatttttttcaaatagatacaaattttttaaataaagtgcacataaaaaatcaaatattggtgtgccct

SEQ ID NO: 20508 - DNA, 568 bp, Homo sapiens
tgctctttgttttcagaacgttagaactttttaacttgtactttcattctaagtcagtcaaggaattaattatgttactggagaaagagttgtagatgttagaaaaaaattagttaaacctggagttaccaggcaaccttaagtaaaatgcttaataactttgacttcaataacctcatcttaaaatgggtcaaatagtttctcctctgtctcagcatggatgattttagatttcaaagagaaaagtcgtatcttgaagatagtctgaaaatggtttacatgaatgtgcattatttgacccttactctataaattatatatatataatatatatgaatatatcatttatctactaacatgattggtgttaccatatcttagatccctaaagagtcagcttaacttggttctaaagtgaatatttccattagagatttagatagaattaggtgatcaagaatgataatcgcatttgccgtaattctgatctgyggtttcacatttttttcaaatagatacaaattttttaaataaagtgcacataaaaaatcaaatattggtgtgccct

SEQ ID NO: 20509 - DNA, 556 bp, Homo sapiens
acaggaaggggaacatcacacactggggcctgttgtggggttgggggaggggggagggatagcattaggagatatacctaatgtaaatgacaagttaatgggtgcagcacaccaacatggcacatgtatacatatgtaacaaacctgcacattgtgcacatgtaccctagaaattaaagtataataaaaaaatttaaaaaaaagaaatgtgggaaaataacaaaatgttgactctaggtaaaggtacrtggatgttcattgtattattttttaaacttttataaaggtttgtgattttttaaaaagttgggggaaaataaatcattattcattttcttactggaaatcattaaaagaaaaaaaaagagttcttggcttgcaccgatcacagcgtgattggaaggtagtggacaagtcttgttagcttttcaaaatgctgtcctagacttgatatgtattgggagacttcaggagctctgcacttcagtgacagcatataatgggggtttcctgggtggatacatagctcagccaaaatccaaatgccattagtgag

SEQ ID NO: 20510 - DNA, 551 bp, Homo sapiens
gggctgtcacctgaatcagtactcccatgatgaattggcaactatttacaatggattccatgacttccttccacaaaaatatttggaggcttatgatacacagaggccaaagaaccaatgtggcacatgagctctccagtagagttagctcaataagatctgtctcctcagagatcagtggcttctcagacaagactacttgtttagctgtgactgagtcagttgagagaagacaccaataaatatagcccccgtctcaaaggccaggattatcagaattctgtactacacrctcttaaacaacaagtggatcaaaaaagaaatcataagggtaattatagaatatctcgaaacagatgaaaattacagcataacataccaaagcttacgggatgcagcaaacacagtgttatgagaaaaatttatagttgtaaataaatgcttatattaaaaaggaggaaagatctcacatcaataagcctaacattacactttagcatactagaaatagaaaaacaaactaaacacaaaactagctcaaaaaggaaata

SEQ ID NO: 20511 - DNA, 551 bp, Homo sapiens
gggctgtcacctgaatcagtactcccatgatgaattggcaactatttacaatggattccatgacttccttccacaaaaatatttggaggcttatgatacacagaggccaaagaaccaatgtggcacatgagctctccagtagagttagctcaataagatctgtctcctcagagatcagtggcttctcagacaagactacttgtttagctgtgactgagtcagttgagagaagacaccaataaatatagcccccgtctcaaaggccaggattatcagaattctgtactacacgctcttaaacaacaagtggatcaaaaaagaaatcataagggtaattatagaatatctcgaaacagatgaaaattacagcataacataccaaagcttacgggatgcagcaaacacagtgttatgagaaaaatttatagytgtaaataaatgcttatattaaaaaggaggaaagatctcacatcaataagcctaacattacactttagcatactagaaatagaaaaacaaactaaacacaaaactagctcaaaaaggaaata

SEQ ID NO: 20512 - DNA, 550 bp, Homo sapiens
agtatcttaccatgggggaatttatttcaaattgcatcactcacggaagacaattctagggaaaaaaatgtcaggtcaacactgaaggctcacttgatccttcacatcttcaagtggccttgctcttattaatggattgtcgtgaatgatcttttacaattttgccccaaaggtcaagaagagaaaattcaataagtagtaaaacactataagtggaaatcactacgtatgtttgcattaagccagatgtttaatagataaatgtcagatgaagaaaaactcaagaatattataggtagattccactgtaatctttttaccacatttgcaccaagattggttctcaagtataaaatcaaaaygaaaaacagcaaacatcacttgctcagagcaaaagacacatttaataataaacatcaaggaggtttcacaataaagtcaatggcaatatctcaggactgaaggtaaaaagactttcatactgtgttcagtatcctacaatggctttgtattcgctacgtggccttaggcaaattacttaaaatttctg

SEQ ID NO: 20513 - DNA, 516 bp, Homo sapiens
tatatttcttaacatttttgagagatagaaccttacaagaatcagatgaaaacagtgaactctttctttagaacaacatatatattcatatgtataggcaattttgcccataatttcagggaatttataaattcctgaagtccaaatcaagaaactctaggttaggatattgtgtttccagaaggcccagattaaakgaccccttgttgggccatcacgttaagctgtcgatgcctaagaccacattcaggtgagttatgtgacctgtcgcaggtagaacatggagcactggacgggcagactggaaggcgttctgacatgttccgtgagggatattcgagaagcaacttgacgtagatagaggagatgcagacagaggaacaggtgtctccagggatcagctttcccagcgtaatccctttcctggggctcctgtccgctccaccttccagctgcttagctctccgcagaagccagagtaaatctgatatgctctccccttctgcttcctcccat

SEQ ID NO: 20514 - DNA, 516 bp, Homo sapiens
tatatttcttaacatttttgagagatagaaccttacaagaatcagatgaaaacagtgaactctttctttagaacaacatatatattcatatgtataggcaattttgcccataatttcagggaatttataaattcctgaagtccaaatcaagaaactctaggttaggatattgtgtttccagaaggcccagattaaatgaccccttgttgggccatcacgttaagctgtcgatgcctaagaccacattcaggtgagttatgtgacctgtcgcaggtagaacatggagcactggacgggcagactggaaggcgttctgacatgttccgtgagggatattcgagaagcaacttgacgtagatagaggagatgcagacagwggaacaggtgtctccagggatcagctttcccagcgtaatccctttcctggggctcctgtccgctccaccttccagctgcttagctctccgcagaagccagagtaaatctgatatgctctccccttctgcttcctcccat

SEQ ID NO: 20515 - DNA, 1146 bp, Homo sapiens
tgggctccctccctgagctcctcagtgcccaaagtttcagagggggccgaggtggtgttgggggatgctggtgtgcagtgctgccccatgtgcatgcacacccgaccatgtcacggcagtgcctgggctttgcttcaactttgttctgaaatcagagcggacgccaggaggtgggagaggccagggcgtgggagcaggtctttttgagcctgtggggacaggagggcttcccaggcccctgagagtccagggatgctcgtgtctggagcttcagctggatggctgcagctacacccaggagcaccggtttcccatcccaccaactcggtagggggcagggtttccgcctgttccttgctcccactggcctcacagagcgagtatccctagcggcaccccccctgctgcagccggcctcttccgagtggtccctccagatggccacggctgcgatcggaagaagagaggcaggatgagctaatagagcccttgatgcatcacagatgccagttagttgctttactctgcaagtcatgtttaactgaatggaattttctaacaggtggaattgcagtgtctaaaaagggccttagaaacccattgaccagcatttaaaaaatagtgtcataactttaagattgagcagcagactaaattcttccagggttttgacctcttctgaagacatatttgtatgctctgtgggacttttctgtttctgtgatccattttgatggttttaaactatacattgacagattccttgtgtgtgaaatgaagagtttgaatagattatttcttaggtccccttcaactttgaagttgaaattctgagacccagagttttagttttaagctatggagaagacagtcttggaaaatgcctatgaaactaagggataagtgatactcctcacatgggaagtctctcaagctgttctstctcttccagtgaggaaggctaacagaggaagaccatgaagcacaccaagtggatagtgtgggtttctccctagcctgctttggtctctaaacgttcatgtagatagattacagtagatttaggaatgcagatggttactggtattaattagatacctaaaagaattttaagtctttggcaattgatataaccatgtgtttgtt

SEQ ID NO: 20516 - DNA, 522 bp, Homo sapiens
gaagcacttctctcccaactccagcctctagatgagaacacagcccagtcaccaccttgactgtggccttgtgagatccaagcaggagacccagctaagctttgcctgggctcccgacccaaggaaatggtgagataacaaattaatgctgttttcagcctctaaatctgtagtcatttgttatgcaacaaggaaaaaactaacacacccatcaaattaagaaataaaagagtggagtgaaaaaaagatactaataactgtaagaagtgaagattgagatgaagaatagcagatataaactagctaacaactatctggagccatagtgagttagggcaaaggaccctacaagcatccctgtcacagtgggatgagagggttgaaatctaagamcctgaaggaccagcaaggcagtgtacatctgtgctgtcaactgctctaggaaatttacctgcatttgctcatttcattgtcacaacaacctattaggtgcgtcctcttatctcccaggacaaaagggga

SEQ ID NO: 20517 - DNA, 534 bp, Homo sapiens
tatgcccaactcctttatacggctattagtcagcctaagaagtacatgtcagagactattcaggcaaccaggacagaaagggctttgggttacctgtcctcacttccacttctgggagatcatatggtaagttagcatctaccagaatacaaacggaaacttgaattagtccaagtctcctttggtttctctatcttttcactttctctcctagggggaagaagtgaaattgcctccatttgttgtatctttattkttgttcctgccatacttcatttccctccccagaggtccagagagagatccaggcactgccccagcctgcagctgagtggcttggcatccaggaacagagatgttcatagccatgttgagagaaagtgctactggctctagagtatggcagtgctggagagctgtcaaggggtaaggggccatttatgcttggcactaccctgaaacaaaggatccgcaggggcaccacttggcccaccccttttcttgtccctgagtacagtgaccccttcccctcct

SEQ ID NO: 20518 - DNA, 490 bp, Homo sapiens
tatccctgatgaatgtaagtgcaaaaattctcaacaaaatactagcaactttttgctagcaacaaatactagcaaaccaaattcaacagcagtatgcagtatgctgttgaatttggaagcctcatacttcccgatgtcgaaatgtaacaacaaactctctrtatattatatacagagtttcagtcatgcaagatgaaaaaattgtaatatataaagctacaatagtcagaatggcatggtactgacataaaggcagatatatggaccaatggaagaggatagagagtccagaaataaacccatatatatatgggatcaaattatattcaacaagggttccaagactccacaaaagtgtaagaacttattcttcaataaattgtgctgggaaaactgtatatccacatgccacagaataaaactggatccttattttataccagacaccaaaaccaacccaaaatgaattaaagaattaaatataagattt

SEQ ID NO: 20519 - DNA, 566 bp, Homo sapiens
tgacagcagctctcccatttacyaaggctttgatttttgcaggccctgtgctaagccattcacagagactatcttgttttgcatttctcgtgattatttcatttaggcatcactattattggcacacaacagatgaggaaacggggccatcaaagtcacacgggggtggacagcagagctgagattcaaagccacgcctgatggcaaagcccatgtgcaaattcacgctggtcacaaaagggctgtgagagcagaccccaagctcatgacaagatcagcgtgacccatggtcagcccccctgcacccctgggtttccacagaactcatctatggcagcctgccctgggacactgattgctttaggttcgtcctagacaaagctcttcaagctttcatgctttaatgtggacacaggcatcacctggggtcttgttaagatgcagcttcttctccagtcagtctgggctggggcctgagagtctgcatgtctaagctctcaggggacactgatgctgctggtccaggggttgtgtttgagcagtgacggctcagaagacgccacatt

SEQ ID NO: 20520 - DNA, 539 bp, Homo sapiens
tgagctctcagcactgatgcaggggtcattctaacggaggtgcagagatagacatcatgagcctctggcttaggtgcccaagaactgtactcaggacaagccgatttcaggaattcgacttgaacacagatgtgatcacagtggtatcaagagtagatattttaaaggtgctatccccgtttctctattaaacctcagttaggcttttagttgtctcagatagaggtgtaagactttaatttcatttcatttttaattttaaaaggtcagcgtttttgttgaaactagattgctgcacttaaaagtatggggtaagggaattaagagatgaaaagacagctcttgccaaggttatttgatgaaataaaaggaggccaccagaggaggtgagaggacagcactgttctggtctctgctttcagttctgcgtgttaagtgagatcatgtggtatttgtctctctgtgccyggctcatttcactcagcataatatcctccagctttatcagtgttgctgcaaatgacaggacatccttttca

SEQ ID NO: 20521 - DNA, 710 bp, Homo sapiens
gataaaactatcaactcttgtattcaatttggttaatatttttaaagtgatgacttttcttcctaagcaagaaaataatgggaagataagaaactttaaatgatttggtaaaccagtgggggtggtgctaaattaaaaagcagtctgcaagatgcagcggcaggtgaaggcagttgattcttcaaagcacaacagaaacgaaccaaatgtcatctgtagaatgcaaaacaaagtggtatattcgtacattttagtactacctatcagtaaagaaagcccaaatcactggtataccagtaacaagaataaacttccacatcattatgttgagcagttaagaagccagacacaaaagagcacaatcgtgattccattttaaaaaatggaatgtggtatctatagatatcagaagaatttttgtctctgaggtgggagattgactggaaagcatcaagaggcaactttttggggtgctggaaatattatttgccttgatatgggcaatggttacagggattacacatttgtcaaaattcatcgatatgtttacctaagttatttactttgtatatgttagacctcaataaagtgctattcaaaataaacaaataagaacattaattcaaatgaacatcagaaaaacccattaactgaaatgaagcatcaatcccatgcacaattttagggcatgcagattctctgaaartcca

SEQ ID NO: 20522 - DNA, 534 bp, Homo sapiens
tggccttttaacgcatttgcgtaggtgacacctggcttccactctgtgagccctaawccgcatgtgccctcctaagtattattttatgcgtctgtgttcttcatccaccaccacatcttgaagttactgaaggtaggcactgtcagtaaaggcatcccactgccactccgcttcaccacggccgtaacaggaaccacaggtatcactatatctgccatttactgagctcctcacatgtggcaaggcctgttccaaacactttacgtgtgataattcattcgatcctaaaatacaaagaggtttagatgaggaaactgaggcacagagtagttagcttggccaaatttaacacagggaaagcccaggactccaaaccctttcaactttacaggctgcatgctcaatcaccacacccaaagccaaattcaccattgacagtggacagccactgagttaattacgttggagaagtcatggggaagtctgggagttgaggcatctggattccaattcctactctctcgtttccttaat

SEQ ID NO: 20523 - DNA, 1398 bp, Homo sapiens
  misc_feature (1)...(1398): n = A,T,C or G
tttaaagaacattgcttactttttaccaacaataaaaaatccttaaatagataaggacaatctagcataagttaagtctttctttatttttttcagcctgaatatgtttttttgttcgtttgtttgtttgtttatgagacggagtttcactcttgttgcccaggctggagtgcaatggcgtgatctaggctcactgcaacctctgcctcccatgttcaagcgattctcctgcctcagcctcctgagtagctgggattaaaggcatgtgccaccacgcctggctaatttttgtatttttagtagaaaaagggtttcaccatgttgatcaggctgctttcaaactcctgacctcgggtgatccacccgcctcrgcctcccaaagtgctgggattacaggaatgagccaccaagcccagccctcagcctgaatatgtttgtgaagtctttttttttttttttttttttttaccaattctatccttctttaacatggacctcaaactcttctatcttcttgaaagaatctctgactaaaatccaaaacttgtgtgacagtcaagaatgtggaatttgactaagggcagtgggtcaccccctttaatccagctcttttgaaggcatgcagngaggatcacttgagtcccaggagacacgcctgngcaacagtgagcccctaatcgctacaaaaagaaacacaattagccagagtgttgggggggcatgcctggtagtcccancaacttacaaaggtttgaggtgggaggatcactctgnccctggggagtaacactgccagtgaacccctggacctccctttgacctccggccgggttattggggggtgctctcttgttcccattatagcaccgttgatttctattccttccattactagaatattgtgcatgatttcgtccatatttaaacnnnnnnnnnnnnnnnnnnnnnnnnnnnnnnnnnnnnnnnnnnnnnnnnnnnnnnnnnnnnnnnnnnnnnnnnnnnnnnnnnnnnnnnnnnnnnnnnnnnnctcggggtgatccatggcttttggccacccaaagtgttgggattacaggagtaagccaccacgcccagccagtcatttatcattaggagcattactagtcataatttttcagcctgttttaaagtatgttataactagaaaccccctataccaaggattgaaacaatgacctgtaggtcaaattgtgtttagccaacagtgtttctaaatgcatatattagattcatgagtttagacctgggatttgtcctttattagctaacacccttgctgcatcacacatttgcattacttgcatggtccatgaagacacctgagtttgtgaataccagtctaaacttttaattttgtatcctcaaaattcaaaagaa

SEQ ID NO: 20524 - DNA, 512 bp, Homo sapiens
aagagttaattggtgtgtggtttagggtcgggcaggctgacaggagcctgggctggtgctcacactgtcagagcttgggcaaagtgggtaagtgtaaggcctccctgactcctacacctaggcttcaaattgttcctccgggtggtgtgagtcagaggtgarggtgggcgatttgacctcccacaatcccagctttgccacatctgtgtggttagagcgtggccttccagccctttttgattaacttatatttaccttcttctacttttaggtaacctttgacaatgcccactctttgaaatggtccatccaagggatttcaagaggtcagcatcttgtgtcaggtattttataaaggagccttctttcctacatgtggagcccagctggggagaagtatgttaagaagccagccttgaaatacccatatgacacatcatcaattcaagaccagtcctcacttttctgccacttcgttaggggattttttcagacactgtgggacaggaggc

SEQ ID NO: 20525 - DNA, 1216 bp, Homo sapiens
caagaccaagtaagtctgctaaaatcttgagttctacattggtttcttcttcttaagagtgtatgaaggagatgccagcagggagctgtaggggatgtgtgtgtgcacacgcactgcttgggcagagtggtatgtaccagttagataagggggagtcccagtccagcacaggaaggaaataaaagcaaaagcagacaaacaccccccaacttttaaagcatattatggccaggttaaaatatctccatctcacaacatgaggrcaaaggtgagtgccgattattctgaacactcattctgcagctctcccgaagtcctcagggcacagtgctctctaacacactgtgcaaagacggtgctttaagccacccagagcacctccagggtagtcgtcctgaatggcctgcctaggttgggggaaggtatactattgttttcataaaacaagaacaggaactatgatcacttcctagttcatgcacgagccatgggcaagagagccctggaatcatacaatgcagtgatgtgattcatacccttaaaatgaggggggtcagtggaactctgatttccaaagttgcttccaggctatgagtaactgtcgactagacttgatacaaaatttcttaacatggcatgaagaaaaatgaatcacggcaggtgtcagaccagatgagctcaggcagacagagcctgcagtcttcccctctgcacgtcccactcagcagcacctttccagctgcatcctaactggcatgacctaacaatccccagtgcagtgtccctcctgggtattgccaattctactctgggcatgggttaagaggccagaagccaggctgcacgtaagagtgaggggaagacagcggaaagggttactattctcagtagtggaacggcctgtcttaataaagggcacattgtgctagggaggcatgtgatggtaacaggggccttgcggtttatacagtggccctcttctccagtgttcagtgccaactacaagatgcagcaactctttaccccaaatctgtctcaaaacagccaaaatgccatgggctcctaagtgcaaccccaactatgctgctctctaatgtccactgtctcattttaaaagttgttgctgaaatacagcccaaatcaatcatgcatgcacagaagagaatgagcttggactgttattttccaaactttcttcaaaagtaacatgctgttc

SEQ ID NO: 20526 - DNA, 1216 bp, Homo sapiens
caagaccaagtaagtctgctaaaatcttgagttctacattggtttcttcttcttaagagtgtatgaaggagatgccagcagggagctgtaggggatgtgtgtgtgcacacgcactgcttgggcagagtggtatgtaccagttagataagggggagtcccagtccagcacaggaaggaaataaaagcaaaagcagacaaacaccccccaacttttaaagcatattatggccaggttaaaatatctccatctcacaacatgagggcaaaggtgagtgccgaytattctgaacactcattctgcagctctcccgaagtcctcagggcacagtgctctctaacacactgtgcaaagacggtgctttaagccacccagagcacctccagggtagtcgtcctgaatggcctgcctaggttgggggaaggtatactattgttttcataaaacaagaacaggaactatgatcacttcctagttcatgcacgagccatgggcaagagagccctggaatcatacaatgcagtgatgtgattcatacccttaaaatgaggggggtcagtggaactctgatttccaaagttgcttccaggctatgagtaactgtcgactagacttgatacaaaatttcttaacatggcatgaagaaaaatgaatcacggcaggtgtcagaccagatgagctcaggcagacagagcctgcagtcttcccctctgcacgtcccactcagcagcacctttccagctgcatcctaactggcatgacctaacaatccccagtgcagtgtccctcctgggtattgccaattctactctgggcatgggttaagaggccagaagccaggctgcacgtaagagtgaggggaagacagcggaaagggttactattctcagtagtggaacggcctgtcttaataaagggcacattgtgctagggaggcatgtgatggtaacaggggccttgcggtttatacagtggccctcttctccagtgttcagtgccaactacaagatgcagcaactctttaccccaaatctgtctcaaaacagccaaaatgccatgggctcctaagtgcaaccccaactatgctgctctctaatgtccactgtctcattttaaaagttgttgctgaaatacagcccaaatcaatcatgcatgcacagaagagaatgagcttggactgttattttccaaactttcttcaaaagtaacatgctgttc

SEQ ID NO: 20527 - DNA, 1216 bp, Homo sapiens
caagaccaagtaagtctgctaaaatcttgagttctacattggtttcttcttcttaagagtgtatgaaggagatgccagcagggagctgtaggggatgtgtgtgtgcacacgcactgcttgggcagagtggtatgtaccagttagataagggggagtcccagtccagcacaggaaggaaataaaagcaaaagcagacaaacaccccccaacttttaaagcatattatggccaggttaaaatatctccatctcacaacatgagggcaaaggtgagtgccgattattctgaacactcattctgcagctctcccgaagtcctcagggcacagtgctctctaacacactgtgcaaagacggtgctttaagccacccagagcacctccagggtagtcgtcctgaatggcctgcctaggttgggggaaggtatactwttgttttcataaaacaagaacaggaactatgatcacttcctagttcatgcacgagccatgggcaagagagccctggaatcatacaatgcagtgatgtgattcatacccttaaaatgaggggggtcagtggaactctgatttccaaagttgcttccaggctatgagtaactgtcgactagacttgatacaaaatttcttaacatggcatgaagaaaaatgaatcacggcaggtgtcagaccagatgagctcaggcagacagagcctgcagtcttcccctctgcacgtcccactcagcagcacctttccagctgcatcctaactggcatgacctaacaatccccagtgcagtgtccctcctgggtattgccaattctactctgggcatgggttaagaggccagaagccaggctgcacgtaagagtgaggggaagacagcggaaagggttactattctcagtagtggaacggcctgtcttaataaagggcacattgtgctagggaggcatgtgatggtaacaggggccttgcggtttatacagtggccctcttctccagtgttcagtgccaactacaagatgcagcaactctttaccccaaatctgtctcaaaacagccaaaatgccatgggctcctaagtgcaaccccaactatgctgctctctaatgtccactgtctcattttaaaagttgttgctgaaatacagcccaaatcaatcatgcatgcacagaagagaatgagcttggactgttattttccaaactttcttcaaaagtaacatgctgttc

SEQ ID NO: 20528 - DNA, 1216 bp, Homo sapiens
caagaccaagtaagtctgctaaaatcttgagttctacattggtttcttcttcttaagagtgtatgaaggagatgccagcagggagctgtaggggatgtgtgtgtgcacacgcactgcttgggcagagtggtatgtaccagttagataagggggagtcccagtccagcacaggaaggaaataaaagcaaaagcagacaaacaccccccaacttttaaagcatattatggccaggttaaaatatctccatctcacaacatgagggcaaaggtgagtgccgattattctgaacactcattctgcagctctcccgaagtcctcagggcacagtgctctctaacacactgtgcaaagacggtgctttaagccacccagagcacctccagggtagtcgtcctgaatggcctgcctaggttgggggaaggtatactattgttttcataaaacaagaacaggaactatgatcacttcctagttcatgcacgagccatgggcaagagagccctggaatcatacaatgcagtgatgtgattcatacccttaaaatgaggggggtcagtggaactctgatttccaaagttgcttccaggctatgagtaactgtcgactagacttgatacaaaatttcttaacatggcatgaagaaaaatgaatcacggcaggtgtcagaccagatgagctcaggcagacagagcctgcagtcttcccctctgcacgtcccactcagcagcacctttccagctgcatcstaactggcatgacctaacaatccccagtgcagtgtccctcctgggtattgccaattctactctgggcatgggttaagaggccagaagccaggctgcacgtaagagtgaggggaagacagcggaaagggttactattctcagtagtggaacggcctgtcttaataaagggcacattgtgctagggaggcatgtgatggtaacaggggccttgcggtttatacagtggccctcttctccagtgttcagtgccaactacaagatgcagcaactctttaccccaaatctgtctcaaaacagccaaaatgccatgggctcctaagtgcaaccccaactatgctgctctctaatgtccactgtctcattttaaaagttgttgctgaaatacagcccaaatcaatcatgcatgcacagaagagaatgagcttggactgttattttccaaactttcttcaaaagtaacatgctgttc

SEQ ID NO: 20529 - DNA, 1216 bp, Homo sapiens
caagaccaagtaagtctgctaaaatcttgagttctacattggtttcttcttcttaagagtgtatgaaggagatgccagcagggagctgtaggggatgtgtgtgtgcacacgcactgcttgggcagagtggtatgtaccagttagataagggggagtcccagtccagcacaggaaggaaataaaagcaaaagcagacaaacaccccccaacttttaaagcatattatggccaggttaaaatatctccatctcacaacatgagggcaaaggtgagtgccgattattctgaacactcattctgcagctctcccgaagtcctcagggcacagtgctctctaacacactgtgcaaagacggtgctttaagccacccagagcacctccagggtagtcgtcctgaatggcctgcctaggttgggggaaggtatactattgttttcataaaacaagaacaggaactatgatcacttcctagttcatgcacgagccatgggcaagagagccctggaatcatacaatgcagtgatgtgattcatacccttaaaatgaggggggtcagtggaactctgatttccaaagttgcttccaggctatgagtaactgtcgactagacttgatacaaaatttcttaacatggcatgaagaaaaatgaatcacggcaggtgtcagaccagatgagctcaggcagacagagcctgcagtcttcccctctgcacgtcccactcagcagcacctttccagctgcatcctaactggcatgacctaacaatccccagtgcagtgtccctcctgggtattgccaattctactctgggcatgggttaagaggccagaagccaggctgcacgtaagagtgaggggaagacagcggaaagggttactattctcagtagtggaacggcctgtcttaataaagggcacattgtgctagggaggcatgtgatggtaacaggggccttgcggtttatacagtggccctcttctccagtgttcagtgccaactacaagatgcagcaactctttaccccaaatctgtctcaaaacagccaaaatgccatgggctyctaagtgcaaccccaactatgctgctctctaatgtccactgtctcattttaaaagttgttgctgaaatacagcccaaatcaatcatgcatgcacagaagagaatgagcttggactgttattttccaaactttcttcaaaagtaacatgctgttc

SEQ ID NO: 20530 - DNA, 1216 bp, Homo sapiens
caagaccaagtaagtctgctaaaatcttgagttctacattggtttcttcttcttaagagtgtatgaaggagatgccagcagggagctgtaggggatgtgtgtgtgcacacgcactgcttgggcagagtggtatgtaccagttagataagggggagtcccagtccagcacaggaaggaaataaaagcaaaagcagacaaacaccccccaacttttaaagcatattatggccaggttaaaatatctccatctcacaacatgagggcaaaggtgagtgccgattattctgaacactcattctgcagctctcccgaagtcctcagggcacagtgctctctaacacactgtgcaaagacggtgctttaagccacccagagcacctccagggtagtcgtcctgaatggcctgcctaggttgggggaaggtatactattgttttcataaaacaagaacaggaactatgatcacttcctagttcatgcacgagccatgggcaagagagccctggaatcatacaatgcagtgatgtgattcatacccttaaaatgaggggggtcagtggaactctgatttccaaagttgcttccaggctatgagtaactgtcgactagacttgatacaaaatttcttaacatggcatgaagaaaaatgaatcacggcaggtgtcagaccagatgagctcaggcagacagagcctgcagtcttcccctctgcacgtcccactcagcagcacctttccagctgcatcctaactggcatgacctaacaatccccagtgcagtgtccctcctgggtattgccaattctactctgggcatgggttaagaggccagaagccaggctgcacgtaagagtgaggggaagacagcggaaagggttactattctcagtagtggaacggcctgtcttaataaagggcacattgtgctagggaggcatgtgatggtaacaggggccttgcggtttatacagtggccctcttctccagtgttcagtgccaactacaagatgcagcaactctttaccccaaatctgtctcaaaacagccaaaatgccatgggctcctaagtgcaaccccaactatgctgctctctaatgtccactgtctcattttaaaagttrttgctgaaatacagcccaaatcaatcatgcatgcacagaagagaatgagcttggactgttattttccaaactttcttcaaaagtaacatgctgttc

SEQ ID NO: 20531 - DNA, 542 bp, Homo sapiens
tgtggggttgaagagaacattaagggttactgtttttaattgcctggagtagacagaacaatggtcccccaaaggtgtcctcatcctaatcccaggaacctttccatgtgttacattacacaggaaaagagacgatgctgatgtaattaagttggggggcttgaaaakagaagaatgtcctggagtgtccaggtgagcccagtgtaatcacaagtatatctataagcaaatagggaagcaggagagtcagtgagagggaaggagatgcgttggtagaggcagaggagagaccacaagagagcgattgagatttgaacatgctatgctgctggctttgaagatggaggaaggaggcgatgaaacaaggaatacaggtggcctctagaaaccgtagtaggtaatcaaacagatttttccccagagcctcaagaaggaacatagctcagctgacaccttgacgctagcctcataagacccatttcagacatctggcctccagaactgtaagaaaatcagtttgcattgtgtgaagccactaagta

SEQ ID NO: 20532 - DNA, 582 bp, Homo sapiens
agtgatccacccaccttggtctcccaaagtactacccttgtttaaaggaagttctaacaaatgcccagatgtttgagaatttctacctcctttagatctcttccattagctcctcaagaactaagaatccattgctttctgcaactaggtagtctgtagaatacctacattattatagcacttcttttcttcttwtattcttgtttacttctgatttagaggttctgcctcccttctaagtagtgtgctcttttgaacaataaaaataaataagcaaaagtaagttacaaaagagacataattatggagattcattcagtaattatgttgtctttgatgtgtcaaggactgcaattattttttaatgaaaaattctcatggagtaaaaataactaaagtagaaggaaagtaggctataaaacagaagtgtttcttctaatctaataaaatttccaaattcctgtatttcaaaagacactgtacaaattgggtgtggatcaaatcttaagcaaacagttttgacaccaatgaatctaggtaataaacaaacctcaaagatgagtcactgaattttgattaaca

SEQ ID NO: 20533 - DNA, 430 bp, Homo sapiens
aacttttcattttgcagatgaagaattagagcctaaagaagtaaagtggcatatccaggtccacagagttcatgagtgccagagtctgaaccagaactcagtttcttgattcctagtttgctgtcctttttgtcacctcaagagcctacctcttatggaagttttagagatatacagttgtgtatgaaattccttaatgctgcttaatggcgccctcttgagtgaagctttatgtaaatgtcaggaaaccaacagtcacatgttcaatttccagttaatayagagattttattcattgaacattaactgaaatagtttctatgccaatgagcttcttttaccttagattttcataagaataccatcaggctgtttaaaatatataaagccttcttacaatataagaatcctaaacccactatagaataca

SEQ ID NO: 20534 - DNA, 1251 bp, Homo sapiens
tggccaggctcktttgaaactcctgatcttgggtgatccacttgccttggccacccaaagtgctggtatttcaggtgtgagccaccgcgccaggcctatttaatctcttcaaaagttaaaattgggcaattatatgtggggccttccatattgtatttcttaagaggtggaatatggacaagatttatatattgataaaaatataatgattgatcacacacaaacacatacatttccatgtatgcactgaaaaaaaaaaaaaccgaaaactttaattctcattctgtctttattttagagaaaattttctttgagttaaacaaagttcagttaaaagatgtggcccaggcaacgaagagcttgtgacttagacaggagtcaacttcaattcctttgggttagagtcattaacatttgcgtgtaaaactttctatatagattatatgaggtgtttcagttccagacctcaaaacaagcatagatcattaagttacacctctatcaaggtaaaggttaaatagtttgaggaaaatgacaggaattctcagagcataatgtaattttagaatttagctttaaattgtctggtttctaagacaaaaaagaacaaaagtaaagaaaaaagttattttccatcctctaaagcagatctatggaatagagtttgaagtcatgggcagggctcttcagcgttatacaaattaagtaatttttgaccaagcaaagaagtgatcaccaaggccaaaacatgcttctacaactttgcgccattattagatgcacactgattaagaaaaccctgagttattggtatttttcatatatataattaattatcagaactctgaaatagcgctaaaaatacaacaaaagaaaaaatacatcatatcgattttttgagaaattcatagaaaaaaattcaaaaccattatcatcatacaatttaagaaataaattttttctgtctctgtctctctgtcagtctctttgtccatctgtctctctctctgtctctttctctttcgctctctctctttctgtgtctttgtctctctctgtctgtctctgcctctgtctgtctctctctctctctctgtatctttctctctctcttttctctctctgtctcgctctctccctccctctcttttttctaaaatgagctctggcagatctaatcgaatccattaccaaggcctgaattcttaactttagaaatcaaagatttgatctccatacagaatcctgtac

SEQ ID NO: 20535 - DNA, 1251 bp, Homo sapiens
tggccaggctcgtttgaaactcctgatcttgggtgatccacttgccttggccacccaaagtgctggtatttcaggtgtgagccaccgcgccaggcctayttaatctcttcaaaagttaaaattgggcaattatatgtggggccttccatattgtatttcttaagaggtggaatatggacaagatttatatattgataaaaatataatgattgatcacacacaaacacatacatttccatgtatgcactgaaaaaaaaaaaaaccgaaaactttaattctcattctgtctttattttagagaaaattttctttgagttaaacaaagttcagttaaaagatgtggcccaggcaacgaagagcttgtgacttagacaggagtcaacttcaattcctttgggttagagtcattaacatttgcgtgtaaaactttctatatagattatatgaggtgtttcagttccagacctcaaaacaagcatagatcattaagttacacctctatcaaggtaaaggttaaatagtttgaggaaaatgacaggaattctcagagcataatgtaattttagaatttagctttaaattgtctggtttctaagacaaaaaagaacaaaagtaaagaaaaaagttattttccatcctctaaagcagatctatggaatagagtttgaagtcatgggcagggctcttcagcgttatacaaattaagtaatttttgaccaagcaaagaagtgatcaccaaggccaaaacatgcttctacaactttgcgccattattagatgcacactgattaagaaaaccctgagttattggtatttttcatatatataattaattatcagaactctgaaatagcgctaaaaatacaacaaaagaaaaaatacatcatatcgattttttgagaaattcatagaaaaaaattcaaaaccattatcatcatacaatttaagaaataaattttttctgtctctgtctctctgtcagtctctttgtccatctgtctctctctctgtctctttctctttcgctctctctctttctgtgtctttgtctctctctgtctgtctctgcctctgtctgtctctctctctctctctgtatctttctctctctcttttctctctctgtctcgctctctccctccctctcttttttctaaaatgagctctggcagatctaatcgaatccattaccaaggcctgaattcttaactttagaaatcaaagatttgatctccatacagaatcctgtac

SEQ ID NO: 20536 - DNA, 1251 bp, Homo sapiens
tggccaggctcgtttgaaactcctgatcttgggtgatccacttgccttggccacccaaagtgctggtatttcaggtgtgagccaccgcgccaggcctatttaatctcttcaaaagttaaaattgggcaattatatgtggggccttccatattgtatttcttaagaggtggaatatggacaagatttatatattgataaaaatataatgattgatcacacacaaacacatacatttccatgtatgcactgaaaaaaaaaaaaaccgaaaactttaattctcattctgtctttattttagagaaaattttctttgagttaaacaaagttcarttaaaagatgtggcccaggcaacgaagagcttgtgacttagacaggagtcaacttcaattcctttgggttagagtcattaacatttgcgtgtaaaactttctatatagattatatgaggtgtttcagttccagacctcaaaacaagcatagatcattaagttacacctctatcaaggtaaaggttaaatagtttgaggaaaatgacaggaattctcagagcataatgtaattttagaatttagctttaaattgtctggtttctaagacaaaaaagaacaaaagtaaagaaaaaagttattttccatcctctaaagcagatctatggaatagagtttgaagtcatgggcagggctcttcagcgttatacaaattaagtaatttttgaccaagcaaagaagtgatcaccaaggccaaaacatgcttctacaactttgcgccattattagatgcacactgattaagaaaaccctgagttattggtatttttcatatatataattaattatcagaactctgaaatagcgctaaaaatacaacaaaagaaaaaatacatcatatcgattttttgagaaattcatagaaaaaaattcaaaaccattatcatcatacaatttaagaaataaattttttctgtctctgtctctctgtcagtctctttgtccatctgtctctctctctgtctctttctctttcgctctctctctttctgtgtctttgtctctctctgtctgtctctgcctctgtctgtctctctctctctctctgtatctttctctctctcttttctctctctgtctcgctctctccctccctctcttttttctaaaatgagctctggcagatctaatcgaatccattaccaaggcctgaattcttaactttagaaatcaaagatttgatctccatacagaatcctgtac

SEQ ID NO: 20537 - DNA, 509 bp, Homo sapiens
gaatttttttacccaaacacctaaatcctatggaggtagatagtaccttagagaaaaacacatctacttattttcaaaggtaaaaaagaaaatcactctttgaggcttttttgttaagagacagtaccttgctctgttgcccaggctggagtgcagtgtcgcgatctcggctcactgcaacctccacctcctgggttcaagcgattctcatgcctcagactcccaagtagctggaattacgggcgcccgctacttacgcctggctaatttttttttttttttgagacggagtctcactctgtcgcccaggctggagtgcagtggcgcgatctcggctcactgcaacctccacctcccaggttcatgtcattctcctgcttcagcctcccgagtagctgggactacaggcgcctgccaccacgcccagctaattttttttgtatttttagtagagacrgggtttcaccgtgttagccaggatggtctccatctcctgacctggtgatctg

SEQ ID NO: 20538 - DNA, 540 bp, Homo sapiens
tgataacatatcattataatttatagctgccattatagtattataataacgttaaagaaagttttaagcagaaacaattttatccacaatttcaccaatgtatctactgttttcatcattgcattttctttgcattctttgctcatatttatgcttgttcttatgtagccataatcatgatttatattctctttgtttacttcctatttcactgtaagatattctccctwcattgtgtatttctgaagacagcgagcagcttgggtcttagctttctctgttccaagttaaataagcttaaatcctccagcattttctcaagggtcttagtttccactcacttagccgttgtagctgcgcatctctggatcctttccagacacaacacattcctcaaaatgaagaaaccgaagctacaccctagtacatgctgatcccttgtttttcatctttgcagaataatctgtattgttcagctgtcatttcattgcaggctgcgccctattttaagaaaatgggttacttgaaaaatccacattt

SEQ ID NO: 20539 - DNA, 766 bp, Homo sapiens
aacaaaataattatgtcaagcctttcattaaaacattgcaatgtgaaagaacagctttaaaatgtgtgttctgcagggagaatacagattggtgaaggtcaatcatagttcwggttattcctagaattgaatactgttcacgttctcaagactaatgggaaactgaggctctattagttacataatagaaataagaggcagccagattgaggttgcacattagtagcttttggttagataatttgagtttagaaagaggggtggagaaaaacaaatgggatctaaattatctcaagtataagaagaaaaaatttagttttattggagctgtgatagtttgaaatcatagttgatatagaatagacaatataatattattctcaaaagacatacaaagccatttcttagctttactttcagctatctgttatatattctcaaagcaattgttaattaacatttcagtgagaataattttcccaatataaaatctcattgattttaatattaaggtaaatacattatattaagaattgcttgatgtggtaatgcagtgaatttaggggaagtatttcattatctatatgcaactattatgaaataaattattgttttttattagtttactcaaaaagtaaaataaggccacataattaatcattgcatgtgttcacttgactggacctcagggtgtttaaatacctggttaacaactatttctgggtgtgtatgtgaaggtgtttccaggtgagactatcattcaaat

SEQ ID NO: 20540 - DNA, 766 bp, Homo sapiens
aacaaaataattatgtcaagcctttcattaaaacattgcaatgtgaaagaacagctttaaaatgtgtgttctgcagggagaatacagattggtgaaggtcaatcatagttctggttattcctagaattgaatactgttcacgttctcaagactaatgggaaactgaggctctattagttacataatagaaataagaggcagccagattgaggttgcacattagtagcttttggttagataatttgagtttagaaagaggggtggagaraaacaaatgggatctaaattatctcaagtataagaagaaaaaatttagttttattggagctgtgatagtttgaaatcatagttgatatagaatagacaatataatattattctcaaaagacatacaaagccatttcttagctttactttcagctatctgttatatattctcaaagcaattgttaattaacatttcagtgagaataattttcccaatataaaatctcattgattttaatattaaggtaaatacattatattaagaattgcttgatgtggtaatgcagtgaatttaggggaagtatttcattatctatatgcaactattatgaaataaattattgttttttattagtttactcaaaaagtaaaataaggccacataattaatcattgcatgtgttcacttgactggacctcagggtgtttaaatacctggttaacaactatttctgggtgtgtatgtgaaggtgtttccaggtgagactatcattcaaat

SEQ ID NO: 20541 - DNA, 536 bp, Homo sapiens
acaaaattaaaatgaattacttccaagttattatggctctcctcattttaggtgagcaagttgtaattgttccaacatgcttcatcattcttcaatcgccattgctgttttctatatttaggttgtaaatgccatagtacagatataaacaacttagattctattttcaaaagatgtttaattctttaagtatttgattgaggttagatttttcacaagttaaaaattgagaaagttgagtgtatttcaccatttctactttaagtctggttagttttctctgggaggcagggcattttgacactaaaatgattcttagaaatgttcttttgaggcagtggaactcaggggcactgactggctataaagaagcrccagtgagcctccatgatttcagctgtgctgatgaatcagaacactcagggcccaggaccttgggtagctcacaggataaccttgtttcctgtgattttgtcatatttattaagtttgacatttctgagatggagttttgttaccagctagcaacatatgtc

SEQ ID NO: 20542 - DNA, 537 bp, Homo sapiens
ttttgtccactgttcaccacctcagttaaaaaattaaagctgaatgaaagaaataaaactttaggatttgaaaagcagggaaaaaatttcaagagattatttgttttgcataatttattgtgaaagtgcttcctctgttagtattttgcttcagcaatactattataaatactgtacacctcaattgttattatttattagcaattattaattaatcaatgcacaaataaaatcagaaaactttgggaaacatttatttatatatgtgcatgtatgtacagattatacctgatctacttcataaagtaatttttattagcttacagcaaaagacaaagatgsaaaaaaaaaaaaacagaattaaaaggaagggttaaatagtaaaagggaaatattccagtcataattaagagcatcgtctttagagtcagataaaactggcagcttggcatttctaatccaagattgtctggctgtgtgaccttggacaattcactcaacttccctgatccccagctcattacttaatcaaacaca

SEQ ID NO: 20543 - DNA, 874 bp, Homo sapiens
attgtcacaggttaatttttcatcgttttatccctatcactgaatacagtacctgtcacgagtgtctgttaaatgaaagcaccaagaaaattgaaccataccttgtttcctaatctgtaatagtatgaaagtatggttagcctctttagatggttyactataaaattataaggactagtgaagcaacattgctgcagtttttgacattttataaatatgctccttgtgtattttatcctatactaatttctgctcttgtctgcaacaggccttggttctgttcttatttggcttttgttttctgttgtcacaccactgatacattcaatgaaaatgtattgagcagtcacttaagacctttctgcaacaaagcagaagatggatggattgatagaaagataactttctctagaaaacatttataattactgaattttagcagtaaacttagtaaaattactgtattttagcatgccttcaatttgttttacattttcagccctctaaaaaattggctgtctttggagaattgcattgtgttgaacttattgatttccactgaacatgctgaaaatgcccattatttgatgcatcattaatataataatagagatcaagcatttttagattcaaaataactgacatcaaaatcttacaagcattagaaaaatagaaggtagaattcaccttctctccaggaacaactaaccaaaattattctatacagtgatttttattacattattgtctgagttacctgtatgtaggtcaaataaaggctgagaaattgagttcacattattaacccaataactgatcacaaactggtaatacagcagtggatgggtgtttgcttcaataagggtaaagccca

SEQ ID NO: 20544 - DNA, 523 bp, Homo sapiens
  misc_feature (1)...(523): n = A,T,C or G
cacctgaaatggtgttaattgtggtgcttatgaggactgtctttgggatcagacaagcttatctgaattacatattagtcagttagtaacttttgtatcttgccagtttcttagcttctcatatactttgtcttgtcattaatttcatggtccactaaaaaaagtaaatgagaaatttgataatgcaaagggmatgcaatctatacttaataattgttaactttttcccctttcttgaaacatgccattatcaatacaggagagctggtactcctttcattttaaaacattcagtattattagaaaaagaacaagacttacatctttctaagaattttaaagtgtctcactaagcaagatagtaaataattggcttagttatttaatattcaccatgaaaatnccagtgaacagggaaaatcactaaataaatattcatgtttattaaaataaaatgcttcatttgcaaaattcatgttgtaagaaaccctaacttagaaactttttctcagcaaaaccttta

SEQ ID NO: 20545 - DNA, 561 bp, Homo sapiens
cgaatagtaggtcctcggtatccatttgttgaatgcataaagtatgaatttatctgtgaccttgaacaaatcacctaacttgtttgtccctaaaccaaagctgtctctgagttcttgtccatctctagcatgttagaatgtgaaagaatattggccactatattgtttggaggaaacaaaaatgcactagctggactggaataaggacaatcactcaatcaactggctgcattagccaagggctggtacggggggattgcaaggagcaggggggtagacttggtaaggggtagactttaacggaagtacagaggaagaagacagattaagaaggacaagaggtacaaatagaggagagggccaggtggggcaaaaactgagggcagaaaggatttcaagctggtcattrttatcattattatttattgcctgtttaaaattagtgcttttactatttccaatagtaaagacatggaatcaacctaaatgcctatcaatgatagactgaataaagaaaatgtggtacatatacaccatgaaatactatgtggccataaaaaa

SEQ ID NO: 20546 - DNA, 561 bp, Homo sapiens
cgaatagtaggtcctcggtatccatttgttgaatgcataaagtatgaatttatctgtgaccttgaacaaatcacctaacttgtttgtccctaaaccaaagctgtctctgagttcttgtccatctctagcatgttagaatgtgaaagaatattggccactatattgtttggaggaaacaaaaatgcactagctggactggaataaggacaatcactcaatcaactggctgcattagccaagggctggtacggggggattgcaaggagcaggggggtagacttggtaaggggtagactttaacggaagtacagaggaagaagacagattaagaaggacaagaggtacaaatagaggagagggccaggtggggcaaaaactgagggcagaaaggatttcaagctggtcattattatcattattatttattgmctgtttaaaattagtgcttttactatttccaatagtaaagacatggaatcaacctaaatgcctatcaatgatagactgaataaagaaaatgtggtacatatacaccatgaaatactatgtggccataaaaaa

SEQ ID NO: 20547 - DNA, 658 bp, Homo sapiens
ttctgataagatttggatatgagactcaatgttcagggttagctttgccctaaccaaatttgggaatcatgtttgaaaagaatgaacgagaaacactggaaaccattagatatggcaggcttttacaacatcaaaactgaagttttaatcaatattctcaagccatatagcacaatgcatgttgtttctttgcagtagtcatagagatcctgcagacttattgtgataagaatgtgcctttgatagaattctcactcctaactcttgtacagtgactaggtcagaggctgggtatttcagttctttggtttcttccacaggctctagcacagaactaggcacataactccaataaacaccttcgcatttatcatttttattgcatcagggaaagacagaaagtgggaccaaactgaattgtaaagaggaaatgggaatgactaggttatttcatcattccctaagttaatggagtgtcctagggaactccagggcatcatggaacagggscaccttgtcagggaatgggaacagcctgaatttgaaggtatgggcagtgactataagtttgttcaaggagaactgaagtacctcatgaggtctgcagagtgacactcaatgctgagatctatccatctaggagtctttctgcctgttt

SEQ ID NO: 20548 - DNA, 506 bp, Homo sapiens
ttttctactcatgaattatggtacatgagtttatttttgcaactttaagctcaataacatgttttaagatttcctcaactttctttttccacttcttcagaagttgactcttttggccctttggtcttctatacacattttagaaatgctttgttgaggactaagaggaatgctaagattttgataggaatttcattgaattttgagtatattggcatgctacaatggttagtgttttatacatgaaaataatatatcccttcctcttttcctagtatcatgagatgtttgttaggcagacatgaatattgagttgtatcaaatgtgtttttctgcattattgtggtrgtgatgtgatttagctcctttaattagttaatgtaatgaattacatttgtagattgctctaactattgaaacaagcttgaatttctggaataagcccaatgtgatatttattcaacaaatattcattgagtatacctagtatgtaacatgctttaaga

SEQ ID NO: 20549 - DNA, 534 bp, Homo sapiens
ttgtcagatgtatcttttacaattattttctcccagtgagataattttctgtagctttccttttcattttgtcttttgaaaagcaaacatgtttgattctgataaaatcacctactttttagaaaatgtttgatttgtaattacrgatacattggcaaaggggctatttatcagagtattgcagttgatgctgccaattaaaaaataaataatgggccgggtgtggtggttcacacctgtaatcccagcactttgggagttcaaggccggaggatcacttgagttcaggaatttgagaccaggaggttgggaggccgaggtgggaggattgcttgaacctggaaagttgaggctacagtgagctatgattgcgccactgcactccaccctgggcaacagagcgagagcctgtctcattcataaataaataaaattaaattaaattgtgtgtatgtgtgtctgtttgtatatatctagggctaggtgcagtggctcatgcctctaattcttgcactttgggaggctgagacagga

SEQ ID NO: 20550 - DNA, 527 bp, Homo sapiens
tgtcatgacacactggtgtgtgtgtgtcatttgtgttaataatagtttcagtcatagaagttgccactgattttacctgattttgcaaattagaatggatttaaagttattctgtctgtagttggcctctcgtttacttctttttttctttttttatatttttagagacagggttttgctctgttgcccaggctggagtgcagtggtgcaatcatagctcactgcagctttgacctcctgggctcaagcaatcttcctgcctcagcctcccgatagctggaactacaggtgcatgccactaagtcctrctaattttttatttttaattttttttttgtagagaagaggtctcactatgttgcccaggctggtctcaaactcctgggctgaagccatccttccacctcaccctcccaaagcactgggattatagaagtgcaccacggtgcctggcccacttgctgctttaatgggtgagagaagtgctgagtgacagttcgcatcacaggagctgcatcttaccccaa

SEQ ID NO: 20551 - DNA, 539 bp, Homo sapiens
ctaattttttgtatttttagtagagacggggcttcaccatcttagccaggatggtctggatcttctgaccacgtgatccgcccgcctcggcctcccaaagtgttgggattacaggcatgagccactgcgcccggccgagctagcactttctatacaaattactcctaagtaaagtgtcggagtgtctgaggtgctctgtagaagctgggtctggaagtttgtcctagaatcctctagaatttcttttcttccattcgactcttyagtgaatgtcctgtctctctagtttagggtgtgggggtgcatgtgctgctactgaataattcttacttgcctgtaagatactgtactaaatgggaattaggcttctgaggaaagaagcaaaatgatttggtgacttttgtccctaattccgtgacaaatgacccatggctttcctgaggaggcagcacacacagccgtaggaaagctacaaatgagaaatctgtgcaggagaggagctgccaacagaaaggactcgtcagctggaaccaacagtt

SEQ ID NO: 20552 - DNA, 539 bp, Homo sapiens
ctaattttttgtatttttagtagagacggggcttcaccatcttagccaggatggtctggatcttctgaccacgtgatccgcccgcctcggcctcccaaagtgttgggattacaggcatgagccactgcgcccggccgagctagcactttctatacaaattactcctaagtaaagtgtcggagtgtctgaggtgctctgtagaagctgggtctggaagtttgtcctagaatcctctagaatttcttttcttccattcgactcttcagtgaatgtcctgtctctctagtttagggtgtsggggtgcatgtgctgctactgaataattcttacttgcctgtaagatactgtactaaatgggaattaggcttctgaggaaagaagcaaaatgatttggtgacttttgtccctaattccgtgacaaatgacccatggctttcctgaggaggcagcacacacagccgtaggaaagctacaaatgagaaatctgtgcaggagaggagctgccaacagaaaggactcgtcagctggaaccaacagtt

SEQ ID NO: 20553 - DNA, 539 bp, Homo sapiens
ctaattttttgtatttttagtagagacggggcttcaccatcttagccaggatggtctggatcttctgaccacgtgatccgcccgcctcggcctcccaaagtgttgggattacaggcatgagccactgcgcccggccgagctagcactttctatacaaattactcctaagtaaagtgtcggagtgtctgaggtgctctgtagaagctgggtctggaagtttgtcctagaatcctctagaatttcttttcttccattcgactcttcagtgaatgtcctgtctctctagtttagggtgtgggggtgcatgtgctgctactgaataattcttacttgcctgtaagatactgtactaaatgggaattaggcttctgaggaaagaagcaaaatgatttggtgacttttgtccctaattccrtgacaaatgacccatggctttcctgaggaggcagcacacacagccgtaggaaagctacaaatgagaaatctgtgcaggagaggagctgccaacagaaaggactcgtcagctggaaccaacagtt

SEQ ID NO: 20554 - DNA, 532 bp, Homo sapiens
ttgctggattagctctctaattttcagatgttcatcactttgtcttcaaaatggaagtaattttttttttgacactcagygactcttcaaaaccctggtagttcatgactacataaaatacaagcttcaaattgcttagggacaaaactgtctttacaaatggtattaaaaaggaaaataacataatccctattgtgctgcttcactaatccaggaggtacaaaacagtgtctttggctatttgagaacaagatgaaccatttttcaattctttgtcttttttcttctatcaggcagagaatacattctgaactctttgtgggtggataacagactagggaggaatttggaatgtgtgcaagagtcactacatcccccttattggcccaacacacaacttcttgtcctcaagttaaagcccaaacccctaaatgtggctgataaggttactccctaatttctacactaagctccacccttgcctggctctcttccttcttagcttttgtatacaacacttgttgtacatagt

SEQ ID NO: 20555 - DNA, 543 bp, Homo sapiens
atgggaagaacttccagaattacggctactgcccttctgatcaataaatcaagggaattgttgctttctggaaagacactgggacctgccaatgacctcttgcttcttaggcattcccctcattggtcttttacctttctcaaaccttccttaggacctatcactgcattactcagtacatggcagtatggaggtcaccaggaaacttaaggttcctgctcaccaaaagctaacaattcagttagcatggagacatctggtaaatagyatatacatgaaacagatgataagatccaagggattcatcaagggaacttgattttgtgaactgtgagaggcagaggagaggcttcctgcatcgagaactaaactgagctccaaaggctgggtaacacttggttaaggataggaagaaaaaggaagtttttatatagaaacaaagcctgaattaagacacggaaaaaaggaaactaagtcataagtcagactggtttgggtagagctaaagaactttacagaattgcaaagccattgagttgaaaa

SEQ ID NO: 20556 - DNA, 538 bp, Homo sapiens
ctctgaggggtggccccaacgtgtctctgttggtcaggctggctgatgcccagggccaagcccagcacccacagggagacaaacccaaggggcacggaagccacggccatggcaatggaccatgtgggtgagcagagaaactggatttggcaggcggggactgacgggggacacggggcttggcttggagggcccagggcacagccaggcaccaaggatggggtctggggctgctgaagccccaccgtggggtcctaactgggtaggcgagggagtgaggatgagaaccagggacggagaactggggtcccagagcccacagagagtaggggaagggctggggctaccaggcaaaaacctgggtgaggggctctcagcagaacagtctctccccaatgacaacctgtgtggggccctggaagccrgacagaggaggcctggggctctgaggctcactgccggggctggctcagcccacactgggcaggaagacctccagtgtcctcatggttgtcctttctaattacaaagacttttg

SEQ ID NO: 20557 - DNA, 514 bp, Homo sapiens
tggcttgtctaacagtgctaagaaggaatactaatacagtaaaatactgacttgaattcctcaatacttacttaaacacctccaagacaggatggcatttttcctgaaggtaaaaggtacaaagcaatgaaaattcaaattgtagaagaactatttcataactatgacatgatattgtcatactaacacataggtgattttcctctataaaaaaaaatctttggaaagaatttttagctgaaatatgggccaaaatggcaagttttccttgaaagcaccagatgaaataatattttwtaaatacatatatatatatgtatatataaaatgtaaaaatccaattatcaatgttttggttttggttgttaccttttgttgcaatgatataatgctctctagggccagtgtaaagaagcgaagatcaaagaactaaattcttacatgtcaggttttccaaaccatcatcactgcaacaaaataatttgtcaaattgtcaaaatttacaggcatccca

SEQ ID NO: 20558 - DNA, 567 bp, Homo sapiens
tgttgaacctagattaatttcctgtgaaaatataatttccccaactggacttcagcgcagacaaaattaagtggacaaatttctatagatgaaatagagataattattaaagtactaccccacaacaaggactaggctctgatgttttcataggggaattccatcaaatttaaacaagaaaatctcagtgctatttaaacaattccagagcataaaaaggamggaaagtaactcataaggtttttaaacattgtggtagactatatgtaacataaaatttgcagttttaagtatttttaagtatataagtgagtggcattagttacatttacagtgttgtgctaccgttgactctatttctgaaactttttcatcatgccatacaaaaactgacattagccaataactcccatttttttctatcccagtccttggtaacttagtactttctgtctctatgaattcgtatattctagatattcatgtaagtgaaattatataatatttgtctttttgcatctgggttattttacctgaaagctgaaacataatgctttcagtttcatc

SEQ ID NO: 20559 - DNA, 627 bp, Homo sapiens
tgctatttattactaytatttattactatttctatttgtatagaaatagtaattattactatttctagtaataatagtagtaataatttatttctagtaataatttattactgtttctaagtaataaaaatatctcagatttagttgatacctcaactaaacttgtattgatacaaggtcaaaatagaaaacagttgctaaagtagtaagttcaattatttgacaaaaatttagactgttttctagggagctgttttttccacgattatttctgatgagatgatcagtggggttgaagtacacagtttattatttctggtctcttttaggcataccaacacacatagaaagacatgctggacagtttgatcattcaggtagaccaaatctacatgcattaacaagtgtaattgttataatattctgtcaactttctgtgtttctgacttccaacataaagcaggttttaaaaataccttaagaaagatagctttcacaaattgtccccaaaagaaagaaaaaaaaccggaaaagggagagaatacttggagtggaatgaaggtggacttctgcttgacaccaaacacaacaattaactcaaaatgagccatagacctaaatgtaaga

SEQ ID NO: 20560 - DNA, 627 bp, Homo sapiens
tgctatttattactactatttattactatttctatttgtatagaaatagtaattattactatttctagtaataatagtagtaataatttatttctagtaataatttattactgtttctaagtaataaaaatatctcagatttagttgatacctcaactaaacttgtattgatacaaggtcaaaatagaaaacagttgctaaagtagtaagttcaattatttgacaaaaatttagactgttttctagggagctgttttttccacgattatttctgatgagatgatcagtggggttgaagtacacagtttattatttctggtctcttttaggcataccaacacacatagaaagacatgctggacagtttgatcattcaggtagaccaaatctacatgcattaacaagtgtmattgttataatattctgtcaactttctgtgtttctgacttccaacataaagcaggttttaaaaataccttaagaaagatagctttcacaaattgtccccaaaagaaagaaaaaaaaccggaaaagggagagaatacttggagtggaatgaaggtggacttctgcttgacaccaaacacaacaattaactcaaaatgagccatagacctaaatgtaaga

SEQ ID NO: 20561 - DNA, 593 bp, Homo sapiens
aagtgcaactgtttgtgcatccttctagcaggaacttaaacatgttggataaatagcagctgtcttaaggaatgaatagaaaatcaggaaaagtcatcatccatatgaactctacatatcatctgctttcttgcaaattgtattaatccgttctcatgctgctgataaagacatacctgagactgggcaatttatgaaagaaagaggtttaatggacttacagttcactgtggctggggaggcctcaccatcatcgcagatggcaaggaggagcaagtcacgtctcacgtgcatggcagcaggcaaagagagagcttgtacagggaaacttccatttttaaaaccatcagatctcatgagacttattcaccatcacgagaatagcacagaaaagacttgccctggtgattcaattccctcccactgggtccctcccacarcgcatgggagttgtgggagatacaattcaagatgagatttgggtggggacacagccaaaccatatcacaaatggaacaaattattcatgtggacaatgtgtttccacaagagagggtggcccttcttcaccatagaaagcagcaaaggaattc

SEQ ID NO: 20562 - DNA, 637 bp, Homo sapiens
attttttctttttctttcttttttttttttttgagacagagtctcgctttgtcgcccaggctggagtgcaatggcatggcaccatctcagctcacggcaacctcygcctcctgggtgcaagagattctcctgcctcagcctcccgagtagctgggattacaggcatgcaccaccacgcccggctgatttttttggtatttttcatagagacagggtttctccacgttggtcaggctggtctcaaactcccgacttcaggtgatccgcctgcctcagcctccgaaagagctgggattacaggtgtgagccaccatgcccgctcctattttttctaaaataattataaattctaaaattacctatctaaatggaggagggtcttctgacacctttaaaataaaatccagctcagtactgtaaatgtgtttacagaacttgtttaaagttcttacagttgtttaaatcagactagttaactaccctcactacttagatgcttccatttcttagagctcttttttaagcttatctgaagaaaagcccttccaatttaagggttatttccaattgcacattccaaattgagccttccatcttcagcattcaatatagatatttacaggcccctcttttaaaa

SEQ ID NO: 20563 - DNA, 557 bp, Homo sapiens
tgaatgaatcagtgagttaatgaataaataaacaaatgggaggtgttctcctttatattgtgttagaggctgaggatatagaaatatgtaactcagagtcccattccacaagcccatgctagtgagccaacacaaacaaaaaacaactcaaattcaatgtgattaattcctaaaatcatagcactaacattcagtagtcatgtccagctcttcctttatgtcaggtacctagacatagcggaacagaaaacccttcaaaagttcagtctagtctggaaaacaaacatgaagcaaagaaggcacaacaccatatggaaaagcaagacagaaatatgtacagggcagagaggctgcackgtgtcatttaatcacgaagactctgttattagactgctcgaatacacaaagctgtgttaccttggacatgttacttcacctctctgggcttcagttgtctcattctgtaaaatggtgatattactggaactcatctcatagggttgttagtgagtgaatgtttgtaaaacaggatagtgcccagcacatactagtaacaa

SEQ ID NO: 20564 - DNA, 615 bp, Homo sapiens
ccgtctatggaaaagaacaagcattacctgtgtgtgagtcctactagattcatcagacttttgtcttctttgcctcacactttttaaatgtattatcttcagaaaaagcatttttacttgaaaataagtttgtgtttctgctacagcaagttcatctcacattgagttattgtccaagactgccrtggtaaatatagtctgctccacctagaactgaacttattttcatatggattggtcctcctcagaaatttagcatgtgtataaacatgtttctttagctttcaaatgtgaatgagatccagtgctaagttgattttcatgaaatctatcttaagaagtagatgatgtgactatcaattgtgtacaggatagaatgttaggaaacttttgattctattcctgccttttattttgcagcaggaatttggcaatgtgtgtgctccctctgttgttgagtttcttgagtgtcttcatgaaatagatgcaaaatatcagctaatggccacaatagattttcactaaaaggctacacgaaattattaattctgtttgtgctgtaaaatgtgaattacagtcatgcatcacttaacaatgggaatacatttagagaaa

SEQ ID NO: 20565 - DNA, 615 bp, Homo sapiens
ccgtctatggaaaagaacaagcattacctgtgtgtgagtcctactagattcatcagacttttgtcttctttgcctcacactttttaaatgtattatcttcagaaaaagcatttttacttgaaaataagtttgtgtttctgctacagcaagttcatctcacattgagttattgtccaagactgccgtggtaaatatagtctgctccacctagaactgaacttattttcatatggattggtcctcctcagaaatttascatgtgtataaacatgtttctttagctttcaaatgtgaatgagatccagtgctaagttgattttcatgaaatctatcttaagaagtagatgatgtgactatcaattgtgtacaggatagaatgttaggaaacttttgattctattcctgccttttattttgcagcaggaatttggcaatgtgtgtgctccctctgttgttgagtttcttgagtgtcttcatgaaatagatgcaaaatatcagctaatggccacaatagattttcactaaaaggctacacgaaattattaattctgtttgtgctgtaaaatgtgaattacagtcatgcatcacttaacaatgggaatacatttagagaaa

SEQ ID NO: 20566 - DNA, 571 bp, Homo sapiens
atggcgtgacgtggtgctcaaagagacttggcagagtccctgctttaccttttacgagtgcctttggaggtcagggcaaggagaaaggagctgcctgtctgagaacagctgtcctgcctgtagaatcggcggttctgctggggtttcttgctagccaggcagggtgattgaataagaaagtgtgctccagaacaatggctctccaaggctgcttcagtcaacccagggggcccctccaccatctgggtttttgcaaagctcaccagtcctgcaccctggagccagggaaggtacctcttgggtgggagaaactctcttggttgcctcccttagctsttccactgacttggacagggaaaagggtgctccaagttggtttttaggagaaacatccctcccatcttttttaaaagaaacattctagagatctgccccttcagtaaaaaggcactattaaaaaaaaagtaagctgtcagatgtcaccattttatagagaagtgactagtttgcttttgtcaaacatgtttatagcccttaaattttcctacttccccaaaatgatactacttaa

SEQ ID NO: 20567 - DNA, 516 bp, Homo sapiens
agagagctaggattaagaatgtgtactttattatgcctaatgacattatacataccttggtcacaatgtcatactttaaggtaacataggaattacatttttgttcatttctgcaacttattgagaatgatctgttttggtgtttccacataagaaaatgaggaaaaaaatktatcattttctttgacatggagtaacattttattaagcaatgtttggactacagattagcataaacatgaaaaaggtaattttttgcatttcaatttattgccatagtaataagatgaggtctttttataacatatataatgaaataaatttgtaaaaatgtttgtgcaaagcattcagcaatgtagatttctttatgagtataaactttcaaggatttcatactagctgcctggattagccaaaaatatacattttattgacatatttatttattttcatcataaaaggggaatgagtatatcagttgcttctcttgaatttgaaaatcttcattcatccatt

SEQ ID NO: 20568 - DNA, 516 bp, Homo sapiens
agagagctaggattaagaatgtgtactttattatgcctaatgacattatacataccttggtcacaatgtcatactttaaggtaacataggaattacatttttgttcatttctgcaacttattgagaatgatctgttttggtgtttccacataagaaaatgaggaaaaaaatgtatcattttctttgacatggagtaacattttattaagcaatgtttggactayagattagcataaacatgaaaaaggtaattttttgcatttcaatttattgccatagtaataagatgaggtctttttataacatatataatgaaataaatttgtaaaaatgtttgtgcaaagcattcagcaatgtagatttctttatgagtataaactttcaaggatttcatactagctgcctggattagccaaaaatatacattttattgacatatttatttattttcatcataaaaggggaatgagtatatcagttgcttctcttgaatttgaaaatcttcattcatccatt

SEQ ID NO: 20569 - DNA, 516 bp, Homo sapiens
agagagctaggattaagaatgtgtactttattatgcctaatgacattatacataccttggtcacaatgtcatactttaaggtaacataggaattacatttttgttcatttctgcaacttattgagaatgatctgttttggtgtttccacataagaaaatgaggaaaaaaatgtatcattttctttgacatggagtaacattttattaagcaatgtttggactacagattagcataaacatgaaaaaggtaattttttgcatttcaatttattgccatagtaataagatgaggtctttttataacatatataatgaaataaatttgtaaaaatgtttgtgcaaagcattcagcaatgtagatttctttatgagtataaactttcaaggatttcatactagctgcctggattagccaaaaatatacattttattgrcatatttatttattttcatcataaaaggggaatgagtatatcagttgcttctcttgaatttgaaaatcttcattcatccatt

SEQ ID NO: 20570 - DNA, 511 bp, Homo sapiens
aaaagactgaattttaccctttttttgtgggagggtgagatgaggcaggagggttttgtttgaaaagcctcacaatctcttaaacataacttaaaaactgtttatacctccacataatgatctcaagataatgaccttgaagtgacagtctattgttasatggatagtaatgtatatatatgtatattcatgtgactaagtgttatgatgatagaaactagggctagatttccctcaataacttcatcacttcctagtagcaagttccaatttcagaccagtggtatagagcaatcaatagtggtgctctaaatttgctgagtgaaaattaccccaattagggttgaatacctaaattatagctagggagtgatgtaggctgttgagacaataaatccaaatgtgtggaatcgcaaatggaaggtttctcctgagaggagaaagttcaggcaaatttacctaaaaaggatgaaaaaatattttccaaccagtgaaagaatttgattctaaa

SEQ ID NO: 20571 - DNA, 511 bp, Homo sapiens
aaaagactgaattttaccctttttttgtgggagggtgagatgaggcaggagggttttgtttgaaaagcctcacaatctcttaaacataacttaaaaactgtttatacctccacataatgatctcaagataatgaccttgaagtgacagtctattgttacatggatagtaatgtatatatatgtatattcatgtgactaagtgttatgatgatagaaactagggctagatttccctcaataacttcatcacttcctagtagcaagttccaatttcagaccagtggtatagagcaatcaatagtggtgctctaaatttgctgagtgaaaattaccccaattagggttgaatacctaaattatagctagggagtgatgtaggctgttgagacaataaatccaaatgtgtggaatcgcaaatggaaggtttctcctgagaggagaaakttcaggcaaatttacctaaaaaggatgaaaaaatattttccaaccagtgaaagaatttgattctaaa

SEQ ID NO: 20572 - DNA, 535 bp, Homo sapiens
cccttcatgttaaaggaggcagtggggcagtgaactaacatttgcagtatctattgtgtgtccagcaatttgctaaaagaaaaagtgatttttatttaatccttaccacaacaaccacaaaaagagagttatgtcctcattttacagagagaaaactgagatcaagggagaataagtaacctaccaaagttcactggcatttctgaaacagaaaaacaggccgtcgagtcacagtaacccaatgtttgctcaattatgctaaaacagtctccgtagcagagaaaagcaacgtcatttaacttcaaaggctctagactttagtggacaccgtcttacagctgggcttcacaaagttcctactccctttcctgttaacctttgtgacacaggaagtgaaaaatgaacatgattacttttttcacaccaagctattaaccttgacaaagaaaattggattccataattagtatccagaaaggagaaatrggttaataatgaagatatacttttagagacaattaattgcagatactat

SEQ ID NO: 20573 - DNA, 2689 bp, Homo sapiens
tttttgaaacagaatcttgctctgttgcccaggctggagtgcagtggygcaatcttggctcgctgcaacttctgcctcctgggttcaagcgattctcctgcctcagcctcccgagtagctgggactacaggcgcccatcaccacgcccagctaattttttgtatttttagtagagacagggtttcaccatgttagccaggatggtcttgatctcctgaccttgtgatccacctgcctcggcctcccaaagtgctgagattacaggtgtgagccaccgcacccagccaatatttttctttaatcaactcacctctttttacttaactagtggtaacatccataaaatcctaggtggtggtggtggtggttgttgttgactctctgttgcccaggctggagcgcagtgacctgatcatggctcactgcagcctcaacctcccagaatcaagcaatcctcccacctcaccctcctgagtggctaaaactacaggtacagaccaccaatgcccagttaatttttttttttttttgatagatacgaggttttgccatgttgctcagacttctgggccgaagcgatccatctgcctcggccaccaaaagtgctgcgattacgggcatgaaccactgtacccagcctcaatcatagtttcaatgtttgttgtttgttctaatgcatgttgatacacaaacagaactgtaaatgtaaccaatgtgtgtgcttcctaaaattatcttgcatactacacgtggctagcatcctgccttttcagaaacatagagcaaggtgatccctgtgggtcccacagcactgttggtctgagagctgtcattatctcagctacttagtacttcctgtggaaatttcagggttgattcacatttcagagctacttgtcagtcaagatgagtgaaactaatggattatctagccatacgttgtccaggtctctcactacatataaacttggcttgagacttctattctgaaatgtatttgctcctataccaatataacttgctcgctccatcaagcagcagaaagatctgatcaaaaatttaaatgaacgcattttgcatataatattttgtctcttactattaagctcggtaaataggttgaaatctgcatataaatcacttatatttgcctagttgtctctatggggttgcagcaatggtgctttaaatatcatgtgaaatttttaagagattgctgggcatgggagagaatatggaattatttttctaaaaaaagaattaggagttagaaagcaggactttctttagagttgatgtggcttaaataatttcaaccagatgaactcttgtcaacaatttgcatttaaaatataattaattatgttagtcggcttgctattatactaggaaattaagataccatacatgtttataataggaaatttctcaattgtcttttttaatccactataaagctgcacatttattcccaccagaggaaagaaaaacatattatgctgctaaagtaataccagtcttttctaggattaggaatcagtggatggtttgtgggatttgtgatttctattctcaaataaaaaccagatgggctaaaccaacagcataaacagttgagggaaaaaaattggcagaaaaagtcacatttgataattaaatttgttgttacaccttctcttatttaatgagacagtcagaaactttgtttgcaagataatgtaactcccgagctctgatttaacccaataaaagttcagacttaattttgttcagggcataattaggtaacaatatgataatcaagtgggtctcttttattttctatttttatttttttgagacagggtcttgctctgtcactcaggctggagtgcaggggcgtgatcacagttcactgcagcctccaccttctgggttcaagccattctcccaccttagcctcccgagtagctgggaccacaggtgtgcaccaccgtccctggctaatttttctaatttgtctagaaacagggttgcaccatgttgtccagactggtcttgaactcttgggctcaagggatcctcctgcctcagcctcccaaagtgctgggattgtaggtatgagccaccacacttgaccaagtctttttattataatagaaacagaaaattcttgcccacagcaaactttcaggaaatagtcatactgttgttcatttaaatgtagacataatcagtttatgtacatatttatacataaaaataaaataaacagatttagtacatgccctttattgtacatgcattagcaatatcaatgtaattactacgtgtacattttattaatatttggtattctagcacaaatgcaaggaactaatttacatctactttataaactagagagtaggaacagttatgttaaccattcaatattttagagaacatgataccaaagaaataatgcacactttgccatttaatctaggcaatttgtctagaatcctagattcactggctcatacattcatgcacattccatgagagctgactgtgagtcagaccttgtgctcagctctttgcaagcattatcttacaatctccacttttcggaggaggaaaccgaggctttgagggattaaggtaatttccaggtttgtacagccaacacggtgcgtggctggtttgaatgtagacagcccacagcagg

SEQ ID NO: 20574 - DNA, 784 bp, Homo sapiens
tcactggatttagggcctagtctgaatccaggatgatctcatctccacatccttaaattaaagactttgtttccaaatgagatcacgttcacaggtacccagagttagaacttggatgtacccttttgggggacacaattcaacccactgcagcggatgttgctgcgtaattccctttaacggaggtaaagagtggagactaaattgaaggaataaaaaaaatgacatggataaaactaaacagatataaaaagagaatagaaaaatataagaggttataaaagatttatggaaattttgtgtggtcaaagcttactgagattggataaatttgtttataaggttttattaaaattaggtttagtatgaatacagaaacacgtataaaatttggttttctcttttgaaaaagatgtttgtgtagtattaataggaagcaaaaactgtagtagtaaagaaatgatgtttaaccttctttgagttatcttatwtatgcatattattaacaggtgttccaaaattatatgattcctaaaatgttgatatgtcttggtatattttatgtcataattatgactatttggttaaatttttgtagaaaataaccaaaaaaaaaaaaaaaaaaaaagagtggagactgccctgacagtcaacttcccctgcccccgggtgttgctgggcatgcctccacggctacatattctctccaaattggagcctgctctgacccaagcccagtactgggtgttgttttattctcacaagtactctgcaaggtccccac

SEQ ID NO: 20575 - DNA, 455 bp, Homo sapiens
ctgcatctacatctttaaggtcctttgagcatcttgtggttgcccttagcaacagctgcaccatgggttttacaggctctgtttctgaccaaaccataggatcaaagcctttcagggtggcacaggatcagagcccagccctctctctgatgtctggacattgtctacaacctccctgctgctccatccacgcccggcctcaccctcaccccacccacaccatgcacagatcattttcactgtcagaaagttctttattaggctgggctcagtgactcatgcctgtaatcccagtactttgggaggccgaggcgrgtggatcacaaggtcaggagttcgagaccagcgtggccaacatggtgaaaccctgtctctactgaaaaatacacaaattagctggacgtagtggcgggcacctgtaatcccagctacttgggaggctgaggcaagagaat

SEQ ID NO: 20576 - DNA, 1309 bp, Homo sapiens
tggattttcagcaccacagtctgaacatggacctcgaactttagataatctcattaatcctccactcaaccttcaagaaagtaagattcatgggatgttatccgtcagtaggtttaagctctctatgtagtctcttagtgtattttttcaaatgtctgtgcattcattaactgggtaatccaaggcaatgctttaaaacatagcttttattattattcaggtatggtgaagtcagcagatcaagaaagctgttgaaataatagtttgttactcacagttcccaagaggaaggggcatgccatgccacaagggctatgtgggggaagcaccagagttggtcaggaggcagagagaacaggggaaaacatgggcaagagtctttattatggtttctatgggaagaaacaggcaacccagattaagcaagtttaggattagctagtttgaataattccagtgggctgtagattgttaagagttgtccctagttgtctggtacccagcccctttgtaattaggacagaggagcagtcaccctgaatgtgagtgtggaggaggtggtagcggtgtgggctctggactggttggtttgaatatgaaaggcatgctcacaggctagtcacttactgtctctaggaactggctagccctgggaaggacatattcactctagagtcagtaaagccccagaggtataagcatcaaaaacctatggttaatacagatcatttaacatttttcattaattattacatatcaccttgtatcctggagttaatttggatgtacattgaagtacaagtgtgttttattttgtccattagatgactgtgaaaatgttatatgtaaattgaatttttataaattttcataaatagtactgctatttaaaaatgtataatttcagtaatgtttaatttttgctttcattcattagtgagtctttgtggtttaccttaactttttctaatattcctttctttttttttttttttttgagatagaatctcactctgtcacccaggctggagtgcagtggcatggccttggctcactgcaacctctgcctcctgggttcaagcaattcttctgcctcagcctcccgagtagctgggactacaggtgtgtgccaccatgcccagctaatttttttgtatttttagtagagacagggtttcgccatgttggccaagctggtctcgaactcctgacctcaagtgattggtccgcctcggactcccaaagtgctgggattacagacatgagccactacacccgaccagatttttytaacattcacttttttttt

SEQ ID NO: 20577 - DNA, 567 bp, Homo sapiens
tacacaaggcacacaagaatttggataaatatcaaagaagtcatgctgagtaaatgaagccaatckcagaaggacatatatatataattttaactttataaaattcttgcatagacaaaagctatagctgtgaagagccgattaatacttgtcaagggttagaggtcagaggagggtataatttcagagggttagccccagggagttttggagttgaggtaactattcagttttctgattgcggtggtggttataaaggtttatatatatgttaaaattcatagaactgtatatggaaacatcttttaatatatattaatattaaaaataaaatgttaaatgtgagttattcatttgccttattcaaccaacgccatgtacacataaacactaatcattacgggaccgaatcatttttcataaattcatctaaaattagtcaagctcacgtaaggtttattcaggtaaatgtcacttttatgtactctgatggatttttacaaataaaattaactaaactttgttttgaaactatctgagccatttcgacaagcaactaatgcagct

SEQ ID NO: 20578 - DNA, 638 bp, Homo sapiens
tgcaccatgagtttattttctccagatttaatagcaaaggaacataagtaggtggagggttgaggatttatttccttctgataatcaagagtactctctccagtagtgccacttacccgatgaatcgtagcaattggtctcaacactgatgagcctctctccgcctgctcaggctgctctgatcctgacacttagccgtctctccctaccgtgcctggtccagcactagactgcacagtcgacagtagtggagtttgccttcagtgcacagcacttcccactttccccctttcctttaccacacttgcccccaccctaatggtagctagggcagaggttttcatctgcatcttccaggtgaggccatggagggccaaaaactaacctgacctgcatgatayccccacaataattgccctgggattttcaaccagatcagctgactccaccaccactgttcttcccaagattggcttgttatgtgtgcctttattctgcatgccctcctgcctcctctgaaaggaattgactacaggattctcattccagaatgcccttccctacccatacccttatcttaaaaatcacatgaagtcctggagactggaggctctgaaatgcagttggtcccttgctcg

SEQ ID NO: 20579 - DNA, 2035 bp, Homo sapiens
  misc_feature (1)...(2035): n = A,T,C or G
acttaaaaaagaaaaaacataattgggccgggcgcggtggctgacacctgtaatcccagcactttgggaggccaaggtgggtggatcacctgaggtcaggagtttgagaccagcctgaccaatatgctgaaaccctgtctctactaaaaataaaaaaattagctggatatggtggcaggcacctgctaatcccagctacttgggaggctgaggcgggagaattgcttgagcctgcgaggtggaggttgcagagggccgagatcacacgactgcactccagcctgggtaacagagtgagactctgtctcaaaaaaaaaaaaaattacaatcacactctatttatgtatcacaatcctttaacctaccccaaaatacccatacttgttcactccattaaggntactcttcccttctcctagccaaaatctctcactgcctannnnnnnnnnnnnnnnnnnnnnnnnnnnnnnnnnnnnnnnnnnnnnnnnnnnnnnnnnnnnnnnnnnnnnnnnnnnnnnnnnnnnnnnnnnnnnnnnnnntttgaatggtggaggtgataggatcacttgagcacagaagttgggggctgcagtaagccatgattgtgccactgcactccagtctgggtgacagagcaagaccctgtctcaaaaaataaaatgaagtgtgaattaactagattacttctcaggtcctttcaatgttttatgtattatatgctgagcaacatttgatgtctaaaagaatactattcytaagaaccgaactatattcactttcttccagaagaattctcaccaaatgttcccaaatccttatcctcagctgtgaaggtaaaaattggaacatcactggaatggggtggaacatctgaaccaaagaaatttgatgactctgtgatacttagaccaagcaaggtcaataattttttaatgactctactcatttagattcaatagactacagttctactccttgtatttttaacacccatcattcaataaatcctaagcacatactaaatatagaacaatgtgctagaggatgttgggataaaaaggatgtataagacacaattcttgcctgtaagaagcttcttgtctagtagtagagatataggatgtgtacaaatctttatttttgcctatatttattataacaaagcaaatgtgatcaatgtcatatgaaagataaagaatttcaagtgtaggagatgcctccaggttggaagtgatcaaggaagatttagtgaaagaggaaacatttgagctgattcttgaaggatagttaaggcaaaaataaatgtttcatacttaagtaggaagcttgttcactgtagtcatttggtaggctatatcatgtttgctgtgataatatgttatagagaatgacaggtgtgcatattacttaagataaaccttttggaatagtgtggttgatggtaaagtcagagatgggggtgggaggggtttgtggattaaatagaaaataattattgaaagtaggtgtgtcctgcttctggaggaaaaatagaagtgtatctaaaaatgttatgcaattctgtatagtctgtgaaccaattctcttaaatttgagagatcagaaaaataattaaacattttaaagtacctacaattgcaatgctgataggcaaatattctctgccttttaaattataattctaatgtactagtaattattattgtcattaataataggcacatatatttactttaacaacttctagaggaaagaacagtcactcttccaatgttattaagtaactgcaatttccgcaacttacctctaattaaattttcagggaaaatgtttcaggtgggacagaaataagtcagaaggggatcaattttaggactaattgccatgggatataaaaatcagtgtaagagtgaacgatgccatttcataattcagcacacttacaaattaggaaaaatagggtctacatttcataattatctttacagctatattacatataaggtcaaaaatgccattttttgctgtgagtttg

SEQ ID NO: 20580 - DNA, 547 bp, Homo sapiens
tttaagctgccaacttgtggggtaatttgttacatggcaaaragataattaatgcagatttcatttattaatgaagtacattttcattggtaataatcactcataagaacgtcatctctagttaatatacatctctcactcaggaaacacaagcagatgttttactgaaaatactcaaagcaaccataaccaagaataaaatgatcaaatatttaaaagccactttcatgatgcacttgaactcaagtttccatgaaccaagcagctattgaaggaactaaatcactctgctcagctcaccttgcctttagagcagttctttcagttgcaatgacaaagggagcttgtctctgcctcgactaggcttttggagcagaaattccatgtattttttatatccatcataacttctagcacagggtatgaataacaggcatttaaaacagtaatttacttctaagatgatttctaatttttagaatgtgagctctgtgagacacaaagtgctgtgtgtctcatttaccattgtgtcctcagagccttgtgg

SEQ ID NO: 20581 - DNA, 547 bp, Homo sapiens
tttaagctgccaacttgtggggtaatttgttacatggcaaaaagataattaatgcagatttcatttattaatgaagtacattttcattggtaataatcactcataagaacgtcatctctagttaatatacatstctcactcaggaaacacaagcagatgttttactgaaaatactcaaagcaaccataaccaagaataaaatgatcaaatatttaaaagccactttcatgatgcacttgaactcaagtttccatgaaccaagcagctattgaaggaactaaatcactctgctcagctcaccttgcctttagagcagttctttcagttgcaatgacaaagggagcttgtctctgcctcgactaggcttttggagcagaaattccatgtattttttatatccatcataacttctagcacagggtatgaataacaggcatttaaaacagtaatttacttctaagatgatttctaatttttagaatgtgagctctgtgagacacaaagtgctgtgtgtctcatttaccattgtgtcctcagagccttgtgg

SEQ ID NO: 20582 - DNA, 547 bp, Homo sapiens
tttaagctgccaacttgtggggtaatttgttacatggcaaaaagataattaatgcagatttcatttattaatgaagtacattttcattggtaataatcactcataagaacgtcatctctagttaatatacatctctcactcaggaaacacaagcagatgttttactgaaaatactcaaagcaaccataaccaagaataaaatgatcaaatatttaaaagycactttcatgatgcacttgaactcaagtttccatgaaccaagcagctattgaaggaactaaatcactctgctcagctcaccttgcctttagagcagttctttcagttgcaatgacaaagggagcttgtctctgcctcgactaggcttttggagcagaaattccatgtattttttatatccatcataacttctagcacagggtatgaataacaggcatttaaaacagtaatttacttctaagatgatttctaatttttagaatgtgagctctgtgagacacaaagtgctgtgtgtctcatttaccattgtgtcctcagagccttgtgg

SEQ ID NO: 20583 - DNA, 547 bp, Homo sapiens
tttaagctgccaacttgtggggtaatttgttacatggcaaaaagataattaatgcagatttcatttattaatgaagtacattttcattggtaataatcactcataagaacgtcatctctagttaatatacatctctcactcaggaaacacaagcagatgttttactgaaaatactcaaagcaaccataaccaagaataaaatgatcaaatatttaaaagccactttcatgatgcacttgaactcaagtttccatgaaccaagcagctattgaaggaactaaatcactctgctcagctcaccttgcctttagagcagttctttcagttgcaatgacaaagggagcttgtctctgcctcgactaggcttttggagcagaaattccatgtattttttatatcyatcataacttctagcacagggtatgaataacaggcatttaaaacagtaatttacttctaagatgatttctaatttttagaatgtgagctctgtgagacacaaagtgctgtgtgtctcatttaccattgtgtcctcagagccttgtgg

SEQ ID NO: 20584 - DNA, 599 bp, Homo sapiens
agcaagggtccattcctccctgtcacctcacacggtggaaggggtaaggggtctctctggggcctcttttataagggcactaatcacattcatgagggctctacatgaatgtattctttgcaatacttatacaatatccactgaggttcagactcgtgtgtggtggttaaaatcgtaggctctggagccagaccacatggcttccaataacagcctcactactcaccagctctgtgatcttaagcatactacatgccatctttgtgcctttgtttcttcttctgataaattaatacccactaggactttccacttctggcaggatgacagacagatattttcaaagggccttctcatccctcctgaatatactactaaagaaaaaggttaatgcattcctgtgctcaccagaaagtagcagaatctccaaggagaaaaacaaaacaattagctgaaaccagagcaagaggcagtaggatattaagcaagtggagtagaaaccaatgaagcagagttcatctaataattcctgaaatcaaaagatcaaayttggagtgtaacctaagattccaaggactcaaaggactttagaggtatca

SEQ ID NO: 20585 - DNA, 557 bp, Homo sapiens
tttctggcacccagtgctgttttgaagcctttaatgtgctactccctgcccctgctgccaagtacatgcaaacgatctctctacctccagctcatgccacatttctctcctctccacctgttccaccagttccactgctgtatccccctttctagagtcttcctgtcctctttgctttttcccatctattctctgaattaggatctccaaggaactggtctctagatttggcagttcctctcaaaagttgagtgaggcagagcagattaccattaaccaaaggcataaaagactgatgaataaaccagattgccaaagggttcgtttaaaacagagagagtccttttcagggactgtgtgctccttctgcagtccaaggaaccctgaccctaggtccacattgtaggtcatgcagggtgtacattgtgcaatgccagggacagcatctataccaagyctactgtgatgtgacatgtgcaacatggtggttctcagtattagagtcgccgagcaggtgaattaacgagtttagtgagttcaaaattagaaacaaaaag

SEQ ID NO: 20586 - DNA, 600 bp, Homo sapiens
tgagaaaagaataaaaaggttgtataaatgttacagcagaaatttwaaaaaaaagtattactaaaaaaaggtgtggaatcagaaagttcaaaaaatattgacttagcaaaaaaaagcaaatagtttaattaataaaaaggtaagcacacacacaaatatataatatttgaaatgaacaaaggaatataaccacttaatgaaagggaattttataaacaaagatatatttgaagtcattaagaaaataaccagattaattcagaaaaaaaagataaaaatcaagaggaacacaaccattaatagacctggataatatggtttataatttacctcattcaagataaggtcaatcagataaacagaccaccagacagtgtcgacaatttgtctgaaattgctcatctcatcataaattctatttaaaaaactaatgttttcatgaaatatacttttaaaaataaatcaaaaggaagatatgagttttttgtggatttgagtactcatgatctctgtggctcttttgttaatattgacatttaatgtaattatcttcaaaaattcattcatgggttgtggttttatgttatctgtaaggaaatg

SEQ ID NO: 20587 - DNA, 600 bp, Homo sapiens
tgagaaaagaataaaaaggttgtataaatgttacagcagaaatttaaaaaaaaagtattactaaaaaaaggtgtggaatcagaaagttcaaaaaatattgacttagcaaaaaaaagcaaatagtttaattaataaaaaggtaagcacacacacaaatatataatatttgaaatgaacaaaggaatataaccacttaatgaaagggaattttataaacaaagatatatttgaagtcattaagaaaataaccagattaattcagaaaaaaaagataaaaatcaagaggaamacaaccattaatagacctggataatatggtttataatttacctcattcaagataaggtcaatcagataaacagaccaccagacagtgtcgacaatttgtctgaaattgctcatctcatcataaattctatttaaaaaactaatgttttcatgaaatatacttttaaaaataaatcaaaaggaagatatgagttttttgtggatttgagtactcatgatctctgtggctcttttgttaatattgacatttaatgtaattatcttcaaaaattcattcatgggttgtggttttatgttatctgtaaggaaatg

SEQ ID NO: 20588 - DNA, 582 bp, Homo sapiens
aaagctaaagcggaatacatgattggtggtttcaatggtagctactaacaagcttcaaatttagtgaatattctttaraacacagggtgtcatgccatatttctgcaatctcatgctttttcaaacagccattgaatttcatgaagtggcttgcatttgaacttttttaatttatttgtttatttctggtttccagtctcatcagagcaatttttctcatctttattgcttctccatctggttcaagaagttgtgagaaatgtaatagaattgaaaaattacttgagttttattttttttcaaacttcagaaaagtctggctacaacttcagggtaactgggttagtttttatctcataaaaataatttttctttcgtgttgtctccccatttcactgctattaataactgcatgtttgccagtcagcattcccctcatcatttcctctacgttacatgtgtgattctattcctgaagtttacttttcttctgtaaatctgtatgtatgtgatatggttgacttatttgtctcctccaaatcttatgttgaattgtgatcccaatgatggagctgggcctta

SEQ ID NO: 20589 - DNA, 549 bp, Homo sapiens
aaataaaacatccattaaaacatgttcctattcttattcttcacacccaggaactgaaaatgttaaaaggttagaaaataagaattggtcgggcgtggtggctcacgcctgtaatcccagcactttgggaggtcaagagatcgagaccatcgtggccaacatggtgaaacccccgtttctactaaaaatacaaaaaattagctaggtgtggtggcattygtccgtagtcccagctactcaggaggctgaggcaggaggatcgcttgaacccaagaggtgcaggtggcagtgagccaagatcgcgccactgcactctagcctggcgacaaagcgagactctgtctcaaaaaacacaaaacaaacaaacaaaaagaagcactaaatatggaaaagaagaactgataccagccagtgcaaaaacacacaaaaatataaagagcaatgacattacgaagaaactgcatcaactagtgtgcaaaataactaaatagcatcatgatgacaggatcaaattcacacgtaacaatagtaaccttaaatataaatggg

SEQ ID NO: 20590 - DNA, 549 bp, Homo sapiens
aaataaaacatccattaaaacatgttcctattcttattcttcacacccaggaactgaaaatgttaaaaggttagaaaataagaattggtcgggcgtggtggctcacgcctgtaatcccagcactttgggaggtcaagagatcgagaccatcgtggccaacatggtgaaacccccgtttctactaaaaatacaaaaaattagctaggtgtggtggcatttgyccgtagtcccagctactcaggaggctgaggcaggaggatcgcttgaacccaagaggtgcaggtggcagtgagccaagatcgcgccactgcactctagcctggcgacaaagcgagactctgtctcaaaaaacacaaaacaaacaaacaaaaagaagcactaaatatggaaaagaagaactgataccagccagtgcaaaaacacacaaaaatataaagagcaatgacattacgaagaaactgcatcaactagtgtgcaaaataactaaatagcatcatgatgacaggatcaaattcacacgtaacaatagtaaccttaaatataaatggg

SEQ ID NO: 20591 - DNA, 565 bp, Homo sapiens
gccctttggtgctttgggaaagrgttggcatgggaagacagctgttccctgtaaaagcaaaagaacaaaggatgcagtacaaacctgaccatgagaaatttccaagttgtccatagaactggtccttccttaggccataccttccaacaggaagactagcagggtggcctcctgtgtctatccacacatcaaacttggagcatctttctgttcgcctcatctgcctgtccagaggtcgtccactgcccaagatgaattcaagacctctgcccttggttgcccaggtcttcagtaatgaccccatctctgaagattgctttgtgtactctctctctcactcttctgtttcagattgtatatcttttcaactaattcatacgtgatttaaaggcaagtgattcctactttccttttaagttccaccatgcttgtcatggtgctagccacacagtacaaatagtactcagtattttatagaatccatcgctcatgatgggacccatccttttgttttggtatctgtaatcaacatgaaaacactccagcataaactctatgagatcat

SEQ ID NO: 20592 - DNA, 534 bp, Homo sapiens
cccctgtgcaattgaatatactcatacttatatacatagacacacaacacatacgtgaccatgttggtttgcatttcttacatcattttttctatgattgtttcccatttagtaatatgtcttagaaatccttctaggtctggccaggtgtggtggctcacgcctgtratcccagcattttgggaggccgaggtggatggatcacttgaggttaggggtttgagaccagcctggccaacatggtgaaaccccttctctactaaaaaaatacaaaagttagccaggcatggtggtgcatgcctgtggtcccagctacttgggagactgaggcaggagaatctcttgaatccaggacgtggaggttgcagtcagccaagactgcaccattgcactccagcctgagcaacagcgggagactccatctcaaaaaaacacaacaaacaaaaaaacccacaaacaaaaacaaaaaggaaatcctttcatgtcaccatgtatagaaatttgttcttttaacaatgtacaatgtcccatcga

SEQ ID NO: 20593 - DNA, 534 bp, Homo sapiens
cccctgtgcaattgaatatactcatacttatatacatagacacacaacacatacgtgaccatgttggtttgcatttcttacatcattttttctatgattgtttcccatttagtaatatgtcttagaaatccttctaggtctggccaggtgtggtggctcacgcctgtaatcccagcattttgggaggccgaggtggrtggatcacttgaggttaggggtttgagaccagcctggccaacatggtgaaaccccttctctactaaaaaaatacaaaagttagccaggcatggtggtgcatgcctgtggtcccagctacttgggagactgaggcaggagaatctcttgaatccaggacgtggaggttgcagtcagccaagactgcaccattgcactccagcctgagcaacagcgggagactccatctcaaaaaaacacaacaaacaaaaaaacccacaaacaaaaacaaaaaggaaatcctttcatgtcaccatgtatagaaatttgttcttttaacaatgtacaatgtcccatcga

SEQ ID NO: 20594 - DNA, 534 bp, Homo sapiens
cccctgtgcaattgaatatactcatacttatatacatagacacacaacacatacgtgaccatgttggtttgcatttcttacatcattttttctatgattgtttcccatttagtaatatgtcttagaaatccttctaggtctggccaggtgtggtggctcacgcctgtaatcccagcattttgggaggccgaggtggatrgatcacttgaggttaggggtttgagaccagcctggccaacatggtgaaaccccttctctactaaaaaaatacaaaagttagccaggcatggtggtgcatgcctgtggtcccagctacttgggagactgaggcaggagaatctcttgaatccaggacgtggaggttgcagtcagccaagactgcaccattgcactccagcctgagcaacagcgggagactccatctcaaaaaaacacaacaaacaaaaaaacccacaaacaaaaacaaaaaggaaatcctttcatgtcaccatgtatagaaatttgttcttttaacaatgtacaatgtcccatcga

SEQ ID NO: 20595 - DNA, 534 bp, Homo sapiens
cccctgtgcaattgaatatactcatacttatatacatagacacacaacacatacgtgaccatgttggtttgcatttcttacatcattttttctatgattgtttcccatttagtaatatgtcttagaaatccttctaggtctggccaggtgtggtggctcacgcctgtaatcccagcattttgggaggccgaggtggatggatcacttgaggttaggggtttgagaccagcctggccaacatggtgaaaccccttctctactaaaaaaatacaaaagttagccaggcatggtggtgcatgcctgtggtcccagctacttgggagactgaggcaggagaatctcttgaatccaggacgtggaggttgcagtcagccaagactgcaccattgcactccagcctgagcaacagcgggagactccatctcaaaaaaacacaacaaacaaaaaaacccacaaacaaaaacaaaaaggaaatcctttcatgtcascatgtatagaaatttgttcttttaacaatgtacaatgtcccatcga

SEQ ID NO: 20596 - DNA, 1270 bp, Homo sapiens
ccagccttcgatctcttcaggccttcagctgactggcagggtggggtcacgtcagggaggccgtctgcttcacacacctgacctcagatccaaatgttcatctcatccagagacacccacacacacacccaggatcaggttccaacaaatgtctgggcaccccttggcccagttgagttgacacataacattggccatcacaatttggaccagcgtgagcatttttacaagactgtggagacgcatgttgtcaggtctragagtgcagtgattgagctgtatggcaagtgcatatgtaactttttaagtaaactgtaaactgtttgccagacggggttgtaccgttttacactcccatcagcagagtaggagagtttcaggtagaactgcctaattcttggcaaacaaataaatgtggaagataaatatttttattgaaaataaaatccgagcttcgcacagtggctctcacctgtaatcccaacattttgggaggctgaggtagacagatggcttgagcccaggagttccagaccagcctgggaaacatagcaagaccccatctatgcaaaaaataaaaaattagctgggtgtgtggtacacatctgtggtcccaactactcaggaggctgaggcaggaggatcgcttgaatccaggagtccaaggctgcagtgagccgtgatcacactatggcactccagactgggtgacaaaacaagaccctgcctcttttaagaaaaaaacaaaaaaaaaaaaggaggccaggcatggtggctcacacctgcaatctcagcactttgggaggctgaggtgggtggatcgcgaggtcaggagttcaagaccagcctggccaagatggtgaaaccctgtctgtactaaaaatacaaaaattagctgggtgtggtggtgggtgcttgtaatcccagccactcaggaggctgaggcagagaactgcttgtacccaggaggcggaggttgcagtgagccgagatggcaccactgcagatctgtccagcctgggcgacagagcgacactccgtctcaaaaaaaaaaaggaaagaaaagaagaccccagctgagtaggcctcactgtgaaagcaacattggaggaaagccttgaaggaggtgaggtatatgtggtgaagagtgaggcctgcatggcccaggagacatcaggaggtgacccagcatgcacacgtgagcgagggacagtgggggctaccaaggctggagaggggaggtggtgggggggccctgctcacaggtcac

SEQ ID NO: 20597 - DNA, 544 bp, Homo sapiens
tctccaggagggaggtgcgtaggaagtgagaggtcacactgtcttctcacactaacctcagcctcagggtgtgaggccagcttcagaggggagaccacagttctggggcccagccgtttcagccactgccttcttgccttctttactaaggtcgttaacaagcatactcattagtggcaatttccctggtggtttttgtgatgtgggatttgtttgctatgaaatggctgaatccgcaaatcatttaaaatagtcaatcctactggagatagaaataactccttgcctgtgttratcctagctagtgaccagtgtccaggaggtgaaatcttgggaagagaggcctgggcttctgactcagcagaaaccaccgtcttgacatttttagtcttttctttggtcttgtcctactatagagacttctttctacaggccagatttgacaaaatagccctaccaaatcataatcagaggtgcaccagccaccctcccccaataaatttggccttatttcttgttaccctgatgatgctcaggattcata

SEQ ID NO: 20598 - DNA, 520 bp, Homo sapiens
aatttactggaattcaactactgggtaaaagaaaacaaacagagagggcttagggcagatatcatgggtcctggaccattaagcctcaaacagtccagccttgctrgaaagtttaggggaagaattatgtgtttaaaataaaccttaaaaaattgaagtattatgatcatacagaaaagcgcacagtcaccagtgttcagcttgatgaattatgacacagtgagcacacctgtattaaccacagccaaggtcaagaaacagaacttcatcataaccccagaggttcccttgtcccactcactgccagccctggtttctcttcctccctcttgtaaacgattttaatgattttccagcctccctcagagaagagaagcactttgttcaggaggcctggccgaggctggtggaagagtggaggaatcaactgaagaattaattgaaagtcatagagaaacaatgaccaacaaagaattgggagaacagacacagaattgtatacgtatagccttttattcca

SEQ ID NO: 20599 - DNA, 551 bp, Homo sapiens
tgcagccctttccctgcacacagcgagcccctctacttcactcccaccacctacacaccagggagaaacagcccaatgttcttcatgagggagtgaattttgtcggccttaggtcttgtctgaagagttgagaggttgcagtctggctgtaccagtgaacaacataaataaaggtaagggcctcaaccccagcatctcccctcctcccgccaaccagggagtgcttccctgtcctttctggcatgaaggccacacaccctgtacatccccctcccacratgtaagcatctgaaggccacacaccccgtacatccccctcccacgatgtaagcatctgactgcataattcaaatccaagctagcaacagttgtttctgcaccagctctcagggactgccccagttgctaagctgtttcagttctcaagggagtccaaaagaccagcatattatttttagaggggataagggaattgaaaaacagaaataggttattcttaaggagaagaacatggtacttctggctgaaatgctggttcttaccatccagca

SEQ ID NO: 20600 - DNA, 555 bp, Homo sapiens
aaacttacagtcatggcagaaggggcagcaaacatgtccttcttcacatgatggcaggagagagaagtgccaagcaaagggggaaacactccttaaaaaaaatcagatctcttgaaaactcactrtcatgagaacagcaacataggggtaaccacctcccactgggcccctctcatgacatgcagggattatgggaactacaattcaggatgagattttggtggggacacagcaaaaccgtatcatttaccctttaaggctagcataagtttctaatgtgttctctgtatgcaagccactatttactagctgattatccttggacaattctcttagcctttctaaacttcaattcctccatccataaaatgggaatgataataattgtaatgaacctgtagctttgtttgaaaaatcaaacatagccatgcatggacgacacttagccccataagccgcacatgactgttacttaacgttagttgcagttattagcaatagttcctatcaaagcacaacctactagttgcacagttaattgattggcttgaatag

SEQ ID NO: 20601 - DNA, 578 bp, Homo sapiens
ggagttgaacattgagaacacatggacacagggaggggaagatcaaacaccggggcctgtcagggggtggagggcaaggggagggagagtcttaggacaaatacctaatgcatgcagggcttaaaacctagatgatgggttgatgggtgcatgaaaccaccatggcacatgtaaacctatgcaacaaacctgcacgttctgcacatgtatcccagaacttaaagwaaaataaaaaattaaaattaaaaaaatttgtgttttatcataacattgagtgataaatgtgaaaaaacatgagaaatatatataaagagtgttccccaacaatagagtagtggtaataataggaaaagaaaaaccttaaaaaaaagtagatataattaaatattggatttgcccagtggtattttggttgtttagctctgcatttataataaaagcagcacccttacattgaaatgcctataggaaaaataactttttattataacagttactattctataacttctacctcctaaccctccttttctcataaaacaattacaattatgtaagaattgaggctcctttatttc

SEQ ID NO: 20602 - DNA, 578 bp, Homo sapiens
ggagttgaacattgagaacacatggacacagggaggggaagatcaaacaccggggcctgtcagggggtggagggcaaggggagggagagtcttaggacaaatacctaatgcatgcagggcttaaaacctagatgatgggttgatgggtgcatgaaaccaccatggcacatgtaaacctatgcaacaaacctgcacgttctgcacatgtatcccagaacttaaagaaaaataaaaaattaaaattaaaaaaatttgtgttttatcataacattgagtgataaatgtgaaaaaacatgagaaatatatataaagagtgttccccaacaatagagtagtggtaataataggaaaagaaaaaccttaaaaaaaagtagatataattaaatattggatttgcccagtggtattttggttgtttagctctgcatttataataaaagcagcacccttacattgaaatgcctataggaaaaataactttttattataacagttactattctataacttctacctcctaaycctccttttctcataaaacaattacaattatgtaagaattgaggctcctttatttc

SEQ ID NO: 20603 - DNA, 533 bp, Homo sapiens
ttgaggacatgagtgggggtgaagagggaggtcaggcgctgaagtctgtaaccaagaggaaccaagaagccaggcccaggagtcaccatgaggctggccggtgcatggctagatagcttgrtttttggccaggagagggatagagacggtctagaaacagaaatcagggatagggaggccactcagctccactgtcagtcacaagggcctccactccagccagcaggaggctcagtgctcaggggtaggccaggtcccacaaatgccacactcaacaaggacgtgaggagtggattgagggtttggggaaattggtgtatcacagactgcaagcctcgcagagactgggggagggctgggaaaagaagtcagagagctggacgcagtggctcatgcctgtaatcccagcactttgggaggccgaggcatgaggattgcctgagtccaggagttcaagaccagcctgggcaacatggcgaaacccatctctactaaaaatacaaaaattagcctggtgtagtggcgggtgcctg

SEQ ID NO: 20604 - DNA, 537 bp, Homo sapiens
aatttttgccatgtttgggttttctattatagggaaaatactraattgcgcattgtagcagagggaaacaagctggtggtgggagcggatagaagaaaatgaagacggctccaaacctggggagcgcgcaagaagatgacacaaacttttgaaataacatgaacacgtgggtttcctttttcttgtgcaactgctatttgttagcaatcctctcaatttgcagtgaattgagggtgagggaagaggagcaaatcacacagtgcaaatgaagacattaacatgcagatgaggtgaatcattcttttttcaaagcagaagatcaggtcccatgtaagccgaaataataataatacttacaatcaaaggaagcaatattatttagtttattgatgacaggggttgaggggagggaaagatacatgatgtctttacttctgtccaagtcacaaacaggtaactttctagtcctctgttcggaattccttgcagcagaatgtggagatgtctagcaattggctgagatttctttctaaggca

SEQ ID NO: 20605 - DNA, 568 bp, Homo sapiens
cctccacctcctgtgttcaagcaattatcctacctcagcctcccgagtagctgggattacaggtgccagccaccatgcccagctaatttttgtatttttagtagagacagtttcaccacgttggccagggtggtygtgaattcctgacccctcaggtgatccgtccatctcagcctcccaaagtgctgggattacaggcatgagccaccacacctggcctctttgttactttttattattttaaataatcagtgaaaacttttaaacttagtgtttaaaaaataatagtcagggcctggcacagtgactcaagcctgttatcccagcagtttgggaggcttatgtgggaggattgcttgaggccaggagttcgagaccagcttggcaagatagtgagacccccatctctacaaaattaaattaaattaaaaaataattatcccagtgtagtagcacatgcctgtagtcttagttgttccagaggctgaggcaggaggcttgcttgagcccaagagttcaaggctgcagtgagctatgattgcactacgtttgacatttcttttcagga

SEQ ID NO: 20606 - DNA, 568 bp, Homo sapiens
cctccacctcctgtgttcaagcaattatcctacctcagcctcccgagtagctgggattacaggtgccagccaccatgcccagctaatttttgtatttttagtagagacagtttcaccacgttggccagggtggtcgtgaattcctgacccctcaggtgatccgtccatctcagcctcccaaagtgctgggattacaggcatgagccaccacacctggcctctttgttactttttattattttaaataatcagtgaaaacttttaaacttagtgtttaaaaaataatagtcagggcctggcacagtgactcaagcctgttatcccagcagyttgggaggcttatgtgggaggattgcttgaggccaggagttcgagaccagcttggcaagatagtgagacccccatctctacaaaattaaattaaattaaaaaataattatcccagtgtagtagcacatgcctgtagtcttagttgttccagaggctgaggcaggaggcttgcttgagcccaagagttcaaggctgcagtgagctatgattgcactacgtttgacatttcttttcagga

SEQ ID NO: 20607 - DNA, 508 bp, Homo sapiens
tttttagttgttcttaatgtaataaaaagggatcttgctgtacttaatattctgagactttgtttttaaagtcaatgttatactggtgtgttttatccacattattgcatgtagctgtatatattagtccgttttcatgctgctgataaagacatacctgagactgggtaatttataaagaaaaagaagtttaatggactcacagttccacatggctggggaggcttcataatcatggcggaaggcaagggaagaacaaagatatgtcttatatggcagcaggtgagagagaatgagaaccaagcaaaaggcatttccccttataaaaccatcggatctcctgagacttattcactaccacaagaacagcatgggggaaaccaccccccatgattcaatcatctctcaccgggtgcytcccacaacaggtgggaattatgggagctacaattcaagatgaaatttggtggggacacagccaaaccatatcactgtacttttaagtttc

SEQ ID NO: 20608 - DNA, 535 bp, Homo sapiens
tgtttgtgccgggccaaggtggggggacttcctcttctccgcctgttttctttttgaaaggttcatagcttgtgagagcttttaatgtcataaggctttcatcttccatttgtcatctgtgacacagatgtttttcccaatttcttgtgtggcagtggttgtgtgtccactcacatgacagtctcaactgcctcggcccttttagtcttggtgagggtgggagacagcccccaaggccccattcccccagaaagtccttgcggcaggaacatcagagctccaccagttgggtgaggtagcacccggcactgattctctggctacccaagaagagagaccctctccttgccaaccccagcagggcctgtctcacccatcttccccccaagggccttcctccttcctgccctcctgcatccctggctyttcaacctctttattcccatcttgcattcaggctcctggctttttgagtctttgtttctacttaggaagggattaggggaggacaaaacaacctgggacaccaaagagg

SEQ ID NO: 20609 - DNA, 1269 bp, Homo sapiens
ttcctggctacacagactaaaaattatactacctctcacagaagatttgggtaagggggagaaaagacaaagctgttaaaacccatcccattgtgaacaaaggcaccactttcaaagatggccaatatcatcatctggaaaggaaccacatgtttcctgtatgtttctastctggtaaaagtaatcttccttggtccaatgacagaacaatacaaagcaatgataagaaataattagaaaacatacagctgaacggtttatattagatttgaggaacagttttccccttagagaagctgttacacaaggtatcagttgcatcaaaaatattcttccctggagactgctacagcatcacttcctcttcttattttgggatgctcactttctgaattactgattaaataattaatcaattcattctgaaattcacccattcaaaacatttattgagcaccaactctatgcatccagtgttaataaagacagggacatgagttccagaagatgacagtacaagtaagcaaaataacttggagtatgccctgcaatggcaagaggtggttgatgagagtagcctaaaaccctgggcttgaaagggttcgattaggataatgtgggaggcctgcgaagaggaaagaaaggtcactggaaaaaaaaaaacaaaaacttctgtgtgctagtttttcccagagctggctctggtttaatcaatgtgataaatactggtgtccatttgtaaactcctaaagaatatatttatttttccgtctacagcacctaatacatcttccatcatattatcataatggttatttctatagagaattttacccgtaacttcatttaacactctggtgggaagtggtaatttcaggtgtaccaaaatgaccccacctggaattgtaggaactaactcagagccagggaaagatcacttttctcttcacaatttatagatgagaaaactgaattgaaccccccaaagtcaatacagctcgttagtttttagtgatagggtcagtaaataactcagatgctctgactcaggcctatcccttgctgcagccatatttccaagagaatgaatgacttggagaaaaatgttgtaaacatcaatgagtgtcatttttattcaccaaaacttgtattcaaacaaaaattccaaagacttcccaattttcctcaatttaaactgacaacccatgattatctcatgtttagtacagatttaagcaacctcaccttcacagtttgtgaccacagccc

SEQ ID NO: 20610 - DNA, 1269 bp, Homo sapiens
ttcctggctacacagactaaaaattatactacctctcacagaagatttgggtaagggggagaaaagacaaagctgttaaaacccatcccattgtgaacaaaggcaccactttcaaagatggccaatatcatcatctggaaaggaaccacatgtttcctgtatgtttctagtctggtaaaagtaatcttccttggtccaatgacagaacaatacaaagcaatgataagaaataattagaaaacatacagctgaacggtttatattagatttgaggaacagttttccccttagagaagctgttacacaaggtatcagttgcatcaaaaatattcttccctggagactgctacagcatcacttcctcttcttattttgggatgctcactttctgaattactgattaaataattaatcaattcattctgaaattcacccattcaaaacatttattgagcaccaactctatgcatccagtgttaataaagacagggacatgagttccagaagatgacagtacaagtaagcaaaataacttggagtatgccctgcaatggcaagaggtggttgatgagagtagcctaaaaccctgggcttgaaagggttcgattaggataatgtgggaggcctgcgaagaggaaagaaaggtcactggaaaaaaaaaaacaaaaacttctgtgtgctagtttttcccagagctggctctggtttaatcaatgtgataaatactggtgtccatttgtaaactcctaaagaatatatttatttttccgtctacagcacctaatacatcttccatcatattatcataatggttatttctatagagaattttacccgtaacttcatttaacactctggtgggaagtggtaatttcaggtgtaccaaaatgaccccacctggaattgtaggaactaactcagagccagggaaagatcacttttctcttcacaatttatagatgagaaaactgaattgaaccccccaaagtcaatacagctcgttagtttttagtgatagggtcagtaaataactcagatgctctgactcaggcctatcccttgctgcagccatatttccaagagaatgaatgacttggagaaaaatgttgtaaacatcaatgagtgtcayttttattcaccaaaacttgtattcaaacaaaaattccaaagacttcccaattttcctcaatttaaactgacaacccatgattatctcatgtttagtacagatttaagcaacctcaccttcacagtttgtgaccacagccc

SEQ ID NO: 20611 - DNA, 556 bp, Homo sapiens
gtaccccagcacagagagattttgcatatttgcacattgtcagcatctagaacagtaacctaacatatagaaggcactcagtaagtatttgttggaagaatgaatggatttcagcagatcaactcttttggtcaagatttgaccaagatttttaatagatttttatgcagtagttcccccttatccgaggtttcactttccatggttttatttacctgcagtctgaaaataggtgagtacagtacagtaagatgtattgagagacatcattcacataatttttatgatagtatattgttacarttgttctattttattattattgttgttagtctcttaccgtgcctaatttataaattaaactttatcataagtatgtatgcaaggaaaaaacatagtatacatagggtttagtactatccaaggtttccagcatcctctgggggtcttgggatgtattccctggggatagaggggacggctgtattacgtttcttttctagagcacatttcgctggggtgttgtttgtctttgtgttttctgcagcttggacca

SEQ ID NO: 20612 - DNA, 550 bp, Homo sapiens
tcacggattcggggatgagaatgttctgaaggtcagtgccaggccctgcgctggatgctggtgttttgggtgtggggggtgtttgcaggagaggaggatgtgtgcatggaaggggtagcatactgtaaagtgctataccagaatgagggactcctgattaccctctccaccctgggtgctctaacagcctcaggatcccgttccccaattctcagcctccctttttgcccatgctgagcctctcagatcccctggcctcctgtcytgccttaccctcactgtctacagcagtccgcatggctgggccccccactccagctggcttgccctcactgcacccctcctgctcctgccctgacagtgccttgctctttctcaccccagggcctttgcacatgctgtccctttagccagcatgccctttcctcttgttatccacctgccaaactgcagctcactcatcatcctcccactcatcccctttgtgaggctttcctgattctacatttccaaggctgtaagttagtcattcctcctctccatgcttcca

SEQ ID NO: 20613 - DNA, 550 bp, Homo sapiens
gtaaattaatcatggtactttttaacctgcacgggagaaaatatattggactgagctgaagatgccggcgtttctggtctggcatcgccacctgtgagcttcagctcgggtttgaggaactcttttggtggctggygtttctggtctggcattgccacccgtgagatttcagctcgggttttcggagctctttcggcagcctatgttttgcacagtttgtggtgcagcagctgatcagagtttctcctaaaaagacagagccctgggatcttctcagccagacgcctccccaagctgtgttgatgtcggccagcctcacggcccacacaagcccataggcagttagccccggctgccggcgcatgtgcactgccgcgcgcccttcatacagtcagtgacggcagaggggaagcccagcgggcgggcaggcggggtcagcacagctcctcgtgaggaaggcagaataaatcagcaagcccccgccagctccatgatgagtcacacaccgtgaccttgcctgtcacctggccggagcgaggccgtgggcgca

SEQ ID NO: 20614 - DNA, 529 bp, Homo sapiens
gtgtatatatataatctcacacacacacacaaagggaaaaattattttgacttttttcctacttttaaaatggtacatttaagtttataattttccatgtcagtcaacataattttttaaactaaggtataatggtcaaggcttgtgctaatattacctactactcattgaaatttatattactttacccatcaaaactagtactccagatgtttacatcattgattaaatctcaagaatcttttgttcttaaaatatggaagttaaagattttaatttgaattaaagatagaaggatggtaaattcaatatagagggttgagatttaccagtgagaaaccctgttgaagtatcaggtaaatggtgtgacaaaattagaatcctgtcaaatcacctatccagccatcggggtcccttccttttttagactaatttctaaggtaaccagaatctaatgtatctatgttagggtctcagtaaagcaaagacgtttgtcagggcgtagactcttgagttaarttttttaatc

SEQ ID NO: 20615 - DNA, 472 bp, Homo sapiens
gcgggtggatcacctgaggtcagaagttcaagaccagcctggtcaacatggtgaaaccccgtctctactaaatatacaaaaattagttgggcgtggtggcggtcgcctgtaatcccagctactcgggaggctgaggcaggagaatcgcttgaaggcaaaggcaggggttgcagtgacccgagatcacacygctgcactccaggctgggccacagagcaagactctatctcaataaataaataacaacaacaaaaaaatcctccacttaaatctttgctataatttgccaagtatgttagtaagatgtttaggactttacatatgacagaaggaggataaagggggaaaacgtctttaaatttgtactttgtttttccactaagagggaagaaaggctgaaatggaacagattttactaaaattacaaaaatactattagggtgttcagctttgtatttctccattttggaaa

SEQ ID NO: 20616 - DNA, 595 bp, Homo sapiens
tttgagttggtagacaaatgctgtccaattcctgcgctgtttcccctcagctcacctctgcgaccacttgcatctattagtttcaaagatactaatagcttcccatctcaagtctttgcatctcaccattcctctgccgcagggtttctccagcacctagtgggggttgcttggctgcagaattgggaggatgttaacaccccagagccacctccacccaatggggaatgaaggtaaaaggatcaatacccctgcttccagctcatctctagagactgtttggaggcatattctacatggtttcttgtaggatctccagcagaatcaggcccaccttgtctgcagcagcagcccattattaatgcccacagtattgacctgtctctctcccctgtctcacttttttacatactcctcccttgtattgtgtaagaccactttccaaataaactatgtaactcaagtccttgtcgagggacataaatcctacttatgggagaaccaaactaagatagcagaaaatttstatgcccatttggcagattagaagactgagtttcaaagaactccaatgactttcccaaggtaattgggt

SEQ ID NO: 20617 - DNA, 599 bp, Homo sapiens
taagtggaagatctgattggtgggaaagcaggggagaaactaaaaccaaagagggtttcaatttacattatattgagaagtggagacaggaaaaaagagaaaaaaatactcagactgggatatttaagaattttgactcttggagatggaaggagtggatgcttgagaaggaggaaaaggttttctgagacgtgttcttgttgacattacaaaacacccaagtggagactcagttcccacagggctgctgaactgtgctgggtagaaggcgactttatgcagaggtratgtgggtccctgggactgaagagatttacacaagagcatcctgcattcattcaacacacatagaagtcccagatacacacaaaaaaagttctggggggaacacaagagatgaattagatacaaatcctgtcttcaggaaacttgaggtttaagtcaaaggtaagactcacacagaggtgatcacgtgaaaagggagacaatgccaagaaagaaaacgtttttctcagctatgtactctatatacagcatctccttggtgctttatataaagtatgtcatggaatatccacaaaaaccctgttaagtatccc

SEQ ID NO: 20618 - DNA, 599 bp, Homo sapiens
taagtggaagatctgattggtgggaaagcaggggagaaactaaaaccaaagagggtttcaatttacattatattgagaagtggagacaggaaaaaagagaaaaaaatactcagactgggatatttaagaattttgactcttggagatggaaggagtggatgcttgagaaggaggaaaaggttttctgagacgtgttcttgttgacattacaaaacacccaagtggagactcagttcccacagggctgctgaactgtgctgggtagaaggcgactttatgcagaggtaatgtgggtccctgggactgaagagatttacacaagarcatcctgcattcattcaacacacatagaagtcccagatacacacaaaaaaagttctggggggaacacaagagatgaattagatacaaatcctgtcttcaggaaacttgaggtttaagtcaaaggtaagactcacacagaggtgatcacgtgaaaagggagacaatgccaagaaagaaaacgtttttctcagctatgtactctatatacagcatctccttggtgctttatataaagtatgtcatggaatatccacaaaaaccctgttaagtatccc

SEQ ID NO: 20619 - DNA, 522 bp, Homo sapiens
tatagcgacatatagaattttagcttttttggaaacaatcccaattatttcatatattacttttctggatgaagggatggtatggaataatggaataatcagtggatattcctgataatgttttaaaaatagagaaatatcctgggtgaagaaaacttcctttggtgttgatttggatctgattaatgattttgataccagtgggctagggaaggtccccaaatgccagtgaaaccttggcctcagctgctgtccaggctcttgacaccgtcctgagaatgaattcaaggatgagttggaaaatagtggaagtacacagatttattacaaagcaaaaagtacgcattcaagaaagggcagtgcaggcagattcaagaaaagggagtgcaggcagactcaagagagagtcaggtgcaagggggttgggactgctacctttatgggattctgtaaccaaggggtagaagattcatgaagattcctggaacraggtggagatttcttggaactctggtaccaccc

SEQ ID NO: 20620 - DNA, 558 bp, Homo sapiens
tgcctcagctctaattaaacagttcaaaacatgacatttgtttttatatgaaacacttagaatccaaaaattttataaaaacataagctaggcaaaaaaaaaaaaaaagggggcggggsggcaaaaaagaaacattgagttccaactaaaagaagacaaagatctacttaacgtgtaatcatgctgaacaaaattaatcaatttttcaatgtcggcatttatataaatacaaatcatgctgacaaatacactcatcacacctacagcctgcctgcctactgcctgccttgctactagacaagcaaatggcccccactaaatgttgcccagtgaatcagcattgactcagcagaatgacttgacaatatggcattgtggttatctaaataagttgattattattcaaacatcttcaccagtctctaccacctaagaaaaatgcaaaaacttgcccgggtgcggtgactcccatctgtaatcccagcactttgggaggctgaagtgggcggatcacctgaggtcaggagttcacgaccagtctggccaccttggtgaaac

SEQ ID NO: 20621 - DNA, 586 bp, Homo sapiens
ttacaggctgtgagaactcacttagctagcactgctcaactgaatgtttctgatttttctttattaccaattaaaaggtttttttttttttttttttttttttgagacggagtctcgctgtgtcgcccaggctggagtgcagtggcgcgatctcggctcactgcaagctccgcctcctgggttcatgccattcacctgcctcagccttccgagtagctgggactacaggcgcccgccaccatgcctggataattttttctatttttagtagagacggggtttcactgtgttagccagagtggtctctatctcctgaacttgtgatccgcccacccaggcctcccaaagtgcttttgttgttgttgctatagttttgtttttggttctagggattgcctcagaaagggactggtgttgggagccttctaggaaggaaatgcacacggatgggggaccctggggtgcaggcgacaacagtcayaggtgcagcagaagccaggaagtcggtactgtcttaacttcgctcattgtgctttgcattcagatgagaatgtcatccagaaacacagtgtgttacttcttgcaa

SEQ ID NO: 20622 - DNA, 564 bp, Homo sapiens
gccaaatactaagttttcctccctccaagaatttctttcctctctcctgctaacttctattcccgcctaaggaacgctaatcctgggcccctcattccctgcctttcggaggcattgcagctgcctgggaagaggggaggaggaggaggctggtgaagaagagggagaaggagaagagagactgagggatgaggggaggaaggaggcragagagatccttagtgatagtattctgattggtcagtaatagcttcaagggaggctcagcctctgtagcacctatggttcaaaaaatcatgaggctgtctgttaggctgttcttacattgctgtaaagaaatatctgaggcttggtaatttattaagaggtataattgactcacagttctccaggctgtacaagcatggtgctagcatctgcttgccttccagtgaggcctcagggagcccttactcatgtcaaaggcaaaacaggagcaggtgtatcacatggtggcagcaggaacaagagaaggggggaggtgccacacactttcagataatcagatctaaacaacagcaccat

SEQ ID NO: 20623 - DNA, 588 bp, Homo sapiens
tataaaagtatcttaatgaggccgggcgccgtggctcacgcctgtaatcccagcactttgggaggtcaaggcgggcggatcacgaggtcaggagatcragaccatcctggctaacacagtgaaaccccgtctctactaaaagtacaaaaaattagccgggcctggtggcgggcacctgtagccccagctacttgggaggctgaggcacgagaacagcgtgaacccaggaggcggagcttgcagtgagccgagtttgcgccactgcactccagcctgggcaacagagcgagactccaactcaaagaaaaaaaaaaaatcttaatgatcttattaggtttaagaaattacagcaaggcagagttttgcttgtttggcccatagcaaaacagaaatatgcagataatggaatttacatgggtggtgatagaagaggtcttaaacactgtccccgaagggatgcttgcctcctatcttactatgtaatgagtcatccaggttccactgtaatctgacttcttttgggggatcttacttcctcctgaggcagctgtatcaatcagaagtctgtctgttaccaaaagatacagt

SEQ ID NO: 20624 - DNA, 588 bp, Homo sapiens
tataaaagtatcttaatgaggccgggcgccgtggctcacgcctgtaatcccagcactttgggaggtcaaggcgggcggatcacgaggtcaggagatcaagaccatcctggctaacacrgtgaaaccccgtctctactaaaagtacaaaaaattagccgggcctggtggcgggcacctgtagccccagctacttgggaggctgaggcacgagaacagcgtgaacccaggaggcggagcttgcagtgagccgagtttgcgccactgcactccagcctgggcaacagagcgagactccaactcaaagaaaaaaaaaaaatcttaatgatcttattaggtttaagaaattacagcaaggcagagttttgcttgtttggcccatagcaaaacagaaatatgcagataatggaatttacatgggtggtgatagaagaggtcttaaacactgtccccgaagggatgcttgcctcctatcttactatgtaatgagtcatccaggttccactgtaatctgacttcttttgggggatcttacttcctcctgaggcagctgtatcaatcagaagtctgtctgttaccaaaagatacagt

SEQ ID NO: 20625 - DNA, 588 bp, Homo sapiens
tataaaagtatcttaatgaggccgggcgccgtggctcacgcctgtaatcccagcactttgggaggtcaaggcgggcggatcacgaggtcaggagatcaagaccatcctggctaacacagtgaaaccccgtctctactaaaagtacaaaaaattagccgggcctggtggcgggcacctgtagccccagctacttgggaggctgaggcasgagaacagcgtgaacccaggaggcggagcttgcagtgagccgagtttgcgccactgcactccagcctgggcaacagagcgagactccaactcaaagaaaaaaaaaaaatcttaatgatcttattaggtttaagaaattacagcaaggcagagttttgcttgtttggcccatagcaaaacagaaatatgcagataatggaatttacatgggtggtgatagaagaggtcttaaacactgtccccgaagggatgcttgcctcctatcttactatgtaatgagtcatccaggttccactgtaatctgacttcttttgggggatcttacttcctcctgaggcagctgtatcaatcagaagtctgtctgttaccaaaagatacagt

SEQ ID NO: 20626 - DNA, 588 bp, Homo sapiens
tataaaagtatcttaatgaggccgggcgccgtggctcacgcctgtaatcccagcactttgggaggtcaaggcgggcggatcacgaggtcaggagatcaagaccatcctggctaacacagtgaaaccccgtctctactaaaagtacaaaaaattagccgggcctggtggcgggcacctgtagccccagctacttgggaggctgaggcacgagaacagcgtgaacccaggaggcggagcttgcagtgagccgagwttgcgccactgcactccagcctgggcaacagagcgagactccaactcaaagaaaaaaaaaaaatcttaatgatcttattaggtttaagaaattacagcaaggcagagttttgcttgtttggcccatagcaaaacagaaatatgcagataatggaatttacatgggtggtgatagaagaggtcttaaacactgtccccgaagggatgcttgcctcctatcttactatgtaatgagtcatccaggttccactgtaatctgacttcttttgggggatcttacttcctcctgaggcagctgtatcaatcagaagtctgtctgttaccaaaagatacagt

SEQ ID NO: 20627 - DNA, 567 bp, Homo sapiens
gtgtttccactttctgtcttacaagaaactgggcagtgacccaaggatggttccctaaatcaatggaaaaaaagtgaccataatttatcttttggtcagactctctctctgcaatcatctaattgcatttgagctgcctgttctctgctctcactaacattatttagactgaatgttgtgctttatgaattcttcttcaagtgattttcactgtagcttgattttgcttctctaaaatgtcaagagcwaggcaacgctagtgaatttgtctaaattcctgcaactcccctgaatatttggggtttatttcccaaagaaatcatctaactcagacatgtgtctaataacaacattgataaagaaaaaaaaagtggagccattgttaaccattacatgatttctgaaattaccagtgatacctttttttttctttcacaaaaaagtttctaaaataataacttacaaacaatttctgtcaattactgtgtgtactattaaaccttttgactaggaatcaataaactattgtcagggagccaaatccaccctgccacctatttttggaag

SEQ ID NO: 20628 - DNA, 523 bp, Homo sapiens
ttgatttttttaaagcaggaagactatctcatggaagtgggtttacggattaaagaatttgtgtaaagcactaaaaaatgggaaaagtttacagcttacctatttttctagcttattctttacatatgaaaatggctaactcattgctaactcgtgccaaggagaaatacctcagactaccctatttgtttcatagcctcactcctcatcctcctcatccctaaggcagttgtgcacatctttacataaccattatattaagtacaaacatagagcctgcatttatgtaattcctgattgatgtagaattagtttgtcttttatataccaatttattgctgaccaggaggatctctggaacatgacgcatttcaagactgatagaaattaaccttgaaaacatwagctacacccaccttccttttcctcttcctggagttaagaccaggacccctgatttccccagaataattttaggacctggtttggaaaactcaggataaataaagctcatcagaatatc

SEQ ID NO: 20629 - DNA, 590 bp, Homo sapiens
aaatatttgggaaagcgattactgctgtatgtgacactgcagtgatttcacgttgaaggaagtagcaactgtaatgagcagtcgctgcgggccagaaactctgctaaacactttayaaggacatactcattgaatactttcaaaacccaatccaattttggccacaaaaaggatgtggcattcgtaacatgctacaacatggattaaccttaaaaacattgtgctacgtgaaagaagctagtcatagaaaccacgtattttattagtccatttatatgaatgtctagaatacggcaaagctctaggggcagaaagtagattagtgttgcctagagctgggagcatgttggggtgcggagggggcgggcgactgctaatgggtatagggtttctttttgggatgataaaaatgttctaaaattgattctggtgatgattgcacaactatgtgaatatactgtaaaacattaaaaagtatactttaaatgagtcaactatatagtctgaattttaataaagctgtttttaagaaaaactttttaaaaactccgtgagatataggtaatcactatgctatattccttttacaa

SEQ ID NO: 20630 - DNA, 518 bp, Homo sapiens
aagcaattcttagaaggccattcctggcagcacttaaaccctgaggaagcaaaaagaaacctgaaacaaaatccagatgcccttcaggaatatgtgctttgttatggagggcagtgctgccaaagagaaatgacttctcagattttccatatattgtcccaaataatcttctcagaaaaataaacttggtgccacgtagattaatgtgctgcagagtaagaatgttcaggcagccctggaaatggtgctcccctgaggtgggaaggactggcaagcccactttcccttgttctcccaaactctckaccaaaagcctgcctgagagggggtgggcagaggggcctgggcagcacagtcaatgtccaagctcattttgggtccctgtttgtgtggcacctctggactgtcaggtagggccacctgggttcaggtatttctgaatcagcattcctatagaagttatctaattagacacattagaaatcaacagaaggagggctgggtgcagtggcttgtgc

SEQ ID NO: 20631 - DNA, 513 bp, Homo sapiens
ctagcacgcctggctaatttttttgcatttttagtagagacagggtttcaccatgttggttaggctggtttcgaactcctgaccttaactgatccacccgcctcagcctcccaaagtgctgggattacaggcgtgagccaccgygcccggcctaagctctgattttttatcttgcccaaattccaacctacaggcatgtgccaccactactggctacttttgtatttttggtagaggcagggtttcaccatgttggccaggctggtctcgaactcctgacctcaagtgatccatcagcctcgggctccctaagtgttgggattacaggtgtgggccactgtgcccagccaacattatcttttgacctatctttgttaacacaaatatgcacatttttcatttaatttttaataatgtattatagttcctatgcaggttgagtcatcagtttcttttccttgttgccttattaattttactttattattgagagttgtttcacaaacatgagac

SEQ ID NO: 20632 - DNA, 1246 bp, Homo sapiens
ggactccagcctggacaacagaatgagatcctgtctcaaaaaaaaaaggaaataaagaaaaagagaaagtggtgccattcaacatttgtttaggctcctcaaytgacacaaaaatggactttacactctaaagcctatctctcgaggcaataattcacaatttgcttctgaaagtacagggtgagtctggaaatggcttcctcaccgcctattaattaagcgtagatctctaatctctggttttcctctgggccagcagattgactcaccgtgcccttccaagctcggccttttgtcaagtacttctaggcccctgtgggagctcagtgggtctgtccccatttcgctctatcaccatatgggctgcactcacctgaggagcgagagggcacgtggccagtcagatgggggcagagtgtctcaggagtgcggcccaggctgcaggctaagcagtcggcctcgctggcctggggacagccgcccaggatgactgtccagaaacaacagcaaccctttcaagaacctctgaatcgcggttgtagctgtcggcacttgctccttcacactcccgggtgtgtgtgtatgggaaagggaacaggcgagcagggacaggactgaaaactcaggaaactataaataaaaaagaaaacttgagccaaatcttttcacactaaaggaaataaacatatggaataagttattggaacaagcagctgaagcaaagggcataaatgagttcaacagatatctgctttgttttctagaagaggaaaggaccaaagagaaactggataagaaagaggtaaacaggagtgttcctccctcttaatttatttattcactaattcgacaaaaattttggtgaacacctactaggtaccagacactgtgttaggttccaacgattcaaaaaacaaataaaacatggtccctgctcttaaattgctcacagactagtgttttaattgccttaaagtttttgtagttttagggttctattaaaattttatcacaataagtattttaagcatctcaagacatgtagggctttggaaataaaactgattaattaccacgttttttgtgctttgatgcatctttttcaaaccaaggccacttccaccctaggttggaaaagatacaaagagctaatagtagtgggggattcttttgttggtcacatgcagtgggacttgggttttctcagtacggtggaaacagcccagacattgcagccaggaagtat

SEQ ID NO: 20633 - DNA, 1246 bp, Homo sapiens
ggactccagcctggacaacagaatgagatcctgtctcaaaaaaaaaaggaaataaagaaaaagagaaagtggtgccattcaacatttgtttaggctcctcaactgacacaaaaatggactttacactctaaagcctatctctcgaggcaataattcacaatttgcttctgaaagtacagggtgagtctggaaatggcttcctcaccgcctattaattaagcgtagatctctaatctctggttttcctctgggccagyagattgactcaccgtgcccttccaagctcggccttttgtcaagtacttctaggcccctgtgggagctcagtgggtctgtccccatttcgctctatcaccatatgggctgcactcacctgaggagcgagagggcacgtggccagtcagatgggggcagagtgtctcaggagtgcggcccaggctgcaggctaagcagtcggcctcgctggcctggggacagccgcccaggatgactgtccagaaacaacagcaaccctttcaagaacctctgaatcgcggttgtagctgtcggcacttgctccttcacactcccgggtgtgtgtgtatgggaaagggaacaggcgagcagggacaggactgaaaactcaggaaactataaataaaaaagaaaacttgagccaaatcttttcacactaaaggaaataaacatatggaataagttattggaacaagcagctgaagcaaagggcataaatgagttcaacagatatctgctttgttttctagaagaggaaaggaccaaagagaaactggataagaaagaggtaaacaggagtgttcctccctcttaatttatttattcactaattcgacaaaaattttggtgaacacctactaggtaccagacactgtgttaggttccaacgattcaaaaaacaaataaaacatggtccctgctcttaaattgctcacagactagtgttttaattgccttaaagtttttgtagttttagggttctattaaaattttatcacaataagtattttaagcatctcaagacatgtagggctttggaaataaaactgattaattaccacgttttttgtgctttgatgcatctttttcaaaccaaggccacttccaccctaggttggaaaagatacaaagagctaatagtagtgggggattcttttgttggtcacatgcagtgggacttgggttttctcagtacggtggaaacagcccagacattgcagccaggaagtat

SEQ ID NO: 20634 - DNA, 1280 bp, Homo sapiens
ccacacaggaagaggagaggcccgagtcctccccactgcaaagagtgcaaatttctgtggctccaccccagtgtgcaggctggttagagtatttctggggagccccctgccacctgcctctctcacatggatgactctcaaatgcattattccaagcaaaagaagctattctcaaaagactgcaaactgtgtgattccatgttgatgacastcttacaagacaaaactatggggacagcaaacataccagtggctgccagagatcatggtagaaaaagaggttcacaaccaagggaaataagagaaggagttgtggtcagagataactctgacttcctggttgtcactcctgcccccacatggcgtgtgacttgtttcagctccccaaggcttaaggtgctatcctgggaagcagtgggtttctccttccctggaattaaccaagcagaggctggaggaactcttagcagagaggtgacagaagtcctgaaagcttttgccactgacagacaataaatacatatttcaccactgaccctatgacatgcaataactctagtcatttcttttctcttctcccctctcctcctatcccctcctcctctctgttttcttcttctctatgggtggggcccagcaatctatggttcaacgggcgtttcaggtgatcctgttgcttcctagagtttgagagtcactgccttagggaaaagaatagatgtgctccaaattgcaaacaggtagggaaagaattgcaccttcatgacgatgaaagagtcaaaggtggccttgtacttaacgtgtcataatatctgcagttggaggctcaggagttcgatccacagagcaaactcaatgagaacacagggtcagcatccacaaacatcctcagaagggtgaagcctttcaactgtgatgccttcaggaaaaatccacagaggccaggaagaaaagtgatggcaacaaaaagttgtttcaagcaaatgggataaaattagtaaggtcatgggtaaaatgcagttaagagattatgagatattcatcccaagtatgatggtgaccaaagtcctatttacaaagaggagatttatggggatcctgagataagaagaacttgtgttcaaacaagatatttaaaaacaaaaactctcatggttctacagacctgagaatggggttaacaagacagttctcattaaatgaaggaggtagcctaataaattaaggggatcatgaggcctctggactccagtcttcccagatttgggaaagatcagatg

SEQ ID NO: 20635 - DNA, 1280 bp, Homo sapiens
ccacacaggaagaggagaggcccgagtcctccccactgcaaagagtgcaaatttctgtggctccaccccagtgtgcaggctggttagagtatttctggggagccccctgccacctgcctctctcacatggatgactctcaaatgcattattccaagcaaaagaagctattctcaaaagactgcaaactgtgtgattccatgttgatgacactcttacaagacaaaactatggggacagcaaacataccagtggctgccagagatcatggtagaaaaagaggttcacaaccaagggaaataagagaaggagttgtggtcagagataactctgacttcctggttgtcactcctgcccccacatggcgtgtgacttktttcagctccccaaggcttaaggtgctatcctgggaagcagtgggtttctccttccctggaattaaccaagcagaggctggaggaactcttagcagagaggtgacagaagtcctgaaagcttttgccactgacagacaataaatacatatttcaccactgaccctatgacatgcaataactctagtcatttcttttctcttctcccctctcctcctatcccctcctcctctctgttttcttcttctctatgggtggggcccagcaatctatggttcaacgggcgtttcaggtgatcctgttgcttcctagagtttgagagtcactgccttagggaaaagaatagatgtgctccaaattgcaaacaggtagggaaagaattgcaccttcatgacgatgaaagagtcaaaggtggccttgtacttaacgtgtcataatatctgcagttggaggctcaggagttcgatccacagagcaaactcaatgagaacacagggtcagcatccacaaacatcctcagaagggtgaagcctttcaactgtgatgccttcaggaaaaatccacagaggccaggaagaaaagtgatggcaacaaaaagttgtttcaagcaaatgggataaaattagtaaggtcatgggtaaaatgcagttaagagattatgagatattcatcccaagtatgatggtgaccaaagtcctatttacaaagaggagatttatggggatcctgagataagaagaacttgtgttcaaacaagatatttaaaaacaaaaactctcatggttctacagacctgagaatggggttaacaagacagttctcattaaatgaaggaggtagcctaataaattaaggggatcatgaggcctctggactccagtcttcccagatttgggaaagatcagatg

SEQ ID NO: 20636 - DNA, 1280 bp, Homo sapiens
ccacacaggaagaggagaggcccgagtcctccccactgcaaagagtgcaaatttctgtggctccaccccagtgtgcaggctggttagagtatttctggggagccccctgccacctgcctctctcacatggatgactctcaaatgcattattccaagcaaaagaagctattctcaaaagactgcaaactgtgtgattccatgttgatgacactcttacaagacaaaactatggggacagcaaacataccagtggctgccagagatcatggtagaaaaagaggttcacaaccaagggaaataagagaaggagttgtggtcagagataactctgacttcctggttgtcactcctgcccccacatggcgtgtgacttgtytcagctccccaaggcttaaggtgctatcctgggaagcagtgggtttctccttccctggaattaaccaagcagaggctggaggaactcttagcagagaggtgacagaagtcctgaaagcttttgccactgacagacaataaatacatatttcaccactgaccctatgacatgcaataactctagtcatttcttttctcttctcccctctcctcctatcccctcctcctctctgttttcttcttctctatgggtggggcccagcaatctatggttcaacgggcgtttcaggtgatcctgttgcttcctagagtttgagagtcactgccttagggaaaagaatagatgtgctccaaattgcaaacaggtagggaaagaattgcaccttcatgacgatgaaagagtcaaaggtggccttgtacttaacgtgtcataatatctgcagttggaggctcaggagttcgatccacagagcaaactcaatgagaacacagggtcagcatccacaaacatcctcagaagggtgaagcctttcaactgtgatgccttcaggaaaaatccacagaggccaggaagaaaagtgatggcaacaaaaagttgtttcaagcaaatgggataaaattagtaaggtcatgggtaaaatgcagttaagagattatgagatattcatcccaagtatgatggtgaccaaagtcctatttacaaagaggagatttatggggatcctgagataagaagaacttgtgttcaaacaagatatttaaaaacaaaaactctcatggttctacagacctgagaatggggttaacaagacagttctcattaaatgaaggaggtagcctaataaattaaggggatcatgaggcctctggactccagtcttcccagatttgggaaagatcagatg

SEQ ID NO: 20637 - DNA, 1280 bp, Homo sapiens
ccacacaggaagaggagaggcccgagtcctccccactgcaaagagtgcaaatttctgtggctccaccccagtgtgcaggctggttagagtatttctggggagccccctgccacctgcctctctcacatggatgactctcaaatgcattattccaagcaaaagaagctattctcaaaagactgcaaactgtgtgattccatgttgatgacactcttacaagacaaaactatggggacagcaaacataccagtggctgccagagatcatggtagaaaaagaggttcacaaccaagggaaataagagaaggagttgtggtcagagataactctgacttcctggttgtcactcctgcccccacatggcgtgtgacttgtttcagctccscaaggcttaaggtgctatcctgggaagcagtgggtttctccttccctggaattaaccaagcagaggctggaggaactcttagcagagaggtgacagaagtcctgaaagcttttgccactgacagacaataaatacatatttcaccactgaccctatgacatgcaataactctagtcatttcttttctcttctcccctctcctcctatcccctcctcctctctgttttcttcttctctatgggtggggcccagcaatctatggttcaacgggcgtttcaggtgatcctgttgcttcctagagtttgagagtcactgccttagggaaaagaatagatgtgctccaaattgcaaacaggtagggaaagaattgcaccttcatgacgatgaaagagtcaaaggtggccttgtacttaacgtgtcataatatctgcagttggaggctcaggagttcgatccacagagcaaactcaatgagaacacagggtcagcatccacaaacatcctcagaagggtgaagcctttcaactgtgatgccttcaggaaaaatccacagaggccaggaagaaaagtgatggcaacaaaaagttgtttcaagcaaatgggataaaattagtaaggtcatgggtaaaatgcagttaagagattatgagatattcatcccaagtatgatggtgaccaaagtcctatttacaaagaggagatttatggggatcctgagataagaagaacttgtgttcaaacaagatatttaaaaacaaaaactctcatggttctacagacctgagaatggggttaacaagacagttctcattaaatgaaggaggtagcctaataaattaaggggatcatgaggcctctggactccagtcttcccagatttgggaaagatcagatg

SEQ ID NO: 20638 - DNA, 1280 bp, Homo sapiens
ccacacaggaagaggagaggcccgagtcctccccactgcaaagagtgcaaatttctgtggctccaccccagtgtgcaggctggttagagtatttctggggagccccctgccacctgcctctctcacatggatgactctcaaatgcattattccaagcaaaagaagctattctcaaaagactgcaaactgtgtgattccatgttgatgacactcttacaagacaaaactatggggacagcaaacataccagtggctgccagagatcatggtagaaaaagaggttcacaaccaagggaaataagagaaggagttgtggtcagagataactctgacttcctggttgtcactcctgcccccacatggcgtgtgacttgtttcagctccccaaggcttaaggtgctatcctgggaagcagtgggtttctccttccctggaattaaccaagcagaggctggaggaactcttagcagagaggtgacagaagtcctgaaagcttttgccactgacagacaataaatacatatttcwccactgaccctatgacatgcaataactctagtcatttcttttctcttctcccctctcctcctatcccctcctcctctctgttttcttcttctctatgggtggggcccagcaatctatggttcaacgggcgtttcaggtgatcctgttgcttcctagagtttgagagtcactgccttagggaaaagaatagatgtgctccaaattgcaaacaggtagggaaagaattgcaccttcatgacgatgaaagagtcaaaggtggccttgtacttaacgtgtcataatatctgcagttggaggctcaggagttcgatccacagagcaaactcaatgagaacacagggtcagcatccacaaacatcctcagaagggtgaagcctttcaactgtgatgccttcaggaaaaatccacagaggccaggaagaaaagtgatggcaacaaaaagttgtttcaagcaaatgggataaaattagtaaggtcatgggtaaaatgcagttaagagattatgagatattcatcccaagtatgatggtgaccaaagtcctatttacaaagaggagatttatggggatcctgagataagaagaacttgtgttcaaacaagatatttaaaaacaaaaactctcatggttctacagacctgagaatggggttaacaagacagttctcattaaatgaaggaggtagcctaataaattaaggggatcatgaggcctctggactccagtcttcccagatttgggaaagatcagatg

SEQ ID NO: 20639 - DNA, 537 bp, Homo sapiens
caacaaatattgagtgcctgttccaccaggctctggggtgagcaaaaacagactccttcagctctgcttagtcctctagatacttgaacatacctccttcccatccacagcctgtgcatgtggtttcccttgttctggaatccagtcctttccctctccttctttctctaccttcctgactttgcccagtcaacacctactcacccatcagatctgattacacaccattcattcagggatatcttatccgacctgaagctagtttaggtccccctgtatacgctcttaactgctccctatgtttgacttcacagcactcaccacattttctwttttaacatttgttcctgtggtgatatggtgatttggtttatacccatcttccttgccaggaagcgccaggagcttctacgtctggtttttgcttaccatcgtttccctccggtgctcagctggtgctccacaggcaatttactgattgactaaatgaatgagtaaacaattcccccataagagtattcagagttctgcccttca

SEQ ID NO: 20640 - DNA, 269 bp, Homo sapiens
cgatgagggggtggtgaccccctccagaatccactccccaaagtagccctgcttcccagccctccagaatggactcccagcccccttgttggtgccagctgaggtgagggcttcaagccaagccaggcccagcccggggcagagtggggagcttgctgggaaggtggatggatgatggtggtgctgctgcagggacttgggttgsgggggaggaggaggggcagctgtgccctgcccaccctggccctgccctttgtcctgacttctag

SEQ ID NO: 20641 - DNA, 565 bp, Homo sapiens
tgcttgttcatattctcagaagcccagtagtttaattaaaaatccagaatctagaatatcttttagttttttggttttttttttttwaaagtaaatttgtaaaagttaggccttggcatgaccatgggtattctggccacaactaaaatgacttcagagagttttgtgtacgtggaatgtataatgtatatatgtatgtacatacacaaaaatagatttaaaaaatcatatctaccccctcaaatctggatttttaaaatatctgtgattgtgtatcagtattctgtttactcatggatgaattatctgactagattgtaaggatattggaaatatatttccgagtttaacttctggcccatttggctttgtagaaagtctctgatggagcattaaggcgacattttgtaaaaggagcaaatttttctttttctttcttttcttttttttttgagagtctgtcacccaggctggagtatggtagtgtgatttcggctcaccgcaacctccacctcccaggttcaatctgttcttgtgcctcagcctcctgagtagctgggattac

SEQ ID NO: 20642 - DNA, 565 bp, Homo sapiens
tgcttgttcatattctcagaagcccagtagtttaattaaaaatccagaatctagaatatcttttagttttttggttttttttttttaaaagtaaatttgtaaaagttaggccttggcatgaccatgggtattctggccacaactaaaatgacttcagagagttttgtgtacgtggaatgtataatgtatatatgtatgtacatacacaaaaatagatttaaaaaatcatatctaccccctcaaatctggatttttaaaatatctgtgattgtgtatcagtattctgtttactcatggatgaattatctgactagattgtaaggatattggaaatatatttccgagtttaacttctggcccatttggctttgtagaaagtctctgatggagcattaaggcgacattttgtaaaaggagcaaatttttctttttctttcttttcttttttttttgagagtctgtcacccaggctggagtatggtagtgtgatttcggctcaccgcaacctccacctcccaggttcaatctgttcttgygcctcagcctcctgagtagctgggattac

SEQ ID NO: 20643 - DNA, 532 bp, Homo sapiens
cagattacgtagtagatgccaatgaatctagcatatactcagctatttgtattttgtagaatcgaacaattaaaaaaaggtggtttcacactgaaatacatacacatamattctgggtctaataaaaaggtatttaaagcctacctgtcatgtaggctgagttcaaaagaagaagatatttatatgcctgctgttttgatgattataagaaaaacttcaacatattccatctcatctttgtatagaatataacaaaaaattaaactctttagaggaaatagttgcagacttcccatctgacaagggattaataatcaaactgtatcaagagataaacacatcatttataaaaaagtaaaaaaattatgcatttatatttaaaatttaaaaacattctatagttggaaagccatatttttaacttagctaatataagaattttaactactagatatttatttactgaagatgtctgatttgttgaccctaacaagtctattttcattaaaaacaaaaaaagagaaaaatattg

SEQ ID NO: 20644 - DNA, 576 bp, Homo sapiens
aacaaaataaagaaaaacaaaatctacaaaacacctggaaataaaaagaaaaatggtctatttgaagaaaaccttaaaatctatgcagaacataaaacaaaatctgaataaaaagaaatatcatgttcttgtctgggaagacttaatatcataagaaagtgaattatatcaaaatttaaatcgaaatttaatgtatttccatctctaatcagacaggacactatggggaactgaataagtgattttaaaagtcatggaaaattaatractgagaataaccatgaaaagtatgaaaaaaggagacaaatgaattgctccaacagatatcagaacgctaaaattaaataaaaatactactaggataagaaaatacatatactgatgtaatgaataaagaatccagaattagattccagtaagtcaaactactttactataaaccaggggtggcatattcatccagtgggaaaaggacagtaagaagtgagtaaactatggcccactggccaaattgtggcctctgcctatttttgcaaataaagttttactgggacaaagccaagcctatcatttgca

SEQ ID NO: 20645 - DNA, 662 bp, Homo sapiens
tgtttattataattatataatttaatacaatattacaaaaaccaaggaactatgattatgaaaataggaggtttcttcctatgaaagctaaattaaatgctctggaaagactcgataaaggtcaattgcttaaaaattgctctcaaattataaaaattggagagaaattatgaaaatgtaaaaagattctactctcatgtatttcacaagggtcttcaaattctcactcctcattaaaaaaagaaactgaaactagaaaccttagatactttgatgcattgtggctaaggtttatgtgaaaaagacccatgctcamagaaaaggccctggtcccataccaaaatattagtgaataggagattagttaaaataaaatgtttactcatttatgcttccctttgaacttaaatagaccaacaggtagttctaccactttgggtaggaggtttctactttctggcttcactaagaggtacctttttatggagctggccatccatagcatctggggatccagtaatctgaaggctttcaaggttggaaaagcttaattctctttcacaaactaaggttggtcctagagaaagcagaaaggtgggagttatctgtaatagcaaataactttggccagacactcatgcctccatgccccacattcattt

SEQ ID NO: 20646 - DNA, 662 bp, Homo sapiens
tgtttattataattatataatttaatacaatattacaaaaaccaaggaactatgattatgaaaataggaggtttcttcctatgaaagctaaattaaatgctctggaaagactcgataaaggtcaattgcttaaaaattgctctcaaattataaaaattggagagaaattatgaaaatgtaaaaagattctactctcatgtatttcacaagggtcttcaaattctcactcctcattaaaaaaagaaactgaaactagaaaccttagatactttgatgcattgtggctaaggtttatgtgaaaaagacccatgctcacagaaaaggccctggtcccataccaaaatattagtgaataggagattagttaaaataaaatgtttactcatttatgcttccctttgaacttaaatagamcaacaggtagttctaccactttgggtaggaggtttctactttctggcttcactaagaggtacctttttatggagctggccatccatagcatctggggatccagtaatctgaaggctttcaaggttggaaaagcttaattctctttcacaaactaaggttggtcctagagaaagcagaaaggtgggagttatctgtaatagcaaataactttggccagacactcatgcctccatgccccacattcattt

SEQ ID NO: 20647 - DNA, 519 bp, Homo sapiens
agcagcctgggtccctcttttatggcaactctgagcagttgctatgctgacgggggactgcctatgtttgcacttgctatgaggggaaaagcaactgttgatcaggcttcctattgttctcagataaattttattcctaactgatccatcactgagaagttactatattggcatatagaccataaatatatttataatgttgactttagacattatcctttctaaagaagccctgtgggctttagacaaagctaagactttagaagtttaagcttctttgttgtwatttctaaaaagcatgtattaagtgcctaaattgtcaataccaggcaatctgccaagtgttcatgccctaacaacatttcctgagccaaaggcacagtttgacataacacctgattatggggtgaatattttcaacagaattgtgctagaaaatccaggctgtctgttgttctacttgacgcaggctgtgatttcttcagggtaggcaccaggtcagagcaaatacatcactag

SEQ ID NO: 20648 - DNA, 506 bp, Homo sapiens
cccaaacaatgaagctgagaatatgagaggaccctgagtccaaagatatcccaaaagcctrtattcttaagtagaggctgaaggtaccaagagctaggaagtcagtgagttgtcttttcttaggataaacagtgagatttgcagcagtcaatccacttctttctctggataatagttgatatggtttggatgtttgtcctctccaaatctcatgtggaaatgtgacttccaatgttggatgtggggtctagtgaaaggtattggttcatgaggagagatccctcatgaatgtcttagcaccatccccttggtgatgagtgagttcttgctctaggttcatgtgagatctggctgtttaagagtatggcacctctctcctctctgtctcttgctcctgcactcaccatatgacaggctggctcccctttgccttccaccatgattgtaagcttcctgaggcctcaccacaagcagatgctggcaccacacttcttttacagcctaca

SEQ ID NO: 20649 - DNA, 447 bp, Homo sapiens
ggtaagtattcaatttagtatatttaggacaatgaaaataacattgtaaatcaattttaggtttctatataaaaatgatgtataagggcaaaacctttccattcatcttaaaggctattaaatgtacagcctatatttattcccataatgagaaatattaacttttccaagtcatttgtccaaagagtgcagaaaaagcaccatgatattcaagtattttattgatctgacatgtaagaatttctgtatgagtatatatatagtgttatttaaagtgagtagacatctgggcacgaatcctgggactttgggaggccaaggcaggaggatcgcttgaggtcaggagttcaagaccagcctgaccaacattgtgaaaccccrtctctaatgaaaatacaaaaaaattatctgggtgtggtggcacgcacctgtaatcccagctacttg

SEQ ID NO: 20650 - DNA, 447 bp, Homo sapiens
ggtaagtattcaatttagtatatttaggacaatgaaaataacattgtaaatcaattttaggtttctatataaaaatgatgtataagggcaaaacctttccattcatcttaaaggctattaaatgtacagcctatatttattcccataatgagaaatattaacttttccaagtcatttgtccaaagagtgcagaaaaagcaccatgatattcaagtattttattgatctgacatgtaagaatttctgtatgagtatatatatagtgttatttaaagtgagtagacatctgggcacgaatcctgggactttgggaggccaaggcaggaggatcgcttgaggtcaggagttcaagaccagcctgaccaacattgtgaaaccccatctctaatgaaaatacaaaaaaattatctgggtgtggtggcacrcacctgtaatcccagctacttg

SEQ ID NO: 20651 - DNA, 531 bp, Homo sapiens
cagtgggaggatcacagcggttcatttactcaacacatacttattgtcaggcaytgtgttccatcgttgggctataatgggtgagtaaaaaggaggtgtggtccccatcctaacatgctgtacaacatattagcaggaatttcacatgaagaggaattttctactattacttcattgcttcgttctccgatttttttttaaaaaattctcagctaatactaatgcaagtgctagctttgagtaccacttgtgtagagacttgtgctagaccctgggatacaatctccagagatgagtaacttctaaatcccatctctaagatatggtggatagtgatcatcagtgaggcttgtactatgcaaatcacgtggtatgggctggtttggagcttcaactcattttcataggtcatgctttctcaaggcagcacctctcaaaagaagtttggcaagaattgctctgaggattggaacagagtcaacaatacttgattctgggaagagctatttttccagtgagtgaagggaataa

SEQ ID NO: 20652 - DNA, 938 bp, Homo sapiens
ttctctaatgactaatgctagtatcttttcactgcttattggccatttgtgtatcttctctggggaatagcttaatattgaactttgytcatcttttaattgaattgtgtttttactgctgatttgtaagagttcttgaagcattctagatacttaatacttgtcagacatatgtttgcaaatattttctcctattctgttacttgcttttcattttcttgatagtatcctttaatgcataaaagtttttaattttgataaaatctaatttatcgattttcctttggttgcttgtgcttttggcatcatatataagaactcattccctaataaaaacttttgcatattttcacctatgtttctttctaggagttttatatttatacttattaaatttagatctttgatctattttgggttagtttttgtatatggcatgaagtgaagtaggtgttctgattcattattttacaggtggatattcagtttctccagcaagtattttatttataatatttacttggtagtgttcccttggtatgtggtgaatgaacccaacagccttgtgtggaagctccttttattctattttattttatttttttggtctgctcagtacatttctccttttctcttattttctctaacagattctgttcttcttaagctgtctgtcattcaaagatcttttttggcttgctctggttgggtcctgttggcatagcctatccaaataagatgacatgttgccaaagctacatatcttgttatttaaaataaggcataaaatttgcttacagactggattttaaaggaaaaatgtaactttacatagtatctgtctttgaatcatttacagagtgacctgaacaccttcctggtttgagaagattagaagaagaatctctatcaggaccagtcttcagccataggggttc

SEQ ID NO: 20653 - DNA, 545 bp, Homo sapiens
taacaagttaaataaattctgagaactttgaaaatatatacaagtggatgtgatgatgtagttttcattcaaattgtgttttgattttgaaaaaaaatcacaacaaaaggaaataattcaacaaactggctatttaaatattactgttattttaccaaatacagcttaagaagaaaccatagaaacagaaaaactgtttgtgtgtttagacaccatcttattgtcctatttattgttaattctcctcatgggaactgttctccacactgctgctgaactaaatgccagataagccatctctctcttccatgtcgttttatttaaatagaagaacaatgtgaagagttatcttttaagaacaacaataaaaagaagcttttttactggcattaatacacaattcatggtggctataggaaatgaatacacaaagcaccatcctggatacttaccacacacattttatttaattctggcaactatatattatttcccagttaaacccagsgagcttgaggttcagagaagttaagaaacttccccaa

SEQ ID NO: 20654 - DNA, 573 bp, Homo sapiens
tgtctaaaatattccttttcagaaaatttgcttttggcaatcattcatcaattttaaaaaatatgttcaaatgactgtattaaaatgtcaccatttacatatatttgtccataataatgagttaggatgaattctcaaatttaattttaaagtggacttaatgaagtttctttttttagagagtgattataatagcaggtttacgtaagtgtttattaaattttctgtgatgtagatgasaagcaatatgttaaatacaatttaatcatatacatcatatagtacaaatacaaatacatcatatagtagaaggaggaccaaccatccattataaggaaaataagttaatagcgggtggcaaggtaaacatgtgttttaaagttttggattatattacagtatctaactttatagtcagtgaggtgatatctaccattagagtctggttttcctgggaaatctgctcttggcttttgctgtttacagacagaattcactgggtaaatcttggtcatgcacattgaatgcataacagggtatagagtgaagtgcctgaagatacctgtttgaaaa

SEQ ID NO: 20655 - DNA, 626 bp, Homo sapiens
ttgtttgagagagaaagagagagaataccaatcttaaatttataaagggtttaaaaatggcctcccacaataattaatattaacattgggatccataagtaaccaaatgaagaaataatgttcctaactgaagaatattcttattgcagatcacacaattgagaaggagcatagcatatataaggatttaagtttgatgtgcctggaatgcaaagtggagaaggtcagaagtcatgaaggagatgtatgatgtgttttggattttggattttattcttcttgggaagtcactgaagaattttgatggaaacatagttaacatggcccagttttcattttaggrgtatcaatgtgaagaatagattagaattggcaaggccaggctgttaaggagaaaacttaggaagtgattactgtaatttaacagagaagagtcctggcctgagtgtgtatgctaatattaaaaaatgaaagtaaaaaaattaatggtttctttagaagatagaactgttagactgggcgatgattagatatgtgttagggtagggaggcaagtatgaagatggagaagctgtctagaatgatatcaagagtaagttagtgtctgttggtgtgggtcattgaaa

SEQ ID NO: 20656 - DNA, 599 bp, Homo sapiens
tttaagaccagccaaatattgtgctcattaaaaattcccccttggttttagcatccattgatgtttcttgctttatccagacatcacagtgatagcccccaaatgatgattttttccaatttgttctgcattgactagtcacccctcagcattctgttaggttggtgcaaaagtaattgccattgaaagtaatggcaaaaaccacaattacttttttttttttttgagacggagtctcgctctgtcgcccaggctggagtgcagtgacacgatctcggctcactgccaactccacctcctgggttcacgccattctcctgcctcagcctcctgagtagctgggactacaggcamccgccaccatgcccggctaattttttgtatttttagtagagacgaggtttcaccgtgttagccaggatggtcttgatctcctgacctcgtgatccgcccgccttgacctcccaaagtgctgggattacaggcgtgagccaccacgcctggccaaccacaattagttttgcaccaacctaatactacaagcaggagccatctcttgcttggactcgtgaattcctgtttttcaatggtttacaatt

SEQ ID NO: 20657 - DNA, 675 bp, Homo sapiens
gaaggtgtaggcatggctgcatgactttctgaaggccctgtgggagaatccattttcacgcctttcccagcttctagaagctrattgcattctttggcccacgggtcccttccatctttgaagccagcaattgctgtcaaatctttttcctcatgctgtctccctggatctgactcttttgcttctctgtctcccatttaaagcccactcaaataatccaggataatctcaatattttaaagtcagctgataagcaacctgaactccacctgaactaaccatgtactattgcatatttctggggattagaacatgaacattattctaccaccacaaacaggaacttttcctgcccctgaaatgtactcgtttttggaaaaagcatgatggtctttaactttacacaatgaaatgaccaattttaccatttaggacagaaagtcaaggataattatattggtccattcttgcaatgctataaagaaatacctgagactgggtaataaagaaaagaggtttaattggttcacaaaagaggtttaagagttctgcaagctgtataggaagcattgagacaaccaggttgcggggggactctggagaaactccaaccagcctgcccactgaggtagagcctcaggaagttcactctctacacgggggaggagcctggcc

SEQ ID NO: 20658 - DNA, 675 bp, Homo sapiens
gaaggtgtaggcatggctgcatgactttctgaaggccctgtgggagaatccattttcacgcctttcccagcttctagaagctgmttgcattctttggcccacgggtcccttccatctttgaagccagcaattgctgtcaaatctttttcctcatgctgtctccctggatctgactcttttgcttctctgtctcccatttaaagcccactcaaataatccaggataatctcaatattttaaagtcagctgataagcaacctgaactccacctgaactaaccatgtactattgcatatttctggggattagaacatgaacattattctaccaccacaaacaggaacttttcctgcccctgaaatgtactcgtttttggaaaaagcatgatggtctttaactttacacaatgaaatgaccaattttaccatttaggacagaaagtcaaggataattatattggtccattcttgcaatgctataaagaaatacctgagactgggtaataaagaaaagaggtttaattggttcacaaaagaggtttaagagttctgcaagctgtataggaagcattgagacaaccaggttgcggggggactctggagaaactccaaccagcctgcccactgaggtagagcctcaggaagttcactctctacacgggggaggagcctggcc

SEQ ID NO: 20659 - DNA, 533 bp, Homo sapiens
tggattatcagtagattaaagtcattcatagctccattatatttgtttagtaaatcatatactagatttcatatttgcttcagtttgtgaacacaagatcagtcaaattttctgtctctctgtatctccatataacaacatttcaaaagctagcatgccttgttaataacactctccaaaggtgagtactcaaaaatacaaagtaggtgctactttggcactcagaaacctgctcttgattaactcttgattaagccaaagtcatcttaattgtaaataaattttaatctactaatccccaaaaatgcccaagagcttttattcttgtcatatacatatacacacatatatacacayatatatatatgaatgcacacagagacccaaacagatgtaatattacacttagatgtagtagcaccttaaaggtaattatcaaaaagggtgcaataaaattttctatcaaatgatcttatctcagttcctaccacttaggattataataatttatgttccatctatcgccatcataa

SEQ ID NO: 20660 - DNA, 667 bp, Homo sapiens
ggctcagagagagcacctgagagcaggcagcgcctctgcccacccggcccggggatgacggygcaggacagacacctggggggctccagctgtgatccagatccagacctggacggcccaggaggatggaggcagagcccgggcccacagatctgcagactcaggcacctgcagggcaagtcctcagaagatgaacagtcccctgtcccagacacacattgtcctggacaccaaagcgggacccccagatacaggagtggaccaggaagcgtcccaggaactgccctgtgctcgggccctggactgagaccacaggggtccaggcggtgcgaggtgggagagactgaggagtcccgggtccttgagcgaggagacgggcgccgtgtcaagaaaacagccccccaaacccctggccctggcccaggcgtgggaagcatccgagagtcatcagggagagtttccgaccgcccaggataccaggatgcagttggctcaggtgggagcagacagggcttcttgcctcagccaggtgaggctcaggtgggccaaaggagagggcccaggaagtagggggacagcaggggctctcccaacacagagccgcgatctcaccccagcaggacgcaggtgccagtgcaggaggggtgggcatcaggacgtcagaaaa

SEQ ID NO: 20661 - DNA, 667 bp, Homo sapiens
ggctcagagagagcacctgagagcaggcagcgcctctgcccacccggcccggggatgacggcgcaggacagacacctggggggctccagctgtgatccagatccagacctggacggcccaggaggatggaggcagagcccgggcccacagatctgcagactcrggcacctgcagggcaagtcctcagaagatgaacagtcccctgtcccagacacacattgtcctggacaccaaagcgggacccccagatacaggagtggaccaggaagcgtcccaggaactgccctgtgctcgggccctggactgagaccacaggggtccaggcggtgcgaggtgggagagactgaggagtcccgggtccttgagcgaggagacgggcgccgtgtcaagaaaacagccccccaaacccctggccctggcccaggcgtgggaagcatccgagagtcatcagggagagtttccgaccgcccaggataccaggatgcagttggctcaggtgggagcagacagggcttcttgcctcagccaggtgaggctcaggtgggccaaaggagagggcccaggaagtagggggacagcaggggctctcccaacacagagccgcgatctcaccccagcaggacgcaggtgccagtgcaggaggggtgggcatcaggacgtcagaaaa

SEQ ID NO: 20662 - DNA, 667 bp, Homo sapiens
ggctcagagagagcacctgagagcaggcagcgcctctgcccacccggcccggggatgacggcgcaggacagacacctggggggctccagctgtgatccagatccagacctggacggcccaggaggatggaggcagagcccgggcccacagatctgcagactcaggcacctgcagggcaagtcctcagaagatgaacagtcccctgtcccagacacacattgtcctggacaccaaagcgggacccccagatacaggagtggaccaggaagcgtcccaggaactgccctgtgctcgggccctggactgagaccacaggggtccaggcggtgcgaggtgggagagactgaggagtcccgggtccttgagcgaggagacgggcgccgtgtcaagaaaacagccccccaaacccctggccctggcccaggcgtgggaarcatccgagagtcatcagggagagtttccgaccgcccaggataccaggatgcagttggctcaggtgggagcagacagggcttcttgcctcagccaggtgaggctcaggtgggccaaaggagagggcccaggaagtagggggacagcaggggctctcccaacacagagccgcgatctcaccccagcaggacgcaggtgccagtgcaggaggggtgggcatcaggacgtcagaaaa

SEQ ID NO: 20663 - DNA, 632 bp, Homo sapiens
ccaccaaggcaccgtcagggagcccagccaggctctggggcttcgctccttatccccctcccccggccaggattaggcgctgccaggctcacctgccggcctgagtgagtccagccgagagggctgggaggccggagggcagggctgggaggcaggaggctggggttaggaggctggagagtggggctgggcagcagaagggtggggctgggaggcaggagggtggggctgggagggtggcgggtggggctgggcagcaggagggcagggctgggaaggcagccagctccagggccccctgcctgtgccaggcccagtgggagcagcagggggatgggcagcccctcccataggtgccagggcttggtgaggctggggcagatggggaccatcccggcacaggccatcccccaggcccctcccttcaggcgccttyactccttctgaacctgaagcctcccgcaacaccagcctcctaaaatcttgcttccgggggccacactcagagactccatatccctccccactgaccggacctcaggtgctgacccctggggaccgggtcccccggatcagaaggcactgaggcgcggagtgtggcaggaaccgctgaggttcccctactgtcagca

SEQ ID NO: 20664 - DNA, 528 bp, Homo sapiens
cctgcttcacatgctagttttccagtttctactttgggagaatgaccttatcattaggctggccaagagggcttctttctgttcctgtcacagtactaggctgtatactcattcaccctcagttcccttttctggtatatttcttaacaaattatttccctctttccactatttttaggggtaacaagtctaagatatttacatataaatggctctcccttctcaaacccttttctagcaagcactttctgggaggacagtgtcttaccaggatcttctgtcactgtggtccctttgagggtagaaagaatagattgttgtgaagtcttttgtcagcctcttcatggttataaacgtacttagttttccagactatgtaggttttagacttcaagtgaaaagagtatacgttgttatgcagcaatagaaaacaaaacaactacmacaaaattgtattttttctccatccagaggctttaactttcaacatttgtatatggaggcaaggctgacagccacagcagtaat

SEQ ID NO: 20665 - DNA, 488 bp, Homo sapiens
gagataacagggatacaaaagaaggaggatccctgcctctaaagagctcgccaacttattatgtggaaataatggaccgaatgccactgatgcaaaygcaccttccctctaggacgtggctccttttttccttttttagttgttctttcaccacgtcagctcttctttcctggtctgctttgaagtcttcttctctcctcttccctctgctggttcctttagccctgggcttccctggggctcagtccgacgttccctcttctattctctcccagggtcatctcatccagtcgtacggcttctattatcatccatagcagaaattatgaacccagagtccatggataaacttttgggcctgtgagttccttgaaattgtatgcaaatttggtgtatatggtcatagcttctgccagcttggcagaggggacctagactccacagctctactgaagtgggtgatgcccaggactgcatgttcctgagtg

SEQ ID NO: 20666 - DNA, 488 bp, Homo sapiens
gagataacagggatacaaaagaaggaggatccctgcctctaaagagctcgccaacttattatgtggaaataatggaccgaatgccactgatgcaaatgcaccttccctctaggacgtggctccttttttccttttttagttgttctttcaccacgtcagctcttctttcctggtctgctttgaagtcttcttctctcctcttccctctgctggttcctttagccctgggcttccctggggctcagtccracgttccctcttctattctctcccagggtcatctcatccagtcgtacggcttctattatcatccatagcagaaattatgaacccagagtccatggataaacttttgggcctgtgagttccttgaaattgtatgcaaatttggtgtatatggtcatagcttctgccagcttggcagaggggacctagactccacagctctactgaagtgggtgatgcccaggactgcatgttcctgagtg

SEQ ID NO: 20667 - DNA, 488 bp, Homo sapiens
gagataacagggatacaaaagaaggaggatccctgcctctaaagagctcgccaacttattatgtggaaataatggaccgaatgccactgatgcaaatgcaccttccctctaggacgtggctccttttttccttttttagttgttctttcaccacgtcagctcttctttcctggtctgctttgaagtcttcttctctcctcttccctctgctggttcctttagccctgggcttccctggggctcagtccgacgttccctcttctattctctcccagggtcatctcatccagtcgtacggcttctattatcatccatagcagaaattatgaacccagagtccatggataaacttttgggcctgtgagttccttgaaattrtatgcaaatttggtgtatatggtcatagcttctgccagcttggcagaggggacctagactccacagctctactgaagtgggtgatgcccaggactgcatgttcctgagtg

SEQ ID NO: 20668 - DNA, 481 bp, Homo sapiens
cagggcacagatcgggcctggcccatggaggtggcacatcagaaaaactagccagaggcaccacgccacaggaagcacccccacaggtgctccaggctcagcccccagcgtgcttcaacgcccttcagaatagcaaaccctcgcagatccagcatagagggagctgcctcagcacaggagagacgcccatgccacacccatagctaacgtcattctcaatggtggaaagtcgaaagcgtttctcctaggatcagggagaaggatgcccactctcaccactcctactcaacatagcactagaagtcttagcaagagaaagaaacaaaaggcattctaattgagggaagaagtgaaatgtctctatttgyggacaaattgatcttttatatagaacgccctaaaggctccacaaaaaaactgttaggacatataaacaaattaagatttcaggatataaaatcaacgtacaaaaatcagtagc

SEQ ID NO: 20669 - DNA, 1668 bp, Homo sapiens
ggagccctgcaatccttcaacacttctgcaattaatgagctttcagacacagggcaaaccatttaacgtctgtctctatgtcttcttatatgtaaaattagatttttaatatcagctttatttaccttaccgagttattcttctataacaagaacattaagagcctggcttgtattcgtttgagcgagagattgttggtgtgaaaagcattggttataggcagtttcttacttctacacacagtggattcctacacatgtgtttcaaagttgaataacaaagaataatgagggagacatttccagagaactaaaaatacattctaaaattcctagtagtggttaattatgtgctgcctccctcagacccatgaggcaggtgaggccttcaaatgcacgtagcacagggggccaccagccatcctggggatgggaaagatgacccgagcacctcctcttcccrgcctgaccactcctctgcccactgctgcagcggccacagcatttccacgtctttaggaagatttgggtggctggaaaccgacatccagatatcgggaaaagcagctctatcttcttgccatctgtggtaaattgtaaatgtgaccccaaatgtttactgtttcctttttctccagcctttgccatgtaattttatagaggtcaccaagtttgactttgggcttagccctgtgaattagtctaggttctccagaaaaacagaaacaataggataggtgtgtatacatataaaataatattgttcataatattatttttatttatttatttttttgagacagatccttgctctgttgccaggctggcatgcagtggcatgatctctgttcacagcaacctccgcctgccgggttcaagtgattctcctgcctcagcctcccgagtagctgcgactacaggcgcccgccaccacgccccgttaatttttgtatttttagtacagacggggtttcaccatgtttgccaggatggtctcgatctcctgaccttgtaatccgcccgccttggtctcccaaaatgctgggattacaggtgtgagccactgcacccggcctataatactattttataaatatataccatatgaaattggctcacgtgattatgaaaacagaagtctcaagatagatatgcatttgcaaactgcagacctaggaaagctgatgggctaattctagtccaaatgctggtgggcttccaagggaaaatctgatgtttcagttcaggtccacaggcagaaacacgaaacacaaaacccaatgcctgggttcacagcagtccaagcagaaagagttccctctgacttgctccattcaggcctccagctgattggctgaggcccagccacatcgggtggggcgggggggacaacctgctatgctcagtctgccaatgtaaatgctaatctcatttgcaatcaccctcccagacacacccagaataatgttgaaacaaatttctgggcaccctgtggcccagtcaagttgacacatacaattaaccatcccaccatgagatttgctgtggccagtgggatgttcacagatgagatgccagcagagccttgaaagactctagacccgtcaggccacccaggtactcacttgggaatgcacgctgatggaggtgctttcgtggccactgtggc

SEQ ID NO: 20670 - DNA, 1265 bp, Homo sapiens
  misc_feature (1)...(1265): n = A,T,C or G
aggcacctgccaccacgcctggctaatatttttgtatttttagtagagacggggtttcaccatgttggccaggctggtcttgaactcctgacctcaggtgatctgcctgcctcggcctcccaaagtgctgggataacaggcatgagccaccttgcccagcaggtctcctaaaaatctaaatatacttttaagtatcacagaactaaattatctttaagtaattattgttttaaggcaatcggccgtgtgtgagtttaaatttccaaaagctccttgctttgaaagagtgtggaaagagacagacttgtccgtagaattatcttcccagcagctttccaaccttaccacctggcaagctccagtcatatttcaggactcaactcacataatcttctcaatgtcataatccctttgtgttctcacttgtaccctacacatacatctgtcactgcattgtttatatgtttactcccacctggaagtaggcagcaggtgcttcatatccagctttgatcttctagttctagtgcaaggcctgtcaccagatagcagccctatnnnnnnnnnnnnnnnnnnnnnnnnnnnnnnnnnnnnnnnnnnnnnnnnnnnnnnnnnnnnnnnnnnnnnnnnnnnnnnnnnnnnnnnnnnnnnnnnnnnntctttttgtagaagaaatttcaactaatatatgaagacaaagtatagaattagaatatgaaaatttctgaacacctaatgaatttggtggatctaggtaatagtcatcaatagttgataatatcataaaaagagagagacaaggcgttatgggcctcccagagaaagtacacaccactgcctatgaagtagtcttgcaagcaattatcctgcttcagcctcccgagtagttgggattacaggcaygcacctccacacctggctagtttttgtatttttagtagagacagggtttcaccatgttggctaagctggtctcggactcctgacctcaagcgatctgcctgcctcaatctcacaaagtgctgggattacaggtatgagccaccgcggccggctatgaagtcatatattgttaaaatcctgatattttagagaaatatacccaaatattcacgaaataataaaatgtctgggatttgctccaaaatatttggggcagagaggcagtaggaaaggtatagttgaaacaaaattgataattttttggaagctctgtgaaggattacattattatatctacttttttaataagttcaaaatgttcc

SEQ ID NO: 20671 - DNA, 240 bp, Homo sapiens
ccacacccggctaatttttgtagttttagtagagacaggtttcaccatattggccaggctggtcttgaactcctgacctcgtgatccacctgcctcaacttcccaaagtgctgggattacaggcttgwgccaccgtgcctggccaccaacaggatttctttaaacagacacctggtatgtatctacaggtgacacggcttctcattctggcactgccactgcactgtctatgccaccttg

SEQ ID NO: 20672 - DNA, 382 bp, Homo sapiens
ggatgcttctggaaacattaggtcattcaccctttgaattttctttgtgcctgggctgagtgtgcccttaggatcaagcaaaaagtaatcaggcagagaatagcaagatccagctaacagattttggcatgtaggggtgaatgtcaaagggttaggagcaagaatatgaggatttgataactaagaatgtttraagaaataaagactgctatatatatatattattaaaatatataaaattattaaaagatagaaaacttcagtgtcaagaatccttcccaaaattcaaacaggaataataagaaatctccttttgaacacacaatcaggcctatcccagagactatagaacattagagacaaacaagaggtattacaagtg

SEQ ID NO: 20673 - DNA, 908 bp, Homo sapiens
caacttctgcctctcaggttcaagcgattctcctgcctcagcctcctgagtagtgagtagctaggattacaggcgcccaacaccacgacyggctaatttttgtatttctaatagagacggggtttcaccatgttggccaggctggtctggaacacctgatctcaggtgatccacccacctcagcttcccaaactgttgggattacaggcatgagctaccatgcccggccttttaccttttatacaggagaaggatccatttatttaacaagggacacagaccaaatctcatcatgtggctcacagggaggtgaagagagacacgtggaaggacagaatttcacaggaaggatctttcaaaaaacctcaaccagatagaaggacaaatctggaggtgttcaggcctcatccctacatgggcaggcagagctggctgtgggtacagtggggagcagaaaaatggacttgcagtaggaaatccccgtgggctgggggcaggaggcctggtcctggtctaaggactgcggagttaggagtagcctgggtaaaatagagagggtgggctgacctccagggcctccagcttgtcatttcctcaggaagccccagctgctggtgcctgggctgtctcctcttgcggctccacacacgtgtccttctcgaagtcattgtgggtggtcactgtgacagtctgctggggcttcccctgtgcctcctgggtctcgttaccaaaaagtaacctagctctggcacaaagtggacactcagcaaatattcatgagggtgatggaggggagcagaggaaaaagggggaaagatggaaaaaggaggaggggagagaaaggagtgaaaaacaattgaaggaaggagagatgtgagagaggatgtgaggacaggatggagggatgg

SEQ ID NO: 20674 - DNA, 908 bp, Homo sapiens
caacttctgcctctcaggttcaagcgattctcctgcctcagcctcctgagtagtgagtagctaggattacaggcgcccaacaccacgactggctaatttttgtatttctaatagagacggggtttcaccatgttggccaggctggtctggaacacctgatctcaggtgatccacccacctcagcttcccaaactgttgggattacaggcatgagctaccatgcccggccttttaccttttatacaggagaaggatccatttatttaacaagggacacagaccaaatctcatcatgtggctcacagggaggtgaagagagacacgtggaaggacagaatttcacaggaaggatctttcaaaaaacctcaaccagatagaaggacaaatctggaggtgttcaggcctcatccctacatgggcaggcagagctggctgtsggtacagtggggagcagaaaaatggacttgcagtaggaaatccccgtgggctgggggcaggaggcctggtcctggtctaaggactgcggagttaggagtagcctgggtaaaatagagagggtgggctgacctccagggcctccagcttgtcatttcctcaggaagccccagctgctggtgcctgggctgtctcctcttgcggctccacacacgtgtccttctcgaagtcattgtgggtggtcactgtgacagtctgctggggcttcccctgtgcctcctgggtctcgttaccaaaaagtaacctagctctggcacaaagtggacactcagcaaatattcatgagggtgatggaggggagcagaggaaaaagggggaaagatggaaaaaggaggaggggagagaaaggagtgaaaaacaattgaaggaaggagagatgtgagagaggatgtgaggacaggatggagggatgg

SEQ ID NO: 20675 - DNA, 908 bp, Homo sapiens
caacttctgcctctcaggttcaagcgattctcctgcctcagcctcctgagtagtgagtagctaggattacaggcgcccaacaccacgactggctaatttttgtatttctaatagagacggggtttcaccatgttggccaggctggtctggaacacctgatctcaggtgatccacccacctcagcttcccaaactgttgggattacaggcatgagctaccatgcccggccttttaccttttatacaggagaaggatccatttatttaacaagggacacagaccaaatctcatcatgtggctcacagggaggtgaagagagacacgtggaaggacagaatttcacaggaaggatctttcaaaaaacctcaaccagatagaaggacaaatctggaggtgttcaggcctcatccctacatgggcaggcagagctggctgtgggtacrgtggggagcagaaaaatggacttgcagtaggaaatccccgtgggctgggggcaggaggcctggtcctggtctaaggactgcggagttaggagtagcctgggtaaaatagagagggtgggctgacctccagggcctccagcttgtcatttcctcaggaagccccagctgctggtgcctgggctgtctcctcttgcggctccacacacgtgtccttctcgaagtcattgtgggtggtcactgtgacagtctgctggggcttcccctgtgcctcctgggtctcgttaccaaaaagtaacctagctctggcacaaagtggacactcagcaaatattcatgagggtgatggaggggagcagaggaaaaagggggaaagatggaaaaaggaggaggggagagaaaggagtgaaaaacaattgaaggaaggagagatgtgagagaggatgtgaggacaggatggagggatgg

SEQ ID NO: 20676 - DNA, 908 bp, Homo sapiens
caacttctgcctctcaggttcaagcgattctcctgcctcagcctcctgagtagtgagtagctaggattacaggcgcccaacaccacgactggctaatttttgtatttctaatagagacggggtttcaccatgttggccaggctggtctggaacacctgatctcaggtgatccacccacctcagcttcccaaactgttgggattacaggcatgagctaccatgcccggccttttaccttttatacaggagaaggatccatttatttaacaagggacacagaccaaatctcatcatgtggctcacagggaggtgaagagagacacgtggaaggacagaatttcacaggaaggatctttcaaaaaacctcaaccagatagaaggacaaatctggaggtgttcaggcctcatccctacatgggcaggcagagctggctgtgggtacagtggggagcagaaaaatggacttgcagtaggaaatccccktgggctgggggcaggaggcctggtcctggtctaaggactgcggagttaggagtagcctgggtaaaatagagagggtgggctgacctccagggcctccagcttgtcatttcctcaggaagccccagctgctggtgcctgggctgtctcctcttgcggctccacacacgtgtccttctcgaagtcattgtgggtggtcactgtgacagtctgctggggcttcccctgtgcctcctgggtctcgttaccaaaaagtaacctagctctggcacaaagtggacactcagcaaatattcatgagggtgatggaggggagcagaggaaaaagggggaaagatggaaaaaggaggaggggagagaaaggagtgaaaaacaattgaaggaaggagagatgtgagagaggatgtgaggacaggatggagggatgg

SEQ ID NO: 20677 - DNA, 746 bp, Homo sapiens
agttacaaagttccccagattggtctgaattttattatggtagaaactattaatttcctcttgtagtgaagtatattaatcacaatttcaccagtatttaaagtaataaatgatgtttttagataattaaattttaaatatttgacaccacttttagtgtctaagatatccagttaaaaaattggtacagacagctgttgaattacctgtgttatcaaaataatctcaaataccaatttggatgggtacctgtttaaggctctccaagcatttcctgtttacaggtaaaatatacatggagcctttaatagacagtaggcatcaaatgtgattatgaaatataattgactgagagtgtcttgaggacagtcacagtgctttataaatagccttgaattcccacttaatgtggtataagctatataggggaagggctcaattaagttggtgaagttcaattacaccatttctttttaaagctgacaagaaattgccatgtcattgctaccttaatttcattacaataagaggtgacactaagaatatcagtggccatgctgaagtctcctcctgatactatcatggtgtgaaagacatctttttccactcactttacaaaagccattttcttcttctcctttggagagaattaggcatagtacmtattaattttttcttttattttcagtgcttgagtgttgaattatttgaacaagcactttatcctttcatgggaaaggtcctcc

SEQ ID NO: 20678 - DNA, 595 bp, Homo sapiens
tgctggatatgatggagttcctgaaacttccgtattgtcacctggattgcctgatgagtcaaaggagagagggtggaactttgtgcctggggtttttgtttttgtttttgtttttttgagatggagtctccctctgttgcccaggctggagtgtagcggagcgatctcggctcactgcaagctstgcctcacgggttcacaccattctcctgcctcagcctccagagtagctgggactacaggcgcccgccaccacgcctggctaatttttttttttttgtatttttagtagagatggggtttcaccatgttagccaggatggtcttgatctcctgacctcgtgatctgcccacctgggtctcccaaagtactaggattacaggcgtgagccactgtgcccggcctatgcctgggtttttgtctgaaggaagggatatatgctagaaagtaggtgtgtaattataaaatatgtccaggaaatcttagaagctttttgtgctttctttttttaacttatgagatctttactatgatggccttgtgttactaaatttagtgagcattggatacttataggagaataatgctttcttt

SEQ ID NO: 20679 - DNA, 1202 bp, Homo sapiens
  misc_feature (1)...(1202): n = A,T,C or G
tgcatgatagtatcccacaaatccattgccaattcttttgcttactgttgcattttatgttcagaatctatgaatatttactcaagcactacttttaatttgccacgcggttttagagaagtaacttaattatcttgattcactttattaattagcaaaatggtaatacaagctgcaaacttttattaggtttaaaatgtatggtagatccaaataaatccaggaccgagctcgaattcgtaaacagtgaattttnnnnnnnnnnnnnnnnnnnnnnnnnnnnnnnnnnnnnnnnnnnnnnnnnnnnnnnnnnnnnnnnnnnnnnnnnnnnnnnnnnnnnnnnnnnnnnnnnnnntatgtgagagtgccactgaatgagaaatcctctcaatagaaagcaaaggtaaagagcttgaaaaatcctctcatcctttgtaggtaaaatctccagagcagtggtttgagcagatgggaaatttgtactccctgtgctatatctgttcagttgataaaaagagaactttgatctctgagactgtcaatacagttctttttaagaaaaatttgcttaaagcaaacagtaaaagtagcaaagcagttattaaaattccaccccaattggctatgctcccagttcccaaacccaaaacataatgcccactgattactcagattatgtttaagacatttttctgcatgggtttgaagttcggcactataaatagccaatctagttgagaaaattacaaatttttcttttcaaattctaatcatattagatgagttaaataagtttcagcaaaaatccttgcagtgacattgctattgatataagccctaagtagtaaattctgagctgcatccagccactagagttttgtggataactgtaaaatagtaccgttaagcttaaaaccactgcctgtcaatcatttgaaaagtacactgatctgtataattcctgtacattttttaaagtttgatgttaatctattcattgaggcagtccttaaaaaaactcttttagtctttgaaatctgktttttttttaatgagatgcatacttacctgagattttcaaacaaattagcaatatgcaatgagaaaaacccagctctacccattacaggtatttattttacagtcttgttagctgtaactgtgtagtaaacacattcggttttaccattccaatttttgca

SEQ ID NO: 20680 - DNA, 520 bp, Homo sapiens
gaaacatttggttctttatacaatttttatctcagaaccatattttctgcacatttggaagaatatcaactagctttagcgtcattacaaaaaaagaaataaacaggctttaagaatgaactgtgctggctccaaactgaagttacaatgccactaatgacatataaataaatggtggagggaaagactaatttgggaaagaatataggcagaactttgacacagacagcttcaaaaagacaagttaaaactgcaagtggatccaaaacatgaatttggattttgtaaaaatatgtacttccagacaygagtgtttttgaaattttagggtttttgcaaagcagttgatttctctcttgactctaaatagtgcagtggcattaataaatcatgtaataatataacaaatttgctttacttgtttaccaattagtcagtatagatgtatgatggaataatagcagagttcactatactaatatttgggataagttggcctggaagagaagaaagagcccac

SEQ ID NO: 20681 - DNA, 388 bp, Homo sapiens
  misc_feature (1)...(388): n = A,T,C or G
gagctgtgaggtgaaaacaggtaagaaaacactgatacagggtcaagtytgaaaagaggccatggaattgggcaaatagaaagtcagtggctctctgaatgaatgcttttttaattatagataaaaacaaacttcagagaatggtcagtggggagtgagggagggagaggtgagggcatgagatgaggagcagagaggctgacagcaagagatcctcgagcttgcctgcgcaatgacacgagagtgaagccccagggaaggccacacgcactctccgtgcctgcctcgggaaaggcagggcgccccctcagggagcacagctgctggggcccgcgcctggggaaaggcaccagttttggagccagatgcacttggactnccataccgg

SEQ ID NO: 20682 - DNA, 388 bp, Homo sapiens
  misc_feature (1)...(388): n = A,T,C or G
gagctgtgaggtgaaaacaggtaagaaaacactgatacagggtcaagtctgaaaagaggccatggaattgggcaaayagaaagtcagtggctctctgaatgaatgcttttttaattatagataaaaacaaacttcagagaatggtcagtggggagtgagggagggagaggtgagggcatgagatgaggagcagagaggctgacagcaagagatcctcgagcttgcctgcgcaatgacacgagagtgaagccccagggaaggccacacgcactctccgtgcctgcctcgggaaaggcagggcgccccctcagggagcacagctgctggggcccgcgcctggggaaaggcaccagttttggagccagatgcacttggactnccataccgg

SEQ ID NO: 20683 - DNA, 803 bp, Homo sapiens
tccaggactatttatagattttgctcattcttccattttcttactgagataatctcctggtccatcctgattgtcacataataaatccttcttcaatttaattctactatgctgggtacagtggctcatgcctgtaatcccagaactttgggaggccaaggcaggtggatcacctgagatcaggagttcaagaccagcctggccaatatagtgaaaccctgtctctactgaaatcacaaaaataaaaataaaaaaattagctgggtggtgcgcacctgtaatcccagctactcgggaggctgaggcacgagaatcacctgaccccaggaggcggaggttgcagtgagctgagattatgctactgtactccatcctgggcaacacagtgagactccatctcaaaaaaaaaaaatttaattctactcaaccagaaattttactgaatgttctatgatttggtggtgtttggacagttctaacacaaggtgagaatgtgcattgtaagacgtaaattagaaaatatgacwatgggtgaatatcccttaaaatatagaatgcccaattaaattaagaagaaaaacattaggacaccaacagattaaataggtaaaggacatggtaggtaatttataacccaaacgtaccacacaaacacacaagcaaaacaaatggcctgcaaacataaaaatagttgtaactcactagtaatcaaaaatctaaaattagagtaacagaacacaattttaacctatacaaacagcaaagcctaaaataaacaaaattgtgattttatagccagccag

SEQ ID NO: 20684 - DNA, 803 bp, Homo sapiens
tccaggactatttatagattttgctcattcttccattttcttactgagataatctcctggtccatcctgattgtcacataataaatccttcttcaatttaattctactatgctgggtacagtggctcatgcctgtaatcccagaactttgggaggccaaggcaggtggatcacctgagatcaggagttcaagaccagcctggccaatatagtgaaaccctgtctctactgaaatcacaaaaataaaaataaaaaaattagctgggtggtgcgcacctgtaatcccagctactcgggaggctgaggcacgagaatcacctgaccccaggaggcggaggttgcagtgagctgagattatgctactgtactccatcctgggcaacacagtgagactccatctcaaaaaaaaaaaatttaattctactcaaccagaaattttactgaatgttctatgatttggtggtgtttggacagttctaacacaaggtgagaatgtgcattgtaagacgtaaattagaaaatatgacaatgggtgaatatcccttaaaatatagaatgcccaattaaattaagaagaaaaacattaggacaccaacagattaaataggtaaaggacatggtaggtaatttataacccaaacgtaccacacaaacacacaagcaaaacaaatggcctgcaaacataaaaatagttgtaactcactagtaatcaaaaatstaaaattagagtaacagaacacaattttaacctatacaaacagcaaagcctaaaataaacaaaattgtgattttatagccagccag

SEQ ID NO: 20685 - DNA, 430 bp, Homo sapiens
atgggaattgaacaatgagaacacttggacacagggaagggaacatcacacaccggggcctgtcgaggggtggggagaagggggagggatagcattaggagatatacctaatgtaaatgacgagttaataggtgcagcacaccaacatggcacatgtatacatgtaacaaacctgcatgttgtacacatgtaccctagaacttaaagtataatttaaaaataaataartaaaaaataaaatgccagagttggcaccttaagatcctctttcacagcaaaggagcaggactaaaaccaggcatcttgaccaatatcccacaggtgctctggtaaaatctccaagaccaggacccaggtcttccagtacctaattcaagttctttccatgcccacacaaaggcaagcagcagaaggaggagcaagcataagg

SEQ ID NO: 20686 - DNA, 291 bp, Homo sapiens
gcccatctgaaaaatgcaaaacaatcagtgtagcttctagcaaaaagaatttagcaagttggctggatatgaaattaacagaaaattaacagtattaaattgataatatcaatataatttagagaataaaatggaaggaaatagaacagcaacacaaataataagggaagttatgctagacctaggtgaacaagatttaaagtayctactaattttaaaaagtcttgaatcaatggaaagacagaagttctgcttaggtagaaatattcaataatatgaggaggtccattc

SEQ ID NO: 20687 - DNA, 523 bp, Homo sapiens
gtactgaaaaaaactacaaaaattaaccaggagtggtgatgcggtaatcccagttactcgggaggctgaggcaggagaattgcttgaatccaggaggtggaagttgcagtgagtcgagatcgcgccattgcactccagcctgggcaacaagagtgaatctctgtctcacaaaaaaaaaaaaagtaattcatctacagtcacaaagcttgtccgtgggagaattgggatttgaccccagggctagtggactccagagcctggccagtccatgccagcatggtgttccttagatgatgtgttacatctgcctggaccagtaaaatagctatgaataactgacagcttctacgtgtgtgtataaaggtcacacggttcatgagttagactcagwttcagcaggtctttgagatcatctcgttcaaacttctacaccctaataagcaattccctgtacaacattccaagtaaaaggtttctcagtctgtgtttgagttgtttttaaatgaaaaaaatatatagtaaa

SEQ ID NO: 20688 - DNA, 542 bp, Homo sapiens
ctagtgttccctagcgtgaacttttttctatccaaagttctcttcaaagtagtctgcatagtggaaagttgtgaagaatattttatggctgatgttaaaagcttactttaaaaaaaagtttaatgaaggaaakaatgaaatgttgtttttaaaaagataggatctagtttagatttaggaaaaatttcttggctataaaagctttcaatctctgtaatagcatagcaacgtaaattatgaactcaccttctcttagcatttttatggctgaaagagaaaatgatattgctggcctgcctggaataggaacatggactaaataatttcaaggattccttcttgctggttgattttgggataacttcagggaagaacagactcagtctactgttaggtttttggcttagtctcaagtgactgcaaaggtttaaaaagatctgaatgaaaacattcagatgcatgaagtcattatgatatcttaaatatacttacgtcaaaatccttgaggatgtgaaaatatgtttctactgaccttcttgtat

SEQ ID NO: 20689 - DNA, 542 bp, Homo sapiens
ctagtgttccctagcgtgaacttttttctatccaaagttctcttcaaagtagtctgcatagtggaaagttgtgaagaatattttatggctgatgttaaaagcttactttaaaaaaaagtttaatgaaggaaagaatgaaatgttgtttttaaaaagataggatctagtttagatttaggaaaaatttcttggctataaaagctttcaatctctgtaatagcatagcaacgtaaattatgaactcaccttctcttagcatttttatggctgaaagagaaaatgatattgctggcctgcctggaataggaacatggactaaataatttcaaggattccttcttgctggttgattttgggataacttcagggaagaacagackcagtctactgttaggtttttggcttagtctcaagtgactgcaaaggtttaaaaagatctgaatgaaaacattcagatgcatgaagtcattatgatatcttaaatatacttacgtcaaaatccttgaggatgtgaaaatatgtttctactgaccttcttgtat

SEQ ID NO: 20690 - DNA, 1036 bp, Homo sapiens
tttttaatagaaatggggtttcaccatgttggccaggctggtctcgaactcctgacctcaagtgatctgcccaccttggactggcaaagtgctaggattacaagtgtgagccaccccgcctgacctgacagcctacctttctagacatcttataattacagaagctaccatgaattgaatgacatgtaactcacagatgctatgctacacaccacaggtttcatttacttgttaattaatttcatttaattgttataaccacactggaagagaactataataataggggcaacttaatttttgatattacatttagaagtgcaaaaatatgtatttaattttcttaaaactgatttgcccttctttataaaacttccatattactagaaaatgggaaggagtcaggaggaaactaaatttatgtctctttgggaaagttatctcagtttaaccccaacatttaaatagtttatttaggaacccagtctctggggaaaatgtgaagtactttggatcttctctctctttctcagtctcttctggtggcctatttgtaggggcaagccagggacattatgtgctcagtagtagttggaaagaagagggcttgggacctgctcatgaggttcttgaagattcatttggattcttgcagccctgctggtagtttacccagagctggcacttcttaggagagtcataacaatccattgaatgggagcccatttttgtcttgctgacgctgtgtgtaactcagcctgaagttttctgatctttggttaaaggtccttgatgcaccccatttcctcccgaaacacacaaacacttcatcaactctccatggatattttcactacaaagcaatatcagctatcttaattacttgtatccttctctagggcacatataacccagtggacagcttcaagattatataggaaatcaagatgttctggcaaaatacacytgtgctgccctgctggattaactttgttgcagctgccctattgtgagatatctctgtgtggatgctcca

SEQ ID NO: 20691 - DNA, 1260 bp, Homo sapiens
aaaacagttttgtggtcacctgagttggggaaatgtcacatattcatgtcactcattctcttcctggaaatacctgtcatccagcctggacactgggtaacagcaaagttcgtaaggatgacttccttcacattcagacctcagtattctctgactcttttctaaatctccattgcagaaaactttggaattatcactccaaactgcttcatgtctgtattattaaactctgaagtcatcatccctgaatttgacttctttcttcccttttattctgtctaacaaaatttctctgtcctcagcaaacttctagttccttggccttcgtctggtgctacgataagcattttagatggcactcaccagccagagattccctaagaagacagcttgactttccatcacaggcatgtcccaatccccagtgctgggcagactcaaaccatccattccttggcttctgggctgctgtatgatgacactgacaattatgctacttagtgatggggcgggtgctaattcctattatctaacttcagctaggccctcagggtgactcaaagttgacacaaacttatttattttttcctaaacaactcactatcctcttttctattcttctcacattcccaaacctgcgtttgctttcctcacagtcattcgactgtttcttaactatgctgagacagtgtaggtcatgtcagaaactccttcaattcagataccttatatttcttccatcttctgcttccctgagaatggcatgtgtttcctcctctccaaggcccacccaggtttgtgattaaatctacctttgtctcctccagaacttgcttcagtggttatctccacctttaatccctcactttctactgacttctttgcatacccaaatgttcagtttcctttttccttaaaaactaacaaaaacgacatcccttatcctttaaactccaaacctctctatcttttccttcactatgtccttctataccaggtaacccacagtccctgattccttcctccatgagtatggtgactatatcttctgatcaaaaaatcaggccatgctctctggccaaattactaaaccaatgaggacatgggacagaaaaatggaaaccaggttggtcctggttgactctaagcattttaatacatcttttggaccaaattaccaaaaatcttctgtaacaaaaaatrgagactattaaatatatttggttctatctaagctcatattaaaaaaaaattaaaatc

SEQ ID NO: 20692 - DNA, 526 bp, Homo sapiens
cagcagtgtgtagttaaaaccaagtactgtgagggctcacctgatttttggttcttatgaaggtgcttttattgtgtagatagttggtaaattggtctctttgcagggggtgaggagaacaatcagtagagccttctgttctaccatcttgttctgcctcttccattcacaaaatcttaagtatggaagaaatatgacatttattcagcatttttcaaaagttgagcatgaaagctatagcccaagaaaactcaccacagcaaaaattgtacaggctacattgctaatcacaactaaataaatctggagacytacagtaaaaatttaagaaaaaagtccgttcaaagtgttaatgtatccccaataattgttttttctaggaaatttttgcaaagctacagtcacatagtatttacaaaattacaaactgcaaataacttctgtcaaaatgtaagggaacttactaaaactgtaattaaaggcatagccttaaatgccattttcattaaaagcaaatattttaaca

SEQ ID NO: 20693 - DNA, 519 bp, Homo sapiens
tgcacactgtaaccaaaggagaaacactctcctgattactgtagacagggacattctgaggggccctgagcagacaggaccttaggtgaccctggtgcctttgcgtagaagaacctttctcataagatagtttaacattatttataataaggagtcaccgaaaacaactaaagtatccgacaacagagggcaatttccaaaggttgactttaaaaaaaaaaaaawatatatatatatatatatacacacacacacacatattttggcacttcacagacaatctctaagtatcacaacaaacctgcaagatagatatttgcatgacctttttacaaaagaagaaactgaagtacaaaatgggaatgtgactttcccaaagccatttagcaatgaaaggatagaagtttaattccaaagccagtacttgttaccatgtattatgctgcgtgacaggcaagacatcctttccagacatcctgtcctaggattatgttttggtctcttgagcaacacttaaca

SEQ ID NO: 20694 - DNA, 548 bp, Homo sapiens
tggggagcatcggggcttttcctgagcgctgcagacacctacagcctgggaccacgtgctgctcagaatgctcattctctgatttgtaagcaattaatatggctgtgacagcagcaatccggacacagcaatgcagaattctcaacacaattctacttcctagctctagtatttgctgaaatgtgcaacaacatgttctataaatcaactaaaatttgttgagtgtttactgtgagccagacactgttgtaccagtattactgcagtaactcatttaatccttacaacaatcttacgagatggattcatttttccaaaaatgtacattgaaacctaagcaagttaagtaayatgcccaattcatagagcttctcaccagagtttggattcaggtcatctgactccataagccaggtgtttagcccttactctcttttgccaaactgctagattataaaaaaaactgcaaaatgaaatcattcattccttggtgtatttgttttctattgtcacattaccagaaatttagcggcttttaaaataacaca

SEQ ID NO: 20695 - DNA, 548 bp, Homo sapiens
tggggagcatcggggcttttcctgagcgctgcagacacctacagcctgggaccacgtgctgctcagaatgctcattctctgatttgtaagcaattaatatggctgtgacagcagcaatccggacacagcaatgcagaattctcaacacaattctacttcctagctctagtatttgctgaaatgtgcaacaacatgttctataaatcaactaaaatttgttgagtgtttactgtgagccagacactgttgtaccagtattactgcagtaactcatttaatccttacaacaatcttacgagatggattcatttttccaaaaatgtacattgaaacctaagcaagttaagtaatatgcccaattcatagagcttctcaccagagtttggattcaggtcatctgactccataagccaggkgtttagcccttactctcttttgccaaactgctagattataaaaaaaactgcaaaatgaaatcattcattccttggtgtatttgttttctattgtcacattaccagaaatttagcggcttttaaaataacaca

SEQ ID NO: 20696 - DNA, 548 bp, Homo sapiens
tggggagcatcggggcttttcctgagcgctgcagacacctacagcctgggaccacgtgctgctcagaatgctcattctctgatttgtaagcaattaatatggctgtgacagcagcaatccggacacagcaatgcagaattctcaacacaattctacttcctagctctagtatttgctgaaatgtgcaacaacatgttctataaatcaactaaaatttgttgagtgtttactgtgagccagacactgttgtaccagtattactgcagtaactcatttaatccttacaacaatcttacgagatggattcatttttccaaaaatgtacattgaaacctaagcaagttaagtaatatgcccaattcatagagcttctcaccagagtttggattcaggtcatctgactccataagccaggtgtttagcccttactctcttttgccaaactgctagattataaaaaaaactgcaaaatgaaatcattcattccttggtgtatttgttttctattgtcacattaccaraaatttagcggcttttaaaataacaca

SEQ ID NO: 20697 - DNA, 621 bp, Homo sapiens
tcccaatattatttttcagttcagtttaacaagtttccactatcactgtggatttatgaatttctccttgcaattatgtcagtttttactttatacaaatagaggttgttattaagtgtctacaagtattgctatttttctcagttaatttttttcttattatttagttaccttttatcccaaataatgctttttgccttaaatcaattttatgtrtaaaattgactatagttacatcagctttattttggtatttgcctgctataatttttccatccttttgttttcaacattttggtatctttttaatagtatacagttggattttttttattttatacaggttgataatttctgcttctttttaaaaactagtttagtccattagtatttattgtaattaaaaatagatttagaagagaaaagatttgaacagatttgggacaccaaggaagatatatggatggaataaaagcacttggaaagacgctcaacatcctaagtcattagagaaatacacactaaaaccacaatgagataccactgtgtacctattggaatagcaacaacaaacctgttaatgccaagtgctggtgaagatatgaagacaatgaaacttgc

SEQ ID NO: 20698 - DNA, 593 bp, Homo sapiens
tgactaatttttgtatttttagtagagagggggttttgccatgttggccaggctgatctcraactcctgacctcaagtgatccacccacctcggcctcctaaagtattgggattataggcaatgttcccacctgatgttctaccatttcaaagaatgctctacattgcagtccatgctctgatctcccacctcaacaacccttagaactctccatggagcctcctactttcccgcctcaccttctctcccagggccatgtgctctggattcatggacagggcaggcaatgggccatgtgctctggattcatggacagggcaacgggccatgtgctctggattcatggacagggcaacgggccatgtgctctggattcatggacagggcaatgggccatgtgctctgcattcatggacagggcaatgggctaccgactccagatgtcccaccaccttacctccgggcacgcaacggaagccgtctccctgataaccaggtttgcactggcacgtgaaagagcctggagtgttgtagcagaaggcgtcagggtgacatcggcttggctggcattcatctacatctgtaaaacagc

SEQ ID NO: 20699 - DNA, 593 bp, Homo sapiens
tgactaatttttgtatttttagtagagagggggttttgccatgttggccaggctgatctcgaactcctgacctcaagtgatccrcccacctcggcctcctaaagtattgggattataggcaatgttcccacctgatgttctaccatttcaaagaatgctctacattgcagtccatgctctgatctcccacctcaacaacccttagaactctccatggagcctcctactttcccgcctcaccttctctcccagggccatgtgctctggattcatggacagggcaggcaatgggccatgtgctctggattcatggacagggcaacgggccatgtgctctggattcatggacagggcaacgggccatgtgctctggattcatggacagggcaatgggccatgtgctctgcattcatggacagggcaatgggctaccgactccagatgtcccaccaccttacctccgggcacgcaacggaagccgtctccctgataaccaggtttgcactggcacgtgaaagagcctggagtgttgtagcagaaggcgtcagggtgacatcggcttggctggcattcatctacatctgtaaaacagc

SEQ ID NO: 20700 - DNA, 548 bp, Homo sapiens
cttctagatcagctcaggagaccaaaatattcaagattttctttgacaggctgagcctgagaatgtcttccacaccctttttgctaaggggaactgtcctacttgcagcccctgcaactcagcagcctgttgggtcccttcccctcctctccaaccacacctgaccccaggggtcccaggccttaagctggcctgggacattcatctcatcacctggtgtgaaagatgcgttgggccagtcagatccytgcttttcaagatctaaaggatcataagacagggtggcgagcagcaggagcacagagtaaaacttcaaggagcataaaggccccagggtgacctggtggcctcacacaggccagcgcatgaggtagctggcctagctgttggagccatagaggtgaataagcccactgcaagaagcagtaagggctgctagccgagaggagactggatgcccctggaagaactgaaggaggtagcagggagcatagtgcatacctcattcccctttttgtagcaacttgtttgggtttctaaatccccac

SEQ ID NO: 20701 - DNA, 525 bp, Homo sapiens
tttgtgtgtgtaaatgtttgcactgtaacgctcctgttcatcagttttagtttgttctgttttaaggtgggaaggaatgtagctatcctttagccttaactagtaataaaagagaaaaggtaaatctgttcatcttaaaagtaatatatcctttaaaaaacaaattgatattttgctttgtttcctcccatcccaaggcaaccatcactaaaattcggtacccattcttaataagagtccattaaaaatcctcctcaattcagagggtttcagaaattcgatacaaaggtggcagtcatgtatagaataagtwtctctgaacttgaaagctaagcaaaaatattactgaggccaactgaaatcctatggaattcagccaagatttaaccagtccagagcactgccaacactggctgagggcggaatgctgacggggcaaggatgaggcgcagccaggacttcgaaaaggaagctgatatcaatggagggaatttttcatctgatgcagcatttcatatacttaac

SEQ ID NO: 20702 - DNA, 689 bp, Homo sapiens
atgctccactataacgtagtatgtagcaattaaatgggggaaaagacatgtttgaaatttggcttggactgttaacttgttacttatttaatcaactatctagcaaatgatgttctagatgctggagaaatgtaggggtatacatgatgcaaaagcaaattatctgtcctcagaggaacccatggtacagatacagagggacagacctccataaacgacaaagaagttaacaaatgtcttccatccaagcacatctgtcacatgtagaacttgaaaactaatttttgcttggctaatatgattatgacctactcagagtatatttttagtttatttagtttgttaaatttggaacaaaaagctctgagctaattttcagaatgagtgtgaactggttcgtttaactatgtacacaatttcaccatttttctgagactgcacatggtagttctgtttttttaagatgatgaaaaaagattttatcctctgatcatgccaagmagggaagactcagaatctatcatcctaatcttttcaagcatatcaagtacagctttgatgatgaaagaatttttatggaataagtttggtgcctaaacaaatctcctactattttcctacctgtaatgatataagaaaatgtatatctgccaacaatcactcattcactaaacaggaactaattttaa

SEQ ID NO: 20703 - DNA, 509 bp, Homo sapiens
acaagttaaacttaactcaatattacacacacttacaaacatacacatatgaatacacatttgttgtgagaaagctgaaaaatgttatgcacgatataattttcccaacctcctgtttgtcatcctccaaatctaacttcgaatagacttggttgaacaaatgcatgttttactacatagggagctaaacacagaaaaagaaatttatggtatccaggtatggtggaaattggatgattaatattttgagggtgtaaagcttatgcaattagggaatattttctttacaaaaagtaattcaaaattactaattcaaacccacatacaaggccttgaaaagagcctgtataatcagtggctgtaaagctagatactcagtaaattcatgaccaagctacttggatggtatcttayactctactcagtatctgatacggtattatcatttgccatatccttatgttgactctccatagctattgtcttcatgatgtatcacaataatatta

SEQ ID NO: 20704 - DNA, 606 bp, Homo sapiens
tatattaataatattttattattaaaaataaactattttaaaattactgtttatgtttattattattgtaaaaatgtgtgaaacttcttcattgataaatcattataagagtttatgttgggagactgaagttgaaagattacttgagcccaggagttggaggctgctgtgtgctgtggctgggcttatgaatagtcactgaaccctagctggggcaatataatgagacctcatctcaaaaaaaagaaaaaaaagagtttctgkttttttttgtttttttaaaaataagttgctagaaagggaatcactagcataaattgaatgctattaaagattaatatagtttgccaaattaattttcataatgtccgtttcaatttgaattcctaagcgtaagtgtataagaatgctgattctgcaggaggatcacttgagcccagaagtgcaaggccacagtgagctatgattgtgacactgcactacagcctaagtgacagagcaagaccctgtctctaaaaaggacaaagaatacttattgaaagcacacttaacattatcaccatttatttctgtcataatattttgcctaattgcatatacaaaaaa

SEQ ID NO: 20705 - DNA, 606 bp, Homo sapiens
tatattaataatattttattattaaaaataaactattttaaaattactgtttatgtttattattattgtaaaaatgtgtgaaacttcttcattgataaatcattataagagtttatgttgggagactgaagttgaaagattacttgagcccaggagttggaggctgctgtgtgctgtggctgggcttatgaatagtcactgaaccctagctggggcaatataatgagacctcatctcaaaaaaaagaaaaaaaagagtttctggttttttttgtttttttaaaaataagttgctagaaagggaatcactagcataawttgaatgctattaaagattaatatagtttgccaaattaattttcataatgtccgtttcaatttgaattcctaagcgtaagtgtataagaatgctgattctgcaggaggatcacttgagcccagaagtgcaaggccacagtgagctatgattgtgacactgcactacagcctaagtgacagagcaagaccctgtctctaaaaaggacaaagaatacttattgaaagcacacttaacattatcaccatttatttctgtcataatattttgcctaattgcatatacaaaaaa

SEQ ID NO: 20706 - DNA, 515 bp, Homo sapiens
caacagtaagcttaatcagcttgtctatgcctcagctgatctcaccacattcctcaaaaackatccccactctcagtcagtggtgtccagtttcgcaaactataaacctggagaccatcataggcaactccttcttcctcatttacaacttccagttgggtagcaattcttctccatctctggtgccactgccttcagaacccctgctagattggtttaatagcccttaacaggtgtattagtccatttccatactactatgaagaaatatccaagactgggtaatttataaagaaaaagaggcttaatggactcactgtgccacatggctggggaggcctcacagtcatggcggaaggtgaaggaggagcaaatgcacatctacatggcggcaggcaagagagcgtgtgcaggggaactgccctttataaaactgtcagatctcgtgaggcttattcactatcaccagaacagtacaggaaatcctgcctccatgattcaattaccttccacca

SEQ ID NO: 20707 - DNA, 515 bp, Homo sapiens
caacagtaagcttaatcagcttgtctatgcctcagctgatctcaccacattcctcaaaaacgatccccactctcagtcagtggtgtccagtttcgcaaactataaacctggagaccatcataggcaactccttcttcctcatttacaacttccagttgggtagcaattcttctccatctctggtgccactgccttcagaacccctgctagattggtttaatagcccttaacaggtgtattagtccatttccatactactatgaagaaatatccaagactgggtaatttataaagaaaaagaggcttaatggactcactgtgccacatggctggggaggcctcacartcatggcggaaggtgaaggaggagcaaatgcacatctacatggcggcaggcaagagagcgtgtgcaggggaactgccctttataaaactgtcagatctcgtgaggcttattcactatcaccagaacagtacaggaaatcctgcctccatgattcaattaccttccacca

SEQ ID NO: 20708 - DNA, 515 bp, Homo sapiens
acttgtatgaacctaactgctggaggaaagtgggggcagctggtttattctacggagttctagtgtgagatgcagctcatgtttctatgccaatttctaatgagcaagctaccccacttctctgagcctcatttccttatccatgaactggataatatctaccttgcagggccaatgtgaggttgaatgaattcatgtttgtaaggagataagygcttcatagaaggttaataaataatagttttttttatggtaaaagagcccccaatcacaaaactagaagaccccattagagggatccagttcccactcctccctacaccacttaaagtgtagccttctccatagttgcctctcccagcccacgctcataggctcccccagggagcctgctgcatcctggggaaattctcgctactagaaagtttttccttgggctgaatcaaaattgatgtctctgcagctttcacctattgggccttccccctcaagaacactgaaaacaagtctatacc

SEQ ID NO: 20709 - DNA, 558 bp, Homo sapiens
tttccatacccagctgtctgctgctcaaaactaccataagctgactatcacagctcacaggatacccttgaagaagaccatctggtttatgtctcttggcaaaatttgtttaaaaacaagcagctgcatgacaaagtaagaaagagtctctgtctagctgtggtaaataagtagctttgcaatactcataataaagcatttttctaatccaagccaacatcttcaaaaggaaagcattattttcttacaactgaaagaaaaatctacagaattcagtgatgagggaaggactccattaaatttgtttcagcagcttgagatagtgagaaaaacaaaacaaaataraaacctgtttgtgattagatacagtcttgtaataactagttttaaaagtatttatttagaatctaatacttggatattattttaattctttatattaagagatttacatttcataaaagcttgtcctttgaaccctaatactcatattgtgatggtgagccggaatgagtaaggtcacttactatatagtcggtatataataattcgttgaat

SEQ ID NO: 20710 - DNA, 558 bp, Homo sapiens
tttccatacccagctgtctgctgctcaaaactaccataagctgactatcacagctcacaggatacccttgaagaagaccatctggtttatgtctcttggcaaaatttgtttaaaaacaagcagctgcatgacaaagtaagaaagagtctctgtctagctgtggtaaataagtagctttgcaatactcataataaagcatttttctaatccaagccaacatcttcaaaaggaaagcattattttcttacaactgaaagaaaaatctacagaattcagtgatgagggaaggactccattaaatttgtttcagcagcttgagatagtgagaaaaacaaaacaaaataaaaacctgtttgtgattagatacagtcttgtaataactagttttaaaagtatttatttagaatctaatacttggatattattttaattctttatattaagagatttacatttcataaaagcttrtcctttgaaccctaatactcatattgtgatggtgagccggaatgagtaaggtcacttactatatagtcggtatataataattcgttgaat

SEQ ID NO: 20711 - DNA, 758 bp, Homo sapiens
cccttatgtcacataaaacaatctaccttgtttccacgacaaaatacagtgcatgggtaggacattgaatgccaaaccgatgacaattttcaagtagggataggcttccttatgaagtgctggctttcaaaaagaccttagtgatcactgaaactcatttacatataccacctgttagcccatggactaaatcagctcattcccttttgtgcactcttgctttcttctataaaaactgaagttaatattgctggcttcatagcattccagtgaataataaatgaagatttatctccaaaataacttccacattgcccaatgtataacagatagctaaacaatgtggttcctgcactcagttctctctttcttgtttttgtcaggcttgtgttctgatttccccagttattcattctttccaagaaatctaagtctgtgtgatacatttcatctgcccacaaatcaagttcagaaaagatagacattctaattctgggttccctgttgatcatcagttactcaagttagtcacaagtcataggcctagaaagttaaatccttctttatttagtgtacctggatttttaaaaagcaaaagtcccygcttcaaatccaaatgcaacatggtaatgtattgtcagaatccttcagactaagattatagtttaacatttaagtagataatttcataacgtaggtctgtataagacattttgttgtactattttgtagaaaacctatttaaactcatcacacat

SEQ ID NO: 20712 - DNA, 529 bp, Homo sapiens
tgcatgtgcaggcgtgcgtgtgcaggtgtgtgcmggtgtgcctgtgtgcaggggtgcgtgtgtgcaggtgtgcatgtgtgtgcaggggtgcgtgtgtgcaggggtgcattgtgcaggggtgcgtgtgcaggtgagtatgcaggtgtgcatgtgtgcctgtgcaggtgtgtagtgtgcaggggtgcgtgtgtgcaggtgtgcatgcgtgtgcaggtgtgcgtgtgttcatgcgtgcgtgtgcaggggtgtgcatgtgtgcctgtgcgcaggggtgcatgtgtgcagggttgcgtgtgtgcaggtgtgtgtgcaggtgtgtgcatgtgtgccttgtgcaggggtgcgtgtgtgcaggtgtgcatgtgtgtgcaggtgtgcatgtgtgcaggtgtgtcagtagtggatctggctacatgtgtctgtgcccagtttgcctgtctctgggattttcgtgtgtgctcatatgcatatcacgtgtgcagggcctggggcgtggacgtcaggcactgagcctgctttggaacaagcc

SEQ ID NO: 20713 - DNA, 529 bp, Homo sapiens
tgcatgtgcaggcgtgcgtgtgcaggtgtgtgcaggtgtgcctgtgtgcaggkgtgcgtgtgtgcaggtgtgcatgtgtgtgcaggggtgcgtgtgtgcaggggtgcattgtgcaggggtgcgtgtgcaggtgagtatgcaggtgtgcatgtgtgcctgtgcaggtgtgtagtgtgcaggggtgcgtgtgtgcaggtgtgcatgcgtgtgcaggtgtgcgtgtgttcatgcgtgcgtgtgcaggggtgtgcatgtgtgcctgtgcgcaggggtgcatgtgtgcagggttgcgtgtgtgcaggtgtgtgtgcaggtgtgtgcatgtgtgccttgtgcaggggtgcgtgtgtgcaggtgtgcatgtgtgtgcaggtgtgcatgtgtgcaggtgtgtcagtagtggatctggctacatgtgtctgtgcccagtttgcctgtctctgggattttcgtgtgtgctcatatgcatatcacgtgtgcagggcctggggcgtggacgtcaggcactgagcctgctttggaacaagcc

SEQ ID NO: 20714 - DNA, 529 bp, Homo sapiens
tgcatgtgcaggcgtgcgtgtgcaggtgtgtgcaggtgtgcctgtgtgcaggggtgcgtgtgtgcaggtgtgcatgtgtgtgcaggggtgcgtgtgtgcagkggtgcattgtgcaggggtgcgtgtgcaggtgagtatgcaggtgtgcatgtgtgcctgtgcaggtgtgtagtgtgcaggggtgcgtgtgtgcaggtgtgcatgcgtgtgcaggtgtgcgtgtgttcatgcgtgcgtgtgcaggggtgtgcatgtgtgcctgtgcgcaggggtgcatgtgtgcagggttgcgtgtgtgcaggtgtgtgtgcaggtgtgtgcatgtgtgccttgtgcaggggtgcgtgtgtgcaggtgtgcatgtgtgtgcaggtgtgcatgtgtgcaggtgtgtcagtagtggatctggctacatgtgtctgtgcccagtttgcctgtctctgggattttcgtgtgtgctcatatgcatatcacgtgtgcagggcctggggcgtggacgtcaggcactgagcctgctttggaacaagcc

SEQ ID NO: 20715 - DNA, 529 bp, Homo sapiens
tgcatgtgcaggcgtgcgtgtgcaggtgtgtgcaggtgtgcctgtgtgcaggggtgcgtgtgtgcaggtgtgcatgtgtgtgcaggggtgcgtgtgtgcaggggtgcattgtgcaggggtgcgtgtgcaggtgagtatgcaggtgtgcatgtgtgcctgtgcaggtgtgtagtgtgcaggggtgcgtgtgtgcaggtgtgcatgcgtgtgcaggtgtgcgtgtgttcatgcgtgcgtgtgcaggggtgtgcatgtgtgcctgtgcgcaggggtgcatgtgtgcagggttgcgtgtgtgcaggtgtgtgtgcaggtgtgtgcatgtgtgccttgtgcaggggtgcgtgtgtgcaggtgtgcatgtgtgtgcaggtgtgcatgtgtgcaggtgtgtcagtagtggatctggctacatgtgtctgtgcccagtttgcytgtctctgggattttcgtgtgtgctcatatgcatatcacgtgtgcagggcctggggcgtggacgtcaggcactgagcctgctttggaacaagcc

SEQ ID NO: 20716 - DNA, 544 bp, Homo sapiens
acgagcaatcaaaaaccaaatgtgggaatctaggaacagtgatacaagcttgaagtctactggaatttactgttcataggtatagtgttctagacccatagtaaacttgataattttctaaaaacccaaaacaaaaaaattatgcacacttttttggggaaatgggacaaaagagagtctacacaaaggatggcattcgtgcaaaatgtgctctggtctagccaccacacagccacggttttctcgctcaccaactctctctaatttcatttctagtttcatataactgaactggccagacttaacgagctggaagagaagtctatttagtcagtggttagaatttggctacactaaacattaaaagtgctaaggaaaaatggcatttaataaaatgcatctagaagaratacatctctaaccatagaggcaaccacagtttatctttcaaatcttagtacaataattttaatgaacaactgaattcctatttgcatgcgtaaatcccttaggtctgcttattactttcccatttcttgggtgc

SEQ ID NO: 20717 - DNA, 523 bp, Homo sapiens
caggaaacacaaagttaagaataattgttaggtggggcagtcatgatataagtcatagttgcataaacaaaawgcagttattatgagtaatatttcaaaataatcagtagcaatgatctttactcattttagaaagtaaaaaacatatttttcaaagccatttaagagattatcagaagtcaacagagttgccatactattttgttgttaaatggggatctcttttatctgagcacataatagtttggtcacaatacaaaagaaaaccccaagtctacatctactcattttatatatacttcatataataatttttagttaaggttttataaatcagactattagaaatgaataaaatcactaacattgagctttccatatttcttattcatctacacagaaattacaaaatttattttagtagacaattatatatgttcagacatgtataaactcataagaacgtaagtggataatgaatttaaaagttggattttaattttaagatatgattcatcttacc

SEQ ID NO: 20718 - DNA, 523 bp, Homo sapiens
caggaaacacaaagttaagaataattgttaggtggggcagtcatgatataagtcatagttgcataaacaaaaagcagttattatgagtaatatttcaaaataatcagtagcaatgatctttactcattttagaaagtaaaaaacatatttttcaaagccatttaagagwttatcagaagtcaacagagttgccatactattttgttgttaaatggggatctcttttatctgagcacataatagtttggtcacaatacaaaagaaaaccccaagtctacatctactcattttatatatacttcatataataatttttagttaaggttttataaatcagactattagaaatgaataaaatcactaacattgagctttccatatttcttattcatctacacagaaattacaaaatttattttagtagacaattatatatgttcagacatgtataaactcataagaacgtaagtggataatgaatttaaaagttggattttaattttaagatatgattcatcttacc

SEQ ID NO: 20719 - DNA, 523 bp, Homo sapiens
caggaaacacaaagttaagaataattgttaggtggggcagtcatgatataagtcatagttgcataaacaaaaagcagttattatgagtaatatttcaaaataatcagtagcaatgatctttactcattttagaaagtaaaaaacatatttttcaaagccatttaagagattatcagaagtcaacagagttgccatactattttgttgttaaatggggatctcttttatctgagcacrtaatagtttggtcacaatacaaaagaaaaccccaagtctacatctactcattttatatatacttcatataataatttttagttaaggttttataaatcagactattagaaatgaataaaatcactaacattgagctttccatatttcttattcatctacacagaaattacaaaatttattttagtagacaattatatatgttcagacatgtataaactcataagaacgtaagtggataatgaatttaaaagttggattttaattttaagatatgattcatcttacc

SEQ ID NO: 20720 - DNA, 636 bp, Homo sapiens
ccatgtataatgctatgctgttttatgtaacagacttgagcaactgtggattttgatattcatagggttcctgcagccaattcccccaaaatatacagggaggactgtactattattaatgtcttgcattgatatcatgccttatgcttttcaaactttttaatttatgccaatagatatcttagatataagtttataaacctgaagatgtaagtttataaacctcaaaatatgtgacttttttaaaaacctgtgctattaacagccctctcccccaacctaagccctgattttgtttactataaattttaaaatattctctcagacttcagaaaagagcagttaaaatactttgaaatattgaatatgaacataagaattacatacaaacatataggtttgtatgtaaatagttaayctatctctatttggagagctaaattataacttaatgctccagtttttatgaatttattttcttttctctgaatgtttgctaataatttaaaagagaaagctgtatgtattgatcttgtgttgtgtttttttcacaggtttctgtagagcaacattttcgttctgtgttagtcctctattggtttttgtcaattctaagagtggagataatcagggagt

SEQ ID NO: 20721 - DNA, 1271 bp, Homo sapiens
aaaaccaaggcaaggaatgataactaaaaacatggggccgtttcttagagaagctaattgtattttaaaaactttttctgacataaaaactgctgatagccaaaactgcttctaaaaaaatttgggaaatacaaaattatatgaaaaagaaaataaaatcacctgtagtcctaccacccagagataatcactattaaagattaatatatttaccattttattttcagcagcatttttagttatgtgattccataaacataacacatttttayggaaatcagtcctttatcttaacagtatttttgtaaatgttattaatttctttccaaaaaagacaaaaaggagaatttttttcttccatttacttcagaaatgtctgttttctagcatataaaataacagtaaatatttacttttatcacgtgtataatcactaaatatgaggtacaattctaaagatatgaaggaaatctctctttttttgtacaaaagagttttaaatgaaactttgctttttaaaaataaacttacttttgtaacaaagggatagcatactttaagataacagattaaatgagtgttctgaatggccctgactaggccctgaactaggctggcaccaggaatgcattttactgtgtgtggcctttttaccttgaaaactgcgataaaagtagactaaatctttcttcttagcttttgtatacttcattagctgtgggtcttaggcaaattactcagtaagcctcaggttctttggctataaaacaggacagaggggtaaatatatacagagtgcttaattacagcgcctggtacacaatgcaaaatattaactcttattattacttacctttctgaccgtgctaagtgactgcatagtaggttaataagttacatctataattttatctttgaacatagaggctattttattttcctctgagagaaattgtattttttgatcttcaaatatttttaatggacaaaaacttggattttttgaatgtaagtttcaaatggcattaatcaaatgttattaattaatacattagtcaactggcattaatgaatttattaatagcattaatgatcatgtaaaatattttctaccctgcagggaagaaaaataaaaccaatctctggagaacattttcttttttcaaattttaaagtttatttttagattatatattttcatttttctcatcctagctgtaaagatgtaatttttagtgtttaagagatcagtaaggtggatttgtgggtaa

SEQ ID NO: 20722 - DNA, 570 bp, Homo sapiens
aaataggccaaaaataaaacctcatatatatggtcaattgatttctgacaagggtgccatgaacattcaataggacaaggaaagtttttttcctaacaaatggtactggaaaaaatgaatatccacatgcaaaggaatgaaattggactttttctttacacaaacattaactcaaatgtgtcragcacttaaatgtaaatgttaaatttctaatactctttgaaggaaacacataggggaacagctttgtgatgttgaatttggcactgatttttaggatatgacatcaaaagcacatgcaacaaaaaaagaactttataaaaattcataatttgtgcactaaaaggtgacatcaaacatatctaaagcacatatatttttatatacatatatatacaatcttatttagctttaacaaaaaataaaattctaatacatgttgcaacaatgaactttgacaatatcatgctaaacaagacagttacaaaaggataagtactgtacaattccagtcgtaagaggtgcctaaaatataatagacaaattaagatagaaaatataagaatagtt

SEQ ID NO: 20723 - DNA, 1357 bp, Homo sapiens
caataaaaaagtcatggaatcaacctgtggctatcaacagatgattagattccaaaagtgtttatatatgtacacacacaaagacacacacggaattctactcagccgttaaaaagaaaaaacaggaatggaactgaaaaccattatctttagtgaaataactcagaagatcaaaaaacacatgttctcacttataagtggcagttaaacaatgggtactcatgaacatgcagagtgaaataatagacattggacatcccaagagttgggagtgtgggagggggtgagagatgatatactacctattgagtgcaatgtgcactattcaggttatgtgtagggtaaaagcctagatttcaccactgtactacatgtcaatgtaaaaacctgcacttgtaatcctaaatctattaaaattaaaataaaatactaatacaacaaaaaattcaaaaaataaaagttatggcatgagctatgacttctagtgaggaatgaatcattttaagccaatttttattttcaaagatcactatgtgtgtgacagacatggctttctggaacttcacagacttcaaatgcaacctctcccagtacataaagatatttctcaactcttataattcttaagcccacattgagaacaatttattaaaacatttttttctaacttttattttaggtctgggggtacatgtgcaggtttgttacgtgggtaatttttgtgtcacagggttttggtgtacagatgatttttgtcatacaggtaacaagcatagtacctgataggtagttttttgacccttaccttcctcccaccctccaccctcatggagaccttgtatctataattcctttcttctggtccgtgtgtactctgttcaatgcttaatttaataataataatagtaataataaaagttattctatcctaatcctattcaaataacttgccagaaaacataagtaaaaattgcatgtatcataatattttctaccttggtaatgcctacatgatattaaatgtcaaaatagtcaaatgaaaaagaaaattagataaagttacaaagatggttacagatattccatccttagcatctaagcaactgaggttatggttaataaaacgcagttttktggagttttttttgtttcactctgatataaacttctcaacatcaaaatatgtgaaagtaaattttcattatttgttttccagacaaaatatctgaactaaatacgttgtcacatgtcttttgtaccataaaaaagaatttttcagttgtctagaataatgtagttgatcctcaacaaatgagaaaataataaaactagtatagaaaatacgtattttcaaagg

SEQ ID NO: 20724 - DNA, 1357 bp, Homo sapiens
caataaaaaagtcatggaatcaacctgtggctatcaacagatgattagattccaaaagtgtttatatatgtacacacacaaagacacacacggaattctactcagccgttaaaaagaaaaaacaggaatggaactgaaaaccattatctttagtgaaataactcagaagatcaaaaaacacatgttctcacttataagtggcagttaaacaatgggtactcatgaacatgcagagtgaaataatagacattggacatcccaagagttgggagtgtgggagggggtgagagatgatatactacctattgagtgcaatgtgcactattcaggttatgtgtagggtaaaagcctagatttcaccactgtactacatgtcaatgtaaaaacctgcacttgtaatcctaaatctattaaaattaaaataaaatactaatacaacaaaaaattcaaaaaataaaagttatggcatgagctatgacttctagtgaggaatgaatcattttaagccaatttttattttcaaagatcactatgtgtgtgacagacatggctttctggaacttcacagacttcaaatgcaacctctcccagtacataaagatatttctcaactcttataattcttaagcccacattgagaacaatttattaaaacatttttttctaacttttattttaggtctgggggtacatgtgcaggtttgttacgtgggtaatttttgtgtcacagggttttggtgtacagatgatttttgtcatacaggtaacaagcatagtacctgataggtagttttttgacccttaccttcctcccaccctccaccctcatggagaccttgtatctataattcctttcttctggtccgtgtgtactctgttcaatgcttaatttaataataataatagtaataataaaagttattctatcctaatcctattcaaataacttgccagaaaacataagtaaaaattgcatgtatcataatattttctaccttggtaatgcctacatgatattaaatgtcaaaatagtcaaatgaaaaagaaaattagataaagttacaaagatggttacagatattccatccttagcatctaagcaactgaggttatggttaataaaacgcagttttgtggagttttttttgtttcactctgatataaacttctcaacatcaaaatatgtgaargtaaattttcattatttgttttccagacaaaatatctgaactaaatacgttgtcacatgtcttttgtaccataaaaaagaatttttcagttgtctagaataatgtagttgatcctcaacaaatgagaaaataataaaactagtatagaaaatacgtattttcaaagg

SEQ ID NO: 20725 - DNA, 496 bp, Homo sapiens
cctcccaaagtgctgggattaaggtgtgagccactgcactccgcctatgaatctttttttcttttttcttttctttttttttttttgagacggagtctctctctatcgcccaggctggagtgcagtggcgcaatctcagctcactgcaaactccacttcccaggttcacgccattctcctgcctcagcctcctgagtagctgggcctacaggcacccgccaccgcgcctggctaattttttgtatttttagtagagacggggtttcaccgtgttggccaggatcgtctggatctcctgacctgctgatccgcccgcctcggcctcccaaagtgctgggatyacaggcatgagccaccgcgcctggccgaatctttttttcttaagagattggcacagataaagattattggaatgatttcagttttttccacctgaggaagaaaagaccaatgtgcttttgtctcatggcccatttcagctcgacatcactatgca

SEQ ID NO: 20726 - DNA, 496 bp, Homo sapiens
cctcccaaagtgctgggattaaggtgtgagccactgcactccgcctatgaatctttttttcttttttcttttctttttttttttttgagacggagtctctctctatcgcccaggctggagtgcagtggcgcaatctcagctcactgcaaactccacttcccaggttcacgccattctcctgcctcagcctcctgagtagctgggcctacaggcacccgccaccgcgcctggctaattttttgtatttttagtagagacggggtttcaccgtgttggccaggatcgtctggatctcctgacctgctgatccgcccgcctcggcctcccaaagtgctgggattacaggcatgagccaccgygcctggccgaatctttttttcttaagagattggcacagataaagattattggaatgatttcagttttttccacctgaggaagaaaagaccaatgtgcttttgtctcatggcccatttcagctcgacatcactatgca

SEQ ID NO: 20727 - DNA, 488 bp, Homo sapiens
cacccacctcagcttcccaaagtgctgggattacaggcataagccactgtgcctggcctgaaacttaatttctaaaatacatttaaaatatattcagttctgtgtttcctggagttgaataatttagctaaaactgccgtctttatgagtcctaaagtcatatttggtgatattaagtgaaaatgatttgtgtaaaatcttctctataacttgatcaaactataacagcattactggtatgtataatttccactaaacatgtttcacaaaaagtacacaaggtatttgtcatcacaggacaaactcctctctctagatctctgaaatatgctttattcaattttttcttcatgatacagcattatacatacctgctgtctatccagtttatttccatatgttttcttggtaagcagtgtttactaaaagtaggaaattaatatttaytaaaaattccaaattagtatttcccagcaataataaagatg

SEQ ID NO: 20728 - DNA, 512 bp, Homo sapiens
tttttttttttttgagatagtcttgctctgtcgcccaggytggagtgcagtggcacgatctctgctcactgcaacctccacctcccgggttcaagtgattctcttgcctcagcctcccaagtagctggcattacaggcacctgccaccacgcctggctaattttttatatttttggtagagatggggtttcaccatgttgaccaggctggtcttgaactcctgacctccagtgatccgcatgccttggtctcctaaagtgctgagattacaggcgtgagccaccatgcctggccaaatagaactttttccacagtacccacaataagttcacaaatatttccaagccctgactctgccaccgtagatcatccatgctctctctatatttgggcaatacagcataatagttaagtctagactccggagtcagaaatgtgttccaatccctattctaccacccattagctttgggggcttggtcaagtcactcaaggccccagttttcatacct

SEQ ID NO: 20729 - DNA, 512 bp, Homo sapiens
tttttttttttttgagatagtcttgctctgtcgcccaggctggagtgcagyggcacgatctctgctcactgcaacctccacctcccgggttcaagtgattctcttgcctcagcctcccaagtagctggcattacaggcacctgccaccacgcctggctaattttttatatttttggtagagatggggtttcaccatgttgaccaggctggtcttgaactcctgacctccagtgatccgcatgccttggtctcctaaagtgctgagattacaggcgtgagccaccatgcctggccaaatagaactttttccacagtacccacaataagttcacaaatatttccaagccctgactctgccaccgtagatcatccatgctctctctatatttgggcaatacagcataatagttaagtctagactccggagtcagaaatgtgttccaatccctattctaccacccattagctttgggggcttggtcaagtcactcaaggccccagttttcatacct

SEQ ID NO: 20730 - DNA, 512 bp, Homo sapiens
tttttttttttttgagatagtcttgctctgtcgcccaggctggagtgcagtggcacgatctctgctcactgcaacctccacctcccgggttcaagtgattctcttgcctcagcctcccaagtagctggcattacaggcacctgccaccacgcctggctaattttttatatttttggtagagatggggtttcaccatgttgaccaggctggtcttgaactcctgacctcmagtgatccgcatgccttggtctcctaaagtgctgagattacaggcgtgagccaccatgcctggccaaatagaactttttccacagtacccacaataagttcacaaatatttccaagccctgactctgccaccgtagatcatccatgctctctctatatttgggcaatacagcataatagttaagtctagactccggagtcagaaatgtgttccaatccctattctaccacccattagctttgggggcttggtcaagtcactcaaggccccagttttcatacct

SEQ ID NO: 20731 - DNA, 578 bp, Homo sapiens
gaacctcatagaagagcaggcaagtgaactggtctttgacagccaagcaggatttccaggcatctgacagcatgtttatgttctaggctgggaaattctgttctattcttccctctgaaaagaagaacaagttgtgtctcaagaaggaggacagaggacactctttcatacttctcttccactttctcatccaaagccagtagccaactctaaaactgaatgcacattctgagaaacactgaaaaggaaacakaacttttgatgcagaaattaatcaagacttggatataaatttgtcacatataaaaaactttcaacttcatcaagttaactttgagacatttaatggaaaacaaggcattgattcacaacatacatatataaaatacgatttatcaaaagtaaaaagacaaacagtacttgagatatgtgactgcgaagaaatatcaaccaaagtcactggctggaaagataaattaacaaatttattcattatcctttggcttccacctctattctcaaatcttctttaaactaataagttagagcttcttggttaggtgaacaagtacttggct

SEQ ID NO: 20732 - DNA, 578 bp, Homo sapiens
atcatagtactcagtagttagttttcaactcttacctcctctttctcaccccttagtattccccagtgtctgttttttccatctttgtgtcaccgagtagtgatcctttgctcccacttataagtgagagcaaactttaaacttttaagacatatttgataaacagaatattttaattttagtgtagtcaatttaatatatgatatataagatatggtttgtggtttatcgcattttacattaaaaattcttctctgcctccaaatcacaaatatagttccatatatttccttgtaagatgaagttcaattcctctatgtctgtttattcaactttattttttaaatgataactaatgttctaaataccattgagtgcaattacagttcagtatcagacattgaacttcaaaatatgtctggatattttcctgggctccrttttctattcaattaatcttttatctctttccaagccagtactgcactcatagttcttgtagctggattcaggaaaaaaaaatcactttgtcttattaatctgaatggtcttggctactttgataatttggcgtctta

SEQ ID NO: 20733 - DNA, 484 bp, Homo sapiens
taggaaatgttttgtattaagtagagcccacttagagcatcacaattattttatatatttttcaaatcttaattttatttttaaactcacaatgaatacaaaaaatagacttctatcaaaattgaaacaatttgcaagtgtatgggataaaagcatcctcctttcccacaatttcacttccctgctcagtattatttcatataaatagcctatgttcttttagattactttctatgcatgtacctctataaatgtgggcatgcaaagtgcatatatgtcagttattcatacagataaatatatcttttctttcttttttttttgagatagtctcgctttgtcactcaggctggagtgcaatggcgcaatctcrgctcactgcaacctctgccttctgggctcaagcaattcttctgcctcagcttcccgagtagctgggattacaggtgcacgccaccacacccggctaatttttgtattttta

SEQ ID NO: 20734 - DNA, 533 bp, Homo sapiens
gatttgtcagtctctcaaaagagtcatgctgtggtcccatcccatggtaaagactgaacatattggatgggagagagsggtagacagggtgggagttgctggtattggatcttctgccatgccaaccacctcccttccttggcacatttctccagctgctgcattcaccagccaggatcctttggctgcaagcaatggaagctggctttggtcagccttaccaaaacatggatctgtggacagatgtggggtagctcggagaacacagaagggctaagggaccaggtgacagaaggactagacctgggtcaagtctgagaaatctctttgaggcatacattttggggtgagggcctactcactcttgtttcttgtctcagtcccctcaaggtaaaatttcccaggagggaagtgtgggcttgggccccacgctcactctctggcagagcaccttggtcatccattcctgagatggtgaccaagtgggcatgggatcctcgaggggaacttgaagtccagggcagaagagtggg

SEQ ID NO: 20735 - DNA, 533 bp, Homo sapiens
gatttgtcagtctctcaaaagagtcatgctgtggtcccatcccatggtaaagactgaacatattggatgggagagaggggtagacagggtgggagttgctggtattggatcttctgccatgccaaccacctcccttccttggcacatttctccagctgctgcattcaccagccaggatcctttggctrcaagcaatggaagctggctttggtcagccttaccaaaacatggatctgtggacagatgtggggtagctcggagaacacagaagggctaagggaccaggtgacagaaggactagacctgggtcaagtctgagaaatctctttgaggcatacattttggggtgagggcctactcactcttgtttcttgtctcagtcccctcaaggtaaaatttcccaggagggaagtgtgggcttgggccccacgctcactctctggcagagcaccttggtcatccattcctgagatggtgaccaagtgggcatgggatcctcgaggggaacttgaagtccagggcagaagagtggg

SEQ ID NO: 20736 - DNA, 580 bp, Homo sapiens
ctatagcaaagtatgtctgtcagtgatagtgcctacaactggaattagtcctagaactgtgaatcctatttttaagtgtgattagaattttattctttagagcctggttgttttaagtcattaattcagtcatcaaaaattgatggagtgcctactaagtgccacacacagaacattctggaatttcaaaattaacaagatttattatctgctttggaaagatttggtagctatatctggtagttttggcagtttttctgtgtttatgtgcctacccagtrtctaatcacccatgtcccttccttgtaatactctctgtggatatcatctgtcttccaggtagcccatgactcagaggggaactgacctgacccccaactacagcagtacacccggattggtctaagctaactagagtaatcctactttaatgaaccaatgattcattcagtgaaaccaggcttaatccaattaatatataatactctcccacaaggtggcccaatcagtgaaaaactcatattttctttggaaatctccttctgaatgtgaaaggcacggttatctggataccagaact

SEQ ID NO: 20737 - DNA, 1084 bp, Homo sapiens
tagattttctgacttttgctacatactaatgttaagtactattataagggtttattctaagtctcatcctaagcttagtcctgggatagactcaggatgaatgaaaccagggaggtgaactggagaagctcacatcccagaggtagaggtggcaaacatacgtggggttgtgacrcagggataattgtaataaacatattaaataaacgaatgaatcattattctataaaactggctgggtgcattggctcatgcttgtaatttcagcactttggaaggccaaggtgggaagaccacttgaggccaggagtttgagattagcctggccaatatagtgagactctgtctctacaaaataatagaaaaacttacctgagccttgtggtgcacgctggtagtcccagctacttgggaggttgaggcaagaggattgcatgagcccaggagtttcagattgcaatgagctgtgattgtgtcactgctttccagcctgtgcaacagatgagaccccaactcaaaaaaaattttttttaatcaaaaactgatatttacagattctggttgaggtaagatgttatatatacactctaccatgtttctcccactgaatgaagatctagaacctggaaagacagcagtaatccgagggctctgaaaagtaaatagttgtaggtggatcacagaagatcagaatgtgaagtgtcactaaactggttgtattggtccattgtcacactgctgtaaagaaatacctgagactgagtaatttatcaatgaaagaattggctcatggttctgcaggctgtacaggaagcatggtagcatctgcttctggggaggcctcagggagcttttgctcatggaggaaggtgagggggaagtgggcacatcttacatggcaggagcaggaggaagagagagagggggaaggtgctgcacacttttaaacaaccagatctcatgagaactcacgaacttattatcacgagaacagcatcgagatgatggtgctaaaccattcatgaaggaccaccagcatgatccaatcctcccattgggccccacctccaacactggggattac

SEQ ID NO: 20738 - DNA, 559 bp, Homo sapiens
aacattaaatgagtcactgtatgcaaagcaggacagcgcctcgtgcagagtagacattcaaatatgagacagaaaaggcacattgctgatttagccccaattcccctctgcatcagagagggacagtttagaaactgctgtcccttggccgggtgcggtggctcatgcctgtaatcccggcactttgggaggctgaggtgggcggatcacctgaagtcgggagttcgagaccagcctggccaacaaggagaaaccccgtctctactaaaaatacaaaaaattagccgggcatggtggtgcatgcctgtaattccagctacttgggaggctgaggcagaagaatcacttgaacctgggaggcgaaggttgcagtgagccgaggtcgtgccattgcactccagcctgggcaacaagagcgaaactctgtctaaaaaaagaaaaaaagaaagaaactgctgtcccagcctgtacckgttcacttgccagtctacagcttcaaggctctcagattttgtgtagccctggcaagtccctccactccctaagcttcagtttcttc

SEQ ID NO: 20739 - DNA, 540 bp, Homo sapiens
tgccttgaaatgttcccttgatgcattcaaagttttaaaaacttgtttgacacacatctatcctctagatcagtggactatatttttttaaaaacacatattttatcagttagatttttataacaaaccctcaagtaaatacatatatacacatatatgtacatatgcatatgtatataaatacataatttacttatatatcctatkgaactaatataattcaatagcataaaatgtacctgaaatagaaattttaaaacagaaaaaagctgaaaaacattagtttttaaattttagtttttcattactacaagatgcttttgtattcgtaaaaatgtgttaaaactagagtaatatagtttgacattttttttcccaaacaaaaaaaaagctccattgaacacttcatgatatagtaacttaagatctggttctgaggctacttattttgataatagagtttaagaacaaaaagtatgttttacaaatatacatagatctaaatagttttgtctactaaataataaaacatatttttac

SEQ ID NO: 20740 - DNA, 540 bp, Homo sapiens
tgccttgaaatgttcccttgatgcattcaaagttttaaaaacttgtttgacacacatctatcctctagatcagtggactatatttttttaaaaacacatattttatcagttagatttttataacaaaccctcaagtaaatacatatatacacatatatgtacatatgcatatgtatataaatacataatttacttatatatcctatggaactaatataattcaatagcataaaatgtacctgaaatagaaattttaaaacagaaaaaagctgaaaaacattagtttttaaattttagtttttcattactacaagatgcttttgtattcgtaaaaatgtgttaaaactagagtaatatagtttgacattttttttcccaaacaaaaaaaaagctccattgaacacttyatgatatagtaacttaagatctggttctgaggctacttattttgataatagagtttaagaacaaaaagtatgttttacaaatatacatagatctaaatagttttgtctactaaataataaaacatatttttac

SEQ ID NO: 20741 - DNA, 584 bp, Homo sapiens
cactgcaacatttgcctcccaggtttaggcgatcctcccacctcagcctaccaagtagctgagattacaagtgtgcaccactacgcccagctaattttttgtattggtagagatggagttctaccatgttggccaggctggtcttgaactcctgacctcaagtgatccgcccgccccagcctcccaaagtgctgggaatacaggcacgagccactgcacctggccaaagcaatgatactgagtccattgggtacaccatggggttcaacctgaagggaactgacaggatagagagagcagattttgagaaaccagtttttaatgtgtatgacaatcaatgttagtggaaacaagaagagcacatttgaaaatagaaggaagttagggttacgattttatcttggcatcagatattggcttagaagtggaatatgaccattaagatgatggtttaaaacgtggaggaaactatrattttagctaggacatagtgaaaagaaccttggatttttgtcaaacagatatgagtttgaattctggcttcatcatttaataactaagtgacgttgggcaaagtattaaat

SEQ ID NO: 20742 - DNA, 535 bp, Homo sapiens
ccaagatagaaggttttcaaggacaatcatggccggaagatacagtggcaataaaggtattttgaatgaattaacacccatggactgggcctggtggctcatgccttaataccagcactttgggtggctgaggcaggcagattgcttgagttcaggaatttgagctcagcctggtcaacaacggcaaaacctcgtctctaataaaaatacaaaaaattagccgggtgtgctggcatgcgcctatagtcccagctactcaggaggctgaggtgggagaatcacctgagcctgggaggttgaggctrcagtgaaccaagatcacaccactgcactccagtctcgacaaccagagtgagatgctgtctcaaaaaataaaaaatacaaataaaaaatttgttaaaaaaaagtagcacccagcaccaaagaggaaataataatgatttcctgtagacataaggctaaccagtgtttataacgcaaagataacctcccttcagagtccccccaagcttaggtgaagaaaattgtgagcagg

SEQ ID NO: 20743 - DNA, 522 bp, Homo sapiens
ggcaagacagggcttagctatattcggctcagcttgaactcataaaccatcaactggcctctgtacttccaggacaatctgatgaataaaatacagatataaaattaaaaaatatatttataaagagattagtaaaacagcaatctgtaagtgagaaatgacaaccacttagtccagaccaaatgagagagaagacttgcaaaagggtaacttttcttacaaatcaagttatgggaaaatttgagatccaaatagacttttaactttggattgtctttattcccaacacacgtttttaatttaatgcggtgtactttatcctaactcttttagctcacccccytgaaaaaaaaactagctgtcttcctaaagatagagaaaacttgtccaagtcagaaactctttggaattttaataaaagtaacataatttagaaattaatatacttcaaatatactgacagtatatattggcaacagaatatatgctaatttagaattttaggatattctataattaaaa

SEQ ID NO: 20744 - DNA, 556 bp, Homo sapiens
ggaaatggaggcaggtatcagcactccgggtctacccgagagccatgtggatggggagcggattgggtgctgtggagtgtggattgggtgctgtggggtggggattgggtgctatggggtggggattgggtgctgtgagtgtggattgggtgctgtggggagcagattgggtgctgtggagagcggattgggtgctgtgggttgtggattgggtgctgtggggagcggattgggtgctgtggggtgtggattgggtgctgtgggtgtggattgggtgctgtggggtgcggattgggtgctgtggggtgcggattgggtgctgtgggttgtggattgggtgctgtggggtgtggattgggtgctgtggggagcggattgggtgctgtggggagcggattgggtgctgtggggtgtggattgggtgctgtgggaagcggattgggtgctgtggggagaggattgggtgctctggggtgtggattgggtgctgccgggwgaggattgggtgctgcggggagtggattgggtgctgtaggtgcggattggatgctgtggg

SEQ ID NO: 20745 - DNA, 556 bp, Homo sapiens
ggaaatggaggcaggtatcagcactccgggtctacccgagagccatgtggatggggagcggattgggtgctgtggagtgtggattgggtgctgtggggtggggattgggtgctatggggtggggattgggtgctgtgagtgtggattgggtgctgtggggagcagattgggtgctgtggagagcggattgggtgctgtgggttgtggattgggtgctgtggggagcggattgggtgctgtggggtgtggattgggtgctgtgggtgtggattgggtgctgtggggtgcggattgggtgctgtggggtgcggattgggtgctgtgggttgtggattgggtgctgtggggtgtggattgggtgctgtggggagcggattgggtgctgtggggagcggattgggtgctgtggggtgtggattgggtgctgtgggaagcggattgggtgctgtggggagaggattgggtgctctggggtgtggattgggtgctgccgggagwggattgggtgctgcggggagtggattgggtgctgtaggtgcggattggatgctgtggg

SEQ ID NO: 20746 - DNA, 564 bp, Homo sapiens
ctcgctctgttgcccaggctggagtgctatggtgcgatctcagctcactgcaaccttcacctcccgggttcaagcaatcctcctgccttagcctcccaagtgctaggattacaagcatgtgccaccatgtctggctaatttttgtattttttggtagagacagggtttcatcatgttggccaggctggtctygaactcctcacctcaagtgatctacctgcctcggcctcccaaagtgcaggaattacaggtatgagccactgctcctagcctctgaggctcttaagtgcctctgtattgcacacatgtcactggaatactgttctttaatcctgggaagcaactgctttaaaatgagggaacacacaggtacaaagcacaggaacttcctgggacgaattgttacaatttctttagctcttatgtgaggcaattgtttaaaacctgacacctgccctgtgaagttggaactactgtccccagttgataaataagggacatgaagcttggccacgtcctgtgacttgcttggggtcaccaggctcaagggagggagctgggctt

SEQ ID NO: 20747 - DNA, 523 bp, Homo sapiens
cttgtgtcagaactatactcctgccaatggcaacaacgcagttcctgttccactcgctgaatgaggtcacgggtcgttcactcattgtagtctttgtgacgctattgttggtgatagaatgayaaagttgatggtcgattttgcaagatacacctgaggtacaggtgcatggagctcctgataatgtgtactgcgttacatgatctgtaaatcgtgggctacgcatcctctacacccgactggaacacgctttgcacctatgcgcacacgtgtttcgcggagagtggtgctcagcgttgtgccaggcgctgaatcaggctctggggtgcagcagtgacctcggtggtcatgtccccgcgtcgcccggccacctccgcagagcaagctgagcagggggctggctggaggccgacggcggaatcccctcaacggagcgccgccagggggcgcgcgaggcagggcggagctgcgtactttgtccgcccgcgcggcccgtcgctcgcgccgcggcgggaaaatccga

SEQ ID NO: 20748 - DNA, 523 bp, Homo sapiens
cttgtgtcagaactatactcctgccaatggcaacaacgcagttcctgttccactcgctgaatgaggtcacgggtcgttcactcattgtagtctttgtgacgctattgttggtgatagaatgataaagttgatggtcgattttgcaagatacacctgaggtacaggtgcatggagctcctgataatgtgtactgcgttacatgatctgtaaatcgtgggctacgcatcctctacacccgactggaacacgctttgcacctatgcgcacacgtgtttcgcggagagtggtgctcagcgytgtgccaggcgctgaatcaggctctggggtgcagcagtgacctcggtggtcatgtccccgcgtcgcccggccacctccgcagagcaagctgagcagggggctggctggaggccgacggcggaatcccctcaacggagcgccgccagggggcgcgcgaggcagggcggagctgcgtactttgtccgcccgcgcggcccgtcgctcgcgccgcggcgggaaaatccga

SEQ ID NO: 20749 - DNA, 1935 bp, Homo sapiens
taaataatttactcttcacaccattaaatggcccacattaggatatgaattagtgtttgtctactttgaatgcttatggttttaatcaccaacagtagctagagcaatctcttcagatctcatattaagtggaatcataatgcagttttacttggatacagggtgtattagttttatattgctrcagtaacaagttactacaaacacagtagggtagctcaagagagtacaactttattatcttccagcaggctagaaggccagtaggaatcttactgagctaaaactaatgtgtgggcagggctgcattccctctggggagttggggagaatttgtttctttgcttttttcagcttttggaggtcacccacatttcttggttcatggctttttgctccatcttcaaagttagcaagataacatttctgtttcccttgccacatcttcagactctctttatctgcctttctattccacttttaaggatccttgggattaccttgggccacctggataatgcaagataagctcactatcttaaggtcatctgattagcaaccttaattcaatctgaagttcgaattcccattgcaatgtaatctaacacattcacagattccagggattagaaggtgaggatcttgcaggggataagagcatcattctacctaccacatgcacatgcagcataaagctttgctttccaagctttgctgaagttaaagaatggtatcacaaagatggcagagactggagtggcaaggtgactagacaagcccttatgatggaaaaagaaccttagtgagacccagtttaattttggtgtcccaagtattgatcagcctttagggactagcaataccttttatgagaagctaatgaatacatgagaatgcaaattcataacttttcagtggcaagctttacaagttgatactgttatctgtagttcaaatatcctctcccaaggaagccaatttaaattaaagaagttaaccaggggtacaatttgacctagggagatgcagaatctcaagcctatctcctctggccaggacacttaaacattatctttacccttaaggactatgttgccctcctagacaaaaggctcagcatctctatcctttggtctgtataagatgaaatctgccaggatctcagaaaaccctttttctctgtcacataaaataacatttcttctgctcacacattgtttttttattgagttattgccactagtgagatttttgctttctatagattatactcaaaaatctgtctttagatgaccagaaatccctgatttttttgcttctttaagagataacatgcatcttacaatgacttctacacagggatactttttgggcatttgaaatttccagtttaatttttttagagagaaaatgatttttctttttttctggggcatttcttttattgggtactgcttttgacctctacctggctgtagggatcatgtgcttttgaataacctttttctatcaagcaccatgacattttacattccaagtaccatcataactacttgttttctttattagggaagcctattatatttttcctgaatctgcttgagcattcactggtggctgatcccttacattgtctcactatattctcaagattagtgtgaactcccttctcatcctccatgtgtgtcacatctgagatattggccttccttacccaggaacgtgacctccccaggaaaagttttcctgcttatttctccaaatttccgtgccatctctttggactcttctgacagtttttactactattcttaataaatgtatgtgaacatctagtctctccttaatgcagaattcttttctaaaaatctagtagaagaccaggcaaatggaaaatgcgcataatgtacaaaatttgcttgttgatgctatttc

SEQ ID NO: 20750 - DNA, 1935 bp, Homo sapiens
taaataatttactcttcacaccattaaatggcccacattaggatatgaattagtgtttgtctactttgaatgcttatggttttaatcaccaacagtagctagagcaatctcttcagatctcatattaagtggaatcataatgcagttttacttggatacagggtgtattagttttatattgctgcagtaacaagttactacaaacacagtagggtagctcaagagagtacaastttattatcttccagcaggctagaaggccagtaggaatcttactgagctaaaactaatgtgtgggcagggctgcattccctctggggagttggggagaatttgtttctttgcttttttcagcttttggaggtcacccacatttcttggttcatggctttttgctccatcttcaaagttagcaagataacatttctgtttcccttgccacatcttcagactctctttatctgcctttctattccacttttaaggatccttgggattaccttgggccacctggataatgcaagataagctcactatcttaaggtcatctgattagcaaccttaattcaatctgaagttcgaattcccattgcaatgtaatctaacacattcacagattccagggattagaaggtgaggatcttgcaggggataagagcatcattctacctaccacatgcacatgcagcataaagctttgctttccaagctttgctgaagttaaagaatggtatcacaaagatggcagagactggagtggcaaggtgactagacaagcccttatgatggaaaaagaaccttagtgagacccagtttaattttggtgtcccaagtattgatcagcctttagggactagcaataccttttatgagaagctaatgaatacatgagaatgcaaattcataacttttcagtggcaagctttacaagttgatactgttatctgtagttcaaatatcctctcccaaggaagccaatttaaattaaagaagttaaccaggggtacaatttgacctagggagatgcagaatctcaagcctatctcctctggccaggacacttaaacattatctttacccttaaggactatgttgccctcctagacaaaaggctcagcatctctatcctttggtctgtataagatgaaatctgccaggatctcagaaaaccctttttctctgtcacataaaataacatttcttctgctcacacattgtttttttattgagttattgccactagtgagatttttgctttctatagattatactcaaaaatctgtctttagatgaccagaaatccctgatttttttgcttctttaagagataacatgcatcttacaatgacttctacacagggatactttttgggcatttgaaatttccagtttaatttttttagagagaaaatgatttttctttttttctggggcatttcttttattgggtactgcttttgacctctacctggctgtagggatcatgtgcttttgaataacctttttctatcaagcaccatgacattttacattccaagtaccatcataactacttgttttctttattagggaagcctattatatttttcctgaatctgcttgagcattcactggtggctgatcccttacattgtctcactatattctcaagattagtgtgaactcccttctcatcctccatgtgtgtcacatctgagatattggccttccttacccaggaacgtgacctccccaggaaaagttttcctgcttatttctccaaatttccgtgccatctctttggactcttctgacagtttttactactattcttaataaatgtatgtgaacatctagtctctccttaatgcagaattcttttctaaaaatctagtagaagaccaggcaaatggaaaatgcgcataatgtacaaaatttgcttgttgatgctatttc

SEQ ID NO: 20751 - DNA, 1935 bp, Homo sapiens
taaataatttactcttcacaccattaaatggcccacattaggatatgaattagtgtttgtctactttgaatgcttatggttttaatcaccaacagtagctagagcaatctcttcagatctcatattaagtggaatcataatgcagttttacttggatacagggtgtattagttttatattgctgcagtaacaagttactacaaacacagtagggtagctcaagagagtacaactttattatcttccagcaggctagaaggccagtaggaatcttactgagctaaaactaatgtgtgggcagggctgcattccctctggggagttggggagaatttgtttctttgcttttttcagcttttggaggtcacccacatttcttggttcatggctttttgctccatcttcaaagttagcaagataacatttctgtttcccttgccacatcttcagactctctttatctgcctttctattccacttttaaggatccttgggattaccttgggccacctggataatgcaagataagctcactatcttaaggtcatctgattagcaaccttaattcaatctgaagttcgaattcccattgcaatgtaatctaacacattcacagattccagggattagaaggtgaggatcttgcaggggataagagcatcattctacctaccacatgcacatgcagcataaagctttgctttccaagctttgctgaagttaaagaatggtatcacaaagatggcagagactggagtggsaaggtgactagacaagcccttatgatggaaaaagaaccttagtgagacccagtttaattttggtgtcccaagtattgatcagcctttagggactagcaataccttttatgagaagctaatgaatacatgagaatgcaaattcataacttttcagtggcaagctttacaagttgatactgttatctgtagttcaaatatcctctcccaaggaagccaatttaaattaaagaagttaaccaggggtacaatttgacctagggagatgcagaatctcaagcctatctcctctggccaggacacttaaacattatctttacccttaaggactatgttgccctcctagacaaaaggctcagcatctctatcctttggtctgtataagatgaaatctgccaggatctcagaaaaccctttttctctgtcacataaaataacatttcttctgctcacacattgtttttttattgagttattgccactagtgagatttttgctttctatagattatactcaaaaatctgtctttagatgaccagaaatccctgatttttttgcttctttaagagataacatgcatcttacaatgacttctacacagggatactttttgggcatttgaaatttccagtttaatttttttagagagaaaatgatttttctttttttctggggcatttcttttattgggtactgcttttgacctctacctggctgtagggatcatgtgcttttgaataacctttttctatcaagcaccatgacattttacattccaagtaccatcataactacttgttttctttattagggaagcctattatatttttcctgaatctgcttgagcattcactggtggctgatcccttacattgtctcactatattctcaagattagtgtgaactcccttctcatcctccatgtgtgtcacatctgagatattggccttccttacccaggaacgtgacctccccaggaaaagttttcctgcttatttctccaaatttccgtgccatctctttggactcttctgacagtttttactactattcttaataaatgtatgtgaacatctagtctctccttaatgcagaattcttttctaaaaatctagtagaagaccaggcaaatggaaaatgcgcataatgtacaaaatttgcttgttgatgctatttc

SEQ ID NO: 20752 - DNA, 528 bp, Homo sapiens
gggtatctagtcctaagctgattcctctctctctccactacttttaatttttaaaaaatattttgtttaaaaaattggtgcttgggtcccacccccagagattctgatttaattagtctggggtatagtctgagcacgataatttttcgttgtttttgagccagagtctcactcgtcgcccaggctggagtgcagtggcgcaatctcggctcactgcaacctctgcctcctgagttcaagcaattatcatgcctcagccacccaagtagctgggactacaggcgtgtgtcaccacaccaggctaaatttttgtatgtttaatagagatgggttttcaccatgttgaccaggttggtctcaaactcctagcctcaagtaatccacccacctygacctcccaaagagctgggattacaggcatgagccaccacacccagcctctatcaactacttttaaacaccattccacaggaagtccctcttggagaaataagatgggaatgaggacatagtccacaacaatattga

SEQ ID NO: 20753 - DNA, 524 bp, Homo sapiens
cacagtgaaacccatctctactaaaaatacaaaacttatccaggcatggtggtgggcacctgtaatcccagctactcmggaggccgagacaggagaatcacttgaacccaggaggcagaggtcgcagtgagctgaggtggcaccactgcactccagcctgggcgacagagtgagacttgatctcaaaaaaagaaaaaaagaaaagtggagaggaaggtgtttttttcagaagactggagtgaagggagagacagggaaccactgaattctgagaacagggactgacgtgtatcccagcaaggaaaggatgctaaaggaatccttggcatgttacgcactgtacaacttgctaaatttggtattatcaggcaccttcagtactctaaaggcttttatctctgtgtaggtaagccatttagctctgcaaatgggtttactaaataaataaataaatgcataaatacataaataaccaagttgatatttttcaaagcatgttttagtgattttaaatccatagatct

SEQ ID NO: 20754 - DNA, 524 bp, Homo sapiens
cacagtgaaacccatctctactaaaaatacaaaacttatccaggcatggtggtgggcacctgtaatcccagctactcaggaggccgagacaggagaatcacttgaacccaggaggcagaggtcgcagtgagctgaggtggcaccactgcactccagcctgggcgacagagtgagacttgatctcaaaaaaagaaaaaaagaaaagtggagaggaaggtgtttttttcagaagactggagtgaagggagagacagggaaccactgaattctgagaacagggactgacgtgtatcccagcaaggaaaggatgctaaaggaatccttggcatgttacgcactgtacaacttgctaaatttggtattatcaggcaccttcagtactctaaaggcttttatctctgtgtaggtaagccayttagctctgcaaatgggtttactaaataaataaataaatgcataaatacataaataaccaagttgatatttttcaaagcatgttttagtgattttaaatccatagatct

SEQ ID NO: 20755 - DNA, 521 bp, Homo sapiens
attcctgtctctgggattttaccatctaataattatctggttttactacctaagtggctcgaattaaacaaataactgccaaacatgcacttcattttgctttrtagagttactatcttaaaaagaaattatcctgcaggaatacttgggatgaaatagtcttaaactttctgggagaagaaaacactggccatattttagagaggtcaacgatagctctttctctttctcttaatagtggttaaagtcatgagttctggagccagatcgccttagttctaatcccagctcaccactttctagctgtgtggcattagataaattacttagcctctctgtgtcatttgaaattgagtataaaaataatacccaccttgtagagctattgggagagttgaatatgacaatcttgtgttgtcacagtaagtctcaattaatgttacttcattacttttgtgtctctcctctacttacaataacaaaatcctttcctgaagtaaagttgttcattattaactaga

SEQ ID NO: 20756 - DNA, 521 bp, Homo sapiens
attcctgtctctgggattttaccatctaataattatctggttttactacctaagtggctcgaattaaacaaataactgccaaacatgcacttcattttgctttgtagagttactatcttaaaaagaaattatcctgcaggaatacttgggatgaaatagtcttaaactttctgggagragaaaacactggccatattttagagaggtcaacgatagctctttctctttctcttaatagtggttaaagtcatgagttctggagccagatcgccttagttctaatcccagctcaccactttctagctgtgtggcattagataaattacttagcctctctgtgtcatttgaaattgagtataaaaataatacccaccttgtagagctattgggagagttgaatatgacaatcttgtgttgtcacagtaagtctcaattaatgttacttcattacttttgtgtctctcctctacttacaataacaaaatcctttcctgaagtaaagttgttcattattaactaga

SEQ ID NO: 20757 - DNA, 579 bp, Homo sapiens
gagagagggcatccctgtcttgtgccagttttcaaagggaatgcttccagtttttgcccattcagtatgatattggctgtgggtttgtcatagacagctcttattattttgaaatacgtcccatcaatacctaatttattgagagtttttagcacgaagggttgttgaattttgtcaaaggctttttctgcatctattgagataatcatgtggtttttgtctttggctctgtttatatgctggattacatttattgatttgcgtatattgaaccagccttgcatcccagggtgaaaaagagggaatcctccctaactcattttatgaggccagcatcattctgataccaaagccgggcagagacacaaccaaaaaagagaattttagaccaatatccttgatgaacattgatgcaaaaatcctcaataaaatactggcaaacygaatccagcagcacatcaaaaagcttacccaccatgatcaagtggacccacttctttaatgaaacaaaaatccacttttcctgatttgtaaatttggggctttgcaaaatggattttcattaggggcttattgatg

SEQ ID NO: 20758 - DNA, 572 bp, Homo sapiens
tcctgggttcaagctattctcctgcctcagcctcccgagtagctgggattacagtcatgcgccaccacgcccagaaaattttgtgtttttagtagagatggggtttctccatgttgatcacccatccttacctgatctgcacacctcggcctcccaaagtgctgggaatacaggcatgagccactgcgccctgcctttcttgctctatctttacaccagcatcccttcttcaattacacacaattctttcgatccctatcctcaaggtgccaggcgttattccacctttatcttttgaactttatccagagtgactgtcttgctgtaacagatcactctctggtcagacccctttcaaggctttaactttcttgtttgatagcattctcccttttcagttcctttcaaatccagtgttcatgacttccctgattctatcaagatatatttatattttttgaatgygtgtgctttaagccagtggtccccaacctttttggcaccagggaacgagtttcctggaagactatttttccacaggtggggagggggtgggagatggttttgggatg

SEQ ID NO: 20759 - DNA, 505 bp, Homo sapiens
tgagcaagaaaatcctatatcaaggtacattagcaccacctgctatcagcacccttagagaggctggcaacagagaggttctttaacttttataaccgtgctctacattaggagaggctcaaggaaagaaaaatcaggcataatctctgaagactttataatgagctcatgttctcattcttcatatagattccatttttctgtatgaaaatggtctgccaactgtccataattagccccatcttacttcacctggcaatatctagtgcttatgaattctgttggtagggaatatctttatgtggtgaatgcattctgcaaaaagtatacatcaaaaattgtaaatcatattacatcttaattacagaattgattcctctgaataataagcttataataaagccttgctagggtggtttcatatccttaaatccaaaatattgtgtttgttctttcactmtcaatttgtatagactttatgtgacaataggtactctgaaagggg

SEQ ID NO: 20760 - DNA, 548 bp, Homo sapiens
tgacatcccccccaacccgccacaaacacagaaaagttatatttggaaaaaagcacctgtgtcattaaccttcgtctcttttggcatacaataaagttacaggaaaagtttttcctataacatttcttaacagtcatatggtagctcattcagaaagaggctaaccaaaccgttcatgacatgatggacaatcccttaaaatgcctcatattgaacatctgtatttgaactttaagaagttaaagctctagaattatctaaccaaataaaatacaaattaataaaagttttatgaaaatgtactaaattggaagttgccaatgatttgagggaaggctattttttttttctgatctttcaaaggtattttcccttactgttatactcaaagaaacacctagtccacaggaaatcttcacatgaattagcaaaaagccccagctgggcagctgcacctttgtggtttgacaggcagccagtaataattcaaaaatcgcccacttttccaggatgrcgcagcctccacaaggaaacacggtttggagagc

SEQ ID NO: 20761 - DNA, 835 bp, Homo sapiens
ttgtaaatgttattgtaaaattattttatatgtcaacattaagaacaaatgacttgctctgtggtgataatacaaattttggtagagctcagtgggtaagtgccatgatgcaaacaatattcttactaaattaagaaagcctacagaacagaaaggttattggagtcggttgcagcggacatatatttcataattgcatccaaaatcctaatactcttcaaattggaatagaagtgttgttgtaaaaatttacatgcataaacacacacacacagactagctgaactacaatttttgagatggagttgacattgaacttaaaacatatttcagcatggtaatagattctttctcttttatctgcctgtattcaatagaattttagaaagtttgaacttttgaagaaatactttataaatcaagcttagtgtcctataattgtgttgagtttcttgtgtgaatgagtcctttaaattttgttctcattttgtccaaaatcagttggaaatacttaatctaattattaaacaaaaggagtcttccctaaagtctacgtttttaatatattatcttgtgggaataatcttttattagaaatcttattcagaattatataaatgtatatttattacacaaattcaaatgagagattccccatctttgcaacatctaaaactggtkaatacaaataataatttgaggcattttatttgataagttttatcttgaaaatatttctcaaatgagttttatgacacataaaatacaacttttaaaaagatttttaattaaagattactttataaaatatattctgcagaaaaataccattggc

SEQ ID NO: 20762 - DNA, 835 bp, Homo sapiens
ttgtaaatgttattgtaaaattattttatatgtcaacattaagaacaaatgacttgctctgtggtgataatacaaattttggtagagctcagtgggtaagtgccatgatgcaaacaatattcttactaaattaagaaagcctacagaacagaaaggttattggagtcggttgcagcggacatatatttcataattgcatccaaaatcctaatactcttcaaattggaatagaagtgttgttgtaaaaatttacatgcataaacacacacacacagactagctgaactacaatttttgagatggagttgacattgaacttaaaacatatttcagcatggtaatagattctttctcttttatctgcctgtattcaatagaattttagaaagtttgaacttttgaagaaatactttataaatcaagcttagtgtcctataattgtgttgagtttcttgtgtgaatgagtcctttaaattttgttctcattttgtccaaaatcagttggaaatacttaatctaattattaaacaaaaggagtcttccctaaagtctacgtttttaatatattatcttgtgggaataatcttttattagaaatcttattcagaattatataaatgtatatttattacacaaattcaaatgagagattccccatctttgcaacatctaaaactggtgaatacaaataataatttgaggcattttatttgataagttttatcttgaaaatatttctcaaatgagttttatgacamataaaatacaacttttaaaaagatttttaattaaagattactttataaaatatattctgcagaaaaataccattggc

SEQ ID NO: 20763 - DNA, 835 bp, Homo sapiens
ttgtaaatgttattgtaaaattattttatatgtcaacattaagaacaaatgacttgctctgtggtgataatacaaattttggtagagctcagtgggtaagtgccatgatgcaaacaatattcttactaaattaagaaagcctacagaacagaaaggttattggagtcggttgcagcggacatatatttcataattgcatccaaaatcctaatactcttcaaattggaatagaagtgttgttgtaaaaatttacatgcataaacacacacacacagactagctgaactacaatttttgagatggagttgacattgaacttaaaacatatttcagcatggtaatagattctttctcttttatctgcctgtattcaatagaattttagaaagtttgaacttttgaagaaatactttataaatcaagcttagtgtcctataattgtgttgagtttcttgtgtgaatgagtcctttaaattttgttctcattttgtccaaaatcagttggaaatacttaatctaattattaaacaaaaggagtcttccctaaagtctacgtttttaatatattatcttgtgggaataatcttttattagaaatcttattcagaattatataaatgtatatttattacacaaattcaaatgagagattccccatctttgcaacatctaaaactggtgaatacaaataataatttgaggcattttatttgataagttttatcttgaaaatatttctcaaatgagttttatgacacataaawtacaacttttaaaaagatttttaattaaagattactttataaaatatattctgcagaaaaataccattggc

SEQ ID NO: 20764 - DNA, 835 bp, Homo sapiens
ttgtaaatgttattgtaaaattattttatatgtcaacattaagaacaaatgacttgctctgtggtgataatacaaattttggtagagctcagtgggtaagtgccatgatgcaaacaatattcttactaaattaagaaagcctacagaacagaaaggttattggagtcggttgcagcggacatatatttcataattgcatccaaaatcctaatactcttcaaattggaatagaagtgttgttgtaaaaatttacatgcataaacacacacacacagactagctgaactacaatttttgagatggagttgacattgaacttaaaacatatttcagcatggtaatagattctttctcttttatctgcctgtattcaatagaattttagaaagtttgaacttttgaagaaatactttataaatcaagcttagtgtcctataattgtgttgagtttcttgtgtgaatgagtcctttaaattttgttctcattttgtccaaaatcagttggaaatacttaatctaattattaaacaaaaggagtcttccctaaagtctacgtttttaatatattatcttgtgggaataatcttttattagaaatcttattcagaattatataaatgtatatttattacacaaattcaaatgagagattccccatctttgcaacatctaaaactggtgaatacaaataataatttgaggcattttatttgataagttttatcttgaaaatatttctcaaatgagttttatgacacataaaatmcaacttttaaaaagatttttaattaaagattactttataaaatatattctgcagaaaaataccattggc

SEQ ID NO: 20765 - DNA, 526 bp, Homo sapiens
taaattggcctaacggttatttgtgctctatatgcacaaggtaagttattttatccccattttacagatgaggaaatcgttttaaaggacttaaagcattgtcattgcttaagaccagtggtattctcttgcattattcctttaagccagagataaaagaaattaataagaaaaaaaatcagagaacaaatccataacagtttacttcagccaatgagtggttatatttagttttatcttgtagaaagagaagtcattttatgttttaaggagagagcatgagtgaaaactgtggaaaataataagcaagtcactgggggtrtgcattgacctcctcctctctcctttagtaaatgagtctgaatactggttatggattgtattgatcatatattaaaatgacaaattgcctccacattagcttgcacacaagtctcttaacgaaacccattgtaacttgtcagatgcaacctaagaattgaactagacattgatggacaagaccttccactgaccattgaaaaca

SEQ ID NO: 20766 - DNA, 543 bp, Homo sapiens
gtaaaggaaaaaaattaagtctaattttaagcataaaacaaagttttcttttctccaggcataaatctgaacatttttcaatgtctctagccatgttgtcacatttccctggatttccagaagtcattaatagtcatactaaataattgtgttttaacctacacacacacacacacacacacacacacacagtttttaacttagtaataaaaatattaattttcccaattttcaagtgcttttgtttaatcacaaaatttaaaaagggagatgaaaatgaagaaaactttgaagtcttatcaaagagcataaaataagatctgaaaaagtataaaggcattttatgttttggctgaaagtttcaatagataaagatgtcagttctttcagaattatataaaygtcatgcaacttctgttagactccaacagcgtttttttttttttttaatatagataaaatgatcttaaagtttgtgtggaaagaaaataccagggaatagcctttaaaagtatgaaaatgaagaccagtgaaggggaactt

SEQ ID NO: 20767 - DNA, 1212 bp, Homo sapiens
caaatactccaattacaggaactacacagctttgcaataatgacaatcaaattattttaaaaactgtgatgagaatccccgcccaaccccaagaaattactttctgagcatttgctacaagtctccaaaagatagcatttcctaaccattttagcctgcatttttaaagcacaggaatgattgttttatcaattaaaatttctagtttacagatggttacctagtcttaatctggtgaaattagaacctcagacttcattttaagacaagaaaagaaagtaaattgtggtaacaaggtacactgggaacagtaagaatttgttttcagacaaaactgaggctcaattcctagtttggccatttactaggtacatgatacaaggcaagagactccaactctccaagtctcagcctctttcataacaaaaaattaaatagtgctatctgcctcataagatagttttaattcctgaaagagatgactgatggaacacaccagacacagagtagatactcaatgtatgttagctcttgtacccttcttcacaaatactacaaaattttccaaactgaccaaataactttacacacataaggttcggacactattgtaacagtttcatgtactattggaggtatatttagaacattaattttttaaatgatgtttaagaaagttaaaatgtattaataaaaaccctcagatattccatcatgctctacaaagctatctctaggtggccctctaagtggcttactttgggtggttccagtaagatgcatttcattatttagatgtctccttgttragtaaatataaggtgaagtaaaagaatcaatacattcatcatctgcctgtatacatatgccgtggtcttgattccgtaagaagacatgtctttattcatctaaagccatgtacaaatggaagtagaatttccaaagactgcttttaaaattaaaggcatgtttcacaagttagcaaaagccgtgcagcctcttagatctctgtattggctaaccacacaccacgacatgctatcctcagttggaaagtccccccacacagtatgtaaactcattttgaaactggagagaacagttcctcctataactcatctgggcaagtttatataaaagaataatttttcagaaagccacagaggttctctcccaagattgctgaagtataattatggacaagtgtaaata

SEQ ID NO: 20768 - DNA, 1212 bp, Homo sapiens
caaatactccaattacaggaactacacagctttgcaataatgacaatcaaattattttaaaaactgtgatgagaatccccgcccaaccccaagaaattactttctgagcatttgctacaagtctccaaaagatagcatttcctaaccattttagcctgcatttttaaagcacaggaatgattgttttatcaattaaaatttctagtttacagatggttacctagtcttaatctggtgaaattagaacctcagacttcattttaagacaagaaaagaaagtaaattgtggtaacaaggtacactgggaacagtaagaatttgttttcagacaaaactgaggctcaattcctagtttggccatttactaggtacatgatacaaggcaagagactccaactctccaagtctcagcctctttcataacaaaaaattaaatagtgctatctgcctcataagatagttttaattcctgaaagagatgactgatggaacacaccagacacagagtagatactcaatgtatgttagctcttgtacccttcttcacaaatactacaaaattttccaaactgaccaaataactttacacacataaggttcggacactattgtaacagtttcatgtactattggaggtatatttagaacattaattttttaaatgatgtttaagaaagttaaaatgtattaataaaaaccctcagatattccatcatgctctacaaagctatctctaggtggccctctaagtggcttactttgggtggttccagtaagatgcatttcattatttagatgtctccttgttgagtaaatataaggtgaagtaaaagaatcaatacattcatcatctgcctgtatacatatgccgtggtcttgattccgtaagaagacatgtctttattcatctaaagccatgtacaaatggaagtagaatttccaaagactgcttttaaaattaaaggcatgtttcacaagttagcaaaagccgtgcagcctcttagatctctgtaytggctaaccacacaccacgacatgctatcctcagttggaaagtccccccacacagtatgtaaactcattttgaaactggagagaacagttcctcctataactcatctgggcaagtttatataaaagaataatttttcagaaagccacagaggttctctcccaagattgctgaagtataattatggacaagtgtaaata

SEQ ID NO: 20769 - DNA, 1048 bp, Homo sapiens
tgccaagtagcattgcttgaaatatacacatttaaaaattagaaaaattcaccttcagagaaaattacggaattcatatctatagcatgattcctttttttaaaaaaaaacctcaatattcgtttgtatgtatctgttaaaagacaacattaagttaatacttcaggaggaaagaactggagggggctgcctgggcaaagatgttaaaattttctatcatctcttatttaacttttacaatgagcttattactgtagtaattaaaataaaatcctcatcaactcagtctttgagttgagccaagcaaaacatcaagcaggcagtaacagaaacatgaatgtgaaagatcgaatagtaaaattagtactgatggttaatggacatgaagaaaaacttcgttccttggagagacctactttcctggcacctgcagaatcactgattatttacatcggttatgcacatcgggccaccagctctgatctgtcagagagaagccctgagcctgtgagccaatgcgctttccctccagctgcataccagatagggcatgcctcaaaaagatgtccatcctgcgggtgcaaaataaaaataaaataaaacgacggtttttatcattagtttccaacgtttttgagcaggcgtttttggagagstcctatgtttccagaacatccatttgagaacatgcgttgtggaatgtgccccctccaaggccaggtcactcagcggcagttacagctgggcaggcgcctttaggaggtgggtgagatggctgactagtaccatcagttctatcacacgagttaccaatattttaccgcccctccgtcccccaccggctttgaagcaaaacggaacagccgggcacgcacagggaggatgtctgtgccgctgttgttctaggtttgtcagccggggcggccagcaaggaatccaggggctgacttgtcctgctccaagaagcaaaagagcccacaccattgctgactgtggtactgtgaattttgttatcttcactgccttccagaatggaccttttctttga

SEQ ID NO: 20770 - DNA, 1048 bp, Homo sapiens
tgccaagtagcattgcttgaaatatacacatttaaaaattagaaaaattcaccttcagagaaaattacggaattcatatctatagcatgattcctttttttaaaaaaaaacctcaatattcgtttgtatgtatctgttaaaagacaacattaagttaatacttcaggaggaaagaactggagggggctgcctgggcaaagatgttaaaattttctatcatctcttatttaacttttacaatgagcttattactgtagtaattaaaataaaatcctcatcaactcagtctttgagttgagccaagcaaaacatcaagcaggcagtaacagaaacatgaatgtgaaagatcgaatagtaaaattagtactgatggttaatggacatgaagaaaaacttcgttccttggagagacctactttcctggcacctgcagaatcactgattatttacatcggttatgcacatcgggccaccagctctgatctgtcagagagaagccctgagcctgtgagccaatgcgctttccctccagctgcataccagatagggcatgcctcaaaaagatgtccatcctgcgggtgcaaaataaaaataaaataaaacgacggtttttatcattagtttccaacgtttttgagcaggcgtttttggagaggtcctatgtttccagaacatccatttgagaacatgcgttgtggaatgtgccccctccaaggccaggtcactcagcggcagttacagctgggcaggcgcctttaggaggtgggtgagatggctgactagtaccatcagttctatcacacgagttaccaatattttaccgcccctccgtcccccaccggctttgaagcaaaacggaacagccgggcacgsacagggaggatgtctgtgccgctgttgttctaggtttgtcagccggggcggccagcaaggaatccaggggctgacttgtcctgctccaagaagcaaaagagcccacaccattgctgactgtggtactgtgaattttgttatcttcactgccttccagaatggaccttttctttga

SEQ ID NO: 20771 - DNA, 540 bp, Homo sapiens
taataattaataaagccctaataataataaagatgatgatgatagctaacatctactgagcattctactggaccacaattgtgcaccaccatacccagctaattttaaaattttttgtagagatgtgggtcttgctatgttgcttaggctggtctcgaactccttactccagtgatcttcttgtcttggcctcatgaagtgctgggattataggcatgagtctccgtgcttggcctttctcctcattttataattgagaggcatgtgggcaggagtgaagtgtcccrgctaataccactcaggtagttcaagacagagccaggactaaaatcaaagtctgctctttctacctgtataaaagaagaaactcagttagaaccatttattacatacttactgaaaactgaattaatatctatactaataagtgtcctggcagggatttgataggaaagaaatagaatgtatgattttatgatttctaccatcccaaggcttgtgattttcctgaggacacacaggatgcataaatacaagcct

SEQ ID NO: 20772 - DNA, 557 bp, Homo sapiens
tttttttttttttttttgagatggagtctcgctctgtcgcccaggctggagtgcagtggcagtggtgcgatctcagctcactgcaagctccgccttctggtgtcatgccattctcctgcctcagcctcccaagtagctgggaccacaggcacccaccaccacgcctggctaactttttgtatttttagtagagacagggtttcaccgtgttagccaggatggtctcgatctcctgaccttgtgatccgccccactttggcctcccagagtgctgggattacaggcgtgagccacygcgcccggccgacattcaataaattatttgttgactgatgaggaaagaaaaaggatgatatgatggaggctggagtggggttttaggaagcattccagtgtgggacctcagctttagtatgaagacaggagaactgagttgagtgacggttttatttccccaaaaaggaaatagtagcaaaagtggctcaaaggaaataccattaagatatatatatatatatgtatatttatagtacatcatgacattcaaagccatgaag

SEQ ID NO: 20773 - DNA, 557 bp, Homo sapiens
tttttttttttttttttgagatggagtctcgctctgtcgcccaggctggagtgcagtggcagtggtgcgatctcagctcactgcaagctccgccttctggtgtcatgccattctcctgcctcagcctcccaagtagctgggaccacaggcacccaccaccacgcctggctaactttttgtatttttagtagagacagggtttcaccgtgttagccaggatggtctcgatctcctgaccttgtgatccgccccactttggcctcccagagtgctgggattacaggcgtgagccaccgcrcccggccgacattcaataaattatttgttgactgatgaggaaagaaaaaggatgatatgatggaggctggagtggggttttaggaagcattccagtgtgggacctcagctttagtatgaagacaggagaactgagttgagtgacggttttatttccccaaaaaggaaatagtagcaaaagtggctcaaaggaaataccattaagatatatatatatatatgtatatttatagtacatcatgacattcaaagccatgaag

SEQ ID NO: 20774 - DNA, 584 bp, Homo sapiens
ggatttcaaaacattgaaaacacaatgtatgataatcagtcctttaatgcttgggtgactactctttgacgtgtatttactaataatttttttggtatatgatggtatctgttacatggcagagttgaatagtgatacttaaaaatcattttctatttagaatcagtgagacaaaaaccctattatacttttcttaaaaaacatacttgcagtagtcctccctaatccatggggcatatgtaccaagactcccaggggatccctgaaagctcagatagaaccaaatcctatatgcactataatttttctgtacatacatgcctatgatraagtttaaataaattatgcactgtaagagattaacaacaataactaataataaaatagagcaattgtaacaggacagtgtagtaaaagttatataaatgtgcaatctctctctttctctctctctcaagatattttattgtactgacctcatctattttcagacaggagtttgaatgtgggtaactgagactttggaaagcaaaactcgagataaaagggattactgtattaaagttagaaatgttgctgaagtg

SEQ ID NO: 20775 - DNA, 584 bp, Homo sapiens
ggatttcaaaacattgaaaacacaatgtatgataatcagtcctttaatgcttgggtgactactctttgacgtgtatttactaataatttttttggtatatgatggtatctgttacatggcagagttgaatagtgatacttaaaaatcattttctatttagaatcagtgagacaaaaaccctattatacttttcttaaaaaacatacttgcagtagtcctccctaatccatggggcatatgtaccaagactcccaggggatccctgaaagctcagatagaaccaaatcctatatgcactataatttttctgtacatacatgcctatgatgaagtttaaataaattatgcactgtaagagattaacaacaataactaataataaaatagagcaattgtaacaggacagtgtagtaaaagttatataaatgtgcaatctctctctttctctctctctcaagatattttattgtactgacctcatctattttcagacaggagtttgaatgtgggtaactgagactttggaaagcaaaactcgagataaaagggaytactgtattaaagttagaaatgttgctgaagtg

SEQ ID NO: 20776 - DNA, 660 bp, Homo sapiens
tggcaaaatgtgaagacagcatgctgatgactgggaaaaatctgtctaaatacacttttttccccaaaggaagaattattttaaagaaaagttggtagggcatattttaagactgtctatcttcttttgaaggaaaatcacttagcttaagtggaacattaggtttcctgtttcctgtcatagtttttctaaattacattcagtacagcaaaaaaaaaaaacaaattcagaggtgaatccygagttcctctgtgcaagagaaaaggccttcaaagtttaaacaggcacagctatcctttcttctcggggtggggggaagacagggggtggcataactcttgcagagggctaattaagtaagcccatgtgagttactgcattaaccatgcagaggacagccccaggtagaggattcctaacccttagaaagtactcagaagtcaatcaatcaactagagagcattcaagagaataattagaagccttgaaacaattgttccacatatcttgtccccaatgtaaatggaaataagggaattctccaaacaggtcatacctactgattaaaatccataaaagttctgagagtgtttctcctaaatgcacaggaattaacatgcaaaggcaggatagtagctatcctgaactttcaaattctaa

SEQ ID NO: 20777 - DNA, 551 bp, Homo sapiens
ttttttgtttttgagatggagtacttgctctgtcgtccagactggagtgcaatggcaccatctcagctcactgcaacctctgcctcccaggttcaagctattctcttgcctcagcctcccaagtagctgggaccacaggcgtgtacgaccacacctggctaatttttgtattttcagtagtgatgaggtttcgccatgttggccagactggtctcgaactcctgacctcaagtgatcctcctgccttggcttcccaaagtgccaggattacaggcttgagccaccrcacccagccacacattaatttcttttaaaacatttattgtgtgtttaataagaataagatattgccttgctggtaggaaaaagtacccctaatgcataaaccactgaattaaaatttttaccaaaattaatgctaactttgttcttcatctttgaagtccatatatgtatgtagtttttgaatggctgagactcattgtaaaatgtggtaataacatgtcttagaacgtgatatagccagctaaggagtaaaacgtaggtacctt

SEQ ID NO: 20778 - DNA, 553 bp, Homo sapiens
tgcaacctctgcctcctgggttcaagcaattctcctgcctcagcctcctgagtagctgggattacaggctcacaccaccacacccggctaatttttgcatttttagtagagacggggtttcaccatgttggctagaatggtcttgatctcttgaccttgtgatctgcccgcctctgcctcccaaagtgcggggattacaggcgtgagccactgcgcctggacagttatttttttatgacttcttgtttttatttctatcactaatctctcctttatctttttgaggattttattaccttaatttaactttttggtctaccagtttcaataactatgcttcaaatggttcatgttggtctttttggggggtattttgttacaatttctgtacatctcaggttctggtgattttggcttgtgagcctgtgtttcctgggctggagtgggggttgttctcagctactgcatctggaggtatwgggggaaatcctcagtgtggacagccaaaggcactgcagaactagtgtcaccattttgtttgcggtcattccgc

SEQ ID NO: 20779 - DNA, 439 bp, Homo sapiens
tctctctctctytttttttgaaataacagggaaagaaatacatctgtgtttttttttttacaataaaaatcagacaactcacaactcttatttaggtcatgaaattataacatttttggatcacagactcttgtaagaatctaatgaaaactatgacttattgccatatgtaagggcctaatgaattagatcaatttctggttgttttacttgtctgtttgagtaatccatttaactattcctatgctaatatcatattatttttattacatgattttatactatatgtgctaaggccagactacctcacaattctttttaaaagtattaattcaatgggaagtgaatgaattgaataaattcatttttttaataaattcattttttaataaatgcttccagtagaattgaataatcacctggaaagaagcaaaaatag

SEQ ID NO: 20780 - DNA, 901 bp, Homo sapiens
attttcaaaaacctttagagaaagtaatgtggcaataaatattaagattaatataaaaaactcattctctttgacctgccatcccaggaataaaagaaacaccaggatcttggcattatctgttctttgactacttggtagaatttacctgtaaaaccagctgggcttggtggtgttttttgtttgtttgttttaaattttgtgttctattttgttgtgagtagattttaatttagtttttactttttattttttattttatttttcccataagcctcctagatcttacttttcttaaatgtaaagatttattaaagatttattttcaatttttattgcttcttgaaatagttttgcaacattgcatttttactaggaagtcatcagtgccatccactaagtttttgtctcctagctccctatctgcttgatgatgctggtagtgggactgggcaagccacgctcaacttcccgctctgataatccctgccctgggccctcagcaatctctgttcaccttttcagcccttcaacatctgctacaccaagtcctcacgttcatttctttctgttgaaataatcagagtggtttttgtttacccaacagaactctgactgtccctgacacatcacccacattgtgttttctaatttattaaaataaagtttatgatgatcccttattgattaaaatttctgctatatstgttgtgtctttttttatcttctaatgcatgtgtttacttttacttaatttttacctatctccaatagtcttttaaagtaataattaacttgccatgttggatactgttacattttcaatcttttttttccaatgtacaacttagagcaatttaagtttctcataagttacctgctttagccgcatgtttgaatg

SEQ ID NO: 20781 - DNA, 1068 bp, Homo sapiens
attgccccatactaactagtatattgaaaacggatagaattagatttcgtaataaagtgaacttagttcactcaaatgttaagtcatttcctccactgaatccttgtagacacaggcatttggattgtatctttacaatatgatattggaaaagatgagggaatattggtaatttgaggtgaaaaagaaaactctataattgaatgtggatgctttgtmtcttcttggagcagaggtttaagaaagaaaaggaagaaactccaccactacaaagctaccttggagaacacttagacaaaaatttctcagagcatatgctatttggtgaaaattcacaaattgctcttcatagctttctgaatttgtgtcatatctgcattttaaaattgaatgtgctgcagttccaacctgtatgcttttgaatgaaccttaatgatgggccatttcttattgccgtcatctgtgcctttcattgctgatttatgtcaacttcctttaaatgcattgtggtatttaggcagtggataagatagtaatgccatcgcatgctggttgcttaatgatgcaattgcttgaaaatttaaagcccataatagctttaggtcaggttcagaagttcatgttccatgccagacatttgaagactgaatcagagcccgagcactgccaaaatcatgccacatttgtcaagcctggccttgggtaaaagctgttggaagccgcccattcatccaagccaatcactgataatgaagcttgagggaacatgaaatatcttttctaaaaagaacagacaacctcaccagttggctgccttttttttatttttagtataattaccaggggcaaactgtcttgcagaattgctatcttatattagctttgagtttgtgttcttgagacctgatgcaaggatgttttattagctaagaatatgtggtttgaggtcagctgaacatgattctttcaggtttttcttgtgggctgtaatgtgattgactattctgtggtgtggaagcttacagctagaaaagaaacttcaggagaaccactttcctgttttcacgc

SEQ ID NO: 20782 - DNA, 547 bp, Homo sapiens
aaggaggggaaagggaaaatccagaatgttttaaaaagtgattttcttcacgtttacatagaatttaatggcgtacaagtcactttcacccctgctcccactgtcccttccgggtcagggtcagggcaggttatttaacctctctgggcctcagttttcccatctcatctgtgagatgttaatgatgatggcaccatcctcacagggttgccgtgaagattccatgagatacacgtgtaaagggcttagccaagtgccgtgctgggcacataataagcagtcagcaacgtctgctaatgatgcagggagggcaggtgccccaaatcccagttagccgacmgggaaagtgaggcttggtgatttcaaggctagtaaatatcagggacaaaaaccaaggtcacctgacccagaaatctagggctctgagctcacctgcaccaagatgcctctctttgttgggcacccccttgggaggaggaaagaaaggacagtggtacttgttccatgtctttggatggcaaaacccaccttctttgagcagcctccc

SEQ ID NO: 20783 - DNA, 1040 bp, Homo sapiens
caaatgcaacaaaataaggaggagcaaaaagaagtagagaaaatcgagggccctgtacttgacctcagttgaagagactctgaaaaagctatttttctttttttctttaaatgataatcattattctttgaaattctgatttgtaggaacagaaaggaaatgctgttaagcagtactcactctttgagcctagttggtttatagttatatctacctaattcatatatgaatgtgctagatttattgccattctaaattttgaatcaataaacaattttaacaaaaataatttttcgttctttcagtctcccaaaattttataatttctattgttaagtctaatcaagttcctgtaaacaaacacacacatatttatatgctagaaccagcaagagcgaacattagaaaattagtaaactttccattctcccacatccaataagagtataccttagtgctctatatatagataatgacacatcaatgtaagagagttcaggacaaaggtaaaataaataaataaataaaataaaatttgtttaaaagtaaaaaagaggggggggttagctcagtcatcccttccaaaagcttaacacaataaaatgtctaattctggcaaaatttaatgcaactcagacagaagtacagatgcaaaatcatttttaaaagaagagatggctgggcacagtggctcacgcctgtaatcccagcactttgggaggcttaggtgggtggatcacaaggtcaggagttccagaccagcctggccaatatggtgaaacgctgtcyctactaaaaatacaaaaattagccaggcgtggtgatgcacacctgtatcccagctacttgggaggctgaggcaggagaatcacttgaacccggaaagcagaggttgcagtgagccaagattgcgccactgcactccagcctgggcaacagggaaagactcccatctcaaaaaaaaaaaaaagagctgactttaaccttcatgtgaacagagaacaaatatggcttatgccacactaaagattttacttaca

SEQ ID NO: 20784 - DNA, 561 bp, Homo sapiens
gattaaaacactgaccccacgtacttccttccttcaaagagaatcatcatttgacagcatagaaggcctctttacaagtayatagctcactagggaatcgttactaagacatacttataaatattaataaacatctcaagtcatttttgttgaatttacttttcaagtatgtgcacttagagggcattaagtcctggttgacttttcctcatcaatgtaatctaagagacttctaagttaattttaaaaatctattatgaaacatgtagaattgtgaaatctatgatgatgtgtgtagaattgttagaatacaagatttatgtagaaataactaaatataaaacaatttttgagaatgtagtaaatatgcagtggaagggatcagtggatagaaaattttgggtgagttattttattacattttaatttttctagttttaaaaggggcttaaaatacttttttctgattattattgtcaaaatgtaatcatactcttcttggacttctgtattccaaaataagaatatgcaactaattccttagctgctagatcactgtgg

SEQ ID NO: 20785 - DNA, 560 bp, Homo sapiens
cttctcaagatttgataagaaaagtgtattttttctgtcttggtatcccttcatgctacctttcaatttcttgtgggtttctctctctctctctctctctctctctctctgtgtgygtgtgtgtgtgtgtgtgtgtgtgtgtgtgtgtgtgtttgtgtatgtataagaagcctcctgaagtctctcatcagctgtgctcagtttggcagagtcacagtttagttctggaatcttctaggtggcatgagtgtaaagcttataccttgtaagcagccccccgccctttgggtgcactctgtatcctgtgcttaattccgtgatctcgtatcccttttacggatggatggacttgttatgtattaatttaaatatcttaaagctaccccaaacccagcatttctaaaactaaacccattctttttttcctaaatctatttttcttatatttgctatctcagatagtattgcaggatctggccagcagcccgcaatgcaacggggctctctatttgttcccaggcggatcagcaggtcgagaaataatagacacacacaagata

SEQ ID NO: 20786 - DNA, 677 bp, Homo sapiens
tccttcattgaggaacccagacaacaaaggatagtgcctgttaatgatgccacatgtcctcgctaatggcagttagtatttttctactcatatcaagcatcggatctccctgtgtgagcacccaccagagagaaatgtctgcaaatgttcatagaacaacgatctttcccctgctcctgcctatctctattctcctgagaaccaagatctgaaaacacagcagttttgaagtttcactgagatgttcctctcaggggcacttgaccttgtagagcatgaagtgtggttttgctctgcagtgattcattcgatcaaacaacaaagaaagacttttactccagctrtttgtgaagaaaaattaatatataaaacatggagctgtttagaatagttcatcttttccgtgtttggggctttgctgcccctctcaatggcaatttcagttgcacagagaaaaaatttgttcttaagacgtagttgaataaatacataaatcacattttgcatactcagagttcgaagaggtcttatgtgtccttttgtagcagattagttgctgaaacatctggtaacctatttatgtcccatccactgaacaaagaaaataccaaaactccttagcttggcattcaaggtgcccaacactcatgcttcattcttccttttcagctctattg

SEQ ID NO: 20787 - DNA, 538 bp, Homo sapiens
ctttgttcactgagcaatgaaaaggatgagaatttaggctcctgattcactgatgttccttttactccatcttttcttgtttttcaccctatttccacttaaaaccattccctcaattgcctttagtaaaatcccaaattcaattcaaaattctaatggcattctaaccaaaatactctggagaggaaaaacatactaaaattcattcattggtggcttttgatatctattgactttaaatgcatataattgaattgattgaaagaccaattaaaatataattagactttcttccaggcagaattttacctttgagactgatttgttgatagcaaccaataattttcctttccaattccatcaggtacaatattctaaactgaagccccccsgcttttttttttttttttttttttttttttttggctataacccacaccaaggctgtggcatttggcaggatggtaatacaaaattgcagatttcttctgttcattccactactatacatctagatattaatgatattaatggactt

SEQ ID NO: 20788 - DNA, 545 bp, Homo sapiens
tctttcttttttaaattattttctcccttccatttactctgcactcattttctggaactctcattgaatggatagttcatctacggcattgattctctatgttgcttaacttttctctaatattttccgtccctatgtccttttaatctgtgggtctggaggattttcttgaatttgtcgtctagttgttctattgatctttttctttagcaactccatctttaatgtgcaataactctggtttgctctttgaatgttttatttttacagcaccaatttttgttttatggatgtaatatttctttgaatctctragcacactagttagaaatattttaaaagttcacttctatttggtttcccctgtggtcagtgttttatttgttaatctacatttatttgtgatggtgatttttctcaaatatctagtgatccttagaagtctatttatattttttgaatgaaagagtaagttgattaatttctgaagccagcacaaatttcctttatgggtatatagtcctgttttcttacgagacttcttt

SEQ ID NO: 20789 - DNA, 545 bp, Homo sapiens
tctttcttttttaaattattttctcccttccatttactctgcactcattttctggaactctcattgaatggatagttcatctacggcattgattctctatgttgcttaacttttctctaatattttccgtccctatgtccttttaatctgtgggtctggaggattttcttgaatttgtcgtctagttgttctattgatctttttctttagcaactccatctttaatgtgcaataactctggtttgctctttgaatgttttatttttacagcaccaatttttgttttatggatgtaatatttctttgaatctctgrgcacactagttagaaatattttaaaagttcacttctatttggtttcccctgtggtcagtgttttatttgttaatctacatttatttgtgatggtgatttttctcaaatatctagtgatccttagaagtctatttatattttttgaatgaaagagtaagttgattaatttctgaagccagcacaaatttcctttatgggtatatagtcctgttttcttacgagacttcttt

SEQ ID NO: 20790 - DNA, 520 bp, Homo sapiens
aattgtgtgtgtgtgtgtgtgtgtgtgtgtgtgtgtgtgtgttttgtgtgtgtgtgtgcatgcctgtatgtatgacatgtacatacacacatgtaagtgtatggtatagagaatgtcaggagaatggggttctagccctgtctgccactctatattcaagaaagtccagagaggaagtagggcagatccagggctttttgaggacacgctttcactctgcacatgaaacaggatgccagactctaagagcttctaaaaggccttgaaaccaactccccggcttccaacctccagctcaagtactctttggcagctgtgaatttctcaggcctcactggtatcaccaacccatctccctgggggtcccggaacttctcaggagtctggggtctggggtgctggcacagaggcccatgggggccacaggcttgtgctcctgggatatctaaaatccactaccacatctcaggactcagagccccaggaaaccaggacttccaaaggctgctttggcttyccc

SEQ ID NO: 20791 - DNA, 548 bp, Homo sapiens
gaacagagaggtcacgtcatttgtttaaaggcacacagctaccgacagagctgggatrccaactcaggtcggtttgattctcaaaccccactgtaccacagttgctctctgaatctcaaagaatccattttgttcttgacaggaaatgaaggaaggaaaaaaaagaagaaagaaaataaacaaaggaaaggaagaggaagggagaaagaaaaatgaaataaaggaacgaaagggataagagagggagaggaaggattagtgtgggattagtattctacaggattagaattagcattaaattagtattctccatgtggaaatataatggagataatagtatttgagaagtctgtgtgcagagttatagttactgttatatctgctgtaaagaatgtaaaggtatatgaggagcaagacacagtttaaatgacaaagggtggcttgagagagtttattgcgttttcatgacttccacaagcacccaccaagccacgacaaatacatatagtttgagtaaaatagtatacatgataagcaaatgtgacttc

SEQ ID NO: 20792 - DNA, 638 bp, Homo sapiens
aagtaagatcactcttatttaatatttaggtttagcctgagtgtctggacagctgcagggttcaggtgctggaggtttctacctgcctagacctttttgattactggctggttcttagagagggacagttttgacggttgagtacctggtgcatgaggttttaccattcttgttactgagtgtgttgcccccttgagtacaatagcagaacatcttctgactaatccagtagttasaggttgaataaggagtgcatccaaggattattggctgtggatgtgcatctggtgcaggctggggaggctgtccagggccatgcctcaggaccctgaatctgacctcctttgtccaaggttttgatcagcaacttggataaagacatagaagccagccttatcaaatttgcgaatgacagaagaccgagatggaaagctaatatattgaataatagaatcaggattcataaaaatcttgacagagaggatgcatctgaaactaacaaggtaaatcctaacaggattacacatgcagtcggcagctcacttcagcagagctggcagcagccaccaatgacgggagaggactggcttgaaggcagtttgtggaattagtaaggtcctgggtttcctaaatgttta

SEQ ID NO: 20793 - DNA, 566 bp, Homo sapiens
atgagataacgaggaggaagatggggcagatgatagtggataaactaaactaacttgattacactttttcccaaacttgttatccacwcttgctgtgctgtgcgaaatctcaaaagccaattaagaccttacaatcacaactgcaggttccagagaagtctcccttataagtctagcagatctgccaacagattgagcgtggtgagagtaactcttctgctttggatttttgtatttcggtgagaacagggagttttattgttacgcttttaaacaaagctattacacattgagatgggaaggcaactcttccgctgatgtggtgtgtagtgatttaggtgaacctttggtattttaaagcgggatcgttctgattggtaacattgtcaattgcacagagaactgattcattttaagacatgttgatgccacttacaaaatcacaagttaaaggactttgggaaatcatttaagtcagagaagcaacatttgatttatttctcagcttactattagcttccttttatcaatattacttgacctttaaatcagttttttaatagaca

SEQ ID NO: 20794 - DNA, 520 bp, Homo sapiens
ttttgtcagagaattttgggaagtagcaaaatgtaaaactacaactgaaacatgactatcattgtctaaaaatcagggtaagtcccatccagtgtgttgtagatatttttttcattgattttaatctaaacacattaattctcttttaaaattaagcattttcccacaaactcaaaggtcaccagagaatttgttcaagacttaaaaaaaagttctatttgtgttttagattcaggcagaacatgtataggtttgttacctgggtatattgtgtgatgctgaggtttggagtatgattgatcctatcatcaaggtagaccataatattcaacaggtagttttatagccctttccttttccctccctccccctctgttagtcctcagtggccattgttcccatctctacatctgtgtgtacccaatgtttagctcccacktataagtgagaatattggtatttggttttctgttcctgcattaatttgcttaggataatggcctctggctgcatccatgtt

SEQ ID NO: 20795 - DNA, 520 bp, Homo sapiens
ggtggaataactcatactcaaaagtgttgatcaaggatctcagttaataagtgaggraggctgtatttaattagagttatttttccaagtaattttcaatatattatctttgctattatggcttatcatataaatttctcaaacctatggtacaatatgtacatgtttatatatatatatatgcgtacaagctatggcaatttttttatttttatttatttttattttatttttttgagacagagccttgctctatctcccaggctggaatgaggtagcatgatcttggctcactgcaacctctgcctcccaggttgaagtgattctcatgcctcagcctcccgagtagctgagattacaggcgcctgacaccatatgtacaagaacactgaatcagattatttcatcaactacatcaataaataatatttaattactattattgtcctttgtgcctacgataatttgttacctttgaataactaaaatacttgcaaatcaagcaagggttttgcttatt

SEQ ID NO: 20796 - DNA, 520 bp, Homo sapiens
ggtggaataactcatactcaaaagtgttgatcaaggatctcagttaataagtgagggaggctgtatttaattagagttatttttccaagtaattttcaatatattatctttgctattatggcttatcatataaatttctcaaacytatggtacaatatgtacatgtttatatatatatatatgcgtacaagctatggcaatttttttatttttatttatttttattttatttttttgagacagagccttgctctatctcccaggctggaatgaggtagcatgatcttggctcactgcaacctctgcctcccaggttgaagtgattctcatgcctcagcctcccgagtagctgagattacaggcgcctgacaccatatgtacaagaacactgaatcagattatttcatcaactacatcaataaataatatttaattactattattgtcctttgtgcctacgataatttgttacctttgaataactaaaatacttgcaaatcaagcaagggttttgcttatt

SEQ ID NO: 20797 - DNA, 520 bp, Homo sapiens
ggtggaataactcatactcaaaagtgttgatcaaggatctcagttaataagtgagggaggctgtatttaattagagttatttttccaagtaattttcaatatattatctttgctattatggcttatcatataaatttctcaaacctatggtacaatatgtacatgtttatatatatatatatgcgtacaagctatggcaatttttttatttttatttatttttattttatttttttgagacagagccttgctctatctcccaggctggaatgaggtagcatgatcttggctcactgcaacctctgcctcccaggttgaagtgattctcatgcctcagcctcccgagtagctgagattacaggcgcctgmcaccatatgtacaagaacactgaatcagattatttcatcaactacatcaataaataatatttaattactattattgtcctttgtgcctacgataatttgttacctttgaataactaaaatacttgcaaatcaagcaagggttttgcttatt

SEQ ID NO: 20798 - DNA, 520 bp, Homo sapiens
ggtggaataactcatactcaaaagtgttgatcaaggatctcagttaataagtgagggaggctgtatttaattagagttatttttccaagtaattttcaatatattatctttgctattatggcttatcatataaatttctcaaacctatggtacaatatgtacatgtttatatatatatatatgcgtacaagctatggcaatttttttatttttatttatttttattttatttttttgagacagagccttgctctatctcccaggctggaatgaggtagcatgatcttggctcactgcaacctctgcctcccaggttgaagtgattctcatgcctcagcctcccgagtagctgagattacaggcgcctgacaccatatgtacaagaacactgaatcagattatttcatcaactacatcaataaataatatttaattactattattgtcctttgtgcctaygataatttgttacctttgaataactaaaatacttgcaaatcaagcaagggttttgcttatt

SEQ ID NO: 20799 - DNA, 715 bp, Homo sapiens
ccaaatctcaccttaaattgtataatccccttgtgtcaagggtggggccaggtgggcataattgaatcatgggagtagtttcccccataatgttctccaggcagtgaataagtcccacgagatctgatggtttcatacatggtaattcccctgcacaagctcttttgcctaacattatgcmagatgtgactttgctcatcctttgccttctgccgtgactgtgaggcctcccagccatgtgaaactgtgagtcaattaaacctctttcctttataaattatttagtctcaggtatgcctttattagcagcctgagaacagactaatacactgcacatctatgatttgattgtgcttaatgatgccaccttcaaacttcatatgatttgtaaaagaaaattagtttgtaagatttggtggctcaaaaatgcagtctaaaatgaaattttaagtgacacattggtttttcttactacatatgtgtatgtgattaaataatatatgaatatgttatatatattacattttaattaaattaacatgcatatgtgtaaagaaaaacatcttgcatatccatttaaatatataaaactcagtgttggccaggatgaggcaaaattgaagctcttgcattgctggacatataaatttatacagactttttgaataacaattctgtcatggataatatttatgccttttaatccagtaattcc

SEQ ID NO: 20800 - DNA, 547 bp, Homo sapiens
tggcccaagggtcatagtttattatcccttgagctaggctgctgcctgaggttgattcaacatcccagctccagtcaacaacaaaaattctaagtctcccgcctaatgctgctgtggtgtgtcatgccaaraaagtgggctactcaggttagaccaatgacttcagaaccacagggctcagaacaggaaggagcttctttctgcagagctgattcctggaaagccaccagcactccaccttctgcccagaaatgtgattcagtcaatagctgatgaggaaaagcaacctgcaaacattaggaagaaggagaaaaataattcagaggtgatgataccacctccaatgaacagggaagcaagttcatcagtaacaaaagtcagtgaggcaaaaaaaaaaaaaaaaaaaaaaaaaaaaggctaatggccgagggctggctccttctttctccctaatcagtgtccttatttcagtgtgctcacatgctcgcctaggactgctttagagtacaactctggacccgccctcatcacagtccaatctaccaaa

SEQ ID NO: 20801 - DNA, 547 bp, Homo sapiens
tggcccaagggtcatagtttattatcccttgagctaggctgctgcctgaggttgattcaacatcccagctccagtcaacaacaaaaattctaagtctcccgcctaatgctgctgtggtgtgtcatgccaaaaaagtgggctactcaggttagaccaatgacttcagaaccacagggctcagaacaggaaggagcttctttctgcagagstgattcctggaaagccaccagcactccaccttctgcccagaaatgtgattcagtcaatagctgatgaggaaaagcaacctgcaaacattaggaagaaggagaaaaataattcagaggtgatgataccacctccaatgaacagggaagcaagttcatcagtaacaaaagtcagtgaggcaaaaaaaaaaaaaaaaaaaaaaaaaaaaggctaatggccgagggctggctccttctttctccctaatcagtgtccttatttcagtgtgctcacatgctcgcctaggactgctttagagtacaactctggacccgccctcatcacagtccaatctaccaaa

SEQ ID NO: 20802 - DNA, 545 bp, Homo sapiens
taggctatttatcagcaatccgtggcctctacccactagatgccattagtaccttcctcctagttgtgacaaccaaagaatgtttccaggcattaccaaatgtaacccgcccctcaattgagaaccacttgtttaggtttacctaaacatttatcattttccttcgttccttcctatatctactttcttctattaggattattttcttcttgactgaagatcaccttctaataattccttttgtgcagatgtgttgatcagttatttttgtttacctgaaaggatgtatttgttagatatacattctggggttgacaagtgttttctttcagcattgtgaagatacggttgattttttccccctacactttcatttccttcctagcttccagtattttattgttgccttcttcccacctacttttctttttctttttttatttaatgtttttttttwtttattttattttttttttgagatgaggtctcactatgttgcctgggctggccttgaatccctaggctaaagcgatccacctgactca

SEQ ID NO: 20803 - DNA, 501 bp, Homo sapiens
agcctaagcaacatagtgagaccctgtgtctacaaaaaataccaaaaaagttagscaggggtgctggcacatgcctgtagtcccagagactctggaggccgaggcaggaggatcgcttgagcctgggaggccaaggctgcagtgagtcatgatggcaccaccacactccagcttggacagcagagtgagaccctgtttaaaaaaaaaaaaaaaagacaatgaagagtgcaaagtcgcagaatgacaagatctaccatttcattgaccggaagtgaacatgcaacattaaaaatcaatggccagacaaccttttggttgaacttttattgatttgtccttgatactatcagttagagttgaaggtgatcaggtgagtgcagcacacgttgaaaagtgaaaccctggctgggcgcgggggctcatacctggaatcccagcactttgggagaccgaggtgggcagataacctgaggtcaggagtttgagaccagcctgaccaac

SEQ ID NO: 20804 - DNA, 501 bp, Homo sapiens
agcctaagcaacatagtgagaccctgtgtctacaaaaaataccaaaaaagttagccaggggtgctggcacatgcctgtagtcccagagactctggaggccgaggcaggaggatcgcttgagcctgggaggccaaggctgcagtgagtcatgatggcaccaccacactccagcttggacagcagagtgagaccctgtttaaaaaaaaaaaaaaaagacaatgaagartgcaaagtcgcagaatgacaagatctaccatttcattgaccggaagtgaacatgcaacattaaaaatcaatggccagacaaccttttggttgaacttttattgatttgtccttgatactatcagttagagttgaaggtgatcaggtgagtgcagcacacgttgaaaagtgaaaccctggctgggcgcgggggctcatacctggaatcccagcactttgggagaccgaggtgggcagataacctgaggtcaggagtttgagaccagcctgaccaac

SEQ ID NO: 20805 - DNA, 649 bp, Homo sapiens
ttgcaattcctgctgccctaaacctctcctctctccagaaggccacagaatggcctcatatggtccctgtaaaattcccacctttggtcagttttatagattaggccagcctctttgatcatttcagatccttttgaattcaggctaaacctctgttcatgtgcccattttcctcttttcctcatgaatcttcaggctcagtgatatttgtttaaagtaactcaatatttactttatttctttcagcctgaaagagactgaaacatattccaaatgaggatatactaattgcctttcatctttttgttattgtcagacagtatattgggaaattttccatttttctttaatataattggtctgtcatgaacatggtcaatgaggtctatttcaaaggagattcctagatgtgaaataaatagaaagcccttgctatacagtaaaattgatttctaaaaatctaatgtaacaatgtttactcacacaaaaacaacctatcagaaaatctcagtgtttcctcaaagataacgaatattacctttttaaatacgccattgtaaygggaagcatgacatctcatttcgtctgattttagcttatttttctcttcattatttatacattgtttacacacataagttttttcttt

SEQ ID NO: 20806 - DNA, 1008 bp, Homo sapiens
tctccctctgttgtccaggctggagtgcagtggcaacatcttggctcactatatcaatatttatatctaaatatatctatataaacctgatagaaggtattattattagaaggagattgtctccagaataggccttagaggaccaggatgttttgagagagaagagataacaaggagcatcttattattttttgagatggagtttcgctcttgttgtccaggctggaatgcaatggtgtggtctgggctcactgcaacctctgactcctgggttcaagtgattctcctgcctcattctttgagtaattgggattacaggcatgtgccaccataccaggctaattttgtattttcagtagagatggagtttctccatgttggtcaggctggtctcgaactcctgaccttagcctaagaggtgaataacattcccaatgccatttaactaacaggaagcagaagctgtctaactccatttgtcccaaattaaccaccactctccagtgcgtttactttttctttattttgctttgagcccacatcaaaaacaaaaaacaaaactctggttcatcgacctgactgctgattgaaagagctgacagtggtagatgagcaggagatctctttcagaagaccagtacctttggaaatcttgaggaatcctcattgagaggaaaagttaagacctaataggttattttaaaagaatacattgattccaatgacttatgttttagaatgtctttmgtatcataaattacttaattttaataaataaagtgtataaattaaaaaaagaatacatcgtttcaaatgaaattctcttaaacattttcatttgatatgacagtagtttgtcctcaaaatgatgaaagtttgttatctgatattggaataattaatgttcagccacttaagaaaaaaataaaaactcaaagcattgaaagaaattgaatttatatttgcagagtagactcctgcagtgtatttatctttactgagctcaat

SEQ ID NO: 20807 - DNA, 541 bp, Homo sapiens
ttccttttcgtctttttttctgagagtaggttaaagagaaagaagacagtgaactttgctgaacctaccccatggggaaaaaatgtctccaagttatgaaaagtgaaaaagaaaacaaagatgcaraataacatagtgataaaatctctgcatgatttgagactatcgcctcatgaatctaaagctgactgatcaatacttcctatttcccagctcagaagtgggacaacatcgctactcgactaaacagatggctaaccacaacccagtaaaccccctccctgccgaaacagttactggacaggagaatgcaggttatagcacgtggtcatttacaaaactaaaaggtatgaaactctctgctgagtcaggttgcctagacacagctctaacacattctgtcacctaagattatcatatacattaaggtttaaaaaaaagccagccagcccaggtaagaaatacaaaagtctacacggcatgaaatagctcaaagagacttgtttggtggaattaactagtggtttaatgggggggtggg

SEQ ID NO: 20808 - DNA, 511 bp, Homo sapiens
ggaagccaatgcccaggaatgcctccaggtgtcctttgttccctgcagcacccgctccaccaccctctctccctactgtccacaagacagcctcccacctttgtaggccaaggattcccatctgagggctcygaaaaaaatgtaaggtcccggaatcccttgagacactggaaagccagattctttttctatagaaatgcatatatgaccgtccccatcccatcccccatcgcctcgtggggttcctgggctgatcccccacccaggcaggaagcctcaagaggtccatagtctgagtcaagccctccagctttgtctcctaggcaacggctgctttctccttccagctacacatggaccaaggcaggaagatcccagcctcccttcatttctggcatcccagcagctagccctcctctccatccccacgcacacaggcacctcaccctatggagctcattccactgcattcttttgaggaagtgaaacagccctgaaagatgaccctcac

SEQ ID NO: 20809 - DNA, 1115 bp, Homo sapiens
ttttttcaagattttttctatatctttgattttatgaaatttgaatataatatgtctatgtgtagtttttaagggatttatcctacttggtagtctctgaatttcctgggtctgtggtgtggtacatgacattaatttggagatattctcagtcattaaaactttgaatattttctttctgtttttgtctttctttcctacataatggtattcccattatgggcatgctacaccttttgtagttgtgacaccactctagactattctactgtcttcttttcagtattttttctctttactttccagtttgagaaatttcaattgtcatagcctcaagctcagagactctttccctcagtcaaacccagtgtgctaatgagcccattgtccaattagttttgctgtgataataatatggtatgttttaaaaagaagtccttttatagattcaaacagaagtattccaaattaaattctattactctagctaagatttgtctcatacctatccagtacagtgtgcatgggacagggaagggaaaggataggcagaggtcgagatgaccaagtttgactgttagttaatacatgttgaagctgggtgatatgtacatggaggtttactctactagtctttccaattttgtatatgtttgaaatttctcacaataaaacagataaagatagattaacagagagaagaagaacaatctaacacagagaatagatagtggtcatttcagatcttgaggaaccagggaagaatgctttcctgggcccctcaaatcatacatacgtgaccaaatggtttgcctttgccaagcttccctgctcagaaaygattccttctacagctctgttatacttctgcttctctaaaagctggtgtctgtgactgcctgctcagccctgggcaaatcccacgtgcactgttaatcaagtttgctaagctgccacgaagtctaggggtcactgatccccctggactctgcttggtgctattgattcctgcctgctgccccgtggtcttgcgacctctctgcatgccccatggcctgtgtttcctgtccctccaggagtgcgcttgtcggctccacggtttcccttgctgcagg

SEQ ID NO: 20810 - DNA, 553 bp, Homo sapiens
cattacgattaactatagtcaccatgccatgcagtagacttaaaaaaatgtatccctctgatctaatggaaacattgtccctttcgaccaacattttcccatttcatcccaccctgccagactctggtaaccaayagctgtgtgattatgaaaaatcagctaacccctgagactcaatttcctcagctccactgtagtacttaccttgtggggagctgcaaagagtaggagagatactatgtgcatgcttgtcacattgtgactcttcattaaatggtaattactcacatattattgaaaagattaaccacaatgtatagtcataattttgatagtgacagctttcaaaacataaattgcatgcactccatcatacatctactataacgcttaataccttgtgctgtaattattttttatttttattatttttttaagagatagtctcttgctctgttgcccaggctggaatgcagtgatgtgatcatagtcactgtagccttgaactcctgggcttcagcgatcctcctgctccagcctcctaagtagctgg

SEQ ID NO: 20811 - DNA, 553 bp, Homo sapiens
cattacgattaactatagtcaccatgccatgcagtagacttaaaaaaatgtatccctctgatctaatggaaacattgtccctttcgaccaacattttcccatttcatcccaccctgccagactctggtaaccaatagctgtgtgattatgaaaaatcagctaacccctgagactcaatttcctcasctccactgtagtacttaccttgtggggagctgcaaagagtaggagagatactatgtgcatgcttgtcacattgtgactcttcattaaatggtaattactcacatattattgaaaagattaaccacaatgtatagtcataattttgatagtgacagctttcaaaacataaattgcatgcactccatcatacatctactataacgcttaataccttgtgctgtaattattttttatttttattatttttttaagagatagtctcttgctctgttgcccaggctggaatgcagtgatgtgatcatagtcactgtagccttgaactcctgggcttcagcgatcctcctgctccagcctcctaagtagctgg

SEQ ID NO: 20812 - DNA, 608 bp, Homo sapiens
tgggaagatatttttaaaaggctgacataattgggagatgaaatgagtctcttttgcccaatcctttcctcttgactcaaatatggatgtgatggctggacttccagcagtcattctggaccatgaggccttgccttagagctttactagttacatatcttctccctcttaaagggagggaggctaaggctgacactagcaacaaaataygttgcaaaaggaaaaagggagcttaagtccctgataattgtggagcctccatacctggagtgcctatatctcagcttctcttatgtaagagataaattaatgtttcctctttaagccaattagttaggttttctatcaaatgcaaccaaacctaattctgatttaccatctacctttcattttctctttattggtagacatgagttcaagaaatatctcactttgctcttagtgctactatgagaaaaatattgcaagcttgatgataaatgacacttgatacctggcctctgagtcaaagaacaacaaggtagggtgggaatggtaaagaatgcgagatgcaagtgtccaccttatctaatagtggtcactactatgaaccagcttagtaatcccat

SEQ ID NO: 20813 - DNA, 608 bp, Homo sapiens
tgggaagatatttttaaaaggctgacataattgggagatgaaatgagtctcttttgcccaatcctttcctcttgactcaaatatggatgtgatggctggacttccagcagtcattctggaccatgaggccttgccttagagctttactagttacatatcttctccctcttaaagggagggaggctaaggctgacactagcaacaaaatacgttgcaaaaggaaaaagggagcttaagtccctgatrattgtggagcctccatacctggagtgcctatatctcagcttctcttatgtaagagataaattaatgtttcctctttaagccaattagttaggttttctatcaaatgcaaccaaacctaattctgatttaccatctacctttcattttctctttattggtagacatgagttcaagaaatatctcactttgctcttagtgctactatgagaaaaatattgcaagcttgatgataaatgacacttgatacctggcctctgagtcaaagaacaacaaggtagggtgggaatggtaaagaatgcgagatgcaagtgtccaccttatctaatagtggtcactactatgaaccagcttagtaatcccat

SEQ ID NO: 20814 - DNA, 608 bp, Homo sapiens
tgggaagatatttttaaaaggctgacataattgggagatgaaatgagtctcttttgcccaatcctttcctcttgactcaaatatggatgtgatggctggacttccagcagtcattctggaccatgaggccttgccttagagctttactagttacatatcttctccctcttaaagggagggaggctaaggctgacactagcaacaaaatacgttgcaaaaggaaaaagggagcttaagtccctgataattgtggagcctccatacctggagtgcctatatctcagcttctcttatgtaagagataaattaatgtttcctctttaagccaattagtyaggttttctatcaaatgcaaccaaacctaattctgatttaccatctacctttcattttctctttattggtagacatgagttcaagaaatatctcactttgctcttagtgctactatgagaaaaatattgcaagcttgatgataaatgacacttgatacctggcctctgagtcaaagaacaacaaggtagggtgggaatggtaaagaatgcgagatgcaagtgtccaccttatctaatagtggtcactactatgaaccagcttagtaatcccat

SEQ ID NO: 20815 - DNA, 637 bp, Homo sapiens
tcgttctatggcaatgagcagaattttctgaacatgttgaatgtaagtggaggaaatagacatctttatcctgttcctaattgtaatagaaatgactcaaatctttcacatcacatactttaccaattagtgatttaagatggtcttaagtattgagaaatgtcactttcaatcttgccatgttgagatgacattgagattagatgctgacatttttttctgatatattttagacatcttccttaaaagattctaatttaatctgttgatgtggtaagttatgtttacacataatgtagcaggaataaatcctactagtgtattactattgttctattcgtacagtattggaaagcattcctactctatatgtgtattattattatattagtatgtttaatttgatttgttgtcatatttttgtactcatagtcaaaggtaaaagcggtcgatactttattttcatgtgtgtatgtgcccgtgtgtgtgtctttttgagctcagagattgcagtttattctaatctyataaaatgaattcagaagttgcccaattcttctaagatctgagatattttaggtagcatgagcatgagtgacgtccatagaatttaatgtctggtacaggaagggctcag

SEQ ID NO: 20816 - DNA, 699 bp, Homo sapiens
tgcgtcaaggggaattctctgcctgccttttctggctcccccatgtcagccaagtgttaggtaacaaaggggccaacatatttgtacctaggtttcaggatgcaccaaataagtgaatgggaggcacacagattctgggatgaggacttggcagttaattctcccatgctcaacactggtccttgcctgacccacatgcagacatgtttgctgtcacaaaataattcacttaaattagttaaatctgcaacaacaacaaatctgtttaagatcagtacagacattttagtacctagaccttaataaatttagtatattgaccttttggtaaagctactgagtgatttctatacgtttacatattcataagtttaagtctttgtaatatcagyacattaaaactaaagagtatttaaatatgcattgaatatctgcatacgacacaaaaatgggccatctctccataaggcaagcacattattaatttctttgcaaaatatctggacaagatttttcaattaatttttttcctgttgtgtttgcctccacctgacaccacagatgtgatgttgtctttttcacagctggagaccaactaaaatggcctctgggataatatgaatgtgtcaagcaacaaagaatatggcatttaaagcaatagaattcctatattcatgatgaaactttgccctctcctca

SEQ ID NO: 20817 - DNA, 1118 bp, Homo sapiens
cgaagctatccatttttcctttatgactccttcattttgtatttcgcttaagatcatttacttgggaagaccagatatgttcttatattttgttctggaaacttattcttttgcattttacttttaaatgattaatcatccacaagtgtgttttgtgagctaaatatatgaatattaatatgctttttctttcccataatggatagccagtttttgccataaatcactgaataatctgtcttttcctcaccaatttaaaaaccagggatattactgtatgagtgaatgagggttataagaaatgtactttttttttttttaatgcagagaggaggatgtcagttttgaagcagagttcaaggatatagggcagggtttgtagaaaatccaggataaaggagtgtggttgccttgggagctgtagtgtcaaattggataggtttaaaagtataggtgggatgaagtaagaatatatctaggacaaacaaatataggcatacccatatgtttatatgcttagctatatgctttgctttactgcacttcacagatattgcagggtttggtgtgtgtgtgtgtgtttgcaaattgcagatttgtgattaccctgtgctgagcaaatccgtcagcatcatttttttgacagcatgtgttcgctttgtgtctctgggtcacattttggtaattcttgcaatatttcaaattttttccttagtattatgtatgttatagtgatccgtaatcagtgatctttgatattattattgtgtttgttttgggcagcatgaacagcacccatagaaaatgacaaacttaataaattatgttgtgtgtgttctgactgctctaccaactagmcatttccctgtctctctcctttggtctccctattctttgaaagacaacaatattaatataaggccagttaataaccctataatgtacacctagtatgcatcaatattaatctttcaatggcctctaaatattccaagtaaaagagtcatatgtctctcactttacatcaaaagctagatgtaattaagcttagtgaggaaggcatgtcaaaagccaagagaggccaaaggctaagcctcttgcaccagttaggcagattg

SEQ ID NO: 20818 - DNA, 569 bp, Homo sapiens
agcacctattcaacttgcccctgttcactgtctaaaaacactgatcatcttttatacagcattctttatcagtgaaaaggtatttccggaagtatgaattctatgctatatataaacaaaatggctctctttataaaaattttttcctggtattacagaagtgtatcacatcattaattagtctaacccaaatgttgaggaactgccaaaagccaagtaaaaacacatcattttctttataatatttgggatatcacatgtgcagacagattaagtaaatataaagcaatccagattaagaaatggaaaagagttaaaacaggactggaaagtgtttttcctaaggccattccagagagggagaaggtgaaacaggaaaaacagacctcrtttaggggagtggagcaaatgaactatgcagggatcacacagagctcaaaactcaccaaaaaaaaaaaaaaaaagattaaggcacaaaaataatatgcgtgtgcttttaggaatgaaaaggcttggatttataaatgggaaaaagtattgaggctaatatattattaaacagtccacaa

SEQ ID NO: 20819 - DNA, 569 bp, Homo sapiens
agcacctattcaacttgcccctgttcactgtctaaaaacactgatcatcttttatacagcattctttatcagtgaaaaggtatttccggaagtatgaattctatgctatatataaacaaaatggctctctttataaaaattttttcctggtattacagaagtgtatcacatcattaattagtctaacccaaatgttgaggaactgccaaaagccaagtaaaaacacatcattttctttataatatttgggatatcacatgtgcagacagattaagtaaatataaagcaatccagattaagaaatggaaaagagttaaaacaggactggaaagtgtttttcctaaggccattccagagagggagaaggtgaaacaggaaaaacagacctcgtttaggggagtggagcaaatgaactatgcagggatcacacagagctcaaaactcaccaaaaaaaaaaaaaaaaagattaaggcacaaaaataatatgcgtgtgcttttaggaatgaaaaggcttggatttataaatgggaaaaagtattgargctaatatattattaaacagtccacaa

SEQ ID NO: 20820 - DNA, 575 bp, Homo sapiens
gattgggatcaggagttctttgaaattcaagacagggtgtaaattgctgcaaagggtctctttaattgggatcaaaacatttttgacagcttttggattttagctattgtcacgttctgcaaatgtttcttttcttggtttttaaaaaaagtgcagtcaagcttgagcaaaaataccacagatgagataaacaactaagactgtcattccaaatgataaaggcccagttttccacttctttgatatggaaaaaaaaacttcatttagaacccatgctgaacattgagtcagtcccctgctgggcaatgactaaggtttagtaaactgttcctgctcataatttccagtagagatttttcaaataaaaagcatcaatagatatgactttaagagaaaacataatcttaaaattagtctctggactcaacttagatgtgactttgtccagcactttatcctctacttgactttcttcaacaatatctcatcagatggttgttgcttgaatacccccagcgacggtgaactccctcacacagaaggcagtccatttaactgcygactgatagaaaagc

SEQ ID NO: 20821 - DNA, 574 bp, Homo sapiens
taaaggctaattctattaaacctaatataaagcttaatttaaatctatttttaagtcagtgttggtctgtgtatcataaagagggcacagataggtaagggacagaaagctggaagagattaattaaaatagggaagaaacacttaagatctaccctcttggcaaatttcaagtatacaataccgtatcgttaactttagtcattaactttagtcgttaaagttatcgttaactttgatgttgtacattagggtctctagaaagtattcgtcttgcataactgaaaccttgtacctcttgaccaacatctgcccacttcccattgcccctagcccctggcaaccactattctactctctcctatgagtttgactattttagagttcatatataattgagattatacagtttttaatttacaatgtatgcttatatcaagttatacatctttaatatatgcaattttaaattgtcaattacacttcaacagagttggamaaaataaaaataagaaagacattgttattattagtaaaaagtaatacatttgtcatattccaaaaaataaaaaaca

SEQ ID NO: 20822 - DNA, 545 bp, Homo sapiens
tattatagctcagattttctacccttaaacgtttttaaaatttcaagccgtttcttaaaagttctttgattttcctctctgggacttaataatataaattacttatttctttttaaaaaatcactttaagggcatggcgctagacatgcaagatgacataagaaactattttttacagaatagcattatgtattttcaaatgagctctagattatgtaatatgaattatgatcctgtttatattgaatggagtgggtaattgcaagctataaatcatttctgcatatctgaaaaatttagccttsttattcgagttgcacacataaataaagagagttttatttgtttctttaaatctatttttttagatctgcttaaaatcggctgtgcttcagaaagtgtggtatattatgtttaaccttttcaatctaaaatcaaaatattttctttgattcaaaaactagatatgttttccatatctagcatatcctaacatatggaaaataccaaagaaagttattttttctactaaaaatgaataagtg

SEQ ID NO: 20823 - DNA, 524 bp, Homo sapiens
gtatgttacttctctcccctcaccaayggagaacaaatgtgggcaaagtaagtaaagcaatcaccacctttggagggaagaattggtcatgttctatggatggtggatcaactctattgcggatactcagtaacatttttactctctaactcatcatttacacctcaaatcttttttatttaaatgctctgaagttgtagctttgaataatagtcttcgatgtggtaggggccttaatcaccatcattctagtctaactcgtctcccatcaaatcccatcctatgacattcctgatgaacataatttagcctctatttaaaaatatctatgatgaagagtgcattgtcttaccagaaagcccattccacttccaattgttgtgagagttagaaagttattcctcagttttggtttaaacctggctccctcttcattccacacattgacattagttcagtttacaggagctacatagaatagtctaccatattttcctcatgactgtctttccaatatgtgaagt

SEQ ID NO: 20824 - DNA, 524 bp, Homo sapiens
gtatgttacttctctcccctcaccaacggagaacaaatgtgggcaaagtaagtaaagcaatcaccacctttggagggaagaattggtcatgttctatggatggtggatcaactctattgcggatastcagtaacatttttactctctaactcatcatttacacctcaaatcttttttatttaaatgctctgaagttgtagctttgaataatagtcttcgatgtggtaggggccttaatcaccatcattctagtctaactcgtctcccatcaaatcccatcctatgacattcctgatgaacataatttagcctctatttaaaaatatctatgatgaagagtgcattgtcttaccagaaagcccattccacttccaattgttgtgagagttagaaagttattcctcagttttggtttaaacctggctccctcttcattccacacattgacattagttcagtttacaggagctacatagaatagtctaccatattttcctcatgactgtctttccaatatgtgaagt

SEQ ID NO: 20825 - DNA, 1855 bp, Homo sapiens
atgtcaaaaaagctacatatatgtgtttgtgtgtctatgtgcatgtgtgtgtgtatgtgtaaataagtaactacagtagttttctctggtggaaaggtaggagtatgggcatgcaaagtgtatatgggtagatgaaagtcatgttaatattttttagttcttgagttggttgattggttcaccaatgtttattatttatttttctaaatctattatagatatacacacacattgtaaatatatcaaatataattttatgttttttaaaatatttaaatatttgtatattggaacaaaaaataacaaagggaaaaggaactgcaaaatgctcatagcactgttttgctttctttaaaaataaggttgggtttattagtgatgtggaacaattgtttatcagcttcctttcaaaattctcagagatcttttggtcattgagtaatcccaaattctgtggtttgtaatatattctatttagagttttgatctttcaaacttctttaagaagtctcagtacatctttgaaatccaagtgttttatttttagtgtttcactttgctctttttattagctgaaatgaccttcttgaattattgtggcatacaggaaagaggaagaaggaaaaagtcatctgaagaagtgttctttctaagcggttcatctattccacgtccttacaaataattcaactgtgtttattctcaaccaaaactctgctattattctaatgatggacagcctgttctttacagttctatcatatttcctgatccgtgccaattgcctagatggagctatgaatgtggtcacagtgataggtggctgtgagggttttgtgagaggcattttcttctgcagggcagatgaagtgcttggaatggaggattaaaaaaatagtaaagctcatttccattgcattatgtattttgatgtatttctaatgtattccttttcaaaacttatcttcactggagtagaggtaaagacagaatgagcaacagttgctgtttcatgcacatcaagtagccatttttaaaactcttaaaaatgcagcaaagcaatttaaaaagagcaagtggcatggttgctttttttaaaaaaatgtgttttctctgtagctacatttaccagactcaagatatgcaaatgaaacaatatatgaatttggctataccaattttctttcaaaactgtctaatacaaagatattaaatccatctatttatgcattaaatccagatttcttaatacagagccagtacttcttttgaagtaattcaacaggattgcattttgtatcaagatatatttcagatgttgaaaagattccattttcaacaatactttggatcaacaatagttttattaatcattagtcaaacatgttttcttcccytaaagtcctctccttggctttctgtagtacctgagaaatttccaagtaagtgagaatttgccttgcctattgaagtcaaattattttatgtgtttgaattacaaattgaaggaggctatggttttattgactcacttttgtgttcaaatgcaaaagtttttgaaatcattctgtgctcatagtctgtcattgctccttctgagtccccttctcctcttttgaagtcattgttgtataaagatgaaaaaaagacatgtcctattagctaaatcaatattgatattcaagaaaaaggtctaaaataatttctaaagagctattctcacataaaaataaatcatctttggtaacgtattttttaaaagagtttggcttttacgtttatgcaagactgacttcttgctaagcctttactccaagacatttcacaatggaggtccccagtgtttgtccttgtc

SEQ ID NO: 20826 - DNA, 1855 bp, Homo sapiens
atgtcaaaaaagctacatatatgtgtttgtgtgtctatgtgcatgtgtgtgtgtatgtgtaaataagtaactacagtagttttctctggtggaaaggtaggagtatgggcatgcaaagtgtatatgggtagatgaaagtcatgttaatattttttagttcttgagttggttgattggttcaccaatgtttattatttatttttctaaatctattatagatatacacacacattgtaaatatatcaaatataattttatgttttttaaaatatttaaatatttgtatattggaacaaaaaataacaaagggaaaaggaactgcaaaatgctcatagcactgttttgctttctttaaaaataaggttgggtttattagtgatgtggaacaattgtttatcagcttcctttcaaaattctcagagatcttttggtcattgagtaatcccaaattctgtggtttgtaatatattctatttagagttttgatctttcaaacttctttaagaagtctcagtacatctttgaaatccaagtgttttatttttagtgtttcactttgctctttttattagctgaaatgaccttcttgaattattgtggcatacaggaaagaggaagaaggaaaaagtcatctgaagaagtgttctttctaagcggttcatctattccacgtccttacaaataattcaactgtgtttattctcaaccaaaactctgctattattctaatgatggacagcctgttctttacagttctatcatatttcctgatccgtgccaattgcctagatggagctatgaatgtggtcacagtgataggtggctgtgagggttttgtgagaggcattttcttctgcagggcagatgaagtgcttggaatggaggattaaaaaaatagtaaagctcatttccattgcattatgtattttgatgtatttctaatgtattccttttcaaaacttatcttcactggagtagaggtaaagacagaatgagcaacagttgctgtttcatgcacatcaagtagccatttttaaaactcttaaaaatgcagcaaagcaatttaaaaagagcaagtggcatggttgctttttttaaaaaaatgtgttttctctgtagctacatttaccagactcaagatatgcaaatgaaacaatatatgaatttggctataccaattttctttcaaaactgtctaatacaaagatattaaatccatctatttatgcattaaatccagatttcttaatacagagccagtacttcttttgaagtaattcaacaggattgcattttgtatcaagatatatttcagatgttgaaaagattccattttcaacaatactttggatcaacaatagttttattaatcattagtcaaacatgttttcttcccttaaagtcctctccttggctttctgtagtacctgagaaatttccaagtaagtgagaatttgccttgcctattgaagtcaaattattttatgtgtttgaattacaaattgaaggaggctatggttttattgactcacttttgtgttcaaatgcaaaagtttttgaaatcattctgtgctcatagtctgtcattgctccttctgagtccccttctcctcttttgaagtcattgttgtataaagatgaaaaaaagacatgtcctattagctaaatcaatattgatattcaagaaaaagrtctaaaataatttctaaagagctattctcacataaaaataaatcatctttggtaacgtattttttaaaagagtttggcttttacgtttatgcaagactgacttcttgctaagcctttactccaagacatttcacaatggaggtccccagtgtttgtccttgtc

SEQ ID NO: 20827 - DNA, 561 bp, Homo sapiens
gtctgtccagaaatgggaaaggattgggaaagatgcactgagattcttatagggccccaagtcacttctattaggctaaatttctaagagatgctaggttcttagaaatttcacaaaaatacttgtctgatggtaatacaattaaatgttctaaagtaaaatgattttcacttcactgaarcacgtcaatcagaaagcttatttcaaaaaagggaactatcttagttaagtaagaaaatgctccatttcattttgattgtttactggctataataacattcacaagtcttacatatctgctatctttttcctacccaaggagctgctactttgtaaggtgtggagaatgggtatttttattccattatatggattagaaaactaaaactgggaatcacttgttatgtcacaaagaaaaattggtagaatttcagtaagaactatagtctcctgatttttcatccaagacaattttatttatccatacagtgtcattgattgagtgcctgttatgtaccaagtattattctgggtcctatgaataacactgtcctgcctttt

SEQ ID NO: 20828 - DNA, 561 bp, Homo sapiens
gtctgtccagaaatgggaaaggattgggaaagatgcactgagattcttatagggccccaagtcacttctattaggctaaatttctaagagatgctaggttcttagaaatttcacaaaaatacttgtctgatggtaatacaattaaatgttctaaagtaaaatgattttcacttcactgaaacaygtcaatcagaaagcttatttcaaaaaagggaactatcttagttaagtaagaaaatgctccatttcattttgattgtttactggctataataacattcacaagtcttacatatctgctatctttttcctacccaaggagctgctactttgtaaggtgtggagaatgggtatttttattccattatatggattagaaaactaaaactgggaatcacttgttatgtcacaaagaaaaattggtagaatttcagtaagaactatagtctcctgatttttcatccaagacaattttatttatccatacagtgtcattgattgagtgcctgttatgtaccaagtattattctgggtcctatgaataacactgtcctgcctttt

SEQ ID NO: 20829 - DNA, 561 bp, Homo sapiens
gtctgtccagaaatgggaaaggattgggaaagatgcactgagattcttatagggccccaagtcacttctattaggctaaatttctaagagatgctaggttcttagaaatttcacaaaaatacttgtctgatggtaatacaattaaatgttctaaagtaaaatgattttcacttcactgaaacacgtcaatcagaaagcttatttcaaaaaagggaactatcttagttaagtaagaaaatgctccatttcattttgattgtttactggctataataacattcacaagtcttacatatctgctatctttttcctacccaaggagctgctactttgtaaggtgtggagaatgggtatttttattccattatatggattagaaaactaaaactgggaatcacttgttatgtcacaaagaaaaattggtagaatttcagtaagaactatagtctcctgatttttcatccaagacwattttatttatccatacagtgtcattgattgagtgcctgttatgtaccaagtattattctgggtcctatgaataacactgtcctgcctttt

SEQ ID NO: 20830 - DNA, 546 bp, Homo sapiens
cccaatggttttcacaaacttcatgatatgaggaaggttttgatggccttcagaatcaactccatgacaaaccaccgatccctcgagggaaggatctctctgtgactcccacgtccccctgctctgtgactctctgtgactccctgtgctctctgtgactcccatctccccctcctcttgtcctgtgcagtggctccctgtggctctgtagtgagactgttttgcagtacagcagactagaataatttttctacaaaattaccagaacattaatgttctctatggtgtctaccaagggccattgtccctcaggatgtttgtaaatcatctacagtgccagtttagagattatggaaatagaaaattctgtatcatgtatactatatagttgctgagtgatttttatagagaagtagttgcctctggttacatctcctcctaaaagrgttgtttaaaattaaatgaaatagagaaacttaaaaatacctaaaaatgttgtagaacacagttaaagatgtagatcactctgctttgttattctttgca

SEQ ID NO: 20831 - DNA, 516 bp, Homo sapiens
tggacataggaagcggcaaagatttcataacaaagacaccaaaagcaattgcaacagaagcaaawgttgacaaatgggatctaattaaactaaacagcttctgcacaacaaagaaaactattaacagagtggacagacaacctacagaatgggcttttttgtgtgtgtgtgaaatggaatctcactctgtgcccaggctggagtgcagtggtgccatctcagctcactgcaagctccgcctccctggttcaagcaattcccctgcctcagtctcctgagtggctggggtaacaggcacactccaccaagcctggctaatttttttgtatttttagtagagacggggtttcaccatgttggccagactggtctggaactcctgacctcaggcaatccacccacctcggcctcccaaagtgctgggattacaggcgggagccacagtgtgtggccactttttttaaactagaagtaatcttagagctcatttctccctctcctgtaatctcagagata

SEQ ID NO: 20832 - DNA, 516 bp, Homo sapiens
tggacataggaagcggcaaagatttcataacaaagacaccaaaagcaattgcaacagaagcaaaagktgacaaatgggatctaattaaactaaacagcttctgcacaacaaagaaaactattaacagagtggacagacaacctacagaatgggcttttttgtgtgtgtgtgaaatggaatctcactctgtgcccaggctggagtgcagtggtgccatctcagctcactgcaagctccgcctccctggttcaagcaattcccctgcctcagtctcctgagtggctggggtaacaggcacactccaccaagcctggctaatttttttgtatttttagtagagacggggtttcaccatgttggccagactggtctggaactcctgacctcaggcaatccacccacctcggcctcccaaagtgctgggattacaggcgggagccacagtgtgtggccactttttttaaactagaagtaatcttagagctcatttctccctctcctgtaatctcagagata

SEQ ID NO: 20833 - DNA, 479 bp, Homo sapiens
ataacttaagagctatttgtactgttttggtcaatggtctgtatttctagcccatckttctatatgattgttggcttttttcttctgcatttgtataaactctttatattattataaatgtaagttgcaaatatttttcctattttatcttatcttttattttacttatgatgtattttccatataaaatttaaattttttaaatatcacaatttccatctttttccttaatcagagttagattaaattttcactgctcttagattatagaggaattcaactatgttttcttttggtccttttgtttgtattaggtatttggaatttatcctggtgtacaatgtgagggattccattcaattttattttttccatgtggctatccaattattctaacaccactttttaaaaagttgaccttttctcccactgatttgagctgctgccctgattgtattgtaaatacccatatgcagttg

SEQ ID NO: 20834 - DNA, 588 bp, Homo sapiens
ttggcgatagccttgggagtaagaaaatccgacttccccatggcgaccacggcagcgatcactttctggaccccagtactcagccagccggaaacggaaccgggctggcggcggtgggcgggacaaatcccagctgagaggcggaaggaggtggggcctgggaagactgggttgcaacggtcgcgagactcccctcgccgtagcgcgaagaaacgagactgaagaagagagcaaggtgggaggggcgcgctggggagcttcggcgcatgcgcgctgaggcctgcctgaccgaccttcagcagggctgtggctaccatgttctctcgcgcgggtgtcgctgggctgtcggcctggaccttgcagccgcaatggtatggcagcttgcgggaagatcggcaggaccgcaagggatggaagagcttgggcacggggcagggaggaggagatgggcgcgggggcagatstggggtcgcagggcctagctgggcccctggcccgtcggaggcgccgggtagcgggggctgcaggaagcggctctgaggtcgggcaaggtgtgcgcagggccgggctccggcggagcaaggtccc

SEQ ID NO: 20835 - DNA, 552 bp, Homo sapiens
tgataacgtactttgaggggcaaaagcccctttttgaacagataatttcagggaaaaaagccatacttaatctgtgcttatgtagatgagaatgacaagaacattctttctcattttcatgaatcagaactcataagaactcaagactgaaaagtctagaatctactctgtacaaattgactctgctattttaacccacttcctggggtcattttaattatatctgaaaaatgagttatgagaagmaaatgaattaaatttctctttatacgtaattacaatgcaaatttaaaactgctgtacccagttcctagaaatgacttgggtggagattttcttgctctctcttttcatttttacctttttctcctactcatttaggaaaagatgtaatgattaagtagaaatggaaaagcaataataaaaagttaagtgtaaaaggcaacttaatttccttgttactctgaatgttaatagtcgtgtgtgggtctcacccagtctttcgtcaaagtagctttataatataaaacactccaaagcctacttaaactt

SEQ ID NO: 20836 - DNA, 555 bp, Homo sapiens
ttcatattaaattttttcttttaaaaattgggttcaatgaattatctaggatgattgcattgtttgtggcatcaagtgttgtttctccctttccataccaagcatatcctgcttttggtacaggatatatttttttcagatgtcaaaacacctagggatacattttatgaattactaacttacttttttaggacagacttgaaatcatttagagggtaaactctagcaatatagaaatctgttttttgttgaatggagtagcagctaatctttaagacccattgatagcattttagtagyagcacttaacattcagaaaagaaaaacaaatcatccagcttctgatcttcagttttatgtaactttacaatttggtacttgatgacttggtattggtatgagactgaatagtgtgatgttacaaacatgtgatgtttgcctaccatgttctaggcactgtgccaagtgctagagatggaatggtaggtaaagctgtggtctatacttagggagttcacagtcaaatgaaggatacagtcacaaaacagacacttg

SEQ ID NO: 20837 - DNA, 503 bp, Homo sapiens
tgatgtgggaggcaggcccaggaggagccctcagcagcctcccatggagtttgttcactgatggcagaccaccctggcagcttggcccatcagcaagcatgacacagcaggtaagggttccttccagtagcacaggcttccagtccatgatgagccaacctagtgtgccccttgcactgatgaaatgtgagaccagtcttgcctaggtatttctgctcctttctctgggtgagccagagacactttgagatgatctctcccttgctgagggagataccagaaagggctcaagtgagctaaaatgggagggagatagacagacagwcatcaagagatttatggtaaagaagtggctcacacagttatggaacctaagatgtcctaagatctgtaatcagttagccagagacccgggagacggggagtgtaacacatctgagcctgagtctgagagcaggagaagacccatgtcccagctcaaagacagtcagggagaaaaagag

SEQ ID NO: 20838 - DNA, 520 bp, Homo sapiens
tccccaaatctagtctctccttyttccagaatccccctgtggcacccagtatccctggcctctccatgctacaacagtggctatgtttttcttcagttcaatatagctagaattgtgcaggaaaattcctcaaagtatttctctatttcatggttacctgcctctcttggaaaggtgggagagtgtgagaaaggagggagaagaaaaactcatatttacagaatacccactgtgtatttagtagcaaatatttattgagcacctctagttgtcaggccttttacacttcatgtcattcttccaagaaccttacggggagggtatcctcctgctcatattgtcagcaagcactctggtaggtgcttatttattcccgcatatgcattggaaagcaggttattttttaaggctttacgatgggtggttctttctcagcattgtgtgcatttgattcacagttggccgacagataatgaaattctccaatgctctgatgtaagtcctggaattatgactgcgt

SEQ ID NO: 20839 - DNA, 520 bp, Homo sapiens
tccccaaatctagtctctcctttttccagaatccccctgtggcacccagtatccctggcctctccatgctacaacagtggctatgtttttcttcagttcaatatagctagaattgtgcaggaaaattcctcaaagtatttctctatttcatggttacctgcctctcttggaaaggtgggagagtgtgagaaaggagggagaagaaaaactcatatttacagaatacccactgtgtatttagtagcaaatatttattgagcacctctagttgtcaggccttttacacttcatgtcattcttccaagaaccttayggggagggtatcctcctgctcatattgtcagcaagcactctggtaggtgcttatttattcccgcatatgcattggaaagcaggttattttttaaggctttacgatgggtggttctttctcagcattgtgtgcatttgattcacagttggccgacagataatgaaattctccaatgctctgatgtaagtcctggaattatgactgcgt

SEQ ID NO: 20840 - DNA, 1638 bp, Homo sapiens
tgcatatggagaggagaggagcatgtaagtaaacctgagaactttggtaataaagaaagagaaaattttattcagattatacagaagtatttacatttataaatgcctctttgacaatatgatcggtttcagtttatcttgttggcatgattcaaagccctggtgtcagagattgttccattaagtaggcagattacacacacacacacagataaggacatatcaagtaaaagcacaattaaagagaagttcgtgggaagatcctgatttgcatacccagagtgggtctgtatacacattaatctgacagcggcctggacgattttaatgtttctaactccgaatataaacttgtgtttctctcatgcagatgttgccctttcttctgcttataggaaaattcccatgtagtttcaaagccctgtcatgggcaaggtaaacagtggtgctagctgtgaacagataaaatgtatatccatcgattaactaagccttggaaatgaaacacgtcctgtctcttgaatgctgtacacagagccaagagaaatagacggatcatcaggctttacaaagggagttcacagtagtcgctgatatgagggaataatatctttgaaagtttcaaaacacagataagatgaactcatttgtatttcttgggaaatactcttctgaaacaatgagaagctcttgccaggtttaggctgttctggtatgcagtcaacaccgccaccagctggcctaattgagaaagactatttgtgcctaaatttctcttacagaaactatgtgataaaaataaaacacctggcagaaggacgcaaagctctatcatttcaaaattcagtttttttcctgttttgtgaaatggctttcacagaaatgtgcctttaggtgtgactgttatcttttgataggagtgaatacgtattggtatcatatgcagctacaaaccatttccaatatacgtataaaataatgggaattatggatctttgtggtgctaataattacgtttgtaaataccctggtttccatttttttgtctttccattttcaaaatatgtgtatagtggagacaaaggagaagagggtgaaccttacattaaccgattrtatctcatgctggcaggcattcgtgaaatgtttggtgaaagggaagtttaaaattactgattaaagtgagggtctgtgtttactaaagcattgtactttaaagccattcttcattgatatagaacatttcaatggcgttctgttgatttaatcgtaaaggttctgatgtttatatctgcttatactcttctactgcaaacattcacttcccaacaaatttattcgaaccacacattacattttgggaagttatgttaaccaaatattgttgctgctatctctgtaatatgactgcatttaactttacttttgaatttgtttttgaagagagtacttgcagacaatgggagctgcctggaagaaatacatataagcaacatttgtgtaatgggctaaatcctttgaaaagcagtggtggaggtggtagtggaggggtaggattgatttagggaagtctacgtgtgtgttagctgaaatatctaaatctgaaagcaatgataataccatatgtaaaatttccaa

SEQ ID NO: 20841 - DNA, 939 bp, Homo sapiens
ttgtatcctcaacactttgaatactatgttatgaaattctgggtactattaaaaatcttctgaataataaaaacwtttttgagtaattaaattgaattatagagaaaaaaattaaatttttaaaaagatgcaaaagaaaaatgagtaggagtataaataggaggcagaaatgaagctaatctaaaaacatttaccacagggttctgtgcagtttctatgaatgggccacaaatttatctttttcaactgtcaatgcagagtcaaatatgatctcagttaccaaagcaaagtatcaagtatctagaagaaaaaagcaaggcaatttctcagcagctaccgttggaaaataatacacagaggtggatattgctggttgtctttccagaatccattctccccttcatccttactaacagaacctcagttttgttcaggtatctaccctttcttcatgcagcatcttcagttgaaggaagctgatcccagaggcgggctgattagcataagccaaccagtgattggttcaggaattagtatatgatttaatggcagccaatgagacacaaggagatggctgctgaagacttttaggaaagttctttcttggctttaagagagactaatgagaaacaagggtctcttacctgaaatatgtgaaaagaagctgcagttgctgctggcattcatcttgaaaccacgagggaaaccagcatgacaataaacaaaacatatgagaagggaagagccaagacaattgaggaggaatggagtgaaagccctgatcatactgtacctgaagtctaccctgctgctagacatctccccatatgaacctcattgtttaccagtttgattctggtgtctgatgttcacaatccaaaacatactgatgcatatccccacaagtgtatgaaaacatgctctcattttcccaaacta

SEQ ID NO: 20842 - DNA, 939 bp, Homo sapiens
ttgtatcctcaacactttgaatactatgttatgaaattctgggtactattaaaaatcttctgaataataaaaacttttttgagtaattaaattgaattatagagaaaaaaattaaatttttaaaaagatgcaaaagaaaaatgagtaggagtataaataggaggcagaaatgaagctaatctaaaaacatttaccacagggttctgtgcagtttctatgaatgggccacaaatttatctttttcaactgtcaatgcagagtcaaatatgatctcagttaccaaagcaaagtatcaagtatctagaagaaaaaagcaaggcaatttctcagcagctaccgttggaaaataatacacagaggtggatattgctggttgtctttccagaatccattctccccttcatccttactarcagaacctcagttttgttcaggtatctaccctttcttcatgcagcatcttcagttgaaggaagctgatcccagaggcgggctgattagcataagccaaccagtgattggttcaggaattagtatatgatttaatggcagccaatgagacacaaggagatggctgctgaagacttttaggaaagttctttcttggctttaagagagactaatgagaaacaagggtctcttacctgaaatatgtgaaaagaagctgcagttgctgctggcattcatcttgaaaccacgagggaaaccagcatgacaataaacaaaacatatgagaagggaagagccaagacaattgaggaggaatggagtgaaagccctgatcatactgtacctgaagtctaccctgctgctagacatctccccatatgaacctcattgtttaccagtttgattctggtgtctgatgttcacaatccaaaacatactgatgcatatccccacaagtgtatgaaaacatgctctcattttcccaaacta

SEQ ID NO: 20843 - DNA, 1330 bp, Homo sapiens
tggtatagaatcgagtaaacaaggatgaattcaccttaacaaatgatgcccaacaaaggcaagatcattggactcagaaggccaaagttatcttggatgcttggcaaagatttgttatattagccagtggcattcttgggctagaagggggagcagtactctgggtggtaacccagagggaggaaaagtggcaatgaccaattccatgtgtgggagcagcatgggtgttgtgggccaagaggaggggccggggcacagcgtaaagaaaaatgtcagttgatgttcttgttctctatcatggtcctgccttttcttttttcctttttttttttttttttttttgtcctaagacagagtttcaccagagacaagctatagcacctgcaggtgggttgaggtcaaactgtcccatgacatatgatacaagagttaaagaggccctacaggcatctcagtgagttcactgtgtagacatgttgcccaggctggagtgcagtgacatgatcttggctcagtgcaaactctgcctcccaggttcaagtgattctcctgcctcagcctcccgagtagctgggattataggtgcccaccatgacgcctggctaatttttgtatttttagtagagatggggttccatcatgttggccaggctggtctcgaactcctaacctcaggtgatctgcctgcctttcagcctcccaaattgctggtattacaggtgtgagccactgcatggttctgctttttctaacctctggaaaacagattcaggagctggggaggaagaccaggattttttgcccattgccaagatcatgaattgatggcaacaatgtcaagagctgccggcggaagagcaatgaagacatatcaaacctatgactcctccagtgggcgggagtgtgagaggtgcttctcattttcaaatgatttgcactattttttttttttggagatggagtctcactcacccaggctggagtgcagtggcatgatctcggcttactgcaacctctgcctcctgggttccagcaattctctgcttcagcctcctgagtagctgggattacaggtgcccgccaccacacctggctaatgttttgtatttttagtagagtcggggtttcaccatataggccaggctggtcttgaactcctgatcttgtgatccaccctcctctgcctcccaaagtgctgagattacaggcatgagccactgtgcccrgcccgcactattttttacagttatatgtacacacatatatatttgtatatgtatatatgttagtttaattatgaatctcaggtagagactccagcaattttcca

SEQ ID NO: 20844 - DNA, 572 bp, Homo sapiens
atgaggagtggattctccccggagcctccagatagaacacaggtctgctgacactttgattttagccctgtgaaacccattttgaactcctggcctcctgaactgaaagatagaaatttgtattgttttaagccaccaagtttgtggtaatttgttatagtaacaataggaaactaatacaccaagctgaaaagtctgggctttaccttggggatgctggggaaccatgaaagagttttgggtgaggaatatcataaktagatcagtgttgggtttttaaaacatagtcatcttgagagaataggttgtgcttttttcctttgtttctttgcaatgagagataagagtctggagcaggatacggaatgaagtttaagatccctgtaatggcctggatgagacaaaccataggatctatttttgccacagaaagttatattttttgtctttttatatgttatatatgtttctcttttttccttggatgcagagaagcacaggactcaaattgtgctcatctgcagttaatatcccatcctgggctcttggtacactgatctgtccccttcttc

SEQ ID NO: 20845 - DNA, 369 bp, Homo sapiens
  misc_feature (1)...(369): n = A,T,C or G
ctgactcattacttctgttccatttatttttactcctatgtaattttacatgaatactacactaagagttttgtaactctgtgatatgttttagtttctggagagactggtcctctttcagtattcatttttcaaaatttgtattgatctccttatccatgtatttattttatgaactacagartcattttgtcacattacacaatactcctaggtgctgaacatagttttacacagtttacaccttaaaaagggtctattctactttnnnnnnnnnnnnnnnnnnnnnnnnnnnnnnnnnnnnnnnnnnnnnnnnnnnnnnnnnnnnnnnnnnnnnnnnnnnnnnnnnnnnnnnnnnnnnnnnnnnnt

SEQ ID NO: 20846 - DNA, 842 bp, Homo sapiens
ttttgagctggagtttcactcttgttacccaggctagagtgcagtggcgcgacctyggctgcaacctccatctcctgggttcagggtgattctcctgccccagcctcgcaagtagctgggactataggtgtgtgccaccatgcccagctaatttttgtatttttagtagaagacagggtttcaccttgttggccaggatggtcttgatctcttgacctcatgatccgcccacctcggactcccaaagtgctgggattacaggcgtgagccaccgcacccaacctctgctctggatcttgtagtggctttctgttatttagtatctaaacattaaactactctggatttccaggacttacagtgtctagctttgctttcctgcccagcataatctcagttgctctctggagggctggtcctcttcagggggcttgcctccttgctcgacctcatggattctaggctcctttccagagcttgttttgttcctttttgaccttttacctcttctatgaagtctctcccctccaggccatgccagtttgttcattcatccattcattaagtctatttagcacccttcacattccatgcagtgccaggctgtgggtacgtatttgtaacccccttgtcatcaaagctactgcatctacatttgtgcagtttgtgctctcaccaatgtgtctggttgaggggactagtaaaatctaccctaaaaaagaaaaaaaaatctttagtacatttataattgtatactctgcattactgagtatattcttgaaggaaagaacttccattctgatcaaaggttgcagagtacagattcctgtttaacttttaca

SEQ ID NO: 20847 - DNA, 842 bp, Homo sapiens
ttttgagctggagtttcactcttgttacccaggctagagtgcagtggcgcgaccttggctgcaacctccatctcctgggttcagggtgattctcctgccccagcctcgcaagtagctgggactataggtgtgtgccaccatgcccagctaatttttgtatttttagtagaagacagggtttcaccttgttggccaggatggtcttgatctcttgacctcatgatccgcccacctcggactcccaaagtgctgggattacaggcgtgagccaccgcacccaacctctgctctggatcttgtagtggctttctgttatttagtatctaaacattaaactactctggatttccaggacttacagtgtctagctttgctttcctgcccagcataatctcagttgctctctggagggctggtsctcttcagggggcttgcctccttgctcgacctcatggattctaggctcctttccagagcttgttttgttcctttttgaccttttacctcttctatgaagtctctcccctccaggccatgccagtttgttcattcatccattcattaagtctatttagcacccttcacattccatgcagtgccaggctgtgggtacgtatttgtaacccccttgtcatcaaagctactgcatctacatttgtgcagtttgtgctctcaccaatgtgtctggttgaggggactagtaaaatctaccctaaaaaagaaaaaaaaatctttagtacatttataattgtatactctgcattactgagtatattcttgaaggaaagaacttccattctgatcaaaggttgcagagtacagattcctgtttaacttttaca

SEQ ID NO: 20848 - DNA, 532 bp, Homo sapiens
cattcctcttaaaatataggtctattctatgagcagctgatatggtttgtatctgtgtccctgcccaaatctcatgttgaatcgtaatctccaatgttggaggtggrgcctagtaggagatgattagatcatgggggtgaatttctcgtgaatggtttagcctcatccacttggtgctgttccagtgataatgagtcagttcttgtgacatctggctgttaaaagtgtgtagcacctccccactctctctcttcctcccattctggccacatgaagtgtcaactcccccttcatcttctaccatgatgtaagcttcctgaggcctccccagaaaccgagcagatgttagcaccatgcttcctgtatagcctgcagaaccgtgagccaattaaacctctttttttttaattaaattatgcaatctcaggtatttctttataataatgcaagaataatacagcaactgaccagattatctagctgtgactgtatattcttaaaatttcatatagggttaatcaagcccccattt

SEQ ID NO: 20849 - DNA, 532 bp, Homo sapiens
cattcctcttaaaatataggtctattctatgagcagctgatatggtttgtatctgtgtccctgcccaaatctcatgttgaatcgtaatctccaatgttggaggtggggcctagtaggagatgattagatcatgggggtgaatttctygtgaatggtttagcctcatccacttggtgctgttccagtgataatgagtcagttcttgtgacatctggctgttaaaagtgtgtagcacctccccactctctctcttcctcccattctggccacatgaagtgtcaactcccccttcatcttctaccatgatgtaagcttcctgaggcctccccagaaaccgagcagatgttagcaccatgcttcctgtatagcctgcagaaccgtgagccaattaaacctctttttttttaattaaattatgcaatctcaggtatttctttataataatgcaagaataatacagcaactgaccagattatctagctgtgactgtatattcttaaaatttcatatagggttaatcaagcccccattt

SEQ ID NO: 20850 - DNA, 519 bp, Homo sapiens
tagtgtggactatttgggaaaagaaggaaaagtaattttcccttattctttaccaacccaacctcaggagggttgctttcctttcccttttccccaaacccacacactactactgaaagtggtgtctctgctcttggctcttggtatgggaaccacagtgagtatgaattactgattataaaaattttggtctgatattttaaaattcattgcatcctcaccctaataaacctagtaaccctttgtgaggctacaaaaaaaaaaggcatatttgcttgcccrgggggcttctcttccagttcacctgggtagaattctgggtgtagtccccacttctaccactagggaccactcccgtccccagggaccttgtctcagtcctggacccacagcatccgttccagtccccagagctcaaccactgggcagggaaagctcccaggaaggggctcggcttcactgtggttttctgtgagccacgttttctgcttatagacccgggaggtaggagctgaccca

SEQ ID NO: 20851 - DNA, 552 bp, Homo sapiens
tgagctaaatgaaatgaactcagtagccttcagagtattccactgagggttctgatctgtcccaacaaaaatcccagctgtactttggcacacatggtgagtgttaccttctcctgcttaaatattgatggagatgattctgggctctgtggctcagcagctccagggatcttctgttcatttgcatcttgagaagattgggccaggagactatggtggctgggrggatacatcctcctcctgccctctttccaagatgggcttgtctgtttcatccttccctccacattcccctcctaggtcagaagataagaactttcggaatcattctccccatttaagaatgggggcttggcaaggaagagatccaatcactaattttaatgtgatattgggatattttactgtaactcccaaatctgaaaagcatcctatcaatgagtgtttgtgttatctactattttaactgataagggctgaattctgtctccccaaaattcatacgttgaagtcctaacccccagtacctcagtatttggagacagcaccttt

SEQ ID NO: 20852 - DNA, 552 bp, Homo sapiens
tgagctaaatgaaatgaactcagtagccttcagagtattccactgagggttctgatctgtcccaacaaaaatcccagctgtactttggcacacatggtgagtgttaccttctcctgcttaaatattgatggagatgattctgggctctgtggctcagcagctccagggatcttctgttcatttgcatcttgagaagattgggccaggagactatggtggctgggaggatacatcctcctcctgccctctttccaagatgggcttgtctgtttcatccttccctccacattcccctcctaggtcagaagataagaactttcggaatcattctccccrtttaagaatgggggcttggcaaggaagagatccaatcactaattttaatgtgatattgggatattttactgtaactcccaaatctgaaaagcatcctatcaatgagtgtttgtgttatctactattttaactgataagggctgaattctgtctccccaaaattcatacgttgaagtcctaacccccagtacctcagtatttggagacagcaccttt

SEQ ID NO: 20853 - DNA, 563 bp, Homo sapiens
gttatctattactgcttaacagagtgccccaaactgagcaactaaagcaacaagtgttatctcacagtttcagtgggtcaagagtacaagactggctaatctcactggtactggtgcagggtcactcatgaagcttcaagcaacctgttagctggagctgcagtgccatgaagttcctgaagctgtaggctccagttctaagctcactcacatggcttatttcctcatctcacaaacctctgtttgggctgatcacaatgtggcagctgacttcctccagagcaagcgttctgagaccaacagtaagaacaaccaacatggcagccgcagtatgttttataacccacctgcagtatcttgtataacccacctgcagtttcttgtataacccacccgcagtttcttgtataacccacctgcactatcttgtataacccacctgcagtttcttgtataatccacckgcaggagggacatatcattgggtcttccatgtgctattggtcacacagaaacctcacacaatgtaggaacggactaacacaagggtgtgaatactggga

SEQ ID NO: 20854 - DNA, 605 bp, Homo sapiens
acaagagagaaattcttgtatgtgtaaactaggaaagacatgagaatatcagagaagcattgtttgtaatagcaaataactgtaaacaacttaaacaacaatcaacaagaacaagtgaatattatacagtagcaaaaaggataaactacagcacatgcaccaacacggactaattgctcaaacacgawgctatgtgaaaaaagcaagctgtgtgagtgtgtgtgcgtgtaatacatatataaaacatgcttcatttatgtaaagtttaaaaaaatgcaaaagtaaacaatagactattttagaaattcataccaatgtaggaaaaacaataaagaaaaacaaaggaatgataaacattacattcaggatatggttatctctgagggaagggagtagcacacacatgtcgaaaatatttttaatgtttatttcttaagctgccttgtggatatgcgggtatctctattattgtttacatctaacacatataccagataaaaccttttataaatcattagtttcatttttaaatgtaaattaaaactgttcatctctatattggctgtcacaagtatactaatcatcttaagaagtttaaaaaaaaa

SEQ ID NO: 20855 - DNA, 605 bp, Homo sapiens
acaagagagaaattcttgtatgtgtaaactaggaaagacatgagaatatcagagaagcattgtttgtaatagcaaataactgtaaacaacttaaacaacaatcaacaagaacaagtgaatattatacagtagcaaaaaggataaactacagcacatgcaccaacacggactaattgctcaaacacgaagctatgtgaaaaaagcaagctgtgtgagtgtgtgtgcgtgtaatacatatataaaacatgcttcatttatgtaaagtttaaaaaaatgcaaaagtaaacaatagactattttagaaattcataccaatgwaggaaaaacaataaagaaaaacaaaggaatgataaacattacattcaggatatggttatctctgagggaagggagtagcacacacatgtcgaaaatatttttaatgtttatttcttaagctgccttgtggatatgcgggtatctctattattgtttacatctaacacatataccagataaaaccttttataaatcattagtttcatttttaaatgtaaattaaaactgttcatctctatattggctgtcacaagtatactaatcatcttaagaagtttaaaaaaaaa

SEQ ID NO: 20856 - DNA, 605 bp, Homo sapiens
acaagagagaaattcttgtatgtgtaaactaggaaagacatgagaatatcagagaagcattgtttgtaatagcaaataactgtaaacaacttaaacaacaatcaacaagaacaagtgaatattatacagtagcaaaaaggataaactacagcacatgcaccaacacggactaattgctcaaacacgaagctatgtgaaaaaagcaagctgtgtgagtgtgtgtgcgtgtaatacatatataaaacatgcttcatttatgtaaagtttaaaaaaatgcaaaagtaaacaatagactattttagaaattcataccaatgtaggaaaaacaataaagaaaaacaaaggaatgataaacattacattcaggatatggttatctctgagggaagggagtrgcacacacatgtcgaaaatatttttaatgtttatttcttaagctgccttgtggatatgcgggtatctctattattgtttacatctaacacatataccagataaaaccttttataaatcattagtttcatttttaaatgtaaattaaaactgttcatctctatattggctgtcacaagtatactaatcatcttaagaagtttaaaaaaaaa

SEQ ID NO: 20857 - DNA, 605 bp, Homo sapiens
acaagagagaaattcttgtatgtgtaaactaggaaagacatgagaatatcagagaagcattgtttgtaatagcaaataactgtaaacaacttaaacaacaatcaacaagaacaagtgaatattatacagtagcaaaaaggataaactacagcacatgcaccaacacggactaattgctcaaacacgaagctatgtgaaaaaagcaagctgtgtgagtgtgtgtgcgtgtaatacatatataaaacatgcttcatttatgtaaagtttaaaaaaatgcaaaagtaaacaatagactattttagaaattcataccaatgtaggaaaaacaataaagaaaaacaaaggaatgataaacattacattcaggatatggttatctctgagggaagggagtagcacacacatgtcgaaaatatttttaatgtttatttcttaagctgccttgtggatatgcgggtatctctattattgtttacatctaacacatataccagataaaaccttttataaatcattagtttmatttttaaatgtaaattaaaactgttcatctctatattggctgtcacaagtatactaatcatcttaagaagtttaaaaaaaaa

SEQ ID NO: 20858 - DNA, 976 bp, Homo sapiens
aggctgaaggtaattgcatgtcaggcattgcacaagactcaaaaattgaaatatttaatgacacacagcccttacactccaggaactacatttgcactgattctactcaacaccacgtgtttctaggttctctataaatattattttatgaccaaaatctaagactcaaaaaactagcttcccttttaaatgggattaactgatggaacaactaaaacacatcttcacttcatcatactctttaaaaaccaatacaaatattctgggcatggttcatttgtattacaaatttcttcctctaccctgtgacttgtctttctaaaaccttcccaatggtatctttccatgaactaatgaatagaaattcataattttaatgtggtctaagtatttaaactttttctttatgattaatgctttgtgtactatgtatgaattatttttctactctaagtgctcatattattttctaatgtaagctttattttttaacctttaatatttagatctacaaaccatctggaattaagtttttttatgatataaggcaaagtcaatctttgtttttctttatggatatccaactgacctcaaakgatatattgaaaaaattatcctttaccacactgcactgctgctatggtcatctttgtcatataccaaatgatcatgtgtttttatatatatatatatatatatatatatatatatatacacacacacatacacgtatatacacacacacatataggtatctgcactttccttgctgttgcactggctatttatttgcactaacaacaatagtacactatacagtgtactactgccctacagtgtacctactacactgtactattactactctatataaaactacagtattaattactatagcttattataaagtcttgatatttacttaattacgtgtctgattttaatacgaattgtaaaatcgatcagcctatttcga

SEQ ID NO: 20859 - DNA, 976 bp, Homo sapiens
aggctgaaggtaattgcatgtcaggcattgcacaagactcaaaaattgaaatatttaatgacacacagcccttacactccaggaactacatttgcactgattctactcaacaccacgtgtttctaggttctctataaatattattttatgaccaaaatctaagactcaaaaaactagcttcccttttaaatgggattaactgatggaacaactaaaacacatcttcacttcatcatactctttaaaaaccaatacaaatattctgggcatggttcatttgtattacaaatttcttcctctaccctgtgacttgtctttctaaaaccttcccaatggtatctttccatgaactaatgaatagaaattcataattttaatgtggtctaagtatttaaactttttctttatgattaatgctttgtgtactatgtatgaattatttttctactctaagtgctcatattattttctaatgtaagctttattttttaacctttaatatttagatctacaaaccatctggaattaagtttttttatgatataaggcaaagtcaatctttgtttttctttatggatatccaactgacctcaaatgatatattgaaaaaattatcctttaccacactgcactgctgctatggtcatctttgtcatataccaaatgatcatgtgtttttatatatatatatatatatatatatatatayatatacacacacacatacacgtatatacacacacacatataggtatctgcactttccttgctgttgcactggctatttatttgcactaacaacaatagtacactatacagtgtactactgccctacagtgtacctactacactgtactattactactctatataaaactacagtattaattactatagcttattataaagtcttgatatttacttaattacgtgtctgattttaatacgaattgtaaaatcgatcagcctatttcga

SEQ ID NO: 20860 - DNA, 976 bp, Homo sapiens
aggctgaaggtaattgcatgtcaggcattgcacaagactcaaaaattgaaatatttaatgacacacagcccttacactccaggaactacatttgcactgattctactcaacaccacgtgtttctaggttctctataaatattattttatgaccaaaatctaagactcaaaaaactagcttcccttttaaatgggattaactgatggaacaactaaaacacatcttcacttcatcatactctttaaaaaccaatacaaatattctgggcatggttcatttgtattacaaatttcttcctctaccctgtgacttgtctttctaaaaccttcccaatggtatctttccatgaactaatgaatagaaattcataattttaatgtggtctaagtatttaaactttttctttatgattaatgctttgtgtactatgtatgaattatttttctactctaagtgctcatattattttctaatgtaagctttattttttaacctttaatatttagatctacaaaccatctggaattaagtttttttatgatataaggcaaagtcaatctttgtttttctttatggatatccaactgacctcaaatgatatattgaaaaaattatcctttaccacactgcactgctgctatggtcatctttgtcatataccaaatgatcatgtgtttttatatatatatatatatatatatatatatatatatacacacacacatacacgtatatacacacacacatataggtatctgcactttccttgctgttgcactggctatttatttgcactaacaacaatagtacactatacagtgtactactgccctamagtgtacctactacactgtactattactactctatataaaactacagtattaattactatagcttattataaagtcttgatatttacttaattacgtgtctgattttaatacgaattgtaaaatcgatcagcctatttcga

SEQ ID NO: 20861 - DNA, 1431 bp, Homo sapiens
aggacatcagtgcacctctgatttaaccaatccttgagacttcttgttatatgagataataaattctattgctatttaagtcatgtatagggctttaaaacatttcatagctgaaaacatcctgatatatattttatatttttatttgatatgtggaagagaaaataaaatatgggaggaaagacactaacctcctttgggggcaggctctacaattgtccagtaataaaataattttctttgctgtgcttccagaatgatcttaaactaatgataccagaagttgataaaatcagtgggggaaacagtctgtctattaatgcataagattgtgttatttaagtaaatgagtaggcactcatgtgacattttgaaatcttcaagaaaatgatattttccagtcactgcaatttaatttgggggagcctgcagcattagcatgagaccagccagcctgtccttattcttctcaagccctagcacacctaattcacaggcacctgctacagcaaaggaggagctgcctggctaaaacaacctagttacatcagcctgctaaaaatggtcctagggatagattttgctcagcattgagttctttgaataacaacaacaaaaaaaacccagcaacttattctgcagttttagggtttgctgacatttttttaccaggcgtaactatgcttttattgccaagtcttactttaaaataccaaagacaacttttcaaaaagcggagcttggatatcaagatttccttaccaaaaaaaaaaaaaaaaaaaagcatttgttttgttaattagtattgaacttgaataggggtgccttcagatactttccttggaaaagtttatggtgatttggccttttttatttttttgagacggaatctcactctgtcacccaggttggagtgcatgatctcggctcactgcaacctctgctgcccaggttcaagcaattctcctgcctctgcctcccgagtagctggaattacaggtgcctaccaccacacctggctaatttttgtagttttaatagagacagggtttcaccatcttggccaggctggtcttgaactcctgacctcatgaaccacctgcctctacctcccaaagtgctgggattacaggcgtgagccaccacgccaggccaatttggctttttttttagtgtaccattatataggctcgatcatgccactatattatagttmactgtcactgacagagaatcccactgacctttcacagcaactcacgccttgccccttcttaagactgctgagctatacatatttttgtgtgccttcagcaagacacactctgaacagtaatgcctatatgtatcactaaagtcaattgagcctttttgtcctttctcttgatgtccctcccctcagcaaagccaaagtgtaccttcaaagtagca

SEQ ID NO: 20862 - DNA, 532 bp, Homo sapiens
catatattaaaaactcagttccaaaacataggttctttctacacaaaaatattttgaaatattttgaaaatattttgaaaatatttgtgtatttttgctatctacaaaaatattttgttaggtagcaaagaggcaagataaagctcatttgggcaggaacttgaatttcatctgtgatgcatgcatacttggtttcatttgatcttgtggtgctaattgatcatgaatttcacaaagtgcaagaccttcatgtttcagtctgaaacttttcccatcctgtcatcatctggacttctaaagtgtggtagtgacaatagtaatggccatcgtatcctcctgctttttaacgttttgtcagtactaattatagccatattcgtagcctttcaaaacaccatgcgttgtttgccatgtctttgttcatccccattttwgattgcataggaactttctttgtcccttaagcttgaacagactctggaacacagaagcttctcacctctctttatcagtacctttttgctagaggaat

SEQ ID NO: 20863 - DNA, 519 bp, Homo sapiens
tgatgcttcataactctgtccagtatggtagycaccagacacatggctactgagcacttgaagtgtggctaatgtagctgcagaactagagttttaaaattttgctcaatcttaattaacataagtttaaattttaaaccgaaagcagtgtaaaaagtgaaaattcacttactgttagtgtaaaatagaaactggagctcaaagactaagtacaaaaacagtaaaatcctacagaattaagttttatattagttacatgtttaaataataatatttaagatacattgggttaaatcaattattaaaattaattttactgttttttcttttaatgtggccagtagaaaattttaaatggcatatgtggctcatcttctatttctattgggcaatgatgctccagaaagagaattataaaaagaatagaaagagtattctctacacccggaatgtatagggtgaagaatagagggggaaaaaggaaaaaatactaatttaacccagctaactacatgaaag

SEQ ID NO: 20864 - DNA, 531 bp, Homo sapiens
tctgacaaatgacttaacacatgtctactctgaacactacaaacttggaaaagtaaaccccactttaagttacccaccacctacccatccatcacctgggtaaggctgtgtgcctcacagtatcatctccttcagagtcctgccagaagctggaatatggagcagcaccaagggacaagcagataagggtgttgtaaaaggtgtcagttgataatgcatcttaaacaatgctagtttaatatctcaaatccataaaatgattcagttttagaggaggaatgtaatgtgcttgtcaaaaaaatatattggcttygacttaaaaaaaagattgtgacactctacattatatgttgtggtggttattaatatttgttcttaatctgagaccaagactaaatagaaaaaatcataatagtcaaatacatctatccaggaaatgagggtgaatgcggacatggtgggtgataattaaagagtagaaaggtaaaacaactttgggggaaaaaaagggaaaaattggaagggaaaaat

SEQ ID NO: 20865 - DNA, 531 bp, Homo sapiens
tctgacaaatgacttaacacatgtctactctgaacactacaaacttggaaaagtaaaccccactttaagttacccaccacctacccatccatcacctgggtaaggctgtgtgcctcacagtatcatctccttcagagtcctgccagaagctggaatatggagcagcaccaagggacaagcagataagggtgttgtaaaaggtgtcagttgataatgcatcttaaacaatgctagtttaatatctcaaatccataaaatgattcagttttagaggaggaatgtaatgtgcttgtcaaaaaaatatattggcttcgacttaaaaaaaagattgtgacactctacattatatgwtgtggtggttattaatatttgttcttaatctgagaccaagactaaatagaaaaaatcataatagtcaaatacatctatccaggaaatgagggtgaatgcggacatggtgggtgataattaaagagtagaaaggtaaaacaactttgggggaaaaaaagggaaaaattggaagggaaaaat

SEQ ID NO: 20866 - DNA, 515 bp, Homo sapiens
  misc_feature (1)...(515): n = A,T,C or G
tgacctgtggaagataggagaggtggttatgaattcaaagggaatacaattcacctgcatctgtcacagggcatccctgtgactagatcagctatatttgtctccatacagaaaaaatgtgtgcttctcgatgcaatagttatacttagatagttaagacttgctacctttcaaactattttaatctattttatatttcayagtatccaaatgtcattatactattttaatgaagagaagatttttaagagtaggttaaaatcacacagattgaattcaagagcagaaaacatttagcagagactgaaaatcaatgattctaaccccactctacccttttcataataataatgatgtttcatacaatttctttgtattgaaagctactacttagaacacttattntgtgctggannnnnnnnnnnnnnnnnnnnnnnnnnnnnnnnnnnnnnnnnnnnnnnnnnnnnnnnnnnnnnnnnnnnnnnnnnnnnnnnnnnnnnnnnnnnnnnnnnnnt

SEQ ID NO: 20867 - DNA, 981 bp, Homo sapiens
tcacttattatggtccagccactcgggcatttgttccggtccacaaacacaccaaactctgtcctaccaccaggctggtacatttgccagtccctccacctggaacacccctccggatctcagatctcagcttgaatgttcaagtcatcagagagacctttcccactttaaatgtcctcccctggtccctctttgtcacattgtcctgtctacctcttcctaggcagcatcatagtctgagattatcttgcatccttgtttattgggatgaaggcttgagtgagagtagggacttgcctgtcttcctgagctgtgacttcagggactggcagagttcttggcacctaggaaagggataagagagccactgctcctgagttggggacacagaaggagaggatggggagttcttttagattatggtgtttgaccagccattgagaaagcttgtgtattcttcaagcatttggatagtcataggtcctcatgctgtgctactcaaatcgtggtcctcagtctggcattgccagtgacagcatcacctgggaggtcgttaaaattcaaattcccaggccttatgcgagacttagagaatctgcatctccatgggtgggtcctggaatctgtgtcttaggaagttctcctggtggtccttatgcatactgaagtttgggaaactcagttcttgctttttgttttccaaagctggccaggccagtagagccagaaacagatttactttgggagttccttctgtcctcctttcagaagcccctgtcaagtttccctttgtccagctgccagctccccacctgctccttccttgtattgacttgccatgatgacattcrtttgacaaatgtgaagtttgacagtccttagcaccttgggaggagtttgagaccagcctggccaacatggtgaaaccttatctctactaaagctatgatactatgttagctatgatacttttttttgatg

SEQ ID NO: 20868 - DNA, 517 bp, Homo sapiens
catatatggatttactttatttccatttatggcaagtgataccagttttccacatgtggtaataatgtaaacttttcttctaaaatatatttattattagtaaaaatgagtaaattaaggaaaatagtatgcactgaaatttggaaaacactagcataacaaatatgaagtatttgcttaatacttttaagcttggcaaatagtaaatacataatgaaagatagctactattttttagatacttttagttactttttagttaaattattgtgaaattctacattaacatgatttaatttaccatttaaaatttatttaacaattagatattccctgtccacaacacgccaggccctgggaattcaaagatgaaaatgaatgaaatagaccctgcttccaaagagctaccattttggtggtgagagagataytaaataaccagtaaaaatataatggttttgtttttgttttttgagacagagtttcgctctgtcacccaggctgcagtgcagtgatg

SEQ ID NO: 20869 - DNA, 1739 bp, Homo sapiens
tggttagctaacacaaaagggtaagcctgctctaaacaggccatatcactaatgttaagaagccagaaatattttttattaaataagagtgacattaactatctgtagataaagcctatctggaggcataggttttgctaatgtgtcataaacatctgctctgatcctctgttcacatgggtgggtatctttgctgctatcgccattcctcatgctctcaccccaccattggaaattcccacttgatcttcaaagtcgggttcaaaatgatcttttctctacttctcctaggaagaatttctctctcatctgtgattctgcaatactaaattttatacttagggcattgtgctatcactatttatgtttacatactgatctccaaaatgtgagctctttaagagtagagacgatgtctaatttgcctttgcatcttttccttcaaaagatgtattctcatgtactatttggggactgtaaatcttttaaggttgaggactaaataatattgtctttgtaatggactcattgcctggtataatattttggcttactgtaggcgctcagtattttataaaataccattgtcaaaagatgaaaaggatcaacctaaataaaacacatgaaaaaagacatttctacttgctctataataaattataataaacattaccaatctaaaaagagctattcaaggttatattatgcagattcctaaacaaagattaaattatattcatttattcattaaatttttatttaagcaaataatgatcataccacttagacataacaattaaggctacctttagacctttttggttactgaattaaaaacagcttattaaaagcaacaatatcatacaaaattccatatgtgtaaataagtgatgactaattatgtaagaagctacttaagaagtttaaatccctgaatatttatgcatgtagagggagactccattgctagttgaacaaaaggcctgagctgaattattttctctactactttcaaatgacatttctaagaacccaaacaagtaactctatggaggaacactgctccagcaaataccacctagtttttctacatccaaacgcccaactcttccctgactcgttataatcgcctctaactggttccctgcctgcaccttcatctgttcttcatggaacagtgaaagcaatcctgttaatatacaagtcaggtcatgtcattcttccattcaaaatcttacacttatttcccatctcactcaaaataaatcccaaagtccttaaaattgcttccaaggtccaacatgatttgcactcccctttccttgttacctctctggtactgttaactattccccttttcactcactctgctatagtcatactggattccttactgtttgtcaatcttgtaagaatcagcctgctccctcacctcaagtttttgtttcaatgtcatcttcccagactgatcagatcattccttaccagttatcccactatatgcccagcagaatggctaaaatagaaaaggctaacaacatcacatgatggggaggatatggaataactagaactctcatacatggttagtgaggaaaggcygatagatactgtaagaccaaacacacacaatccatagcccggcaagtctgctcctaagaatttactcaagagaaaggaaaacacaagtccacagaaagacgtgagtaagaatgttcaaagagctttattcataatgg

SEQ ID NO: 20870 - DNA, 587 bp, Homo sapiens
tgcctcctaagtagctggtgctacaggtgcaaccaccacaccccgcttagatccatttaatttttgaggttcagcagactagttgtggtaaggtagatcagtggcagagactaaagaatgctctactatttacatagtgaaaatgmctgagagaagagggaagtaatattaagtaaaaaaaaaaaccgtatcactatgttcagaccctttattagatacttcatgttcactctgaagactgattaagtcacttgtccgaagtggcggaagtaggatttggactgaggtctgactccagaaccctatgatctttctactgtagcttaattctcccttcttgtcttcttctgccttccccatctatggctgggttctggttggtactcaggggaagattcagaatactaagagagaagcaaaaaggactttaaatggctgaagagatgatcaacagcatcctaggtataaggattattagaatgctacaaccagtccacctaaggaagtaagagcaggtttcttagcttcgcttacaggattctccttagagtacttctacttgattttagctcctaagacttaactgc

SEQ ID NO: 20871 - DNA, 587 bp, Homo sapiens
tgcctcctaagtagctggtgctacaggtgcaaccaccacaccccgcttagatccatttaatttttgaggttcagcagactagttgtggtaaggtagatcagtggcagagactaaagaatgctctactatttacatagtgaaaatgactgagagaagagggaagtaatattaagtaaaaaaaaaaaccgtatcactatgttcagaccctttattagatacttcatgttcactctgaagactgattaagtcacttgtccgaagtggcggaagtaggatttggactgaggtctgactccagaaccctaygatctttctactgtagcttaattctcccttcttgtcttcttctgccttccccatctatggctgggttctggttggtactcaggggaagattcagaatactaagagagaagcaaaaaggactttaaatggctgaagagatgatcaacagcatcctaggtataaggattattagaatgctacaaccagtccacctaaggaagtaagagcaggtttcttagcttcgcttacaggattctccttagagtacttctacttgattttagctcctaagacttaactgc

SEQ ID NO: 20872 - DNA, 573 bp, Homo sapiens
atggtggtggaaaggagagctgttattgcaaactcatcatactttattatttccatcaaaggaagagaggaagtcctcaggcaggcttagctgaaatattacaggggctaagaggtgaacgtgaaaaacctttcattttaagcgtgcagcagctgctgtgtacactcaaaatattgtgaggaggaacttgcccaagaacaaccatgaaattgagcaacatttattaatctctggttatttctccgtggttgttcagaagcaagcggctacaagttaatatttaggatcrttcaaggggaattgcctcatatgttgcaattcctccctagtttcccccaaagaataaaagcacaagaaaaatccaggatattcatacactgatagagaacaagtttcaagaactcttaactctttaaattttgaccagtctcaaactaatatgacattgattttggctataaaagctattcaatccatttgaaaacaggttcaaagaatgtttatgtcagtagctaaaccgaggtgaaaacaggaagaaatactgaaagttcactatttctcacataatgctca

SEQ ID NO: 20873 - DNA, 288 bp, Homo sapiens
gtttcccagcaggagcagtttgtcttggtaaattcataaactggctttgtgaggcacattggtcccacccgcgtctaagcagcattaaccagctgtcctgaggctgctgtctcctagtcaggagagtcccaaggcctccaatctgcagaagtgtgaggccagccccacggcccacagaggygcccagcagagctgtctcaggtcagagttgattagacccaacctccccgccaagggatccctggtcacagtcacacaattaccttttagcccgggggtcccaggcat

SEQ ID NO: 20874 - DNA, 510 bp, Homo sapiens
cgccctcctcagcctcccaaagtgctgggattacaggcrtgagccactgcacctggcctggaagttttcattggcagtgttagtaattatgaagagggcaggagaaaatacagagcacaacttaaggaaacacttcttatgagagcactattacctactttagagttgaacaacagaccttgtacctaagcaaatatttttgtcaataactggcacattttagtattgaaaataatcatgaatcacccagttcaattacccatctgttgctcaactctcctctagaatatttaggtaagaagtcatccagttatgtttggctacatcaagtaataagtaactatacttcccatgcctgcccatttttatctttgaacaattctgatagttaaattgttttttacattaagctgaaatatgttttcctctagcttcagtccactcattctagtcctgatctttagagcaatttcagcacattcaatccctgttctaagtgacaagccttca

SEQ ID NO: 20875 - DNA, 510 bp, Homo sapiens
cgccctcctcagcctcccaaagtgctgggattacaggcatgagccactgcacctggcctggaagttttcattggcagtgttagtaattatgaagagggcaggagaaaatacagagcacaacttaaggaaacacttcttatgagagcactattacctactttagagttgaacaacagaccttgtacctaagcaaatatttttgtcaataactggcacattttagtattgaaaataatcatgaatcacccagttcaattacccatctgttgctcaactctcctctagaatatttaggtaagaagtcatccagttatgtttggctacatcaagtaataagtaactatacttcccatgcctgcccatttttatctttgaacaattctgatagttaaattgttttttacattaagctgaaatatgttttcctctagcttcagtccactcattctagtcctgatctttagagcaatttcagcacattcaatccctgttctaagtgayaagccttca

SEQ ID NO: 20876 - DNA, 580 bp, Homo sapiens
gtcttcaaggttcatccatgttgtagcatgtgtcacaattttcttccttttttttttttttttgagacggagtctcgctgtcacctaggctggagtgtagtggcgccatctcggctcactgcagcctctgcctcccaggttcaagcaattcttgtgcctcagcctcccaagtagctgggattacaggcatccaccacagtgcctggctaatttttgtatttttagtagagaaaagrtttcaccattttggccaggctggtctcaaactcctgacctcaggagatccgcctgcctcagctttccaaagtgctgagattaccagcctgagccactgcacccggtctttccttcctttttaaggctgaatattttattgttgtatatttcatccctttgtttatccatgcatcagttgatggacacttgggttgcttccaccttaacttttttatttgcaacttattttatttgcaaatttgagcatgttcattcatctattcatttattcattcattcaacaaatatgtattctttcctattataagctcaggggtttatagctatgacaagataaacaagg

SEQ ID NO: 20877 - DNA, 541 bp, Homo sapiens
caaccaacttcattgtagatgtctagagtcaaatgatattgtatgcttttctacatttctgtaagacatagtactgtaaatttttatcgactgttctaaattcatattcacatatagagtcaacaaccacattactttatatcaaatttgtatcatttatttcyctttatcaagtattttttgctgagagtcagcctcacattccgtggctgggctaaaatgaacaatgtagaactaataactataacaagctcattaatttaatctccccttcatcattgccaatttggaaccaaaatgtaaattctaatttcattgactttttataggaaaaataaattagtagcattcccttcaagcaaaataaagaaacccacatggtttctatttttacattgccgttcatcataattttaaaccacccacaacaattcagtcaaacaatctgtgtgctttttcctctggggaacttgctaactttgcaattgagataagcaatcaatgctcacctctgctaaactatacataaatattatttcaa

SEQ ID NO: 20878 - DNA, 1327 bp, Homo sapiens
cttgtgtctcataatctgtgtctgtaagttagggaaaaaaaagtttaccaaggcaagaataatttaaatatccagttattcatgtttatcacactgctgtcagtctgttgttggctgacagcaatagttcaaaaacagcgaactattctattccagtttctttcacatcataagactagtacataaagacaggatgtacctccactgacaaatttttgactagaaataaaatgttatttgggagtaggtgttggggtgttagtgmctcaacgtgggaaaaaagttttaatctgtgttttacagattacaaaacatttattttctagcatatctgggatagctctgcttaaatggctcctgtgatacattcctggacaggttcacaggcacaggcctactgataatccgccaacggatcattttcccacacagccttatctttgatacccttctgtcaatactgtgcaccaatgacaccaaagcagaaaaacatgtttgggccaaacaatactgttcatttaggtgaaaaaaatgggatgagggagaagctgttatgtagaagtacgaataaattcagtggatgaagggaacttcccattgaatttttttatttcaatataatagaagccaagtcacaattcaattataaaatcaaaaatgcatttattcataagccaaatacaatggcaatcaattattttcccccataaagggctgtatttgcaatagtgaaaacaaattacattagtacatgtgcaacttacaatgagcatgttcactgggaattatgaaatacagagagaaccctttatatgcaggagcctctctacagtgaactagaggtggaagtggaagtagtggatgtggaacagagcaacgatggagagttaagaccaagacattaagtgttctctcacctagcaataagtccttacttgtgacaaagccataataaaaaattactactttgcattacaattgtacttataactgaactattattatagtctttccaaagagtatttacaattaaatgctatattcttaattttgcttttatcaaaattactgattgcttacacttgaatatattattaaaaatattggatagtttaattataagcataatttatacctcatttagacaaatgttgaattcatttttattacatgcagaattggggggaaggctgctgatttcagtagagactggtgagagtaattaaacaggtagataatccacaaaaacatattaaaattttttcatgtgtgatgaagccagagaatcttctaaatcatacaattgactataatccaaaagaccagt

SEQ ID NO: 20879 - DNA, 606 bp, Homo sapiens
taaacaatgctgcaatgaatattcttgtgcacctatcttttcacgcttatgtgactaggttatattctgatggataaatctagaatatatatatggggtcaaattactgaatctaatggtatatgcattytttttttttttgagacatcatcccactacatcacctaggcttgcctccaattcctgggctcaagtgatcctcctgcctctatcttccaagtagctgggactacaggtacttgccaccatgcccagcttttaaatcctgaatttattattattattattattattattattactactactattaccagtatttcatagagacatagtctcattctgttgtccaggctagtcgcaaactcctggactcaagctgtccccttccctcaacctcccaagtagctgggactacaggcatgtgccaccatgcctggctttaaaatcctcaatttttatttattattattttattttgtagagactggttctcactatgttgcccaggctgattccaaactcctggcctcaaacaatccttccacctcagcctccaaagaagctggtattacaggcaccactgcacctagcttagtatataca

SEQ ID NO: 20880 - DNA, 606 bp, Homo sapiens
taaacaatgctgcaatgaatattcttgtgcacctatcttttcacgcttatgtgactaggttatattctgatggataaatctagaatatatatatggggtcaaattactgaatctaatggtatatgcattctttttttttttgagacatcatcccactacatcacctaggcttgcctccaattcctgggctcaagtgatcctcctgcctctatcttccaagtagctgggactacaggtacttgccaccatgcccagcttttaaatcctgaatttattattattattattattattattattactactactattaccagtatttcatagagacatagtctcattytgttgtccaggctagtcgcaaactcctggactcaagctgtccccttccctcaacctcccaagtagctgggactacaggcatgtgccaccatgcctggctttaaaatcctcaatttttatttattattattttattttgtagagactggttctcactatgttgcccaggctgattccaaactcctggcctcaaacaatccttccacctcagcctccaaagaagctggtattacaggcaccactgcacctagcttagtatataca

SEQ ID NO: 20881 - DNA, 561 bp, Homo sapiens
taaattttaaataattacttaattattttctttatctacacttgccattgagttgatctcatccaatgtcaaaatgaaatttgaatctgtagctcaacctctcctctgagtttgacacttatgcatcatactcatattcatactcatactcagcaactccatttgtgtattacaggtatctcaagcttaccataccatgtgcaaaactcccaacccttgttttcttcttcaagccaggttctccctcaacattctcagtttcaggcagcttcattaatccagttgctcaagccaaaaactttgaagttatctgattcctctttctcctacacacttcattaagaaaccctgttggcctgacattagaaacttagcaagaatcctaccatttctcatcacttcctctggtaccattctaacccaagccaagtcaccatcatctctcacttattactttaatagttgtattagtcaaggttctccagasggacagaaacaacaggagatacacacacatatacacaggtactcccctgtgtatatgtgtgtatgcgtatacac

SEQ ID NO: 20882 - DNA, 466 bp, Homo sapiens
  misc_feature (1)...(466): n = A,T,C or G
tccccaatcccctgtccacagactggtaccggtccatgtcctattaggagccaggccataggtgagcggctggcaagtgagcgaagcttcatctgtatttacagtcactccccatcactcacattatcacctgaactctgcctcctgtcagatcagctgcataggagcgtgagccctattgtgaactgtgcatatatggtatctaggttgcgtgctccttatgagaacctaatgcctgatgatctgtcacagtctcccatcatgcctagatgggaccatgggaaccctagatgagaaagcaagtcagggctcnnnnnnnnnnnnnnnnnnnnnnnnnnnnnnnnnnnnnnnnnnnnnnnnnnnnnnnnnnnnnnnnnnnnnnnnnnnnnnnnnnnnnnnnnnnnnnnnnnnnctatacacagtgtttcactgtggaasgtttagccaatcaatataactgggcagt

SEQ ID NO: 20883 - DNA, 630 bp, Homo sapiens
tcagtgcagaagaaagcgtactgtgatagattaacaatgtctgctgaggcaaagataggaatttggagtcaacatgccatgaatttatttgttatttcatgaactgaaataaagccaaaatcttatagatacccctgtagctataagactaccaggcaatcatcacgtagtgcatcgaatcatgaaaccaacaggaaaaataagacatccagctgtctggaagatagaacaaaggaaatggtccattttttcgtcgactctgcaaggcacaacagtgtttaagttatccatcatatgagcctttccacacagacataatacacaggagatgaagaacgagaaatgctttagtgtaggttactgcttggatctggactgagagacaagctaattgagcaattgcctatgaaaaatgcttgagaaatttttttgaaaaactagaaatctatcataaacatgtaacaaaaatagagacacttatatttgtcccagtgtttcatagagaagaataaaaggaatattttgakaaattactttgaaagagaatttaaacttatccctccccttttcccacacctctgaccctctccccagcagcatgctcaaaaatttgaaattaatattttttag

SEQ ID NO: 20884 - DNA, 505 bp, Homo sapiens
gagatcttttaagctctagaagccatagattttctttcctcaggctcagaatggtagaaaatcagcattagggcatctaataggccctgtctcctacttcatacattaattccttaacaacatccataggaagagacgttggttttcatggatggtaccatatgaaaatctttttttttgagacggagtcttgctctttcacccaggctggagcacagtggcgcgatctcggctcactgcaagctccgcctcctgggttcacgccattctcctgcctcagcctcccgagtagctgggactacaggcacccgccaccacgcccggctaattttttgtatttttagtagagatggggtttcaccatgttagccmggatggtctcaatctcctgacctcgtgatccacccgcctcggcctcccaaagtgctgggattacaggcgtaagccaccatgccatttgctgttttagggaatctgttcattagcttagggcaaattaccattt

SEQ ID NO: 20885 - DNA, 908 bp, Homo sapiens
gtttttaatataaagttatttatatacattatggacttttcttacacaatattttagattatttcagaataaaagaaaaaaattttttagcatcatctatgtgccaggccctgttctaagcactttaaatgtattacctcatttatgcctcacaccatactatgaaagtaagtactggccaggcatggtggctcacgcctgtaaccccagcactttgggaggccaaggcaggcagagtacgaggtcaagagatcgagaycatcctggccaacatggtgaaaccccgcctctactaaaaatacaaaaattagctgggtgtggtggtgcatgcctgtagtcccagctactcaggaggctgaggcagaagaatcacttgaacctgggaggcagaggttgcagtgagcaagtgagcagagatcacaccactgcactccagcctggtgatagagcaagactccgtctcaagaaaaaaaaaaaaggaaagaaaaagaaaaaggaaaagaaagtaagtactatgactatcattccccactttaaggataaagaaattgagacacagggatgttgaggaaatttcacaaagtcatacaactagtaagtggtatagctgggattcagattcaactagtctagctgcaaggttcatggtttactcactgacaatatgctgtgtttaaggaatgttaggaataagaacataatgcatgtcagtagttcgtgaagctgattacttgagaacatgtattgtcatgtgcacagtctgagatgctatctacatagatataaatacatatttatataaatactgtattagtcctttctcaggctgctatttagaaatactcaagactgggtaatttataaagaaaagaggtttaattgactcacagttctgcacggctggggaa

SEQ ID NO: 20886 - DNA, 908 bp, Homo sapiens
gtttttaatataaagttatttatatacattatggacttttcttacacaatattttagattatttcagaataaaagaaaaaaattttttagcatcatctatgtgccaggccctgttctaagcactttaaatgtattacctcatttatgcctcacaccatactatgaaagtaagtactggccaggcatggtggctcacgcctgtaaccccagcactttgggaggccaaggcaggcagagtacgaggtcaagagatcgagatcatcctggccaacatggtgaaaccccgcctctactaaaaatacaaaaattagctgggtgtggtggtgcatgcctgtagtcccagctactcaggaggctgaggcagaagaatcacttgaacctgggaggcagaggttgcagtgagcaagtgagcagagatcacaccactgcactccagcctggtgatagagcaagactccgtctcaagaaaaaaaaaaaaggaaagaaaaagaaaaaggaaaagaaagtaagtactatgactatcattccccactttaaggataaagaaattgagacacagggatgttgaggaaatttcacaaagtcatacaactagtaagtggtatrgctgggattcagattcaactagtctagctgcaaggttcatggtttactcactgacaatatgctgtgtttaaggaatgttaggaataagaacataatgcatgtcagtagttcgtgaagctgattacttgagaacatgtattgtcatgtgcacagtctgagatgctatctacatagatataaatacatatttatataaatactgtattagtcctttctcaggctgctatttagaaatactcaagactgggtaatttataaagaaaagaggtttaattgactcacagttctgcacggctggggaa

SEQ ID NO: 20887 - DNA, 558 bp, Homo sapiens
atgaaacaagataccataagttttcctgtgtaggtatttagattagccattgagactactgtgatagcaaatctttctctctttttgacatatatatttttaaagatattttgttgtgatatcacttagttgatgtacatctagataatttcattgtgttttcacaatgtagaagtatttttaaataatcaaggatgctacttataagaaaaataatttctaattctcacttatttgtagaatctaaaaatcaaaacaattgaatttgtggagatagacagtagaaggatggttacaagagactgggaagggtagtggggaggtgggatggggagatgggaatagttaatgcrtacaaaaaaatataaagaatgaataagacctggtatttgacaacacaaaagagtgaatatattcaataacatataaaatatattcaataataatttatttgtataatttaaaacagcagtccctaacctttttggcaccaaggactagtttcatgggggatggttttaggatgaaactgttctacctcagaccatcagacattag

SEQ ID NO: 20888 - DNA, 558 bp, Homo sapiens
atgaaacaagataccataagttttcctgtgtaggtatttagattagccattgagactactgtgatagcaaatctttctctctttttgacatatatatttttaaagatattttgttgtgatatcacttagttgatgtacatctagataatttcattgtgttttcacaatgtagaagtatttttaaataatcaaggatgctacttataagaaaaataatttctaattctcacttatttgtagaatctaaaaatcaaaacaattgaatttgtggagatagacagtagaaggatggttacaagagactgggaagggtagtggggaggtgggatggggagatgggaatagttaatgcgtacaaaaaaatakaaagaatgaataagacctggtatttgacaacacaaaagagtgaatatattcaataacatataaaatatattcaataataatttatttgtataatttaaaacagcagtccctaacctttttggcaccaaggactagtttcatgggggatggttttaggatgaaactgttctacctcagaccatcagacattag

SEQ ID NO: 20889 - DNA, 537 bp, Homo sapiens
taaatcgtcaacagtgaaatttgtaataggactgaaaatgtaaaaatcagcattttttaaaaaaatccagccatatatcatctggttaatcatgggctctgggctctgagctggggtcctgatggctgctgttaatatttccagcaagctcattaccttgtttatgtccacctagtgctcttcgcagggtgcacatctctacacgggagctgaccggcatgggcaacaaagcacctgatcccaaaatgtaacacagaatcttggcagcctccaaatgccagcacccagtaagagttaggagggcatcggggtccagcagacattgagaattttcgacaattgcatgcaraaaataagtcctctcttctttcctttttcccctagaatattcatgcttactcttcagcagcccaaattgcccttttgagccttcttcacgccatcacagatgtggagatgaaaggacagtctgttctctcgccagctatttcccacttttccactccaaactgggagctgttttacttgctgttccag

SEQ ID NO: 20890 - DNA, 694 bp, Homo sapiens
tgaaacgtggggctacattgaattatgacactatactgataatcattttcatgattttgtactatttttaggttcacttgctcctgtcctttgtggtaagtcttcttaaatacttgaagaaagctcttataatattttttaaaaatatgtaatgctagaggtcctatatcctatctgatgatatatttaactcatagggaatgttctctttttggtgttttaaagatacttcaatgtacatgtcacattacaaaatgtcactttggcatagagttggataaattatttgaacagccagctctttcttctttttaaattgatattttagtttttattaactgttggtgtttggcttgatttggtctattgaaataggcaggcttcttctgctgtagcaaaatacatttcacagctgagagttaaatgttatgcaaaattataagaacctggtgtcckgtgcgcctaatttctattcttgagatttctctcttgtcacctcagtgacaagattgttactaataaaactaaaaggaacagaaaaactcaatgaaaagttgactggaaccttgtggtcatgtgcttggtgctttagattaaaggtggactggatcaaatcagaaaaaccttaagctcaactatgattattcaggaattcagcatttatgtccaagaagagttaagtatgagtcacata

SEQ ID NO: 20891 - DNA, 535 bp, Homo sapiens
ccccatcacagcagctggcgcacctggcttgcccttggcaggcatgagatatcaaccagtagtatgagctgagtgcagcctgatgggctaagtgggcagagcaagccctgtgggcacaagcaaaactcaagcagaggcactgccggctgtggaggtctctggctggcgaagaggcactgaaaaaatcctgtatcatttccatactctatatgtgtgaagcaatacagtgtgaatcccaaagataagggtgtgcatgagtgtgggtatgcatgcctgtgctgctggtgagctgcaggaccaccatggaagggaagttagtaaaggaatgttgccctgggccaggcgcggtggctcatgcckgtaatcccagcattttgggatgctgaggccagccggcagatcacctgaggtcggaagttcaagatcagcctcaccaacatggagaaaccacgtctctaccaaatatacaaaaaaattagccaggcgtggtggcgcatgcctgtaatcccaccgttttggatggctgaggcctgca

SEQ ID NO: 20892 - DNA, 535 bp, Homo sapiens
ccccatcacagcagctggcgcacctggcttgcccttggcaggcatgagatatcaaccagtagtatgagctgagtgcagcctgatgggctaagtgggcagagcaagccctgtgggcacaagcaaaactcaagcagaggcactgccggctgtggaggtctctggctggcgaagaggcactgaaaaaatcctgtatcatttccatactctatatgtgtgaagcaatacagtgtgaatcccaaagataagggtgtgcatgagtgtgggtatgcatgcctgtgctgctggtgagctgcaggaccaccatggaagggaagttagtaaaggaatgttgccctgggccaggcgcggtggctcatgcctgtaatcccagcattttgggatgctgaggccagccggcagatcacctgaggtcggaagttcaagatcagcctcaccaacatggagaaaccacgtctctaccaaatatacaaaaaaattagccaggygtggtggcgcatgcctgtaatcccaccgttttggatggctgaggcctgca

SEQ ID NO: 20893 - DNA, 535 bp, Homo sapiens
ccccatcacagcagctggcgcacctggcttgcccttggcaggcatgagatatcaaccagtagtatgagctgagtgcagcctgatgggctaagtgggcagagcaagccctgtgggcacaagcaaaactcaagcagaggcactgccggctgtggaggtctctggctggcgaagaggcactgaaaaaatcctgtatcatttccatactctatatgtgtgaagcaatacagtgtgaatcccaaagataagggtgtgcatgagtgtgggtatgcatgcctgtgctgctggtgagctgcaggaccaccatggaagggaagttagtaaaggaatgttgccctgggccaggcgcggtggctcatgcctgtaatcccagcattttgggatgctgaggccagccggcagatcacctgaggtcggaagttcaagatcagcctcaccaacatggagaaaccacgtctctaccaaatatacaaaaaaattagccaggcgtggtggcgcatgcctgtaatcccaccgttttggrtggctgaggcctgca

SEQ ID NO: 20894 - DNA, 524 bp, Homo sapiens
tgtttattaattttatgtattgatttactattttagataatatctattttcttactgctgaaatacatgaaaaattatgtaacatataacaccccaaatctccttctacctcctcccaaaatgttgatagttattataatctcttccactgaaaaaggcttttctgtaatatcaattggttcacatgatataggtaaatagggaaatcatgttagtaaaaatgtggaacttgttgatatttttttcctaggaaaggggaaacagagcagaagtagaactatartttcaaggaaaaaagcactctgctgtcttctacacaatcaagtagccctttaagctctattttaagaaaattatttttgaatatctgtatgtagatattttcttggttcctcaaatcatggcaggttgctcttcttgtatcccaaactccccttctgtcttcatgccttttgaccataagacaagtatttccaatctattgcttttgtgcatttttaaacaacccctgaggaagcctccag

SEQ ID NO: 20895 - DNA, 514 bp, Homo sapiens
gaatggtggttgccaagggcagaggagaggagaaaatgggaagttagtgcttgatctggacagagtttcagtttgggaagatgaaaagagttctggaggcggayggtggtggctgcacagtgtgaatgtacttaacgccactaaattgtacatttaaaaatggctaaaatgataaatttaaaaacaaatagattcccaaggccctctagaggaactcccgactcaaagagatcggagaatctgggaatttttccttttaaaaaaaaaagaaagcatcccagaggattattaccatcaaggaagtttaggaaagtattgaagtccgcgctgatttataggcactcaataaatggtcactcaataatagttgccattgttactaataatgtaaatggtttcatctgtagaggttccacttgagaattacagtaataatcatggttaatatttgcaagcactgactacgtatgctgggcttttacatgtgtcatctcactgaatcctataactttac

SEQ ID NO: 20896 - DNA, 514 bp, Homo sapiens
gaatggtggttgccaagggcagaggagaggagaaaatgggaagttagtgcttgatctggacagagtttcagtttgggaagatgaaaagagttctggaggcggatggtggtggctgcacagtgtgaatgtacttaacgccactaaaytgtacatttaaaaatggctaaaatgataaatttaaaaacaaatagattcccaaggccctctagaggaactcccgactcaaagagatcggagaatctgggaatttttccttttaaaaaaaaaagaaagcatcccagaggattattaccatcaaggaagtttaggaaagtattgaagtccgcgctgatttataggcactcaataaatggtcactcaataatagttgccattgttactaataatgtaaatggtttcatctgtagaggttccacttgagaattacagtaataatcatggttaatatttgcaagcactgactacgtatgctgggcttttacatgtgtcatctcactgaatcctataactttac

SEQ ID NO: 20897 - DNA, 514 bp, Homo sapiens
gaatggtggttgccaagggcagaggagaggagaaaatgggaagttagtgcttgatctggacagagtttcagtttgggaagatgaaaagagttctggaggcggatggtggtggctgcacagtgtgaatgtacttaacgccactaaattgtacrtttaaaaatggctaaaatgataaatttaaaaacaaatagattcccaaggccctctagaggaactcccgactcaaagagatcggagaatctgggaatttttccttttaaaaaaaaaagaaagcatcccagaggattattaccatcaaggaagtttaggaaagtattgaagtccgcgctgatttataggcactcaataaatggtcactcaataatagttgccattgttactaataatgtaaatggtttcatctgtagaggttccacttgagaattacagtaataatcatggttaatatttgcaagcactgactacgtatgctgggcttttacatgtgtcatctcactgaatcctataactttac

SEQ ID NO: 20898 - DNA, 514 bp, Homo sapiens
gaatggtggttgccaagggcagaggagaggagaaaatgggaagttagtgcttgatctggacagagtttcagtttgggaagatgaaaagagttctggaggcggatggtggtggctgcacagtgtgaatgtacttaacgccactaaattgtacatttaaaaatggctaaaatgataaatttaaaaacaaakagattcccaaggccctctagaggaactcccgactcaaagagatcggagaatctgggaatttttccttttaaaaaaaaaagaaagcatcccagaggattattaccatcaaggaagtttaggaaagtattgaagtccgcgctgatttataggcactcaataaatggtcactcaataatagttgccattgttactaataatgtaaatggtttcatctgtagaggttccacttgagaattacagtaataatcatggttaatatttgcaagcactgactacgtatgctgggcttttacatgtgtcatctcactgaatcctataactttac

SEQ ID NO: 20899 - DNA, 548 bp, Homo sapiens
aaccaccgtgcctggcctaaattgcttgtttataatcttttggttaaaacctttattgaaatttaacaatgagaaggaactaatggattaggaagagtaaggcctttggaatcagataaacctttacattttgcctggatcacttacttgctgtttgacttgggcaaatgtatttattcaacaagtatttagcttctagaatgtgctgaacaaagtttcaggcactgggaatagaggcaaarggaataggcaagtgctgtgttccctgggaatgtattccaatggggaggacagtaaacaggcaaataaacaaataaatctcaggttgtgcaaagagctaaatttagagtatttagtggtgactgggcagagaagatgccagttgccctgagctggttagagaaaacctcttggcaaaggtaatgtttgaactgaaaggaaggaaggagtcagcctcaagacagagaagttatatgtgttccagagaaaatggcaagtgcaaaggtcctgaggtcagactgaactcagtgaagaaaaaaatctaacat

SEQ ID NO: 20900 - DNA, 521 bp, Homo sapiens
aggagataacaatcagttagaaatactatgaatttatggataatataaattagaaggaggggtttctagagcagaagaagttgcatacctagtgcttgcagggggaggtgccaacaagcaggaagcaaaatcatgattcagaacctgggagaggacagcaattggcaatgtgaggaagtgcggaagccagttgtgaaatacggggctgaaacaaggaagtttgttcaaagtctaagtagggtatgttatagctttgctatatgttatagttttgctaaattttataaatgttgctatatgttatagctttccctgcatgaacagacactgactactggagtgcccttactctagtcagaatgaggtttattctatggagacattgaacttagagaggttgcatacattggaaacaccatgcacagctgggggtggagtcagtctcacaatacacagtgagatatcccatcaattacttccgatagcrctggcagactggcctataactgtcccctcatgca

SEQ ID NO: 20901 - DNA, 521 bp, Homo sapiens
aggagataacaatcagttagaaatactatgaatttatggataatataaattagaaggaggggtttctagagcagaagaagttgcatacctagtgcttgcagggggaggtgccaacaagcaggaagcaaaatcatgattcagaacctgggagaggacagcaattggcaatgtgaggaagtgcggaagccagttgtgaaatacggggctgaaacaaggaagtttgttcaaagtctaagtagggtatgttatagctttgctatatgttatagttttgctaaattttataaatgttgctatatgttatagctttccctgcatgaacagacactgactactggagtgcccttactctagtcagaatgaggtttattctatggagacattgaacttagagaggttgcatacattggaaacaccatgcacagctgggggtggagtcagtctcacaatacacagtgagatatcccatcaattacttccgatagcaytggcagactggcctataactgtcccctcatgca

SEQ ID NO: 20902 - DNA, 490 bp, Homo sapiens
taccagaaacattgcaaagataactaaagatattgatgtgaaacatggaagcagcatcctcttacttaatgtgctgctaacgaaataaatataagtaaaccaaggctgactacatatcccttatgttatttttycaccatggttctaatcttaagaacatcaaatatatgagacatgatgagtgacaatgacaaagatactttgcaatacagtctaaaccaaagcatatggcatgtgacatatatagatatgtatagatccatttattgatatgtgtgtatatatatctatgtatctgtatctcatatgacatgtaataatatactgccaagaacaagagtagaagttattaaaatatgttaaaaaaaaactaatacgaaagttaggatacaagtcaagagaacaaataatctaagaaaaatgggaatatagtttcttcagttgtttattcatatgccaaacagtgctaagtgttagaggttaaggatgt

SEQ ID NO: 20903 - DNA, 481 bp, Homo sapiens
tggctgcagctgctgcctggttaccgaagacatttttctccccttgactgcccagtggtggagaatgggtcactgggtggggtatgcatattatcttccacattctattttcagatgtctacctatgaggaccttcattctataggagtgcttctagcaacrggacactgttaataattgagaattggtgctattaatgtccagaccattcttcttgtttttttttttttttttggattacaggcatgagccaccacgcctggtcccagcccattccattctgataaaatgtgaagatggttcccaatctagaatatttgctgttccagcttttctaagaatatttgttaccaccattccttcactgaactcctctaaaacaaccacaaaagatttcatgttttttattattatgattaatggcagatttgttaacaaaaataggggatttggagagtgctggtttgtggggcaagtgttt

SEQ ID NO: 20904 - DNA, 559 bp, Homo sapiens
tatttatgataactaaggaaatatattaatgaaatactttggctattttcttctgattgagtatccaggctggttctccggacgtattttctgggcaagataaagagacaaagcacaatgctttttagaaatgaaatgttcacctcatctatggctcacataggcatttcaaagtgggacctaatgcttttagaaactatatttacacagcataaaataggaacatgtattccacttagagtgaaaactattcatgcctttcttatrtggtaaataacatattgtgagttaaggatgtttaatagacactaaataatgtaatacatgagaaaggaaactatgattggctagcccagttacctcggtcttacaatatatttttttaaattgaactttctatcattacagtagtgatttttgttttttttctgtctttttttctttttgaacaagaaaaaacaagattgacaatgagaattgtcacatgcagcatgttgttagatttcagagttataacaaaataaaaattgaagtaatttcacatcaaatattgcccaga

SEQ ID NO: 20905 - DNA, 575 bp, Homo sapiens
tgaaggaatggaatcaggccacattacaggggcaagaggagccttgtggccagaggttctagaggtcagcagcaagtcatgcatctgaagaggaagttgattgctgtacctcaagctgaaacagaaactgcggtggctagcaaggaagggtccccacctgtgcgcctcagcccctyggccattgccagcttccaacagaccacagagacttttgggggaaaacttttttattgaagtgtaacagacatacagaaaagtgcacaaataaggaaagtgcacaggggagcgatggctcgatacattttcacaaaggcagacagcggggtaaccagcccccagctcaaggaacagaacattccccgccccggagaagctcccttcaagtctttcccatcctaagcgataaccgttatcctgattccaacagcagtgatgatttttgccgttttttgaacttgatgaaatggcagcacataacacgtattcttttgtgtaagacttacttactacaaactttgtatgtttgtagcaacagccttttgaccctgtctcttcctccatgccctcaaagagaa

SEQ ID NO: 20906 - DNA, 575 bp, Homo sapiens
tgaaggaatggaatcaggccacattacaggggcaagaggagccttgtggccagaggttctagaggtcagcagcaagtcatgcatctgaagaggaagttgattgctgtacctcaagctgaaacagaaactgcggtggctagcaaggaagggtccccacctgtgcgcctcagccccttggccattgccagcttccaacagaccacagagacttttgggggaaaacttttttattgaagtgtaacagacatacagaaaagtgcacaaataaggaaagtgcacaggggagcgatggctcgatacattttcacaaaggcagacagcggggtaaccagcccccagctcaaggaacagaacattccccrccccggagaagctcccttcaagtctttcccatcctaagcgataaccgttatcctgattccaacagcagtgatgatttttgccgttttttgaacttgatgaaatggcagcacataacacgtattcttttgtgtaagacttacttactacaaactttgtatgtttgtagcaacagccttttgaccctgtctcttcctccatgccctcaaagagaa

SEQ ID NO: 20907 - DNA, 487 bp, Homo sapiens
cagagcaagaccctgctctaaaaaagaaaaattaaaataaaaaaattttaatgataaaatcagaagagtcccctgctttccaggagctcaccattgacaggaggatatcaacaccaagcaattccaggagggagagcattccaaaagggaaattatagacagttacacacacatagaccaagaaaactcaacctattctaacaggacctcctgaaacaggtgccgttgtacatgatgtgtgaaggtgtttagaggctaaccaggcaaaagaagggcaagagggaatagcacttcagkcaagggaaaatctcatatgcaaaggtccagtggcagggaaggtgaggggtgcaggaggaagtgagagaagcccacttctctctgactggagaacagagaacaaggggaacagagggaaggaagaggggcggtaagggaatagaccatgaccttgtggtccatgatgtggaattcaaactgtctcctaagg

SEQ ID NO: 20908 - DNA, 571 bp, Homo sapiens
ataaaatactcctaggaatcaataagaaaactacagtaaacccgatagaaaaaggggcaaaagtcttcagcacattacaaatggtatgtttgtataatggatttgtatccattaattggatccacatggccaattaatatatgaaaagatatgtgacttcatcagccattaggaaaataaagattaaaactgcaatgagctaaaacagaatggaaaaaagaatataccaaatgttagaaaagatgtgaaaaaatagaactctcatacagtgttgtaaattgtcatagtcatgttggaaaactgttttgctccctttcctacagctgaatatatgcacatcctatgacctggcagctccttatttgtatatatacaagataaatatgttcatgttcaccaaaaatcatgttatgtttttagtggcaccattcaagttgaaaattatccaacttcccataaacagtaaaatgggcaartaagttttgatctattcatacaaaaaaatattttacagcactgataatgaacaactattgcaataccttctcctactaatgtgtctcagaaatgt

SEQ ID NO: 20909 - DNA, 728 bp, Homo sapiens
attcactaaaatagtgattgtcaacttccatgtatgtaaaaatcataataggtaccttactaaaaattttgaatcttgaaagccagcttaagaggctttgaattagcaagccttggaaagaaccttggaatattatggctctctagagggacagaaattgataggatatatgtatatttgagagggagtttattaaggagaatggactcacacaatcacaaggtaaagtaccatgataggccatttgcaagttgaggagcaaggaaaccagtagtggatcaaagtcccaaaacctcaaaagtagggaagctgacagtccagccttcagtctgtggccaaaggcccargagcccctggaaaaccactggtataaattcaagagtctaaaggctgaagaatttggagtctgatgtttgagggcagaaagcatccagcataggagaaagatgaaggccagaagactcagcaagtctagttcttccatgttcttctgcctgctttatcctagccacgctggcagtatttagatggtgcccacccagactaagggtgggtctgggtctcccagttcactgacttaaatgttaatctcctttgacagccccctcacagacacacccaggaacaatactttgcatccttcaatccaatcaagttgacaatcaatattaaccatcacacttgggaatgtgaattttttaataaataccccaagtaattacaatgca

SEQ ID NO: 20910 - DNA, 1398 bp, Homo sapiens
ggtgagtccgcagtacaaagtgaaaacaagtttattaagaaagtaaaggaataaaagaatggctactacataggcagagcagccccaagggctgctggttcccctttttatggttttttcttgattatatgctgaataaggagtggattattcatgagttttcagagaagggatgggcaattcctggatgagcggtgaggatgaccagaggttctgttgttgccatctcgattttggtgtgttttgtccggcttctttcctgaaacctcttttatcagcaaggtctctatgacctgtgtcttgtgtgacttcctatttcatcctgtgactaagaaagcctaacctcccgggaatgcagcccagtaggtctcagccttattttacccagccacagtacaagatgaagtcactctggttcaaacatctctgacaatatggacttgtagaacacatatttttaataaaaattaactttatatctaaaggatttttgtgaatatgcagaattttgctgctaattactatttgtcacaaatcatgggaaaaagtcacctagagatcttagttatcaagtaattctagagttaataaagagtctaaaatatgagatgttaacccaaactttctaaaagtaatcgttcacaatgtctgaaacaactacatggaagctatatacatcatattatgaatagtattaaggccatatgttatttacatgataaaatttcctgtcatttttttactttaagtttttaagcattttacattctttccttgcttttttctctcccttaagaattgaatatatatatacatgttcttaattattttaaaggattattgtagtttcttatatgagtcatttcctaaacatgcataattagtgcatgtaatatttaaactacagggagatgcctcaaactctcacaaacatgtttattttaaaaaaagggaaaagaagggaataaataaacccttcatgctaaaactaagaaaactgagacaggaaatctactttataaaacaggaaggcattaaattccttagagtccaattaaaaggtaattaaatgtaaaagaaactctactataagcatggtattaatatatctgataatgttaccataagaatgatcaactggaatacctagagaatagggagatgagagagcaacaatatgatactattttgcttaacactgttcagttcygagggatgctggtactgtacacactattttcctgggaggtgatttctgttaagagacacaagtggctcattttacccatgacaatctcatctccttttgttcagatattttgttccccccccgccaaaaaaaaaccttctaattttttagttccctttttcaggttttccaattttagaaaggaggtg

SEQ ID NO: 20911 - DNA, 1398 bp, Homo sapiens
ggtgagtccgcagtacaaagtgaaaacaagtttattaagaaagtaaaggaataaaagaatggctactacataggcagagcagccccaagggctgctggttcccctttttatggttttttcttgattatatgctgaataaggagtggattattcatgagttttcagagaagggatgggcaattcctggatgagcggtgaggatgaccagaggttctgttgttgccatctcgattttggtgtgttttgtccggcttctttcctgaaacctcttttatcagcaaggtctctatgacctgtgtcttgtgtgacttcctatttcatcctgtgactaagaaagcctaacctcccgggaatgcagcccagtaggtctcagccttattttacccagccacagtacaagatgaagtcactctggttcaaacatctctgacaatatggacttgtagaacacatatttttaataaaaattaactttatatctaaaggatttttgtgaatatgcagaattttgctgctaattactatttgtcacaaatcatgggaaaaagtcacctagagatcttagttatcaagtaattctagagttaataaagagtctaaaatatgagatgttaacccaaactttctaaaagtaatcgttcacaatgtctgaaacaactacatggaagctatatacatcatattatgaatagtattaaggccatatgttatttacatgataaaatttcctgtcatttttttactttaagtttttaagcattttacattctttccttgcttttttctctcccttaagaattgaatatatatatacatgttcttaattattttaaaggattattgtagtttcttatatgagtcatttcctaaacatgcataattagtgcatgtaatatttaaactacagggagatgcctcaaactctcacaaacatgtttattttaaaaaaagggaaaagaagggaataaataaacccttcatgctaaaactaagaaaactgagacaggaaatctactttataaaacaggaaggcattaaattccttagagtccaattaaaaggtaattaaatgtaaaagaaactctactataagcatggtattaatatatctgataatgttaccataagaatgatcaactggaatacctagagaatagggagatgagagagcaacaatatgatactattttgcttaacactgttcagttctgagggatgctggtactgtacacactattttcctgggaggtgatttctgttaagagacacaagtggctcattttacccatgacaatctcatctccttttgytcagatattttgttccccccccgccaaaaaaaaaccttctaattttttagttccctttttcaggttttccaattttagaaaggaggtg

SEQ ID NO: 20912 - DNA, 2244 bp, Homo sapiens
tgtcagtaatttagcctgwctccctttgcaaatctatttcaaatttatcaaggatttagaattcaaaggaaaaagtatgtaggtcattgctaagcccattaacagcagcattatcttgccaccaagtggtagtttctgaattgcactgcaggagtttgtggtattttcaagagtatatcttttataccatatttagtatttgctaaaaatcatcaaacccattatgaatgtgaaaataatggataatatatgcctttcccaaagtattcatatttgagaggtgtttataataaaaagacttggtatttgtgcttcctaatttctggattgattcaaactccatcaggtttcacagtgttcaagataaacccaaaatgattaagtgtaaatattctaaaagctttgtttaggactttgaattttaagacatgatatcatttgctctcctttaatctttgctaaaggttgaattctgttaactaaaaagatatctgcaatgatgtaattagttaagatgaagtcatattggaagagggtggtcttcttatctaatacaattagagaagacaggtatttggacacagactcacagagggaagatgatgtgcagacacatagggagaagatagccatatgagggtggaggcagagattagactaatgcatatacaagctgacatcaaggattgccagcaaataccagaagctagaagcagcagaaaaaaggagattcttctttacagggtgcagagggccatgatgacaccttcgtttcagacttctagcctccagacctgtaatacaataaatttcttttgttttaaaccactcagtttgtggtagcttgttatgacagcgccagaaaactaaaataattttcctttcaaacttaaagtgtttctgctagatcactagttagacactgatgttgagaagactaagatttatggaacatttagacctatttgggctcccccaaagagaaccgcctttactaaattgttagtttattccctgttacctgaagacaaaaatcaacatagattcagaatgtaaatgtcaggatggagctgaaagtaaacaaataagaataataacagtaaaacaattggagggaccatctgtgttagctacttggctttatccaaaggaaaaaataaaatttttctgtttttattacaagaggtagtttcgcaatttatggcaagtggccaccgctcaaagttaggctcctatactcacacagagactgagaggcgggtattaccttcctcaatggttacattccaaatatatgtttcctaggtcccaaacaaagacagtcttgagtttataagctagtaagccttttaaaattatttacatcttaaagtcagagaaagaatttgcaattgcaagcttattaacatgaatgctctgagaaaagggaggggtgagtcctctggggttaggctatctgaattctgtaagggctagggtgaatggaagatcaggggcctatgggcaggggcagaaagaagcctctctaaaggttagtcaagctgagggaaaggttacggccctcttggtcagcctttcccattagttattttcaaacctgatagaaggccttgggtagcattctcaagatcttctccctcagtccaacctaaagcctgttcttttaatctcctgaatggttgcacttcaaactatcctaggattctctatcatatgtaaaactcttatgctctggcatggacaacagcctcttcattcatccttctcatcactgtaaacattttagaatttaagcctgattttgtgattccgctgcttagtctttcactaatgcatcattgtcaaaggtcaaaaaaaaaaaaaaaatcaacctttgagaaacttcactaacttggctaattggaaaagttttccccacttcttgcaagacgaacgccatcacctgtgcaagaagaaaacaattaggtagagactgacctgagagaatatcacatctttttaatcaaagctcagctgataactagctttgtgacattgagcaagtcacagaatctatggtaaaacaactaatcaattaaaattaaattagagaagatatctcctattttccagtccatagcttattttggcaaacggggcttggaagcacaaatgttttcttctttggtcttttgtttttgattaaatttatctcctgcaggtagaggatgttacagcacaagggagatttttatataataattt

SEQ ID NO: 20913 - DNA, 533 bp, Homo sapiens
tttttcactattcaagtatttgagtaatacagaaatttactcataaacattcattaaaatgtgatatgaacttctaagaatccaaaccaaaatttacaaaaaatcatgcggatataaattataaatgtttaaaatcaagttttaaatttcttacttataactaatctgtcaattgatttcttgggaattttaagagtaggttcagaaggtacattatctttatctgctggagtacatgaaagaaataaaataataacaataaagttatctattcaacactttgccaayaagtcttttttttttatttccataatcattcacaaatgaacagctcacattaaataaatcacttgtatacttagtgaaaatagtagttatggccaggcgcggtggctcatgcctgtaatcccagcactttgggaggctgaggcgtgtggatcacgtggggtcagagttcgagaccagcctggccaacatggtgaaaccccgtctctactaaaaatacaaaaaattagacaggcatggtggtgtgc

SEQ ID NO: 20914 - DNA, 587 bp, Homo sapiens
caaggctgctaggagtcctcaggcccaagtctgctgtcagaggagctctgcatctcccaggaataagcctgccttagtgtccctgctgtgatcagtcattggctaggagtagccaggaagtaggtggggtgggagagtggggcagagggagggcatagatccccaggaaatgcccaggtggatttcagagtgcagcagtcggagcctctgcttaattacattccctgtwattgtagaccttcaaggcacattctattagtaccgtggtagatagatgaatgggtggattataaggtagataagagatacataggtaaaatatgtatatatatatataatctctgtatttattgtaatttgttcagcccttgaggagcaactgcctcaacttcccttttctcccttcatttcaggcattttaatcaatactcttttaagactgacaatctaattttccaagccacaaaagaatgatcaattttattatgaaaaaatttaaaacttgtagttggtaaatggcaagacaaattgagaaatattttttgcaacatatatgataaaaagactaaatcctttagtgtgtggaa

SEQ ID NO: 20915 - DNA, 587 bp, Homo sapiens
caaggctgctaggagtcctcaggcccaagtctgctgtcagaggagctctgcatctcccaggaataagcctgccttagtgtccctgctgtgatcagtcattggctaggagtagccaggaagtaggtggggtgggagagtggggcagagggagggcatagatccccaggaaatgcccaggtggatttcagagtgcagcagtcggagcctctgcttaattacattccctgttattgtagaccttcaaggcacattctattagtaccgtggtagatagatgaatgggtggattataaggtagataagagatacataggtaaaatrtgtatatatatatataatctctgtatttattgtaatttgttcagcccttgaggagcaactgcctcaacttcccttttctcccttcatttcaggcattttaatcaatactcttttaagactgacaatctaattttccaagccacaaaagaatgatcaattttattatgaaaaaatttaaaacttgtagttggtaaatggcaagacaaattgagaaatattttttgcaacatatatgataaaaagactaaatcctttagtgtgtggaa

SEQ ID NO: 20916 - DNA, 587 bp, Homo sapiens
caaggctgctaggagtcctcaggcccaagtctgctgtcagaggagctctgcatctcccaggaataagcctgccttagtgtccctgctgtgatcagtcattggctaggagtagccaggaagtaggtggggtgggagagtggggcagagggagggcatagatccccaggaaatgcccaggtggatttcagagtgcagcagtcggagcctctgcttaattacattccctgttattgtagaccttcaaggcacattctattagtaccgtggtagatagatgaatgggtggattataaggtagataagagatacataggtaaaatatgtatatatatatataatctctgtatttattgtaatttgttcagcccttgaggagcaactgcctcaacttcccttttctcccttcrtttcaggcattttaatcaatactcttttaagactgacaatctaattttccaagccacaaaagaatgatcaattttattatgaaaaaatttaaaacttgtagttggtaaatggcaagacaaattgagaaatattttttgcaacatatatgataaaaagactaaatcctttagtgtgtggaa

SEQ ID NO: 20917 - DNA, 587 bp, Homo sapiens
caaggctgctaggagtcctcaggcccaagtctgctgtcagaggagctctgcatctcccaggaataagcctgccttagtgtccctgctgtgatcagtcattggctaggagtagccaggaagtaggtggggtgggagagtggggcagagggagggcatagatccccaggaaatgcccaggtggatttcagagtgcagcagtcggagcctctgcttaattacattccctgttattgtagaccttcaaggcacattctattagtaccgtggtagatagatgaatgggtggattataaggtagataagagatacataggtaaaatatgtatatatatatataatctctgtatttattgtaatttgttcagcccttgaggagcaactgcctcaacttcccttttctcccttcatttcaggcattttaatcaatactcttttaagactgacaatctaattttccaagccacaaaagaatgatcaattttattatgaaaaaatttaaaacttrtagttggtaaatggcaagacaaattgagaaatattttttgcaacatatatgataaaaagactaaatcctttagtgtgtggaa

SEQ ID NO: 20918 - DNA, 527 bp, Homo sapiens
tatatactgcacacctccgagtgtatatacaccgtgcactgattttgaagtctttgtgaagcttctctgtccataagggcagttcasgctgtgactgctgagtccgtcagctcttttccagccacagatttcttcacaggtgtgggtgtcctgtgtgcgggccactaaaccaggagctgttttcatgcgtcgttcctggtccccacttggtcttttttcatttcactcagcccccgaccctccaaccctgtccagtctcacgatggggctgaccctaggaccagcccacagggatgctggcaccagcacggaggaggcccatggccggggccacccgtccagcgtctagcagggaggctgcatccgtgtcctactggcgcctcaggccccgcagaaagccgcagattttaaaaaagttttccctgcctcctttcacagacagatgcttcccaactgcctgtcacacagtgagggcacgtgtgggtcccacatgctccagcaccctgcttggcggcccatggccagct

SEQ ID NO: 20919 - DNA, 527 bp, Homo sapiens
tatatactgcacacctccgagtgtatatacaccgtgcactgattttgaagtctttgtgaagcttctctgtccataagggcagttcaggctgtgactgctgagtccgtcagctcttttccagccacagatttcttcacaggtgtgggtgtcctgtgtgcgggccactaaaccaggagctgttttcatgcgtcgttcctggtccccacttggtcttttttcatttcactcagcccccgaccctccaaccctgtccagtctcacgatggggctgaccctaggaccagcccacagggatgctggcaccagcacggaggaggcccatggccggggccacccgtccagcgtctagcagggaggctgcatccgtgtcctactggcgcctcaggccccgcagaaagccgcagattttwaaaaagttttccctgcctcctttcacagacagatgcttcccaactgcctgtcacacagtgagggcacgtgtgggtcccacatgctccagcaccctgcttggcggcccatggccagct

SEQ ID NO: 20920 - DNA, 527 bp, Homo sapiens
tatatactgcacacctccgagtgtatatacaccgtgcactgattttgaagtctttgtgaagcttctctgtccataagggcagttcaggctgtgactgctgagtccgtcagctcttttccagccacagatttcttcacaggtgtgggtgtcctgtgtgcgggccactaaaccaggagctgttttcatgcgtcgttcctggtccccacttggtcttttttcatttcactcagcccccgaccctccaaccctgtccagtctcacgatggggctgaccctaggaccagcccacagggatgctggcaccagcacggaggaggcccatggccggggccacccgtccagcgtctagcagggaggctgcatccgtgtcctactggcgcctcaggccccgcagaaagccgcagattttaaaaaagttttccctgcctcctttcacagacagatgcttcccaactgcctgtcacacagtgagggcacrtgtgggtcccacatgctccagcaccctgcttggcggcccatggccagct

SEQ ID NO: 20921 - DNA, 613 bp, Homo sapiens
ttttctaacagtcataactgactaaatktatcaccttctagacccctgtctccctgctgcttccacgcccagctctgcctctgcagggcctgggtctgggccctgtggggactgctgggtgggcggtgctctggggtctttgcacatcagaaatgcctgcattttaccccctactcttggatggtactttcactgggcacacatgacttgtctccccagggtgtgggttacctatccgctatctcccaccatctgacgttgccgaggagacgtgtcctatcagcccaattatttgctgttcctttttaaaccacctgtcttttctgccaagtgttcagacattcccttctacttcatgctcagctgcagaacatgacatgcctgggtggacttatttccccttatcccatcagtgttggagatgggctcctgtctcgagttttgaaaacctaccaggtcctctttccagtctcggcccctggggctctgagtctatatatactgaccctctccatctacattctggcccctggggctccgagtccatatatactgaccctctccatccacactctggcccccttccagtcccagcacctggggctccgagtcc

SEQ ID NO: 20922 - DNA, 613 bp, Homo sapiens
ttttctaacagtcataactgactaaatttatcaccttctagmcccctgtctccctgctgcttccacgcccagctctgcctctgcagggcctgggtctgggccctgtggggactgctgggtgggcggtgctctggggtctttgcacatcagaaatgcctgcattttaccccctactcttggatggtactttcactgggcacacatgacttgtctccccagggtgtgggttacctatccgctatctcccaccatctgacgttgccgaggagacgtgtcctatcagcccaattatttgctgttcctttttaaaccacctgtcttttctgccaagtgttcagacattcccttctacttcatgctcagctgcagaacatgacatgcctgggtggacttatttccccttatcccatcagtgttggagatgggctcctgtctcgagttttgaaaacctaccaggtcctctttccagtctcggcccctggggctctgagtctatatatactgaccctctccatctacattctggcccctggggctccgagtccatatatactgaccctctccatccacactctggcccccttccagtcccagcacctggggctccgagtcc

SEQ ID NO: 20923 - DNA, 613 bp, Homo sapiens
ttttctaacagtcataactgactaaatttatcaccttctagacccctgtctccctgctgcttccacgcccagctctgcctctgcagggcctgggtctgggccctgtggggactgctgggtgggcggtgctctggggtctttgcacatcagaaatgcctgcattttaccccctactcttggatggtactttcactgggcacacatgacttgtctccccagggtgtgggttacctatccgctatctcccaccatctgacgttgccgaggagacgtgtcctatcagcccaattatttgctgttcctttttaaaccacctgtcttttctgccaagtgttcagacrttcccttctacttcatgctcagctgcagaacatgacatgcctgggtggacttatttccccttatcccatcagtgttggagatgggctcctgtctcgagttttgaaaacctaccaggtcctctttccagtctcggcccctggggctctgagtctatatatactgaccctctccatctacattctggcccctggggctccgagtccatatatactgaccctctccatccacactctggcccccttccagtcccagcacctggggctccgagtcc

SEQ ID NO: 20924 - DNA, 613 bp, Homo sapiens
ttttctaacagtcataactgactaaatttatcaccttctagacccctgtctccctgctgcttccacgcccagctctgcctctgcagggcctgggtctgggccctgtggggactgctgggtgggcggtgctctggggtctttgcacatcagaaatgcctgcattttaccccctactcttggatggtactttcactgggcacacatgacttgtctccccagggtgtgggttacctatccgctatctcccaccatctgacgttgccgaggagacgtgtcctatcagcccaattatttgctgttcctttttaaaccacctgtcttttctgccaagtgttcagacattcccttctacttcatgctcagctgcagaacatgacatgcctgggtggacttatttccccttatcccatcagtgttggagatgggctcctgtctcgagttytgaaaacctaccaggtcctctttccagtctcggcccctggggctctgagtctatatatactgaccctctccatctacattctggcccctggggctccgagtccatatatactgaccctctccatccacactctggcccccttccagtcccagcacctggggctccgagtcc

SEQ ID NO: 20925 - DNA, 568 bp, Homo sapiens
tctgcctggatatttccaatgtatctgttaaggcttaccttcaggaagcttcttgacccccaatattgtaagacactcctctcttgtgctcctgggcaaccctctatttaccctgatcgtggcacttaccacactgcattctgaaataatttccacctgtctgtctgctccactgcactgtaaggtccgggttctcactgctgtattccagtgcttatcatacaattggtgctcaacatttgtggactgggaaaaatataagtgggtaaagtttggtattaatgtaattaagttttctatctttcaatttcctcaaataaccaaacattaatatattttatgctaatgacaaatttagttcagaataagaatgtaaatttgtctctgatggtkgaaggggtcaggggacccctaaggctatttctttacccctcctaatatctagtgcacatcgacaccgatttttgtcagcaggtacaccagtaatctagaaatagaatgccaggcatgggatgagcatgagcatatactttgctgtgttttcaagtatcacctgcagacacacagt

SEQ ID NO: 20926 - DNA, 548 bp, Homo sapiens
agtccaatttgagacaaagaattttgtacccttttactatctcgttatcttcactctacggtttggtctttgtgatttcagatctaggtaattattgcattgtcttayattataaggaaatggcactgttttgcaaaaatatacaatgattatttagagtcatatttgttttaactggttttaacacttaccactcatccttttgtgccatgattcctcattctcgtgctcttagacttatggttggtgaagattctgggtctctgagacagcaggcacatgggcaaagaggaataactatcctccccttcctctggcgctctctccatcagccagtgtttccaggattggttttcctctattaatcatcacctgccctgtagtcagcaacgtttttgcaaacctttaatcgaaacacgaggttgtcttcagtcgtggttgtcagcgttgagaattttcttctttctctgagttttcacggatgagaaactgcgctgagggctgctacagatgtcatttaaaatttttaacttttcttcatcaacata

SEQ ID NO: 20927 - DNA, 553 bp, Homo sapiens
gtgggctccacccagttcgagcttcccagccgctttgtttacctaatcaaacaactaactcggcaatggcaggtgcccctcccccagcctcgctgccgccttgcagtttgatctcggactgctgtgytagcaatgagcaagactccgtgggcgtagaaccctccgagccagctgtgggatataatctcctggtgtgccgttttttaagcccattggaaatcacagtattagggtgggagtgacctgattttccaggtgccgtctgtcaccgctttctttgactaggaaatggaattccctgaccccttgcctttcctgggtgaggcgatgcctcacccttcttcggctcacgcacagtgtgctgcacccactgtcgtgcacctactgtctggcactccccagtgagatgaaccctgtacctcagttggaaatgcagaaatcacccatcttctgcatcgttcacgctgggagctgtagactggggctgttcctattcagccatcatggctcctccccctgggttttcctattttctaaggtccaagaatagtgg

SEQ ID NO: 20928 - DNA, 553 bp, Homo sapiens
gtgggctccacccagttcgagcttcccagccgctttgtttacctaatcaaacaactaactcggcaatggcaggtgcccctcccccagcctcgctgccgccttgcagtttgatctcggactgctgtgctagcaatgagcaagactccgtgggcgtagaaccctccgagccagctgtgggatataatctcctggtgtgccgttttttaagcccattggaaatcacagtattagggtgggagtgacctgattttccaggtgccgtctgtcaccgctttctttgactaggaaatggaattccctgaccccttgcctttcctgggtgaggcgatgcctcacccttcttcggctcacgcacagtgtgctgcacccactgtcgtgcacctactgtctggcactccccagtgagatgaaccctgtacctcagttggaaatgcagaaatcacccatcttctgcatcgytcacgctgggagctgtagactggggctgttcctattcagccatcatggctcctccccctgggttttcctattttctaaggtccaagaatagtgg

SEQ ID NO: 20929 - DNA, 513 bp, Homo sapiens
  misc_feature (1)...(513): n = A,T,C or G
annnnnnnnnnnnnnnnnnnnnnnnnnnnnnnnnnnnnnnnnnnnnnnnnnnnnnnnnnnnnnnnnnnnnnnnnnnnnnnnnnnnnnnnnnnnnnnnnnnnattttttattgcgtctatttgattcttctctcttttcttctttattagtcttgctagcagtctatcaattttgttgatctttcaaaaaaccagctcctggattcattgaktttttgaatgaatctttccaccaaatattagaaacatatgtacccaaggagtgttgtttcgttttgtttttgtttttgttttttgtatcaaataggctagataatgtatctttttttttttaattttagtttaagttctggaatacatgtggtgaatgtacaggtttgttacataggtatacatgtgccatggtggtttgctgtacctatcaacccgtcatctaggttttaagccccgcatgtgttaggtatttgtcctaatgctctccatcccctttcccccaaccccccaacaggcccca

SEQ ID NO: 20930 - DNA, 513 bp, Homo sapiens
  misc_feature (1)...(513): n = A,T,C or G
annnnnnnnnnnnnnnnnnnnnnnnnnnnnnnnnnnnnnnnnnnnnnnnnnnnnnnnnnnnnnnnnnnnnnnnnnnnnnnnnnnnnnnnnnnnnnnnnnnnattttttattgcgtctatttgattcttctctcttttcttctttattagtcttgctagcagtctatcaattttgttgatctttcaaaaaaccagctcctggattcattgagtttttgaatgaatctttccaccaaatattagaaacatatgtacccaaggagtgttgtttcgttttgtttttgtttttgttttttgtatcaaataggctagataatgtatctttttttttttaattttagtttaagttctggaatacatgtggtgaatgtacaggtttgttacataggtatacatgtgccatggtggtttgctgtacctatcaacccgtcatctaggttttaagccccgcatgtgttaggtatttgtcctaatgcyctccatcccctttcccccaaccccccaacaggcccca

SEQ ID NO: 20931 - DNA, 593 bp, Homo sapiens
gtcccagcaaccagcaaagttcctgcctattggagggcctgcctggctcctgattgaaaggaagaatcaatgagtgggtgagtgaatgaagggcaacagccttccttctttgcagctgcagaggctgggcagttattgggccatgcaggactcaatcagtctgccctttcttgttttctggtgccctccagccttgacgccatgtttagaccattgatattcacagaataatttccagcattgattactcagatggaacaccctccctcccaagctccgccrccttcctcagtcttccccaccacaggcgactccaccgagtttcctgattaattcccctccataaacattctgatgaagccgccagctctcgccaggcagcctcccagagcaaggattatttcacaaagctgcttttctctttgtgacctgtgttcattagctgctgcaagggtcacagtctgggctgcttcagtggggccacctctgggcaggcagttcccctagaggagaagctcttcccagcctgcccagggtggagaaggtcacccctgcccagacccagtggcctggaagccgtgggaagtagcaca

SEQ ID NO: 20932 - DNA, 520 bp, Homo sapiens
acacaaaactagattatgctatccttggaaaactttggaaactgaactgtaaacagtatagagaattggtagggagttagaaaatgaagaaaaattaaaggataccaaasaattggagaatgaggaaaaattgtagaataatggagaatcagagaattatgaaaagttgcttggttttattttttaggagatgatctatttctacaaaaaagtgctggaatttgtggtagagttgggaaaacaccccccaatcctacagatccagtgtttaggtgtaaacaccaacccgtgaaatttaagttggtggcccttgggagtcatggaagaaattgagcttttagagtaaattagcaattaccatgctaacttattcagaacttaatactgaggtattgtttttattattatgttatggcatgctgctttataatgcacttaaataatctgtgccatcagtgttttgtgtctttaactataagctccttgagggcagtggttgtactatttatttcttaggatc

SEQ ID NO: 20933 - DNA, 520 bp, Homo sapiens
acacaaaactagattatgctatccttggaaaactttggaaactgaactgtaaacagtatagagaattggtagggagttagaaaatgaagaaaaattaaaggataccaaagaattggagaatgaggaaaaattgtagaataatggagaatcagagaattatgaaaagttgcttggttttattttttaggagatgatctatttctacaaaaaagtgctggaatttgtggtagagttgggaaaacaccccccaatcctacagatccagtgtttaggtgtaaacaccaacccgtgaaatttaagttggtggcccttgggagtcatggaagaaattgagcttttagagtaaattagcaattaccatgctaacttattcagaacttaatactgaggtattgtttttattattatgttatggcatgytgctttataatgcacttaaataatctgtgccatcagtgttttgtgtctttaactataagctccttgagggcagtggttgtactatttatttcttaggatc

SEQ ID NO: 20934 - DNA, 1149 bp, Homo sapiens
agtagtatacagtatgcaaacataactcaccatttatcttcagaagaacccacctttctactgcttacatgattttgttaataataaacttttcctgggtttgtgtccaaacaaattatcttcgaccacgaaattttcattttcttccttttttagatattaactctaactggttccacaaatcattttcttccttttttagatattagctctaactggttccacaaaaagtacttaaccaaactggtgctcataatacacaatttcaatatctgcataatgtagaaaaataacatttgcttttatgaatactcatttaacctacctaactaaaaagagagcacggtacccataagtctttaaaatcaacaatctttgttacagtaaataaggtaaaaatgagagatagaaaaggaaactgacatactaggataaaggaatctgcatagatttggtgtgctctctctttatatattttaatccaatacagtaactcagtagctagatgattaataagcaccggccacactactattagaaagaggcttcttctagaaattgatattacggaatgctgtggtactcaaggtgtttatgcagcgcactgtcagacttccaatgataacggaaaagggttaaaagcagatgcatctgaattgtactgtggcaaactgccagaagggtatcatctttagcataaatgatgacaagggttactttaacagggcacccaggatccacaattagtcctacaatactaatgcctctataagctctgtcctctggactcacagaatcctaccaacttctgaagatgacttagtgcacaccaaccgtagctaaaaatcaggatttcctactgacaccagagaggcccttcaaagattctctatttgcttgtttctgctgaacaaaagccggcaataaaacagctacatctttctacatgtgagtcttcaccaaagctttagtgaactgttcacaagagattctaggtctgacaaaamcctttaggtttacttagaaaaactcacaaactcattcggaggtaccaataggctaggcatgaaaaacaagccgcagagcttgccaatatttttgtcattcattcagctgttttataccagagaaagaacccgtcggggatca

SEQ ID NO: 20935 - DNA, 547 bp, Homo sapiens
cacattgtgcacatgtaccctaaaacttaaagtataataataataataataaaagagcctgccttgtaaaaacagtatcctctatctgtgcctcttccattacatctgttttattacacgtggtttctacctctttgcatcctcccaatytcacctccttcagattggggcagggaagaaaaacatacatggggatctattaagagagtgaagtcagtggtttgggtaaaactttgtggtacatttcatttatccattcaaaaagtaatatgcatctccagcgccactcaaattttgctaaggacagggcagcaaaatcctgccttcaagaaatgtatagactactgcaagaaacaaagaaattaggcaattacaatatagtgtattcaaaagtgttatgctaaaggagctaaagaagacaatgggggtggggagtggataggggtgtctgacacagccgtgcagtcaggaaaagctttccagatgttaaaatttgattcttcagagataggtgttagaccaattaaaataggagaaatgctaggga

SEQ ID NO: 20936 - DNA, 1226 bp, Homo sapiens
aatacatatttatttctagatattgcagtgaatatatgtacttcactgtacattcaaatttcacatggtagcacctacattttgtaccactgtagccttttaaaggcgtcaaaacactgaagtcatcactttttaaatataattactgggtgttcaactcatatcaatcattcaattaaaaaatatttaattagcaactgctatatagcaccagatagacatctctctgggacctttctaagaatcatgcaacttagaaaggtcagctgagcttaaacggtcacaaagtctttaagaaatctgctttttagctacttttattatgggtggtttgaacattttcctgtattagagttattgcaagtacaatacaatgatgaatgccttctctagcacctggtagagccaaactagataacattacttattgataaggaaaacattttattagatcaaagaagatgataaaataagtagagggagagaagcctactacatagtttcttcaggtggagcctgaaagcgagcagttcttaacctgatctcttcatctggatttaggaagataccctgatctccataaaatacttaagaaccaccctagtctcatcaataccaaaagtaggttactctgcatatgatttatctcacctgtttaatgatgactctaccagatttaatcacataaggtaacattccctgaccttgatttaatggggaaagacggatggtagggtgtaggaatggaataacacctttacactccatgacacagccctctgtggtgtactacccagtcattcatcatcaatgtrgcacactaactccattagtcttggcttcacattgtctctcaataagataggtaaggtaagagtttctgctatggttttgaaaataataatctgaagttactttaagtatttattctataatctgatgaccaaaaaatctacaatggcattttacccaatcctacagaaacttaaaatcctgaggctccagactatataatcgaaatctctgattttaaaatccaagtttagtactcacaaaattttactaaagttattttcactgtaaataggaaaacacttttaataaggagaaagaaattcctaaaccaatactcacttggaatggagacttttttgaaacctaacagaaaacaatgccactaaatatgttttcattttaaaattcccttcatgatttctccttatttc

SEQ ID NO: 20937 - DNA, 1226 bp, Homo sapiens
aatacatatttatttctagatattgcagtgaatatatgtacttcactgtacattcaaatttcacatggtagcacctacattttgtaccactgtagccttttaaaggcgtcaaaacactgaagtcatcactttttaaatataattactgggtgttcaactcatatcaatcattcaattaaaaaatatttaattagcaactgctatatagcaccagatagacatctctctgggacctttctaagaatcatgcaacttagaaaggtcagctgagcttaaacggtcacaaagtctttaagaaatctgctttttagctacttttattatgggtggtttgaacattttcctgtattagagttattgcaagtacaatacaatgatgaatgccttctctagcacctggtagagccaaactagataacattacttattgataaggaaaacattttattagatcaaagaagatgataaaataagtagagggagagaagcctactacatagtttcttcaggtggagcctgaaagcgagcagttcttaacctgatctcttcatctggatttaggaagataccctgatctccataaaatacttaagaaccaccctagtctcatcaataccaaaagtaggttactctgcatatgatttatctcacctgtttaatgatgactctaccagatttaatcacataaggtaacattccctgaccttgatttaatggggaaagacggatggtagggtgtaggaatggaataacacctttacactccatgacacagccctctgtggtgtactacccagtcattcatcatcaatgtagcayactaactccattagtcttggcttcacattgtctctcaataagataggtaaggtaagagtttctgctatggttttgaaaataataatctgaagttactttaagtatttattctataatctgatgaccaaaaaatctacaatggcattttacccaatcctacagaaacttaaaatcctgaggctccagactatataatcgaaatctctgattttaaaatccaagtttagtactcacaaaattttactaaagttattttcactgtaaataggaaaacacttttaataaggagaaagaaattcctaaaccaatactcacttggaatggagacttttttgaaacctaacagaaaacaatgccactaaatatgttttcattttaaaattcccttcatgatttctccttatttc

SEQ ID NO: 20938 - DNA, 1226 bp, Homo sapiens
aatacatatttatttctagatattgcagtgaatatatgtacttcactgtacattcaaatttcacatggtagcacctacattttgtaccactgtagccttttaaaggcgtcaaaacactgaagtcatcactttttaaatataattactgggtgttcaactcatatcaatcattcaattaaaaaatatttaattagcaactgctatatagcaccagatagacatctctctgggacctttctaagaatcatgcaacttagaaaggtcagctgagcttaaacggtcacaaagtctttaagaaatctgctttttagctacttttattatgggtggtttgaacattttcctgtattagagttattgcaagtacaatacaatgatgaatgccttctctagcacctggtagagccaaactagataacattacttattgataaggaaaacattttattagatcaaagaagatgataaaataagtagagggagagaagcctactacatagtttcttcaggtggagcctgaaagcgagcagttcttaacctgatctcttcatctggatttaggaagataccctgatctccataaaatacttaagaaccaccctagtctcatcaataccaaaagtaggttactctgcatatgatttatctcacctgtttaatgatgactctaccagatttaatcacataaggtaacattccctgaccttgatttaatggggaaagacggatggtagggtgtaggaatggaataacacctttacactccatgacacagccctctgtggtgtactacccagtcattcatcatcaatgtagcacactaactccattagtcttggcttcacattgtctctcaataagataggtaaggtargagtttctgctatggttttgaaaataataatctgaagttactttaagtatttattctataatctgatgaccaaaaaatctacaatggcattttacccaatcctacagaaacttaaaatcctgaggctccagactatataatcgaaatctctgattttaaaatccaagtttagtactcacaaaattttactaaagttattttcactgtaaataggaaaacacttttaataaggagaaagaaattcctaaaccaatactcacttggaatggagacttttttgaaacctaacagaaaacaatgccactaaatatgttttcattttaaaattcccttcatgatttctccttatttc

SEQ ID NO: 20939 - DNA, 501 bp, Homo sapiens
aattctgttttgtattttgctgtgagctactgcttgattttggcattgtatcaaattttccattgaagtacaattcagttaccccaaaataatgctgagaactaacatcataaataaattgctgtttgtgctataaattcttggctgatcattcagatctaccatctgtgctttttcttcttgctgcatgtccttgaggctgacttccttggactacattagttggaccctctttctcttaccctttgggttctggttaggtttggcctatgggagtcattggcaggagaatggaaggtggaaagagagacagtttgggggatttactcccatggatccctctctgtgggctgggattagggatgactgcatcttctaccaaaggctaccacccttgtcttcacctacaatcacagctctttctgggtcacctgtagatttgggggtggtaacagctctcttactctaccctgttgayggccctagtgtgctccaccaatc

SEQ ID NO: 20940 - DNA, 560 bp, Homo sapiens
tccaattaaaacaaccactgtgggtattagtgagggttgaaggatacatcaaataaacaaacaaaaacttttttttccttgtggagactattgcttatgtcagttaaaaaaagaaattaaagaggaaacaatgaaggcagagaggaagtgaggaaggaagaaatagttttcctaatacagaattcctgaactagacagactttcttaccttctcacagacaaccttctatggcttctgtaggaacatctcaggtcttcccttaaacacgagtgatgttaagaacagagaaaaagggacactttctgcartagctaagctcccaagtaaaagaagaattgaaagagcagaaccattcttgccagccttcctatcctaaattcatattcaatgaagttactcctcctattcatgagtgaggaagtgacagagaagggctaagactaccatgataatggatgggcctactgaaggaagataatatcaagagtggagattgttttccccaataacttctctattctaagaggaagtatggtcaagtttgtttgaagacagtgat

SEQ ID NO: 20941 - DNA, 537 bp, Homo sapiens
ttccaaggtcttcaactttttttaatttgatttaccaataagctctctctgcttttactttcagctacctccttaagcccaaagaaacttccatcagtagtcatggaagacaggaaatcagctggccaacagcatgatattgtgatgccctttgtgtattacatttttctagttacccgtaaatgaaaaagtctcaaaacacattttaaaattaggaaataacataccgtagatataaatataataatagagacaaaagaattgtcactttaataaaccaatgaaaatgctaatgcaatctgatgaattgttctaccttyctaaaagttttcataccgattttttgattaaaggctcgtaacaacattattttaaaatttagaaactggatcagatatatattttactatatcatgaatgaggataaaaaacaaaggaaagcctttacatgaactatatctattattaaaatagaatgttgtgtctcaagaaacagttttgacaaactgataggaggagctctttctgtttaaaaat

SEQ ID NO: 20942 - DNA, 523 bp, Homo sapiens
agacgcagagagatggacatttctgaatgaggctgagacagcagagaggactcagtgttcaggaaaatgagacttgacccagtgagaaaagcacagagtccagtgtcggggtttttccctgtactaagcagaaggaaatgttattactgatttgagtcycagttggggtcactgggtgcattgatggaggctggttcctcttttatttcatgtgactagtctttaagtgctaacaaatagttaggagttcttccacatagaagccactggaaaacctcacctagaattcactgtaagcccttctaccaccactatgagctgtgtgactttgggcaacctaacttacgtccctcaggctcctcatctgtgatgggaacatgagtgttttcctctccggactgtaaagtcatagagtagctgcctggcccctgctatgcactctctgagacccagatgcatctcagtcacgaccaggctgccaaggaatgagatacaggtactgcagaagcctgttcctaaggca

SEQ ID NO: 20943 - DNA, 523 bp, Homo sapiens
agacgcagagagatggacatttctgaatgaggctgagacagcagagaggactcagtgttcaggaaaatgagacttgacccagtgagaaaagcacagagtccagtgtcggggtttttccctgtactaagcagaaggaaatgttattactgatttgagtcccagttggggtcactgggtgcattgatggaggctggttcctcttttatttcatgtgactagtctttaagtgctaacaaatagttaggagttcttccacatagaagccactggaaaacctcacctagaattcactgtaagcccttctaccaccactatgagctgtgtgactttgggcaacctaacttacrtccctcaggctcctcatctgtgatgggaacatgagtgttttcctctccggactgtaaagtcatagagtagctgcctggcccctgctatgcactctctgagacccagatgcatctcagtcacgaccaggctgccaaggaatgagatacaggtactgcagaagcctgttcctaaggca

SEQ ID NO: 20944 - DNA, 523 bp, Homo sapiens
agacgcagagagatggacatttctgaatgaggctgagacagcagagaggactcagtgttcaggaaaatgagacttgacccagtgagaaaagcacagagtccagtgtcggggtttttccctgtactaagcagaaggaaatgttattactgatttgagtcccagttggggtcactgggtgcattgatggaggctggttcctcttttatttcatgtgactagtctttaagtgctaacaaatagttaggagttcttccacatagaagccactggaaaacctcacctagaattcactgtaagcccttctaccaccactatgagctgtgtgactttgggcaacctaacttacgtccctcaggctcctcatctgtgatgggaacatgagtgttttcctctccggactgtaaagtcatagagtagctgcctggcccctgctatgcactctctgagacccwgatgcatctcagtcacgaccaggctgccaaggaatgagatacaggtactgcagaagcctgttcctaaggca

SEQ ID NO: 20945 - DNA, 530 bp, Homo sapiens
aaactgatgtggagtttttctctaaatataatagagcctctgattctctggagtcttctarcatacaccaatcatgttacctttgtggtatggttttcaactatgaattcaatttcttagatgatataaaccgatctctattttcctttaatcagtgttggtaactttttgcctttcaagaaatgtcttcatttcatctaatttttcaaatttattgacatacaattgtttccacatttcctgaccgtctctttgatgtctatgatatctgcaatgctgtctctttttcattcctgatactggtaattggtgtgttatctttttcatgatcagtctacaaatagctaaagatttaccacctttattgatcttttcaaataactattttttggttaattggtttctctctttttttaggttttctatttttcttgatttccactgttattgttattatttctttccgtttacttactttgggtttaatttatttgttttagtaaaatgtacatgacataaaattcatcatg

SEQ ID NO: 20946 - DNA, 2344 bp, Homo sapiens
acggaaggaagatgctatggacacggctttctgaagtttccttgggaccccagctcacagctgcccttctgtgtctgcactggctacttcaaaaaattcagatctagcagaatttggagcataatttccaaatggcaattctgttcctaaaactgaatccaacctgttgcctaatataatcccaggagctctttwctgagcctccaaagaggtcattcctccagccctgggacctgaattctgccagcgcccaagtgggtaggaaacagaggaacacagcccggcagacaccttgccctcagccctgtgagtctatttcatgcttctggcctccagaactggaggggaataaatgtgtggtgtttgagtcactacctttgtgggcatttgttacagcagcaataggaaacaggtgcatttcctctgtcgtttttattaatagaatgttagtaatttgctggtgttgctagagttgctgagtggcaagctgggaactttacagtcacttcatccgagtctggccagcaggagggacccggctcagaggaggaaggacgtttcccaggccccacaggacctgaagcctggtcagtctgacacagaagataccacactcaggcagtacccaccagtgtctctacatcttgatatggtctatggctaaaaatgagacaattcttagacccatagaaggattctactgaaggagactctaaaaaccttttaatctgattttagttagtcagatgagcaaaaagaggcccagaaggatcaggtgacttgtccaagaacgcatagccaattgccttaaatggaatgatgctgttccattcagctcctccccgtggccggaacagatctgattgagtagactacagcagtatccactcttgccctctcttgccctagttgtaagacccccagttttcagggggttgcatggccacccagaataaagactacattttccttgcagtgaggtatggccacgtgaaacagggaggtgagcagaagttttctcaagtgttctttaaaggaacaggggacatccttctctgttccttcctttttcctggctggaaagaagatgtgatggctggagctcacgcaataattttggaccctgaggatggcagagtcatgagtcaccctaaagactttgtggaacctcctcctggccctggaatgctgccccggacttcatttttataggaaagaaaaatatgccaggagaatcccgtttcttttttaaagagcgattgtgatttctgcttgttttgttttctgccccttgtagccaaacctcatttaactaataaaggaaaatattcaagtgacagaccttctggggagagaaagatgtgatgtttcaaagacagcttctagtaaaggctcaatgccagcctccccctccaccatgactgctgacccttctaagatcccactctggccagctgctgccaaaatatggcagaaattgtgccagaaagtgccagaaatggtgccctgtctgcataatccaggatggttcacccccaactcggccctccccgtgcctctgagtacccccagtggccggatgccagccacaggaccatatccaaatctctaaccacaagaggggcgggaaatggagggtgcgttctgggcctccacctgacactcaggggcttgttactacagagagaaaggatcctggagccatctaagagtccttgccacatgggggctcgacagctgttgggcagacatcaacttgatgagcaaatccccttcttgtcccctaggccgagggctatacttccccaaactcatcctcctacaaagaagcagatattgagatcagggttgtaccagaaaatccaggccctctggtgtgtccatcctttcagaggtgcagggactagctcagatctcgggctctgcagtcagacggcctgggttcagatcctgacactgtctcttatttagctgggtaggtgcgttcatttcctggggctgctgtaaactgccacaacttcagtggcttaaaacagcacaaagtgattctcttacagttctggaagtcagaagtctaagatgagctaaaatccaagtgttggcagggctgcactccttctggaggttatggggaagaatccattttcttgcctattctggcttctagaagcctgcgttccttggttcatagcctcttcctccatcctcaaggccaggaaagactggtcttgtcttcctcattctgacacagaccctcctacctcccttttccacatttaaagggcccctgtgattatactggacccacccagcaacccatgataacttccctctcttaaaggca

SEQ ID NO: 20947 - DNA, 2344 bp, Homo sapiens
acggaaggaagatgctatggacacggctttctgaagtttccttgggaccccagctcacagctgcccttctgtgtctgcactggctacttcaaaaaattcagatctagcagaatttggagcataatttccaaatggcaattctgttcctaaaactgaatccaacctgttgcctaatataatcccaggagctctttactgagcctccaaagaggtcattcctccagccctgggacctgaattctgccagcgcccaagtgggyaggaaacagaggaacacagcccggcagacaccttgccctcagccctgtgagtctatttcatgcttctggcctccagaactggaggggaataaatgtgtggtgtttgagtcactacctttgtgggcatttgttacagcagcaataggaaacaggtgcatttcctctgtcgtttttattaatagaatgttagtaatttgctggtgttgctagagttgctgagtggcaagctgggaactttacagtcacttcatccgagtctggccagcaggagggacccggctcagaggaggaaggacgtttcccaggccccacaggacctgaagcctggtcagtctgacacagaagataccacactcaggcagtacccaccagtgtctctacatcttgatatggtctatggctaaaaatgagacaattcttagacccatagaaggattctactgaaggagactctaaaaaccttttaatctgattttagttagtcagatgagcaaaaagaggcccagaaggatcaggtgacttgtccaagaacgcatagccaattgccttaaatggaatgatgctgttccattcagctcctccccgtggccggaacagatctgattgagtagactacagcagtatccactcttgccctctcttgccctagttgtaagacccccagttttcagggggttgcatggccacccagaataaagactacattttccttgcagtgaggtatggccacgtgaaacagggaggtgagcagaagttttctcaagtgttctttaaaggaacaggggacatccttctctgttccttcctttttcctggctggaaagaagatgtgatggctggagctcacgcaataattttggaccctgaggatggcagagtcatgagtcaccctaaagactttgtggaacctcctcctggccctggaatgctgccccggacttcatttttataggaaagaaaaatatgccaggagaatcccgtttcttttttaaagagcgattgtgatttctgcttgttttgttttctgccccttgtagccaaacctcatttaactaataaaggaaaatattcaagtgacagaccttctggggagagaaagatgtgatgtttcaaagacagcttctagtaaaggctcaatgccagcctccccctccaccatgactgctgacccttctaagatcccactctggccagctgctgccaaaatatggcagaaattgtgccagaaagtgccagaaatggtgccctgtctgcataatccaggatggttcacccccaactcggccctccccgtgcctctgagtacccccagtggccggatgccagccacaggaccatatccaaatctctaaccacaagaggggcgggaaatggagggtgcgttctgggcctccacctgacactcaggggcttgttactacagagagaaaggatcctggagccatctaagagtccttgccacatgggggctcgacagctgttgggcagacatcaacttgatgagcaaatccccttcttgtcccctaggccgagggctatacttccccaaactcatcctcctacaaagaagcagatattgagatcagggttgtaccagaaaatccaggccctctggtgtgtccatcctttcagaggtgcagggactagctcagatctcgggctctgcagtcagacggcctgggttcagatcctgacactgtctcttatttagctgggtaggtgcgttcatttcctggggctgctgtaaactgccacaacttcagtggcttaaaacagcacaaagtgattctcttacagttctggaagtcagaagtctaagatgagctaaaatccaagtgttggcagggctgcactccttctggaggttatggggaagaatccattttcttgcctattctggcttctagaagcctgcgttccttggttcatagcctcttcctccatcctcaaggccaggaaagactggtcttgtcttcctcattctgacacagaccctcctacctcccttttccacatttaaagggcccctgtgattatactggacccacccagcaacccatgataacttccctctcttaaaggca

SEQ ID NO: 20948 - DNA, 2344 bp, Homo sapiens
acggaaggaagatgctatggacacggctttctgaagtttccttgggaccccagctcacagctgcccttctgtgtctgcactggctacttcaaaaaattcagatctagcagaatttggagcataatttccaaatggcaattctgttcctaaaactgaatccaacctgttgcctaatataatcccaggagctctttactgagcctccaaagaggtcattcctccagccctgggacctgaattctgccagcgcccaagtgggtaggaaacagaggaacacagcccggcagacaccttgccctcagccctgtgagtctatttcatgcttctggcctccagaactggaggggaataaatgtgtggtgtttgagtcactacctttgtgggcatttgttacagcagcaataggaaacaggtgcatttcctctgtcgtttttattaatagaatgttagtaatttgctggtgttgctagagttgctgagtggcaagctgggaactttacagtcacttcatccgagtctggccagcaggagggacccggctcagaggaggaaggacgtttcccaggccccacaggacctgaagcctggtcagtctgacacagaagataccacactcaggcagtacccaccagtgtctctacatcttgatatggtctatggctaaaaatgagacaattcttagacccatagaaggattctactgaaggagactctaaaaaccttttaatctgattttagttagtcagatgagcaaaaagaggcccagaaggatcaggtgacttgtccaagaacgcatagccaattgccttaaatggaatgatgctgttccattcagctcctccccgtggccggaacagatctgattgagtagactacagcagtatccactcttgccctctcttgccctagttgtaagacccccagttttcagggggttgcatggccacccagaataaagactacattttccttgcagtgaggtatggccacgtgaaacagggaggtgagcagaagttttctcaagtgttctttaaaggaacaggggacatccttctctgttccttcctttttcctggctggaaagaagatgtgatggctggagctcacgcaataattttggaccctgaggatggcagagtcatgagtcaccctaaagactttgtggaacctcctcctggccctggaatgctgccccggacttcatttttataggaaagaaaaatatgccaggagaatcccgtttcttttttaaagagcgattgtgatttctgcttgttttgttttctgccccttgtagccaaacctcatttaactaataaaggaaaatattcaagtgacagaccttctggggagagaaagatgtgatgtttcaaagacagcttctagtaaaggctcaatgccagcctccccctccaccatgactgctgacccttctaagatcccactctggccagctgctgccaaaatatggcagaaattgtgccagaaagtgccagaaatggtgccctgtctgcataatccaggatggttcacccccaactcggccctccccgtgcctctgagtacccccagtggccggatgccagccacaggaccatatccaaatctctaaccacaagrggggcgggaaatggagggtgcgttctgggcctccacctgacactcaggggcttgttactacagagagaaaggatcctggagccatctaagagtccttgccacatgggggctcgacagctgttgggcagacatcaacttgatgagcaaatccccttcttgtcccctaggccgagggctatacttccccaaactcatcctcctacaaagaagcagatattgagatcagggttgtaccagaaaatccaggccctctggtgtgtccatcctttcagaggtgcagggactagctcagatctcgggctctgcagtcagacggcctgggttcagatcctgacactgtctcttatttagctgggtaggtgcgttcatttcctggggctgctgtaaactgccacaacttcagtggcttaaaacagcacaaagtgattctcttacagttctggaagtcagaagtctaagatgagctaaaatccaagtgttggcagggctgcactccttctggaggttatggggaagaatccattttcttgcctattctggcttctagaagcctgcgttccttggttcatagcctcttcctccatcctcaaggccaggaaagactggtcttgtcttcctcattctgacacagaccctcctacctcccttttccacatttaaagggcccctgtgattatactggacccacccagcaacccatgataacttccctctcttaaaggca

SEQ ID NO: 20949 - DNA, 543 bp, Homo sapiens
gatgcttggtagaaacccgcaggcagatcaatggatagtcaatagcctagaaactgacacacgcargtctgtgtgtcagcagggtcttggggaatctcatacaatggatctgagcctttcggggaacagggcccatgtggcccagcagttggtgggcagagtcggcgggcaccactaatgcgaggcagtcatgtctcaggtgggcatgacgaggcccttctagacagcggtcagggccctgaggaagtggaggttaagagcccatctctgcacctcagtttcctccacgtggtaatggggattataccaccaccacgcagtctgcctgtgaagacacactggcgtcctgcgcccaggaactagtggcattcgattaaggaacaacgaaagaatagacacccatctagagagcagcacagggtaatcgccctgcgatgctggcgcagcagcccgagaggcagcgctgcctggccagtgctatgagccctcctcggggtcggggcaccagggagcctccttggggagcctgaacacagacccgtc

SEQ ID NO: 20950 - DNA, 543 bp, Homo sapiens
gatgcttggtagaaacccgcaggcagatcaatggatagtcaatagcctagaaactgacacacgcaagtctgtgtgtcagcagggtcttggggaatctcatacaatggatctgagcctttcggggaacagggcccatgtggcccagcagttggtgggcagagtcggcgggcaccactaatgcgaggcagtcatgtctcaggtgggcatgacgaggcccttctagacagcrgtcagggccctgaggaagtggaggttaagagcccatctctgcacctcagtttcctccacgtggtaatggggattataccaccaccacgcagtctgcctgtgaagacacactggcgtcctgcgcccaggaactagtggcattcgattaaggaacaacgaaagaatagacacccatctagagagcagcacagggtaatcgccctgcgatgctggcgcagcagcccgagaggcagcgctgcctggccagtgctatgagccctcctcggggtcggggcaccagggagcctccttggggagcctgaacacagacccgtc

SEQ ID NO: 20951 - DNA, 540 bp, Homo sapiens
gatttaagatgaggtattttatgatcataaacctcaatgaatatgtatcaggcacgaaggttattctgggtgctgtaacaagaactgtaagatcacagacaaggggctctttgtggattaataagctatcacttaatcacttctaactcagcacccccctgctgttccttctgcctgaaatctccaccctcctgcgctgtctaattcttactcgttcttcaagattcctcttgaacattacttcttccaggaaaatttctctgactcttctcctgacccctagcctctgggktaggagctcttctggtttgctccactaccatattgtgctgacccctggctgaggatcccacctgctctctgcactaattattgagtacagatcccctcccagttctggctgaaaactccatgaagtgcagaaccaggtctcattgggctttgtatcctcagcatctagcagagtgcctgattcatagccagggcttgttaaataaactacaggcaggtgtgcagactaaccggcaaggaagaaaggga

SEQ ID NO: 20952 - DNA, 517 bp, Homo sapiens
aagtttatgattttagggaggctgtgaggtttcattaactttttatgcatatccaataagaatgatacccctataaattatgaaaattatagaatgttaaactaatatttaaaatagaaatattatcttactttcactctttagaaaaggtctaacctcaaaaaattccttttcaaatcatcagcaggactatttcaatctcctctcaagacaggccgtaggataattgtgttaccatatcactagtgcatattgttcaacaatatgatcagcaagtaaagaggtaattttaacaatattaaagtataaagaaaacaaattaattctgcaatatactggctataaacctgaatgtgaaatgcaattaataggttgacagtcaatgactctagaactgttacggttctgagctcrttaggtatacacttacatttaagtacttacattaagtacttacttaatgtacttaattacttacattaagtacttacttaaatgtaaatgtataccttacaat

SEQ ID NO: 20953 - DNA, 517 bp, Homo sapiens
aagtttatgattttagggaggctgtgaggtttcattaactttttatgcatatccaataagaatgatacccctataaattatgaaaattatagaatgttaaactaatatttaaaatagaaatattatcttactttcactctttagaaaaggtctaacctcaaaaaattccttttcaaatcatcagcaggactatttcaatctcctctcaagacaggccgtaggataattgtgttaccatatcactagtgcatattgttcaacaatatgatcagcaagtaaagaggtaattttaacaatattaaagtataaagaaaacaaattaattctgcaatatactggctataaacctgaatgtgaaatgcaattaataggttgacagtcaatgactctagaactgttacggttctgagctcgttaggtatacacttacatttaagtacttacattaagtacttacttaatgtacytaattacttacattaagtacttacttaaatgtaaatgtataccttacaat

SEQ ID NO: 20954 - DNA, 548 bp, Homo sapiens
cctcatccacccccttctctattgctagaatattaacaattaatataagtaagtttaattaaactttgttcttgatttgtttaaaactttaacaattaatttgttagcaaaaaaataacatatgccctgcagtaagtttataaaacccgtaaatacagaaaatagatatatgacaatccatgtgttatatagggatcgttttattcatactaaaagtttataatcaccaataacttgccacaatgtatttttcactttccctatcatcccacagggctttatctttagacacaatttaatttgttttttagagaagataaacaaaattagattctttgtaaagtgtagtgctagggccataagaagcagtagattatgggggcaggtgcccggcccaggagagccaggattatggtgatgggagttggttaggaatcaggaacagcaataggtcagaatcccagagaattaactgaagaaactgtttgytcaagttagaaggagaagctttccaagttggaggcaaataaggcaaatagtctacaaat

SEQ ID NO: 20955 - DNA, 573 bp, Homo sapiens
gacactgaagtttttgagccttaactccattacttaattagctgtgtgacccagaccacttcattgtacagctccgttcttgtgctggggagggcattcacacaaaatacaatgaaattgtgcttcctggtggttctgatgtggctttaggcaagttcattaaacactgcgctttcaataagataatgcatgtggaatgctgagcacagtgcctttaagacacttaaytggatatgagaactgttccatagcccttcatttttaattttgattaagagttgtttactaataactaactgggtgagttataaatggagaagtagggtcactgtgaagtggctatgaaatagcacagaggatatatttaaaaagctgtatttttactacatattttcaaactacatatttcattttagtttggagaactttactgaagaataaagaagtagtagtatgtgagtttggatcatttctatggttaggtggtggctgcactaaggcctttccaatgcttagtcctgtgagaggtagatagcgttgtggggggtaggggagaacagataaatgagatac

SEQ ID NO: 20956 - DNA, 573 bp, Homo sapiens
gacactgaagtttttgagccttaactccattacttaattagctgtgtgacccagaccacttcattgtacagctccgttcttgtgctggggagggcattcacacaaaatacaatgaaattgtgcttcctggtggttctgatgtggctttaggcaagttcattaaacactgcgctttcaataagataatgcatgtggaatgctgagcacagtgcctttaagacacttaackggatatgagaactgttccatagcccttcatttttaattttgattaagagttgtttactaataactaactgggtgagttataaatggagaagtagggtcactgtgaagtggctatgaaatagcacagaggatatatttaaaaagctgtatttttactacatattttcaaactacatatttcattttagtttggagaactttactgaagaataaagaagtagtagtatgtgagtttggatcatttctatggttaggtggtggctgcactaaggcctttccaatgcttagtcctgtgagaggtagatagcgttgtggggggtaggggagaacagataaatgagatac

SEQ ID NO: 20957 - DNA, 573 bp, Homo sapiens
gacactgaagtttttgagccttaactccattacttaattagctgtgtgacccagaccacttcattgtacagctccgttcttgtgctggggagggcattcacacaaaatacaatgaaattgtgcttcctggtggttctgatgtggctttaggcaagttcattaaacactgcgctttcaataagataatgcatgtggaatgctgagcacagtgcctttaagacacttaactggatatgagaacwgttccatagcccttcatttttaattttgattaagagttgtttactaataactaactgggtgagttataaatggagaagtagggtcactgtgaagtggctatgaaatagcacagaggatatatttaaaaagctgtatttttactacatattttcaaactacatatttcattttagtttggagaactttactgaagaataaagaagtagtagtatgtgagtttggatcatttctatggttaggtggtggctgcactaaggcctttccaatgcttagtcctgtgagaggtagatagcgttgtggggggtaggggagaacagataaatgagatac

SEQ ID NO: 20958 - DNA, 634 bp, Homo sapiens
tcgctttttctgtgggacttaaggtctgacaggtttcaaataaacaggacggttattcactcttggtgggagtgtaaattagttccaccattgtggaagacagtgtggtgattcctcaaggatctagaaacagaaataccatttgacccagcaattccattactgggtatatacccaaaggattataaatcattctactataaaggcacatgcacacgtatgtttactgtaacactatkcacaataacgaagacttggaaccaacccaaatgcccatcaatgatagactggataaagaaaatgttgcacatatacaccatggaatactatgtagccataaaaaaggatgagttcctgtcctttgcagggacatggatgaagctggaaaccatcattctcagcaagctaacacaggaacagaaaaccgaacaccacatcttctcactcataagtgggagttaatcaatgagaacacctggacacagggaggggaacatcacacatgggggcatgtcaggggttggggggcttggggaagtatagcattaggagaaatacctaacgtagatggtggattgatgggtgcagcaaaccaccatggcacgtgtatacctatgtaacaaacctgcacgtt

SEQ ID NO: 20959 - DNA, 634 bp, Homo sapiens
tcgctttttctgtgggacttaaggtctgacaggtttcaaataaacaggacggttattcactcttggtgggagtgtaaattagttccaccattgtggaagacagtgtggtgattcctcaaggatctagaaacagaaataccatttgacccagcaattccattactgggtatatacccaaaggattataaatcattctactataaaggcacatgcacacgtatgtttactgtaacactattcacaataacgaagacttggaaccaacccaaatgcccatcaatgatagactggataaagaaaatgttgcacatatacaccatggaatactatgtagccataaaaaaggatgagttcctgtcctttgcagggacatggatgaagctggaaaccatcattctcagcaagctaacacaggaacagaaaaccgaacaccacatcttctcactcataagtgggagttaatcaatgagaacacctggacacagggaggggaacatcacacatgggggcatgtcaggggttggggggcttggggaagtatagcattaggagaaatacctaaygtagatggtggattgatgggtgcagcaaaccaccatggcacgtgtatacctatgtaacaaacctgcacgtt

SEQ ID NO: 20960 - DNA, 589 bp, Homo sapiens
ccacaaatatttctgaagaacttataaagtgtcagcactgttataggcagaggaatagactagtgattttttaaaaaatttctgatttcatagagtttatgttctcaggatagcctagtttccttactttctagatcttgctcccaagtgtgacggacagaaatgatcatgtgatgacccttagggaataaatgkaaggcagcacccaagggagtaagaaggcaccaaggagaagatgaacctcaggtagagggcagaccataggtcagccaccttggcccatctgaaggtagtatttactccctgtgctgaaccttggaagttttggattctaattttaaaaggaaagtggtagtctcattttcccagaaaacttacatgttcactctccattacagatttcttacaataattactccaccactacacttatgttttcccacttttcataaaatttgttttacaaatgtgttgcatctatgcttactttcaataactcgggaaagtagtggaaacagctaactaagacatggctccagcactcaaagaaagtgcaatctaatggggaggcattgaaataaatcagtta

SEQ ID NO: 20961 - DNA, 589 bp, Homo sapiens
ccacaaatatttctgaagaacttataaagtgtcagcactgttataggcagaggaatagactagtgattttttaaaaaatttctgatttcatagagtttatgttctcaggatagcctagtttccttactttctagatcttgctcccaagtgtgacggacagaaatgatcatgtgatgacccttagggaataaatgtaaggcagcasccaagggagtaagaaggcaccaaggagaagatgaacctcaggtagagggcagaccataggtcagccaccttggcccatctgaaggtagtatttactccctgtgctgaaccttggaagttttggattctaattttaaaaggaaagtggtagtctcattttcccagaaaacttacatgttcactctccattacagatttcttacaataattactccaccactacacttatgttttcccacttttcataaaatttgttttacaaatgtgttgcatctatgcttactttcaataactcgggaaagtagtggaaacagctaactaagacatggctccagcactcaaagaaagtgcaatctaatggggaggcattgaaataaatcagtta

SEQ ID NO: 20962 - DNA, 523 bp, Homo sapiens
ttctttcaatactcagtaattgattgacataaactagtgtcaactatgagttgatatattagttttctattgctacataacaaattaccagaaacttaygagcttgaaagcatctgttcttcagcttatatttttgtagctcagaagtctagaatggccttcgtaggttctttgcttagtctcacaaggccaaaatcaaggtgttggtgggactacatcaccttcatagagctctgtggaaaaatcctcttccaagctcattctttttgggtagaattcagtttcttgcaattgtaggactgaggtcctagcatctttcctggctttcagtttgcagccacctttaggttctagaggctgcacctattccttcatgagttcctcttatcttcaagaaagtagacacacaaaatccttcttaaactgaaaatttctgacttcctcttctacaactggccagaataaaattgtctgctttcttaaggactcctctgattaggtcagatccacctggataatctct

SEQ ID NO: 20963 - DNA, 523 bp, Homo sapiens
ttctttcaatactcagtaattgattgacataaactagtgtcaactatgagttgatatattagttttctattgctacataacaaattaccagaaacttacgagcttgaaagcatctgttcttcagcttatatttttgtagctcagaagtctagaatggccttcgtaggttctttgcttagtctcacaaggccaaaatcaaggtgttggtgggactacatcaccttcatagagctctgtggaaaaatcctcttccaagctcattctttttgggtagaattcagtttcttgcaattgyaggactgaggtcctagcatctttcctggctttcagtttgcagccacctttaggttctagaggctgcacctattccttcatgagttcctcttatcttcaagaaagtagacacacaaaatccttcttaaactgaaaatttctgacttcctcttctacaactggccagaataaaattgtctgctttcttaaggactcctctgattaggtcagatccacctggataatctct

SEQ ID NO: 20964 - DNA, 378 bp, Homo sapiens
tatttcttttagcagacagttttgacatggacatatgtttttgacatggacatatgttctcatgattctcatattgtgtacatataatgtagtcttgtgaattaagcagatgtttttcaagggacaccataacacttagaggctctgtcatttgaataaatttgagcccaccaatgtaaaacatgcagaaaatcttgagtygtatgttcagtctctgttctgtatcttgccacgttttgacctcatgcaagttgcctaatatttcaatctcaaatttttaatctgtaaaatgagttacttatatttatgtaacttctagaatttttcagtgctcaaataaaatattacaaaatatgaagccaaaaaaagagggaaaga

SEQ ID NO: 20965 - DNA, 566 bp, Homo sapiens
tggggtaacttcctgaccttgcaatggcatttgtaaactctcatggcgctggcgtgagtgtagcagtgaggatgaccagaggtcactcttgtcgccatcttggttttggtgggttttagctggcttctttactgcaagctgtttttatcaggaaggtycttatgacctgtatcttgtactgacctcctaggtcattctgtgacttagaatgccttaactgtctgggaatgcagcccagtagatctcggcctcattttacccagcccctattcaagatgaagttgctctggttcaaacacctctgatatttgcacaacagacaaagaatataacatagagtgcagacaccggccatccatacatgaaagtgtgacatgtgacaggcagcaccgcaggtcagtggaccttgggacagttggtttctatgtgaacattttaaataaacttggagttctagctcacaccatgcacaaaaataaattccctgtgaattaaagatctaaatgttcaaagcaaagcttgaaacttttagaataaaatagaggagagtatcttttttggccttg

SEQ ID NO: 20966 - DNA, 566 bp, Homo sapiens
tggggtaacttcctgaccttgcaatggcatttgtaaactctcatggcgctggcgtgagtgtagcagtgaggatgaccagaggtcactcttgtcgccatcttggttttggtgggttttagctggcttctttactgcaagctgtttttatcaggaaggttcttatgacctgtatcttgtactgacctcctaggtcattctgtgacttagaatgccttaactgtctgggaatgcagcccagtagatctcggcctcattttacccagcccctattcaagatgaagytgctctggttcaaacacctctgatatttgcacaacagacaaagaatataacatagagtgcagacaccggccatccatacatgaaagtgtgacatgtgacaggcagcaccgcaggtcagtggaccttgggacagttggtttctatgtgaacattttaaataaacttggagttctagctcacaccatgcacaaaaataaattccctgtgaattaaagatctaaatgttcaaagcaaagcttgaaacttttagaataaaatagaggagagtatcttttttggccttg

SEQ ID NO: 20967 - DNA, 566 bp, Homo sapiens
tggggtaacttcctgaccttgcaatggcatttgtaaactctcatggcgctggcgtgagtgtagcagtgaggatgaccagaggtcactcttgtcgccatcttggttttggtgggttttagctggcttctttactgcaagctgtttttatcaggaaggttcttatgacctgtatcttgtactgacctcctaggtcattctgtgacttagaatgccttaactgtctgggaatgcagcccagtagatctcggcctcattttacccagcccctattcaagatgaagttgctctggttcaaacacctctgatatttgcacaacagacaaagaatataacatagagtgcagacaccggccatccatacatgaaagtgtgacatgtgacaggcagcaccgcaggtcagtggaccttgggacagttggtttctatgtgaacattttaaataaacttggagktctagctcacaccatgcacaaaaataaattccctgtgaattaaagatctaaatgttcaaagcaaagcttgaaacttttagaataaaatagaggagagtatcttttttggccttg

SEQ ID NO: 20968 - DNA, 522 bp, Homo sapiens
tttctgacctgccctcaaaggaggtcataagagcctcaagtgagaagcgtcctccttatactcggagaaaagaacatctttatctctgtagaaagagagaaatcagaatcaaaagwccttgctaaatttccctgagtttatcatatttagctcaaaccctatgtgtcctatcatatttctccgcagatgtccactcttcaccaaacctaccagaaaaaaacagtcaggtttcactgttcttcaggtcttcatttccttatgatatgacattttcccatgtcatataaaacttatatttaatatatttgtacgtttatctcttgttaatctgtcttttgttatatgggcttcagccatgaacctaggatgagtagaagaaaatatatttttccccaaaatatgtacacctattccgtatcagggaaaaaaaaaagataaaaagaaaatcttcacccctacagagcagagatgatgctcaggagacaaagaaagcagaaggaaatatatatatatatatatata

SEQ ID NO: 20969 - DNA, 606 bp, Homo sapiens
cccagtgtgaccatataggtaacattttgtccccaaggatgtcctgaaacattcagctcaatatgatgtgtgagatggtacattcactaacacaaccaasctgcgctacatatctagaataaaaaggatcatagtctcccccactcttgtcacaacacacctgggtaaagaggttcacccattagatgtgatctttcagagcccttcccgctctggggtagcattattctagtacaaggcataggatggtttaaatgaagctgttttgagagtaaatgctcacagcttggtcacgtaaccatcacagagctatacaagaaaacagatcacagaacctgaaatccagaactccaagttttagagtttattcagtagtcagctgtaaattttaaaaaacaacaacgttcacagtagcgataaagaaacacaattttctccctcctagtgttatattagtccagattcccctaacacaggagaagcatctgtgaaaggtgtcccgctgcttggaatacattatggaaaacccaagaatatttctgatataaggaggtaggaatggtgacatcaccccaggctttcaactggctagagcttagacctctc

SEQ ID NO: 20970 - DNA, 606 bp, Homo sapiens
cccagtgtgaccatataggtaacattttgtccccaaggatgtcctgaaacattcagctcaatatgatgtgtgagatggtacattcactaacacaaccaacctgcgctacatatctagaataaaaaggatcatagtctcccccactcttgtcacaacacacctgggtaaagaggttcacccattagatgtgatctttmagagcccttcccgctctggggtagcattattctagtacaaggcataggatggtttaaatgaagctgttttgagagtaaatgctcacagcttggtcacgtaaccatcacagagctatacaagaaaacagatcacagaacctgaaatccagaactccaagttttagagtttattcagtagtcagctgtaaattttaaaaaacaacaacgttcacagtagcgataaagaaacacaattttctccctcctagtgttatattagtccagattcccctaacacaggagaagcatctgtgaaaggtgtcccgctgcttggaatacattatggaaaacccaagaatatttctgatataaggaggtaggaatggtgacatcaccccaggctttcaactggctagagcttagacctctc

SEQ ID NO: 20971 - DNA, 514 bp, Homo sapiens
caagaactcccaattgctcacctgtaaaatggagattgttctaaggaataaaatgattcaaagtctataaaacacctactcttatgtcataggcactcacattagttcctatcccttaaaaacccaccatctacaaggccaatgtaatcatctctaaattggattacattaaagggatttcatcatttgaaatgacaatgctattcaaggcattgtttcaggactgcaggagacttagacatgaaaatgacaccatggtaagctgctggctgactgacccaacgacagtcactctcaaccactttctaccttgacaccatccactgttaaagctagaagagtgaaggtggccaaataggagcagctccagtctgcagctcccagcgtgatcaacacagaagacgagtgatytctgcatttccaactgagatacctggttcctcacattgggactggtcagaattgggtgcagctcacggagggcaagctgaagcagggtggggcatcgcctcac

SEQ ID NO: 20972 - DNA, 514 bp, Homo sapiens
caagaactcccaattgctcacctgtaaaatggagattgttctaaggaataaaatgattcaaagtctataaaacacctactcttatgtcataggcactcacattagttcctatcccttaaaaacccaccatctacaaggccaatgtaatcatctctaaattggattacattaaagggatttcatcatttgaaatgacaatgctattcaaggcattgtttcaggactgcaggagacttagacatgaaaatgacaccatggtaagctgctggctgactgacccaacgacagtcactctcaaccactttctaccttgacaccatccactgttaaagctagaagagtgaaggtggccaaataggagcagctccagtctgcagctcccagcgtgatcaacacagaagacgagtgatctctgcatttccaactgagatacctggttcctcacattgggactggtcagaaktgggtgcagctcacggagggcaagctgaagcagggtggggcatcgcctcac

SEQ ID NO: 20973 - DNA, 519 bp, Homo sapiens
cagcgggtttctcagcaggggaggtccacaccacaccgcttgggaacctgggtgcctaaacgcaacaggagccaaggcacaaatttaaccaaacaccaaggttgcgtgaggccccatttcatgagccgggctccaaggacgtgtccttaggcggctctggaaggcccagcgccagcccccgtcctctgttaaagggagccagccccgcggctccgcccaggcatggtagcctgagcgcgcccccagggtagtagggggcacctgaggagcagggtctgccctggcatgagcagagcccaggatggggtcagggtcaggccctgccagaggctggagggtgcccaaggcgaggccggtgaggcccagctctacaaataaagtgttttatttacaggagtygtctctccaggtcccagctccctgccacccccaccccagccccagggagaagagggcggatgccagaggagctggcagaggctgggcaggtcctgagtgggccaggctaggccaagagag

SEQ ID NO: 20974 - DNA, 530 bp, Homo sapiens
gtgagcctgcgcaggctgccagcccaccccaggaggccggtccaggcaactggcgggggctctgacctgcagcagactggccaccacagggctggtgtccttgcctgactggttctcaacgtcggcatgcagctgcagtgcctgccccaccacatagccgcggagatcagtgctggctgtgaggaccacgctgcccgtcttcaccagcttgtaggagaacttcttggtggcagaggccacgttgggttgcttggggggagggccagggaggggcttagcaggtgtgcgcaggctggatccctgtggcattgggacaggcccctcagccctgccacgccctgcccctggacatcagcagtcagctcagggcaaagaggccactgcctccagaccctggcccccctcacctcagctggggacaggacgctgggatgaagcagtgcctgcccagctcttccccagcctccatgagggtggrgacccaccaaggaggtcactgtgccatcctcacctcaatgtctgggatgctg

SEQ ID NO: 20975 - DNA, 612 bp, Homo sapiens
ataaatttaagaacagatgacatgttcagctcagcttcaactacttcttaccagttggaagacaccaaggtttcctctgctcctccatcctgtaagacagcatacaagttcagagacctgaataagtctggttaattgtggggtcctgttagcaggtccatttggctcttacaataggccatatccttcaatttagcatcttccatattgtttctcttattttctaccctggacaatgaagaataagggtatttataattttattttaaaattcccaaagtgtaaatcttctggatcatgggagcatacagaagaaacatctaaaccaattttgcaggtgcaggaaagctttccttctgaagaggaagtttgacattttaagtaggccataaaggtgaatagctaaagaaagataatccaaagagagaggacggcatacaaaaaaagctctsggagagaaagaaatttgtaaacatcattcagatcttactttattcagaattttagattagccaacatattctaagattttattgagtgcctccagtatgcctttcttttatttatatcctttatttttcattatcccacattatcttcctactctataat

SEQ ID NO: 20976 - DNA, 540 bp, Homo sapiens
attttctttatccattcatctgatggtacacccattggttgattccatatttggctcttgtgaatagcgctgcaataaacatgggagtgaatgtatctcttttatatgttgatttctccctagactttattttrttttattgttagagatggggtcttgctatgttgcccaggctggtcttgaactcctgagctcaagcaatcctcccaccttggcctcccaaagtgctgggattacaggcatgagctactgcacctggcatccctagactttaaatagcctactagctaatagagaagatttgtgtacacaagccattacaacacaaaataaattgatggcgtatcatataaaatgaagaggaaaaatgaaactatccaagacagaatattagatggaatgcacaatgtgtctgacccagtgtggtactgtttttacattgtctctcatatgcacacagtcccctaacatcaaatgttttcagtgaggaagaaaacaggctctaatccttgggactaatgagtgaggagggagagagat

SEQ ID NO: 20977 - DNA, 537 bp, Homo sapiens
taagtaaccattacataggaaaacattgtcttttaagaaatgactgcatagacatactagaaggtaatmaaccaatccctactgactagttgtttccaacttaggtcctttcaatttttcacaattaaaaacaatacagttggcagtaaataatgtacaaacatctttgcatgttttctaatcatttctttcatataagtttttagaagtggaattgctaattcaaagaatatggacttttaaaagggttttgatatgatctgccaagtttttttgtttttgtttttgttgtttgttgttgttgttttgtttgttctgttttgtttttcagaaaaatggtattagggtaggttcccaccaagacttttgagatagatcattaatgacttcaaatagtttccttgtgtttcattcactttcattctaatagaaaataacagcctagtcaaatgccaaatggtacatttcccagaggtatgaataagttggataactttcctcacattgtgacagttttggagaaatgaacccaggtca

SEQ ID NO: 20978 - DNA, 537 bp, Homo sapiens
taagtaaccattacataggaaaacattgtcttttaagaaatgactgcatagacatactagaaggtaataaaccaatccctactgactagttgtttccaacttaggtcctttcaatttttcacaattaaaaacaatacagttggcagtaaataatgtacaaacatctttgcatgttttctratcatttctttcatataagtttttagaagtggaattgctaattcaaagaatatggacttttaaaagggttttgatatgatctgccaagtttttttgtttttgtttttgttgtttgttgttgttgttttgtttgttctgttttgtttttcagaaaaatggtattagggtaggttcccaccaagacttttgagatagatcattaatgacttcaaatagtttccttgtgtttcattcactttcattctaatagaaaataacagcctagtcaaatgccaaatggtacatttcccagaggtatgaataagttggataactttcctcacattgtgacagttttggagaaatgaacccaggtca

SEQ ID NO: 20979 - DNA, 594 bp, Homo sapiens
ttatrgctggggaaacaggcacagacaaggtaaataacatgcctaaggttatacacaactagtgttgaattctgggttcaaactctgatctttctctttctgtgtcctggtctcctcatccagttttccttcaataatactatggtaagtgagtgtttcagttcacttgttctgagttgggaaaaattaaatgaatcctggctgtttcttaaaggcatacacagagaaactggccacagacagaaaacaggatgttgctagaaattagttaaaagttattccactttttattattttgagacggagtctcactctgttgctcaggctggagtgcagtgggtgatctcggctcactgtaacctctgccttccgggttcaagctattctcctgcctcagccttccaagtagctgggattacaggcatgtaccaccacactggctttttttgtattttttagagacagggtttcaccatgttggtcagcctggtctcgaatgcctgacctcaggtgatcagcccacctcggcctcccaaagtgctgggattacaggcatgagccaccacgcccggctccattaatatttttaagagt

SEQ ID NO: 20980 - DNA, 628 bp, Homo sapiens
tggcagaggtgcaagagcagttatgaactctcaaatgcttctgcttgtagtcacatcagcacacatctctactggctgaaataagtcactcttcctatttagtgagagaaactacaagggaaatggcatgtgtatatgggaggtctcatagaagaattgaggcctctaactcattaatttaccataaaaccacactaagaggtgcccaaagcagcttctgcggcaatgacaagactccttcctgaagccatgagcagcagctcctggaaggagggacgcccaacaatgtgtcatttggatccaagctttaagacaactggattcagaaacgtggtctccacggaagatttttccatgrgagagaaaaaaacagaagcagcaacacaaaggcaactccagcagccttcctcaggcttctagatgaccacattgggtcttacatcaaccacttagcatctgagaggcgaatttgcacagccaccatagaaaaaggaagggggcctcaagagagatttatgaggaaaagtgttttcagtttctgatggggttgacagttaccacatgtcaatctacaaagcatctctggctggtggttgtctttaggcacttgagagaaagtgggtgtgca

SEQ ID NO: 20981 - DNA, 559 bp, Homo sapiens
gtaagagtttgggaactcttgtgtagtagaattcttcagagaaacagaaccaataagatgtatgcgtatatagaaagagatttattacaaggaattggctcatgcgattatagaggctggcaagtcccaatgtgcactattggctggcagcctggagacccaggagagctgatggtgcagatgaagtttgaaggctgtccgttggtggaattcccctttgcttgggaggctgatctttctgttctattcacattttcaactgattgcatgaggcccacccacrctatggggggcaatctgtcttacttaagagttcaccagtatagtgttactgtcatcctaaaacatcctcatttaccaagaaagaacccagcagacaacatgtttaagtggaagaaaacatagatgccacactgcaggagaactaggacaaagcctgcaaactgccttgcagaggggactgatgccaatggcatctgttttgtgaggtgtaagccatttttgccctaagtagaaaaaaaaaaaacccatacactacctcaagtgggaaaccttgaaa

SEQ ID NO: 20982 - DNA, 601 bp, Homo sapiens
aagctactgagctcactaaagacaaggaaagtctcagaaattgtgacagaccagaggaaactcaggagacgtgacaaccaaacgcaattatcatatcctgaattggatcctggaaaacaaaaacaactagtgaaacccaagtgaagtctggagcgtagttcatcgtaatgtgccagcatcactgtcttagttttcagaaatataccaggaaaagaagatgcaacattaggggaaaccaggaaaggggcacacagatactctctgtaccatctttgtaacttttctgtaaatataagattattccaaaatgaagtttacttaaaaaaaaaaaaagcatagaggtttggcatacttgggatgtcttccaagtctcttgttgagaaccacttccactttcttccctaacaataaccaaaaactaactagcaattccccactcagcccctcctcagccctgcctgcccctcactcaggcatgttttcttctgctaamccaggttcacacgaggcactggtgctgccgttactcaataaagcaaccaggtacagtggttggttttgcttttgttttaatccaaatgattaaatcagctgcatttaa

SEQ ID NO: 20983 - DNA, 619 bp, Homo sapiens
aatgaggacaccagtacctgcagcagccacaagccctgactcgcagacgagtggctttgggcttttagagaatggccagagagtgtccctctggggtgagaggattccaagaaggtaytggatacataatcattttgtatgaaatctggatgccaaccacctaagactcctggtctttcagaggacagaagtccatacgagcatttccaggcatctgggcccagtgctgcggctttgcttgctgccagagaagaccacctgggtgtggtcacaaccacaccactgggtggacagcacaccctacccttgcccctggcagagcaagccctgatcaggtgttagctacaccttaacacagcacaagccacgggaacacttccacggcactgtcacacagtggtcgtgacggctgaatgagctaagatctgtgatgcactgtgccagtcaggacctgcaggagaaagaactcgccccacgaggtccagaggaaaagtcgctaatcaaattacaactttgttacaagagaaacttgggactgtaacacccttcccctacaccagaaagatgttgagagaccaaagaatgactggggccagtccagtctggtgagcagatgcat

SEQ ID NO: 20984 - DNA, 461 bp, Homo sapiens
catggttggtttggattctggtataagaaattaaagtggcaaagtagtgtccttcaagaaagcaaatgacaatgtgtccacctggaaccacctgcaagggcaacagtgggggcatggaggtgtctatgcctacgttagacagcagagctcagtgtcatagaggagttgagtagagggaggaggaggagagtgccacacagagaggacgaaggaatggaaaacacatgcgcatacacacatgcacacacgtatgtgcctgcactcacatgcaggcaccctcatgtgcacacccagctgtgyctgtgcatgcagcagaggaaggggagatggggagtgaaggagaaactgagtgaagaacagcagaccaacaggcacctgggtgactccagcagagcacagggctccacatggaaggtgggttcaacaagatcagctggtatctttggggggaatggcttggg

SEQ ID NO: 20985 - DNA, 729 bp, Homo sapiens
agttcgcccttacatggtgggaattcaaacacacaaaactcactatttgcacaaaactgttctttctggtttggagtaggccgccatgcttttttaatgttcttgcagcatgtatattcattacagaattcagataaaatttgcttatgttctgctattatgtttgatcgaattcgaatcaccgtgagctcattagctcaatatgtggtttgccctcaagtgcacactgtttattactttgtaatatgccactatgagtactgacatttagagttgtttaaaggccaagactggaaacagccctacccttattttctgtgtattggggatgggagtaataacattttggggagctttttaaatctcacagagaggaaaatggcctgctctggcaggtgtgtgcaggatagagtatgtttcatgtgttccrgtgccaagaatgagcgctgtactatggtagttcccttaggatttgtatgtgctctgggctcatgaagacattgcatcgtgagttgtggccgttgtaccctttttcgattacctaaaaagggattatttctgagacatgaaaggctcccatcattgactgtggatgtggaaaacctttcctagcttagagcatttatatctataatacattttaaagtcagagttcatgttacctgttttaatcacatgactacatgtcccagtacacaaaagggcactggttggcattcttcttaaagt

SEQ ID NO: 20986 - DNA, 521 bp, Homo sapiens
acaaccgggggcgcggcgggggccagccccgcgccctcgcagctgcgccttcttgcgcggccgcccgcgtttgcccatggaggagcgggrgtccgccgagctcgtcctctaacggggctgcgcggcccggccgagctccgggcccccagggagacccggccggctggagcagagaaggcgccggggcgaaaagccggcctgacttcccgagcctcgctgcctgcagttgtgtgtgtgagtgtatgggagtgtgtgtcggtctcgctgtgagtctgtgtgtatgggagattgaatgaacctacaggacagacggaggcactctggcgcctgggtcctagtgcgagcctgtcgccatcggaccggtcaaaataaaaggtggagactagcgagcgaggcagggaccgcccctgcccgtccccgcaggcttccctgcctctccccaaggcttaccacagagtagaacactgtcttttaaccggaatggaaaaaaatacctgatgtctctgggtgcacctgcataa

SEQ ID NO: 20987 - DNA, 821 bp, Homo sapiens
  misc_feature (1)...(821): n = A,T,C or G
ggatgagaagcactcagataaaatataatgtacaacgtgaaatacatgatctcaaaagttagtaggctcttcatcatatagggcctgctagaataaagttgacatcttcaatagtactccaaaacacaatgacctctaagaaattatggagggctaaggaactggatgttcaggtatcctcatttactcagaggtaatgatagattgatctgtcccagttgaggcttttggttgttttcacaagacatttgggcattcaccaacattgccaccacaaaaagagggagaaccattgtagacactccttcatagaaaacacagccattaaaaatgacactgtattaggccaggcacggtggctcacacctgtaatcccagcactttgggaggccgaggtgggcggatcacgaggtcaggagttcgagacyagcctggccagcatggtgaaaccccgtctctactaaaaatacaaaaaaattagctgggcatggtggcacatgcccttaatcccagctactcaggaggctgaagcaggagaactgcttgaacctgggaggcagaggttgcagtgagccaagatcatgccactgcattccagcctgggcaactgagcgagactctgtctcaaaaaaaaaaagaaagaaaagananagnctctgtattttagctgtcatcagagacataccagaaaagcgaccataaattagtaagaaggttgtatcacattctccaaatgtactctcaggcctatatctatcttatccatgctgaaaagctgcaagttcactttcaccccagagtaagtgacaactataatgatt

SEQ ID NO: 20988 - DNA, 510 bp, Homo sapiens
aaggtcactgatcacagatcatcataatagatataataataaggaaaagtttgaactattatgagaattaccaaaatgtgacacagagatatgaagtaatcacacgctgcttgaaaaatggtgctaatagacktgctcaacagaggtttgctgcaaaccttcaatttgtaaaaaaacacaatatccacaaagcacagtaaagcaaattgtaataaaacaacatatgcctgtattgaaataagaatctgtccacaattctgataagctaaaacaaccatcaattatggaatttctgttaacaatctcttgggaaggaaaagtcaagaaggaagtcaatgatttttaatgaataattaaaatgaagtcaatgattaatgaataatcaaacaataaatgttttctagctagttgccaaagtaatttcttctgaacacataatagttgttcaaaaaaggctgataaactaattcatagaaatgttgacccttgtgtgtatactttatcaatgta

SEQ ID NO: 20989 - DNA, 538 bp, Homo sapiens
caataaacttttgttttaataaaatagttttcattacaggatcccaggagagttacatagatagagtcccagcatttctgagagcttctacaaaggtagataaaactgttatcttttttgtaagtgcacaaaaattaatttgggacgggaattctaaaagaaaacataggaaaataattttgcaaccttgggcttagcaaagatttctaagacaagacacagaaagcagaaaccattaaaaagttaataaattggaacttcaccaaaatttcaaactctgctcattaaaagataccactaaaaaatwaaaaaaaaggcaagccagagacttgcagaaaataatcataatcaaatatcagaaagaggaactgtatcaagaataaatcaggaactctcataactcaacaataaaaagaagaacccgaagaaaatatgggcaaaagtcttaaacagacacttcatcaaaaaatatacaaatggttagtaagaaaatgaaaagataatgtcattaattatcaggaaactgctagttagtgca

SEQ ID NO: 20990 - DNA, 551 bp, Homo sapiens
aaaatatgttagtttatttcacttgtatttcattagtaaaataatttgagcaaaattaaaaggcaaaatctgacattaacctaaaggaagaaaattaggaaagaaaagttatttattgagtgcctgttgtgtcccaggaactatgccaagaggacttttcagaggaagtaagagttaaaatgaaatctgaaagattattaggagttaaggagtgtatcaaggcagggagaaggatgtttcatgcagacaatatgcagaagcccataggtaaaaaaaatatggagttgcccaagacctgaatgtaggtcatgactggagagtasgttgcaaggagggagaggcagttaggggagtagatagagaaaagactagagaggtaagcaggagccagccagcttgtgcagagccttgtaaaccacggtaagcaatttggattttatcctgaggggagtgataagcactgaaggatttaaaataggagacataaattatcaggttattgttaggaaggtcattctggttgctgtgtgggaatggattgaaagggttaa

SEQ ID NO: 20991 - DNA, 632 bp, Homo sapiens
gaaaacaaaccatccaataaatgggcaaaatatttgaaagacactttatcaaagaaggwatataaatggcaaataaatccacggaaagatactcaacatcattagacattaggggaatgcaaataaaaaccacaataagatgacactacatactaatttgtagtaaccaaaagcagattagtagttgctgtttggggagaaggagatgaagggaggaggcaaaggaagggatcacaaaggaacacaagttaatttggaggtgatggatatgctaaccatctgggttgtggtgatggtttcgatacatacatcaaaatccatcacattgtatattaatactttaagtttgtgcaattttttatattccagttataccacaatgcaagctgttttttaaaaaagaggaatggcagctggtcttcattttctcaaagccatcccatcatgaaaatcatagaatgttagaactgggagatacattagtgttaaagatctttgaggcagataccttattttccaaatgaggaaactatatgtcagatggactaggtgatttgctggaggtcacagaactgttgactgcagttctaagctccggtctccccactttccacttctctttggaaaaaggt

SEQ ID NO: 20992 - DNA, 517 bp, Homo sapiens
caaagtccatttacctaacttatttcatgtgattctcataattctgatgttagatactaagaccttattatctcaattttttaagtgaaataattgaagtttgcagaggatcagggacttttctaggttcacttaactagtgtctagcaggacaatgcttaaccagtatttcctaactccaagttgtttactctttccattasatcaccatccattctctcaaaaatctaactgaggttaggttggactacagaggaacgaacagctgtttgggatgatcagcagcttagagaatagcattagaacttacaagaatgtacccagggtattgaaatttataataaaaacaaacctcccaattacaaaataatttcaggataaaaaaggtttacacctaataaggccattctcttctttcccaaaaacttcatgaaaagttaatgcagacagttggagcattttagctcctctgctggtctggcctctgactaaaaataaacaagccctctcccctgca

SEQ ID NO: 20993 - DNA, 847 bp, Homo sapiens
tgctttcacaatggaaagactaaatatcataaagatgtccattctcccaaaattacttaatacatttaatataattgcactcatagtctcaataggcatttttagggatctggacaagctgattctgaaatattatgaaagagtaaatggccaacaagtgccaagaaaatctagaagaaagaaaaataggaagagggaaaaataggggaaaaatccataagactttataaaatttagtaattttaaaagtatagaactgattcagagatagaaaagtaaatcaatgagcaaacatagaaatcagcacacaaaatagggaaacaatatgacaggtagtatcataattcagtggtgataaggtagactcttcaacagatagtgtagaacagttcattacatacatgaaaaagttaaatccctatttcatgatatacaaattcacattcccagattcaggcttaaagattgaaattaaaaaaaagaaagtcttagagtgaagcatggagaaatcttcatagaactaaaaaaaggatgaaatattgatacaggctgggcccgatggctcacgcctgtaatcccagcactttgggaggccgaggcgggaggatcacaaggtcaggagatctagaccatcctggctaacacggtgaaaccctgtctctactaaaaatacaaaaaataaaaattagccgggcatggtggcgggcgcctgtagtcccagctactcgggaggctgaggcaggagaatggcgtgaacccgggaggcggagcttgcagtgagcygagattgcgccactgcactccagcctgggcgacagagcgagactccgtctcaaaaaaaaaaaaa

SEQ ID NO: 20994 - DNA, 553 bp, Homo sapiens
ataactttaagaacatgctgtttgatagtcacattccatttatagggaacacatcagtagctcagagcatcaggcaaaatttctcattattaggttatatttctgttgcatattccttgatactagtacaaaagtgaaggcttgtcttactaattgaaaaaaaaatcttagccatatatgccatatggcatgatccagatattagctacatgaccatcttactgtgaacagggaaagatctgactcacaagcagcaattcaaaatgtataaactttttgctccatcctgcccagcagcttaagtcctaaaacttccctggactaagcttaccctaggttctttcccaccttccccttctgactgccccagggagtggccaaacccaggggccaggctcacaaaaccatgaaggatttctaaagacactttagatgctcttaatgaaatataaagtgtgctcccaggatacaaatacaggacaggaattactgaggaccrgtaaatctaatacttccctccctgacatcacttgtagttccaggccagcaaaag

SEQ ID NO: 20995 - DNA, 551 bp, Homo sapiens
acttcaggaatggtgatcattatgtctcgtatctagatttgttgcgatgattgaatgagataagacaagtaagcattcagtgtgtattcacattgttattattcatcagtcatcagccatgtgctcggagaaacccgtcttagtgcacatttattgtatgcaaattcagttataccatggtaatgcttttctacctgtgttggctgatagaaacctcagttcagaatctgtagctcacctctggcaattactttggtaaagtccaattagggctttgctgtatgtattttctgtactacaaagctggcttcatctttatgttcttatctttattaacctttaattctaattttcttycttattttaaaaatagtatttgtttttccttgaaatgcccccctcttctctcctgttcctggttaacatctatttatgcctcatctagcccagcaaacacttttcccacctattagattgggtcacaacccttgttttgcgctctcataacactccagttttctatcttcccttgttgccatttaaagtgtata

SEQ ID NO: 20996 - DNA, 517 bp, Homo sapiens
atgagggcctgcagaggggcggcgtgggaagaatgggagaggaagaggcctgggcgaagggttcgaggtttcttctctctcagccctgggagaacagtcatttccagaagagctggtcagagggaactgagcttagggcgaaatgacaaatcggtctcttttgttctctgtatttcttatagattttttattttttatattacaaaatcgttgttgctcattgtaaaataaattcaggcaaagcagaagtcaaacaaaatgggacagtattcatccgttccctcacccctttcccagaggcggtcagttgacagatgsgtaacgttccaggcctttcctacaacataggagcatgttctgtgcacatccacttggttttccttttgatgggatccatatttcctctaactgctctgctctgtactggcttgtcccacttagcaacacgctgagaacacctgcgcacatcagtacacgcagatttgctgtatcttgcagccacgacgtaacagtccag

SEQ ID NO: 20997 - DNA, 540 bp, Homo sapiens
catatatgwgtagctatatgtctaagacatagatatatagatatacatacatttacatatgtatatgtacatagatatatatatctaagtcctatcttggctttctctaagtcctatcttgactataaatatatatttataaatatatatttaacatgtatatctgtatctatatacatttctaagtcctgtcttgactttcctattttttcaattgttttggcatcacttatttaagcttcagcttctaggtacctcagttttctcttgagctggaaggcactaataaagcttctccagtatttacccagaagagagattcagtgtcattcagtcatttgggcaaccactttgtaaaactaccattgtgtatatgacatatttctccactgtgagaagaaaacacaaaagaagtagagcttagcgtgaagaatgtatagtttcttaggcaaagtagcgttttactctcttttaacaagaaagttctttaagttttttaggggaaagtaacattgtaattgttggattttggttacttca

SEQ ID NO: 20998 - DNA, 540 bp, Homo sapiens
catatatgtgtagctatatgtctaagacatagatatatagatatacatayatttacatatgtatatgtacatagatatatatatctaagtcctatcttggctttctctaagtcctatcttgactataaatatatatttataaatatatatttaacatgtatatctgtatctatatacatttctaagtcctgtcttgactttcctattttttcaattgttttggcatcacttatttaagcttcagcttctaggtacctcagttttctcttgagctggaaggcactaataaagcttctccagtatttacccagaagagagattcagtgtcattcagtcatttgggcaaccactttgtaaaactaccattgtgtatatgacatatttctccactgtgagaagaaaacacaaaagaagtagagcttagcgtgaagaatgtatagtttcttaggcaaagtagcgttttactctcttttaacaagaaagttctttaagttttttaggggaaagtaacattgtaattgttggattttggttacttca

SEQ ID NO: 20999 - DNA, 540 bp, Homo sapiens
catatatgtgtagctatatgtctaagacatagatatatagatatacatacatttacatatgtatatgtacatagatmtatatatctaagtcctatcttggctttctctaagtcctatcttgactataaatatatatttataaatatatatttaacatgtatatctgtatctatatacatttctaagtcctgtcttgactttcctattttttcaattgttttggcatcacttatttaagcttcagcttctaggtacctcagttttctcttgagctggaaggcactaataaagcttctccagtatttacccagaagagagattcagtgtcattcagtcatttgggcaaccactttgtaaaactaccattgtgtatatgacatatttctccactgtgagaagaaaacacaaaagaagtagagcttagcgtgaagaatgtatagtttcttaggcaaagtagcgttttactctcttttaacaagaaagttctttaagttttttaggggaaagtaacattgtaattgttggattttggttacttca

SEQ ID NO: 21000 - DNA, 1229 bp, Homo sapiens
  misc_feature (1)...(1229): n = A,T,C or G
tgcatcatcatcagctctgctacttcttaaaggaacaggcttggaggtggtttttccctccatgattcctctctgctaggtctgggttactttaaaaatcaatagctcactcttctgccagggccctccctttatgtaatatagctgatcagtggctgagccaggcaggggccaggaccagtcctggagcttgtgaaggttccgcattctagcctagccttcatatgagtgaaaataaaaagagatgagagggtgggtcattcttggcctctgcagccagtctatccccatcagtgtgggttgtctgcagattgtggaggcaacaggagggagctgcctggaagtcgttgaactagggccaaagattgggtagcattttgaccggaagccttaaaattggccagggtcccacactaactggtgttctggggtgcacagcacatgaattgatgccaagtgctctcagatgtactaggaggtccacagcacgagggcagctagctggagacctggacactgccccgaggcttgtagcagcatcctcagccctgtccgccttgcagcagcaatgaccacatgcaaactgttaggctgggggagctgggagccctacgtgcagcacaggaatggagatgggggttagccagagctgagcatggtgttgcaagtatcggggatgcaagaaaatgaaagcagagctacttaatgatgtagatannnnnnnnnnnnnnnnnnnnnnnnnnnnnnnnnnnnnnnnnnnnnnnnnnnnnnnnnnnnnnnnnnnnnnnnnnnnnnnnnnnnnnnnnnnnnnnnnnnnttccccagtttcagtaagaactaaatgactctgtaagaaataattcagctttcctgaggaaagaaaacaaaaaaacaaaactcccaaaacgaaacaaagaaagaygataaaaagtgcttagcagaaaggaagaaatgatgaaggtaggggtggcagaatgaaaataaggaggatacaattacttctattcctccagatagattaaacagaaaagatccttcttggctgtacaactaggatatggttcgactgtgggcataaaggaaacatccaaaggaaggagctccccactacctaggtcacagaataccaaaaccacccatcaagttctggttcagtgaaatccaggacctctctcctctaggacagaaatggctttctgaaagccatttccttacggcttttccagaag

SEQ ID NO: 21001 - DNA, 1229 bp, Homo sapiens
  misc_feature (1)...(1229): n = A,T,C or G
tgcatcatcatcagctctgctacttcttaaaggaacaggcttggaggtggtttttccctccatgattcctctctgctaggtctgggttactttaaaaatcaatagctcactcttctgccagggccctccctttatgtaatatagctgatcagtggctgagccaggcaggggccaggaccagtcctggagcttgtgaaggttccgcattctagcctagccttcatatgagtgaaaataaaaagagatgagagggtgggtcattcttggcctctgcagccagtctatccccatcagtgtgggttgtctgcagattgtggaggcaacaggagggagctgcctggaagtcgttgaactagggccaaagattgggtagcattttgaccggaagccttaaaattggccagggtcccacactaactggtgttctggggtgcacagcacatgaattgatgccaagtgctctcagatgtactaggaggtccacagcacgagggcagctagctggagacctggacactgccccgaggcttgtagcagcatcctcagccctgtccgccttgcagcagcaatgaccacatgcaaactgttaggctgggggagctgggagccctacgtgcagcacaggaatggagatgggggttagccagagctgagcatggtgttgcaagtatcggggatgcaagaaaatgaaagcagagctacttaatgatgtagatannnnnnnnnnnnnnnnnnnnnnnnnnnnnnnnnnnnnnnnnnnnnnnnnnnnnnnnnnnnnnnnnnnnnnnnnnnnnnnnnnnnnnnnnnnnnnnnnnnnttccccagtttcagtaagaactaaatgactctgtaagaaataattcagctttcctgaggaaagaaaacaaaaaaacaaaactcccaaaacgaaacaaagaaagacgataaaaagtgcttagcagaaaggaagaaatgatgaaggtaggggtggcagaatgaaaataaggaggatacaattacttctattcctccagatagattaaacagaaaagatccttcttggctgtacaactaggatatggttcgactgtgggcataaaggaaacatccaaaggaaggrgctccccactacctaggtcacagaataccaaaaccacccatcaagttctggttcagtgaaatccaggacctctctcctctaggacagaaatggctttctgaaagccatttccttacggcttttccagaag

SEQ ID NO: 21002 - DNA, 562 bp, Homo sapiens
tgtgtaatagaacccagtttttgaaattcaagagcagcaggaggaaatagtggaaccaaacactgattataatgattccaagatgataataagggtaaacttacttattttcataaaactgagttatgagcagtggtgttctcctgtagaaaaaaatatggatttgtttagaaaactcagctttcttttctttttcatctaagaatacaccaatattggctttagctaaattatactttgctttgtgagtagggatctatgtcttcattttaggaagaggagtttcctgttgtacctcccatatgagcacccttgagttatttttaatctcttgagacttgtcagggcttcgtaagcactaggcattattcattacaattcatgagtccaggaatgatttattatagataatttttcttcttgagacagggtctcrctctatctcccagattgaagtgcagtggtgtgatcatagctctccatagcctcgacctcctgggctcagacttctgagcagctaagactacaggtgtgtgccaccacaccctgctaatttttacat

SEQ ID NO: 21003 - DNA, 938 bp, Homo sapiens
attctagatccagttcctcctggacactgaggtgttaaaccctagtcaggtaaaaagaacatcaaggtaaggaggtatgtggctctgaccctacccttccattggcatggcctctgaagtctgaggttcctggaatggcatggtgtggtacgtgtctgccaggacccttctcccaacagctgatcttacgtgactggtacctttctgagtcccagacttagatcttggggcctcttcataggaaagagggacttggagggtttcccattcagggatgatttaaaagataataatattagtagctagtatttataagcacattatatgtgccaagtgctgttctaaaaacttttcttatatcaactaatctaatattcacacaaccgttggagatagatactatcattacccctattttatagtcaaagaaatggaaacacagacaggttagatagattgcccaagcctacacagctagtaaacagtagaactgggatttgaacctagataccctaccctttgggctcctagttaagtgcttctcgcaatgtaacatcttgatccccatccagtgaggtttttgtttttgcttttgtttggagacaggagatcttgttctgttgcccaggctggagtgcagtggtatgaacacggctcactgcaacctcaccctcctgggctcaagtgatcctcctgcctcagcctcccaagtcccaagtagctgggaacacaggtgcacaccaccacacctggctaatttaaaaaaaaaattttgtagagacatggtctcaccatgtcgctcaggcaggtcttgaacacctrgactcaggcggtctgcccatctcagcctcccaaattgctgggattacaggtgcgagccgcagagcctagcctccagtgagtttttagttgaaagctacacatagttctacttccgt

SEQ ID NO: 21004 - DNA, 478 bp, Homo sapiens
gggaatatattatgaaataataatggttgttttgataagagaaagtatctggtaacaatatctcatcaggctgtatctagagtgatgaggaaatcatatttattatttctatyctgaatagaaaatacctttggaaaaggaaactgtttaagttaaattgctaggtaggcaggtactactgtggctgccaattctacttaggaaaagcttccacacctaacagagcatacatttgcagaaatgttatcatcaatggagatttgccacaaatttgagcagacgggttacaccttgggttgagtcactggatcaagatgatttaaatagtctatttcttaaaatgctgtcaagagttattctaaagggaggggctatgtgaagtctgtaagagtgtgaagaaatagaataagaaaaatctccaaactgaagtaacaagtactgctaggattctaagattaatctgagaaaacaggcagtt

SEQ ID NO: 21005 - DNA, 478 bp, Homo sapiens
gggaatatattatgaaataataatggttgttttgataagagaaagtatctggtaacaatatctcatcaggctgtatctagagtgatgaggaaatcatatttattatttctattctgaatagaaaatacctttggaaaaggaaactgtttaagttaaattgctaggtaggcaggtactactgtggctgccaattctacttaggaaaagcttccacacctaayagagcatacatttgcagaaatgttatcatcaatggagatttgccacaaatttgagcagacgggttacaccttgggttgagtcactggatcaagatgatttaaatagtctatttcttaaaatgctgtcaagagttattctaaagggaggggctatgtgaagtctgtaagagtgtgaagaaatagaataagaaaaatctccaaactgaagtaacaagtactgctaggattctaagattaatctgagaaaacaggcagtt

SEQ ID NO: 21006 - DNA, 955 bp, Homo sapiens
aggtcagagcaagcaatgaattgtcttcaagtayctgcatgcttgttttgaaggtggctcggagaaacaagctctaaataaaagtaattaacagaaccaaacaaattgttagaagaagaaattgcttgctaattggcatatgttaattggcctgtggtttctagtttacttgaagggcaacctttgaaaagctacagtttatatcacacgatcatgcaagaggatgtgaactgcttttctttaagcacactgagtttgatagtcaaatctgaataaaaccagacttcattagaaccctctgagaaaataatccatttgaatccaaaatgagattcatggcaccggctagtacctagatacagtccctttaataaaaggattcagattctggggatagggacatccaaccctaaggcccttttgtataagaaaataaaaatgaaaagtggtttgagggattccttttaagggaatgtgttctttgagctaagaaatattgaactgtaaagggaaactatgaagacagaatcaaatcccaaactccatccatgttcactttatagtaaaacaaatttgaactctaagtgtttcactgtaaactgtgcaactattaagactaccatagttactgtttttaaatgtcagcgtttaatcctggttctggatgtcaccccttccaagtgagagcttgcttcccaccctaaagtctcaggcacccctgtagtttgctggaaagagatagagatgctatggttggtggtatctactctttccctcaaaaggcactcagacaaagaagagcaaaggaccactcttcttttctctcactattacccaagcttgttggcctgaggttcctaatcatatgagcaaaataagatctgctctgccataatcaatggttccaggaaatacctgggggccgggtggaggagggggtgtggaatgaccaatg

SEQ ID NO: 21007 - DNA, 523 bp, Homo sapiens
ctgactagaatgctttttcctgtttttcctggactttttcttgtcacacaaatctccatttaaacattagccttttagaaggtggctgttaacattctagtaacacgaggcagacaagaaataaacattacttaaatacaaagaatatcaacagtgataggtgctaggcagagaactgatgtagcatgatgtgacagtgtcattagaaaggccttttgaagacctgctaaattatccctctgtctctcatgtttatcatcttctccccctttgcaaatactgtggtattcacaacactggatttaaattctaccttccctgctgtrtaaccatttacatatcacttagcttctaagaatgtccgtgactgcatctttaaaacagaaataatggtattttcttcctcatagatttgttgggagatttgcatgagatattcatgaaaagcatttagcacagtaactatcacttattagcaattgttattaacctaagtgaaatggggtttaataaatgttagcta

SEQ ID NO: 21008 - DNA, 523 bp, Homo sapiens
ctgactagaatgctttttcctgtttttcctggactttttcttgtcacacaaatctccatttaaacattagccttttagaaggtggctgttaacattctagtaacacgaggcagacaagaaataaacattacttaaatacaaagaatatcaacagtgataggtgctaggcagagaactgatgtagcatgatgtgacagtgtcattagaaaggccttttgaagacctgctaaattatccctctgtctctcatgtttatcatcttctccccctttgcaaatactgtggtattcacaacactggatttaaattctaccttccctgctgtgtaaccatttacatatcacttagcttctaagaatgtccgtgactgcatctttaaaayagaaataatggtattttcttcctcatagatttgttgggagatttgcatgagatattcatgaaaagcatttagcacagtaactatcacttattagcaattgttattaacctaagtgaaatggggtttaataaatgttagcta

SEQ ID NO: 21009 - DNA, 559 bp, Homo sapiens
cctaaaactcactggactttctgtaagaagtgaggcaagcaccaaccccacaaagtgacacagtacaagaagggcaaggawtctctgtaggcccagggaaagcggcgttacgacaggaaggagagtggctgtggtgggcagactaagccgattttctggaaaaaggctaaaactacaaagaagattgtgctaaggcttgagtgcattgagcccatctgcagacctaaaagaatgctggctatgaagagatgcaagcgttttgaatggggaggaggtaagaagagtgagggccaagtgatccagttctaagtgtcatcttttgtttgattaggaagacaataaaatcttgagttaaaaaaaaaagtttatattgaaaggcaaataaaaccaagaagactaaacacaacattgaagaaaaagtcagaggtctgatgctagccagcttcaagacttatgataaaactacagtaatcgaggcagtatagtattggtgaaagaatagacaaataaatcaatgaaatagaatagacccacagaaatagacaagtatagccaactg

SEQ ID NO: 21010 - DNA, 572 bp, Homo sapiens
tgttgacatcctaatcctcaaggtgatggtatttggagactgggcctctgggaagtaattaggttatgatggggaatccctcatcaatgggattagtgcccttataaaaaggactcccggccgggcgcggtggcttacgcctgtaatcccagcactttgggaggccaaggcgggtggatcacgaggtcaggagatcgagaccatcctggctaacatggtgaaaccccatctctactaaaaatacaaaaaaattagctgggygtggtggcgggcacctgtagtcctagctatttgggaggctgaggcaggagaatggcgtgaacccgggaggtggagcttgcagttagctgagattgcgccacggcactcctcaaggaaccaggaaacgggccctcactagacactgagtctgccggcaccttgatcttggacttcccagactcctgattcatgtctattgcttatatgtcactcaatgttattctgttctagcatcccaaatggaataagacagaagggaataacagtcaggggaaaaccagtgcctagtcctggcttgtggtataataaca

SEQ ID NO: 21011 - DNA, 1246 bp, Homo sapiens
atcaactatttatttgttcagcaagggacaagtgaaagagaaaagttttgtcctagtaaaagcgaaccctgtgaaataggtaatctatatatctttatcaaacgcgcaaagtgcatgcagcatggcttatgtggtcacatcagaaggggattttcgtttcttgaggggtgccaaacttatttgcctccgaagatgaagggccaaattactttttttttttttttttgagatggagtcttgctcggttgcccaggctagagtgcagtggcgtgatagctcactgcagcctccgcctcccgggtttaagcaattcttctgcctcagccttcggagtagctgggattacaggcatctgccaccttgcctggctaatttttgtatttttagtagagacggggtttcaccaccttggccaggctggtctcgaactcctgatctcatgatccacccgcctcagcctcccaaagtgctgggattacaggagtgagccaccacgcccggcagggccaaattacttctaattctgagagtaaatgaaggaaatttasgtgaagcaattaagtggctaacaaatgtcaccaagattgttataataacagctattattactatttttactacagtctatattttcacaaatcatacatataaaccaagagtcaaatttgggagaaatcattgtcacctacacactgaatacataaggttcatatttaggatatcagacacttaggtcttcaaagaggtttctgccttgtggacatttaacattttttttttttttttttttttttttttgagatggagtttcgctcttgttgcccaggttggagtgcaatggcgcgatcttggctcactgcaacctctgcctcccgggttcaagcgactctcctgcctcagcctcccaagtagctgagattacagatttgtgccacaacacctggctaactttgtatttttagtagagatggggtttcaccacctcaggctggtctcgaactcctgacctcaggtgatccgcctgcctcggcctaccaaagtgctgggattacaggtgtgagccactgcacccgcctgacattcaatattttttaaaaagtggctgaaccaaatagaagaatcatgaataccagtggtaggtggggtccgtttctgggaggtaaagtctaattccagtggagctgggacatatttctttctctaaaatacagaaatatgattgtgttttgatgtctacttaagaggg

SEQ ID NO: 21012 - DNA, 1246 bp, Homo sapiens
atcaactatttatttgttcagcaagggacaagtgaaagagaaaagttttgtcctagtaaaagcgaaccctgtgaaataggtaatctatatatctttatcaaacgcgcaaagtgcatgcagcatggcttatgtggtcacatcagaaggggattttcgtttcttgaggggtgccaaacttatttgcctccgaagatgaagggccaaattactttttttttttttttttgagatggagtcttgctcggttgcccaggctagagtgcagtggcgtgatagctcactgcagcctccgcctcccgggtttaagcaattcttctgcctcagccttcggagtagctgggattacaggcatctgccaccttgcctggctaatttttgtatttttagtagagacggggtttcaccaccttggccaggctggtctcgaactcctgatctcatgatccacccgcctcagcctcccaaagtgctgggattacaggagtgagccaccacgcccggcagggccaaattacttctaattctgagagtaaatgaaggaaatttaggtgaagcaattaagtggctaacaaatgtyaccaagattgttataataacagctattattactatttttactacagtctatattttcacaaatcatacatataaaccaagagtcaaatttgggagaaatcattgtcacctacacactgaatacataaggttcatatttaggatatcagacacttaggtcttcaaagaggtttctgccttgtggacatttaacattttttttttttttttttttttttttttgagatggagtttcgctcttgttgcccaggttggagtgcaatggcgcgatcttggctcactgcaacctctgcctcccgggttcaagcgactctcctgcctcagcctcccaagtagctgagattacagatttgtgccacaacacctggctaactttgtatttttagtagagatggggtttcaccacctcaggctggtctcgaactcctgacctcaggtgatccgcctgcctcggcctaccaaagtgctgggattacaggtgtgagccactgcacccgcctgacattcaatattttttaaaaagtggctgaaccaaatagaagaatcatgaataccagtggtaggtggggtccgtttctgggaggtaaagtctaattccagtggagctgggacatatttctttctctaaaatacagaaatatgattgtgttttgatgtctacttaagaggg

SEQ ID NO: 21013 - DNA, 645 bp, Homo sapiens
ctctcaagtagctggaaccacaggtgcatgccaccttgccctgctaatttttgtatttcttttgtagagaccaggtttcaccatgttgcccaggatggtctcaaactctcggactcaagcggtccacccgcctcagcctcccaaagtgctggcattacaggcatgagccaccactcccggccctgaattcctgtgtcttagctgatactcaaggatccagggtaatgggtgattcacttaggtccataatccaaggatgagaaaactgggtgtgattttccaagcagtgttcccctttcagttttaatcacacacacttttatatgtgaacaaccatcactggtattaaagatatcytcaacagttcaactatctaagggaatatttcatttagctgagagaaatatcaagtaccttctttaaaaggttacatttcaaaaaataccctttcagataacacttctaaatagaagatgattatggtttgttattttaaaaacaggacataatctccatttattagtttgcaacgtttatgaacttaatgattaaaaaattttatgccatttccatctattgtacttcaccctatacttcttatacgctaaagttttgaaatggttaaaccttagatttggcttattt

SEQ ID NO: 21014 - DNA, 516 bp, Homo sapiens
agcctccgaggagaatccaggatccacccagcccccacggagatcccaggatctccttgttttttaatcgaaaacttgtttttctctcctgtttttaatttcttaaggagaaaatttgagacgaagacaatggccacctaaatttgtgtgataccctgttatttcacagttgccttacaagaataaccgtgtctcatttgtcactttctgctacctgagaaaccactctgtatgatgttgacgtgtgaccatgtccaggtgcagctgacgtagtctcagagacgtgtctttggaaaaaacagtacacaacaaatgattatgagccattctgagcatggtggtgagctgcagccagcagaacacacccagccctgccagcaaaggaagcttggtcaaccacagcagcctgtatgggctgcgatggaaaccatgttgagtccccacctcacagttgagaaaagcaacataatttcacatgatgcaytagccgtggcgcctgctacacacgagctctgg

SEQ ID NO: 21015 - DNA, 517 bp, Homo sapiens
gggggctgggtcggttctgggttctcctcgggggctgggtcggttctggattctccttgggggctgggtcggttcaggattctccttggggcttgaacagttgcttcttcttgcctgtcttctcaactctgtgccttaaaccaacttaaccatcaaagaaaacaaattgtatgtgcttcctaccctgggtcttcttaattgtttgtggaattctggaaaattcgcgagcaaggctgttccctctaatttagtggttcagaaactgattttaggctttccatctccttgacgtcgaaaacttgccaaactttaacttctgtgatctttgattcactgcttaaaacaggtcctgggcatcaggtttagatccactgccgaaatggaaaatcctgttctcagacacagcggtgagtgtgatgctgcagacagttctcaytgggatccaccttgtgattctcatttgggtctaatagcctttctttttttcagttccttgttattaagttgctgtttgaat

SEQ ID NO: 21016 - DNA, 524 bp, Homo sapiens
ctgtgtgacctgtcaccctccaggcctcaacatccacactcatgtcagcagggtgatgacaacttcccagggaccccagaacgtcacccgcctcaactgcagacgcctctgagcacatgtcccattcacagagcgtttgggtttcttctttaagcctgctggttatgacagaaagtaaaatattaaccaagaagaataatctcacatttaaatacagcttcacacaaacacatacatctgtagcaacgtcgttacaggagactgagaaggcgtgggggctcctcatcattccaggctgtgcttttcccttgagaagcaatagaggtaggagactgcggctgtttctgacctctggaccggttagagagcgtttgtagggtaaaaacatacacaggaggctgtgtgttatgagaggagccaccaaatcggcaggcgacagcgagggggacacgmggcctgcagagggcgtggacatgaccagctgcttcgaggcctgcactctgcctccgacggctttatctcta

SEQ ID NO: 21017 - DNA, 524 bp, Homo sapiens
ctgtgtgacctgtcaccctccaggcctcaacatccacactcatgtcagcagggtgatgacaacttcccagggaccccagaacgtcacccgcctcaactgcagacgcctctgagcacatgtcccattcacagagcgtttgggtttcttctttaagcctgctggttatgacagaaagtaaaatattaaccaagaagaataatctcacatttaaatacagcttcacacaaacacatacatctgtagcaacgtcgttacaggagactgagaaggcgtgggggctcctcatcattccaggctgtgcttttcccttgagaagcaatagaggtaggagactgcggctgtttctgacctctggaccggttagagagcgtttgtagggtaaaaacatacacaggaggctgtgtgttatgagaggagccaccaaatcggcaggcgacagcgagggggacacgaggcctgcagagggcgtggacatgaccagctgcttcgaggcctgcaytctgcctccgacggctttatctcta

SEQ ID NO: 21018 - DNA, 524 bp, Homo sapiens
tgattgtgcctcgatttcttcattaacatctgccttttctacctcacaggattacaataaaggmacacacacacacacacacgcacgcacaaaaagattgttttgattcttcaaaagattgttctgattctcatatgaaggaaaggaaaacagcatttactaataattttgctaggtattccatctaaattatcttatttaatccacagtacaaccctctttggtaaatattattatccccaatttgcagaccagtaaacaaaggctcaaacttacacagttattaatcagcagtgcaggatttcaaacttacatctatcataaatgactgatacagtcaccataccaggtgaagctccccatacgggaaaggtactcaacagatgttttggacttcacttattgctcaatacaaaagtcaatgccttctgtattaagcaatcatatggaatcaatcatttatttttgagtatctactccacaacttgcaaatcttgaaacttacatcccttagtgacagttca

SEQ ID NO: 21019 - DNA, 533 bp, Homo sapiens
ttgataccagcctgagcaacataatgaaaccctgtctctacaaataatttaaaaagaaattagccaggtatagcatgcagtggtggtcccagttactcaggaggctgaggcagaagagtcacctgagcccaggaggttgagggtgcggtgagccttgatgacaccaccacactccagccygggtgatagaatgagatcctgtctcaataaaaaggaaaaagaaaaagtaaaagaaacagctgtgggaataattactctactggaaaataggagcatgatctgaacatgtgcatacttaatgctaagactcaatgccaatcttagaactgggcgcctaggccccatacattacagggccctatgtatcatcaagagagggctatcaacttatgaaaaaacacactggtgtatgtcactcaccatccagcactcagagctgccacagtgcaatctataaccttaaacattcccttttgtgacactaacttcatttaggctccaagtaaatgtttctccacagctcttgctcaaaa

SEQ ID NO: 21020 - DNA, 508 bp, Homo sapiens
taccccagctagcagagagtgatctgggacccactttgcacttttatggggctgtcacctcacagggttatgccaaggatgaaaacgtgcacaacacactatgcatcttaaggaacttttcrgcaattcctcagtttacctttaaaactcacaggaaccatggctacaatccttcagttcaggattttgtaattctgaccagttaatgaaatgatcatcagacaataggtgtttctgaagggtcttgcaagatgtggggaacaaaagaatgattacactttacgggctcacaatctaggaaagatgggcacacagagagagaggtgggggagagaacagtggggagtctcagtgctggatgaatgtgtcaatgaggaattaccccaggagtttgcaaaaggaggacactgcttgagtctcaggaatgccttcagagggaaaatggattataaacccagtccaccgagaagaagagaggcccagcagatgggttctgcagatactgacc

SEQ ID NO: 21021 - DNA, 508 bp, Homo sapiens
taccccagctagcagagagtgatctgggacccactttgcacttttatggggctgtcacctcacagggttatgccaaggatgaaaacgtgcacaacacactatgcatcttaaggaacttttcggcaattcctcagtttacctttaaaactcacaggaaccatggctacaatccttcagttcaggattttgtaattctgaccagttaatgaaatgatcatcagacaataggtgtttctgaagggtcttgcaagatgtggggaacaaaagaatgattacactttacgggctcacaatctaggaaagatgggcacacagagagagaggtgggggagagaacagtggggagtctcagtgctggatgaatgtgtcaatgaggaattaccccaggagtttgcaaaaggaggacactgcttgagtctcaggaatgccttcagagggaaaatggattataaacccagtccacygagaagaagagaggcccagcagatgggttctgcagatactgacc

SEQ ID NO: 21022 - DNA, 549 bp, Homo sapiens
tgcttcccgggttcaagtgattctcyaccctcagcctccagaatagctgggattacaggcatacgccaccacatctggctaatttttgtatttttggtagagacggggtttcaccatgttggccaggctgatctcgaactcttaacctaagctgatccacccaacttggcctcccaaagtgctgggattacagacataagccactgtgctcggtgcagaatgtctatttttctaagtagcagaattatctacactaaagctttgtgaggaataggagagagtggaatcttgcatggtataattttattaaatgacctctaagattactcacagttttttttcttttttctttttttttttttttttgtgagatggagtcttgctctgtcacccaggctggagtgcagtggcgcgatctcagctcactacaacctccagctcccaagttcaagcgattcttatgcctcagcctccagagtagctagaattacaggcatgtgccaccatgcctggctaatttttgtatttttagtagagacagggttttac

SEQ ID NO: 21023 - DNA, 680 bp, Homo sapiens
tttccattctctcactgagtgagattttgatagaatcatttccttcaacttgcacttcaattatatatttacaatatccctttgttgactacactccaaattacatactttcattacttttaaagtttgtattctgtaaggaatgaacataggcctttaggacttttatttttagaaacagagtttagagttattttaaaaataagtggcaagtgatactttatagaacagagtgcattatttctgattgagtatagatatatagtaagtcttgtaatcaactgactgtccttaagtaatgatgcacatagtttatgtyatttagtattttggaaaagagccaaataattccgttttgtttgtttgttttcttaatcaaatgagtaatgcattttaccccgattgcagaaatttggcccttagaaaacccactaatgaaatgagcaaacaccttaaaagcttgattttttgtttttttgtgaaggataagtaattttaaaatcttggcattgaggttggtgggtttgcttttgaggttaaaaagacatgaaaagaacattatctgaagatgagatctctgctactttatgtttaaataggcttttgacccaaaccagtttaacctaaaaagagtcacataatcaagttctgtcttaaccaggttcattctattaaatgac

SEQ ID NO: 21024 - DNA, 680 bp, Homo sapiens
tttccattctctcactgagtgagattttgatagaatcatttccttcaacttgcacttcaattatatatttacaatatccctttgttgactacactccaaattacatactttcattacttttaaagtttgtattctgtaaggaatgaacataggcctttaggacttttatttttagaaacagagtttagagttattttaaaaataagtggcaagtgatactttatagaacagagtgcattatttctgattgagtatagatatatagtaagtcttgtaatcaactgactgtccttaagtaatgatgcacatagtttatgtcatttagtattttggaaaagagccaaataattccgttttgtttgtttgttttcktaatcaaatgagtaatgcattttaccccgattgcagaaatttggcccttagaaaacccactaatgaaatgagcaaacaccttaaaagcttgattttttgtttttttgtgaaggataagtaattttaaaatcttggcattgaggttggtgggtttgcttttgaggttaaaaagacatgaaaagaacattatctgaagatgagatctctgctactttatgtttaaataggcttttgacccaaaccagtttaacctaaaaagagtcacataatcaagttctgtcttaaccaggttcattctattaaatgac

SEQ ID NO: 21025 - DNA, 707 bp, Homo sapiens
tggagaaggaaaaaagtaagatgagttccacccagctgaaaatgaaactactggaagaacgattgttgccrttaccccctgaaaagcagccctgcatttcagctgctaagaaaagcaagacactgtttgctctttccttctactcacatgtccggcatctgtctagagtagctgaaggttctttgatttctgagatgttctaagttgcctttctgctagagtatctttgatagtttcttgaaagcctattcatcccccactaaatacagtaactacaatttgaacatagctgaaccctttataattaaaggtttttctcacagccatggaagggttgaaataggttgacttcacagagtccctgcagattttgcttaaaacgttttgatgattttagagaggatttgtcatttaagaataaattataatcaaaacaaaaaccacagcagtgtttgaatcatggcaccatgatactacgaagatggtttataattaaataaaagaatcaagttctcaaactgagaaagggaacaacttcccaagacacacagcattttctacagctgctctaaataagatgatccctggtcaaaatgaacaaacttaagaatgacctccctttaaagtcagtaatctggtatcctttctgtatttatcattttattcatttctttgcgtttatgttcagaggggaaatccaaatgcct

SEQ ID NO: 21026 - DNA, 690 bp, Homo sapiens
ttttttttttttttttgctgttcagttttaggagttatatattctggatattaaccccttattagacatgatttacatgtattttcacttattacataagttacattttttactgtaataaaatacacataacataaaatgtaccatcttaaccatttaaatgtacagttcagtagcattaagtacatacagtacattcacctttttgtgcagccaccaccactctccatctccagaactttttcatcttcctaarctgaaattctacccattaaacaataactcctcattgcctcctccagcccctgggaaacaacattctactcctagactactttcagactccatttcttccttcacttaataaaagagagggtccactgctgactaataggattgtttttatatgtggaggccttcttggaaacgtgattgatttattttagagaatagtaatagaaaatagggttgttgaaagaaaagagatagagacaaaaactggttgggtgttttcatactggatgtcttatccgcaggcctcagcattcctgcctcggttctgcctgattcttttacatcaagaagttgatcttgctagccatttccatgttgtagatctgccagcaggtttcatagatttccctttgttcctggtggcatggcttctcacagtacaaaaattagccaggc

SEQ ID NO: 21027 - DNA, 625 bp, Homo sapiens
tgcatctgtgttacagagcaagaagggtgttataaataaagaggatgccacagcagaatgttggatttgcagttagatgtcttctggagctcacctgtccttatataccagacttttaatataccttacagtcaggtgaggagaggagtcagggttgcaagtgagaggctgatactgggcttccattataaagccagagcccggaaagaatgatcccggtaagactctactcactggcatggggactgcagggctccccagcagtatctccacactgtggagggagagcagtcttgagtgaacatggtttcttccctgggattcctcagcactccctgctatatcactacatatcaaggtcaagataactacaacagaaactttccttcgtaaaaaggacgggtggaggacacacagcaatcattggtcagtagcaattatgaaatctgataggacaggcattgtgaggcagctrgagaatttccttgattagacctgtttccactcgttagtggaattccttttcgtttgtgtcccctgggtcacccctctggtggttcttccatgttcattatcctccttggtcacatctgtggtgggcattggagattatgccttacttggg

SEQ ID NO: 21028 - DNA, 1721 bp, Homo sapiens
atgccaggcactgggataccagtgaccacgacaagcaacgtcctgctctcatggtgtctgctttgtagtcacaaagacaataagcaaagaaataacttcagacagtaagaagtagcatgaaaaaaaaatgatgatgagatagtgccttgggtggggcaggaggagtcactttcaatgggatggttagacaggcccttaaggaagcaacaatgagcctgagaattctaagggaagagggcagaggaaacagttataaaagttgttgagttttcattagggaaacaatctgggtctatgacaaaggagccactgagctgaccaagatgagaaaatgctgtttttccataagctgtcataacatagaccctccaggccctggcaagggcaggacctgactcctcctctacaaacattcgtaagtgccgactgcatgcaaggctcagcctccaagtctaatcacagcccagagccaagtgtctggaggcaatgagaggaatgcgctctgacctttcagagtggcaatgacaatgataaatgaaggggcatttggatgctcgcccttgactataagaggaaacaggcagactgtgaactggggctcatgttctgaagcttaagtttcacccattatgcagtttctagggtcacttgttgccacagagtagggcaagaatttgaacttaaggactgccctggtggacttacagacccctcagctgtcagcatagatctctgagctgaaagcacatgggcaacctcaaagcttgcaatatcttctgctgggggagtgtgggggagaaggaaggagggggaagtgaggaggtgagagggacaggggacagagtaaggagtggcctggtgggcatggggttgactgaggcaatataaaaggctgtgctgaaagtcaaaacacttgggtcacagtgccagcagtacgcagaggagtcaggtaacctgtccagccattacaatagaaccagggcagcacctgctagggccaggcatggagcgggctcctcgctcacagtatctcatttaaccctcaacacaacactggggaaagtactattattatccctaatagagagagggggctgcaagagatttcacgccttgcccaaggtcacataatggcagagatggaattctaacttgggtcaagccaatttcaagttgttaactcattggttatatgggaagggtaatcacatgtgctctacctgtctcatgcatttgttgggagatcaaatgagatgagaaggtgctttgtcaacattaatgagctgttccagggtctgctggtgccagcatggttcctagcagtgctgctrtctgcataggttcctgcccccaaccaactacacacctatttcccactctcccactatctcctgaaattctggcccatgcttctcccctggggtggtggcacattcccccatggccgcccttccccggagcagcagcagccctatccccagccaagtcttggcactggacccgcaggatggggagggcatgtggaaaatctgaggagatgtttttcttccttgggaaggacgccaaactgcagtttgctggcgttctgtaaagtatgcacccagagaagatttagtttaggaagaaatgggggaaagaatccctcactatttgcttagtgagctgggttggccaagccagagccaaaccccacatatttgggctgactcgctatgtttaca

SEQ ID NO: 21029 - DNA, 484 bp, Homo sapiens
ggtaattayttatttcccttgtcaattcacatatagcaaaagtataaaatcagccactaaggcccagatactgcactaggatactgcactatcctttgtggtgcccccatcctaaaaccttctgaaatggctcctttgtaaatagacacttcttgaatatccaattctgggtatgtcatacattttctgccgtgacatactccacccattgtcatttcctgacattcatgacagcaccaccaactttatggtgacccatattcaaactttttccattcctgctatagtttgaacatcggtgccctccaaagctcatgttgaaatttaatccccacagtggcagtattgagaggtgggcctttaagaggtggtcgggtccctgagacaatcccctactccgctatccgctacatccaatcaactggcaagtgccacagaatctacttccacgtattccttacttcagctttcacttgaccctttc

SEQ ID NO: 21030 - DNA, 484 bp, Homo sapiens
ggtaattacttatttcccttgtcaattcacrtatagcaaaagtataaaatcagccactaaggcccagatactgcactaggatactgcactatcctttgtggtgcccccatcctaaaaccttctgaaatggctcctttgtaaatagacacttcttgaatatccaattctgggtatgtcatacattttctgccgtgacatactccacccattgtcatttcctgacattcatgacagcaccaccaactttatggtgacccatattcaaactttttccattcctgctatagtttgaacatcggtgccctccaaagctcatgttgaaatttaatccccacagtggcagtattgagaggtgggcctttaagaggtggtcgggtccctgagacaatcccctactccgctatccgctacatccaatcaactggcaagtgccacagaatctacttccacgtattccttacttcagctttcacttgaccctttc

SEQ ID NO: 21031 - DNA, 549 bp, Homo sapiens
cacacatgcacacatgtatgcacacatacagccaggtaggacatgaatttttgtaataaatatactatgatatggctattttgtcttgttattctcataatgggccaaaatggaagtgcctcccatcctctgccaaaaatcaaaaaagcattcactatgaacatttattttcagagaagtgtatgatcatcttgtggtcccacagacagccctaaaattccccactagagacgccaatgtcggaatgagaacctgggtttcttagcttaaagaaggctgccatgatggctccaagaattttatttcttctcttcccattttctctctctgtcactttctgttcttacttcatttcctcatttgtattttgggtttactacaamcaatataaagaagttgtagtaattaaaaagttaaagattagcacgggagctggctttcatttactcattatttcaatgcaatcatacttattgataccctatggttcctggacattgggctagatggagggaataaaacactaacaagttggacagagtcctctcc

SEQ ID NO: 21032 - DNA, 405 bp, Homo sapiens
atttggtgtcatattcattaaatcattgccaagatcaaaatcatgaagattttcctttcttgtcttttaaaacttttacaactttgggtcttatatttaagtctttaatacattttgagttgatattggctcaatatcaaatatcagtatcaaatattgccaataccaactcaaaatgtattaaaggcttaaatataagagtccatttcatacatttgtatgtggatatctgttttttcaaaaattatttgttgaagacactgtcttctttccattgtacattcttagcactattatcaaaggtcaktagaccacatagatgtggatttatttatagattatctgtttgttctatggtttgtttgtgtgtctttgtatcagtatcatactgttttaattactgta

SEQ ID NO: 21033 - DNA, 608 bp, Homo sapiens
tttatttatttatttatttggtagagatgaggtcttgctttgttaaccaggctggttctgaactcctggcctcaagcagtmtttccatcacagcctcccagaacacgaggattacaggcatgagctgccatacccagcctatattttagttttgaatgtgacttttttgtgatcacaaattttcaatgacacaaaactgtccgtcatcccccaaaactctttcatcaagcttgttttctctgggaacagaaaactagtattacagatgaatactgagcaaaatttggcacctctacctgatttattatgggctatttaggaagataatatttcctactatgtaaaggactttgtgttgatcttttggcctttatgtaatttatgtttatgtttctggcaatgccctgatggttaatgtccttatggtaattaaaacatgtatattaattaagtgtgctactagtaataaaagttagttacatataggaaagaggtcagttttgtcaggatgctgaagcaaagttgcgatgggagttttatttcattgggagttgctactgttcttcctgcaattggtgacagactatacagagatcatggattcatgt

SEQ ID NO: 21034 - DNA, 592 bp, Homo sapiens
aatattttaataccagatttcaaagagtaagaaaggtaggcctttgttcaaaaacagaaattatggcatatgtttatcccactgaaaattaatctttattaatttacttttttcaataaggtagagctacagactaaactttgtatttcaggcttaaaaaattactctatgaaagtctataatcctggtaatgttaatctgtaagaagaggagaaaaataaatatgccattcagttatatcccacttatgacaacagaacatagagtcagtatttagtgagtatcatgtagcaatgaaagygtctgcatagacgcataaggataagtgagggttcgctgttagcacagtttttatataagtgcttttgtccacataataaatatcaattcttttgtaaacacattttgtcgtccaaaccatgaagactaaaacatcagttcaatagttattattttaatttgaaaggtacataacaaggatatatagtttccacatgcaagttcaattaaacaaaacgtggattttaatacaataaaattatgttatattaccttatctttgcgcatcaaaaacagaagatcttcaggagtg

SEQ ID NO: 21035 - DNA, 592 bp, Homo sapiens
aatattttaataccagatttcaaagagtaagaaaggtaggcctttgttcaaaaacagaaattatggcatatgtttatcccactgaaaattaatctttattaatttacttttttcaataaggtagagctacagactaaactttgtatttcaggcttaaaaaattactctatgaaagtctataatcctggtaatgttaatctgtaagaagaggagaaaaataaatatgccattcagttatatcccacttatgacaacagaacatagagtcagtatttagtgagtatcatgtagcaatgaaagtgtctgcatagacgcataaggataagtgagggttcgctgttagcacagtttttatataagtgcttttgtccacataataaatatcaattcttttgtaaacacattttgtcgtccaaacyatgaagactaaaacatcagttcaatagttattattttaatttgaaaggtacataacaaggatatatagtttccacatgcaagttcaattaaacaaaacgtggattttaatacaataaaattatgttatattaccttatctttgcgcatcaaaaacagaagatcttcaggagtg

SEQ ID NO: 21036 - DNA, 520 bp, Homo sapiens
tggtctcaaactcccagcctaaagggatcctcctacctcggcctcccaaagtgctgggattataggtgtgatccactgacctcagcctagtttacatttagaaatttacatttctaaaaaaaaaaaaaaatctcagagtctcttcttagaaagtgggagaaggggccaggcgtggtggctcatgcctgtaatcccagcactttgggaggtcaaggcgggcaattcacctgaggtcaggtgttygagaccagcttggtccaacatggtgaaaccccgtctctactaaaaatacaaaaattagccgggcatagtggcatgcacctgtaatcccagctcttcaggaggctgaagcaagataattgcttgaacctgggaggcagatgttgcagtgagccaagatagtgtcactgcactccagcctgggcaacagagcaagactccatctcaaaaaaaaaaaaaagaaagtgggagaagggaggcgttttttgtttttgtttttgtttttaagtagtgcagtgtc

SEQ ID NO: 21037 - DNA, 588 bp, Homo sapiens
caccagcaagtgggactcaccttccctggggtggatgtcatgccgcatatgggatttcacccgtggcaggctgttcatgtcgggtgttgctgaagagattggtaaattaggcagagttttggaggaagttaccttgcaggtccctcccaagtttaaatgggcctgtgggtttgtgagtaagaaaaaataacctatatacttcacattgtgtggctgatgaggggaattcagaactgaagaccatgggwgattcagagaattcctgattttgtaagaaaagcagggtatacaccctgactgatcctcccaagtacagctgagttgcacagtaggctgtgccccagggtagctgtttagctgtaagccaatgttctgcctgtggtgtggcccaatgaacctgaggctggaggcctggcacatgctggctagaatcccagctccaccattggctgtgtgaccttgggcatgtcgttaaactccctgaaactgagtactcctatctgtgaagtgggcatgggtattacagctgacacaggaacgctccctgatggtggggtctcttttccttgttgatggtggttcacactg

SEQ ID NO: 21038 - DNA, 588 bp, Homo sapiens
caccagcaagtgggactcaccttccctggggtggatgtcatgccgcatatgggatttcacccgtggcaggctgttcatgtcgggtgttgctgaagagattggtaaattaggcagagttttggaggaagttaccttgcaggtccctcccaagtttaaatgggcctgtgggtttgtgagtaagaaaaaataacctatatacttcacattgtgtggctgatgaggggaattcagaactgaagaccatgggtgattcagagaattcctgattttgtaagaaaagcagggtatacaccctgactgatcctcccaagyacagctgagttgcacagtaggctgtgccccagggtagctgtttagctgtaagccaatgttctgcctgtggtgtggcccaatgaacctgaggctggaggcctggcacatgctggctagaatcccagctccaccattggctgtgtgaccttgggcatgtcgttaaactccctgaaactgagtactcctatctgtgaagtgggcatgggtattacagctgacacaggaacgctccctgatggtggggtctcttttccttgttgatggtggttcacactg

SEQ ID NO: 21039 - DNA, 588 bp, Homo sapiens
caccagcaagtgggactcaccttccctggggtggatgtcatgccgcatatgggatttcacccgtggcaggctgttcatgtcgggtgttgctgaagagattggtaaattaggcagagttttggaggaagttaccttgcaggtccctcccaagtttaaatgggcctgtgggtttgtgagtaagaaaaaataacctatatacttcacattgtgtggctgatgaggggaattcagaactgaagaccatgggtgattcagagaattcctgattttgtaagaaaagcagggtatacaccctgactgatcctcccaagtacagctgagttgcacagtaggctgtgccccagggtagctgtttagctgtaagccaatgttctgcctgtggtgtggyccaatgaacctgaggctggaggcctggcacatgctggctagaatcccagctccaccattggctgtgtgaccttgggcatgtcgttaaactccctgaaactgagtactcctatctgtgaagtgggcatgggtattacagctgacacaggaacgctccctgatggtggggtctcttttccttgttgatggtggttcacactg

SEQ ID NO: 21040 - DNA, 548 bp, Homo sapiens
gcccagcacatttgctgagatccagagaggcagcttctgtctgtcccctctccctacccgtggacaggaaaccacagatggcccagcaatttgatacgttgcartgtttccaaagctcccagagtgggacgtgaagctgaattgcacgcttccaggaaagtgcccccaatgtggaaaacctgtcattttgtctctagatccattacaagctttgtagtggcacaaaccccgggcagaaatggcctttttataaatgccatggaaatcactgggttgagatgccctatgtttgtagaaaggagcaaagtcagagtgatttctcacacctggtacccaccctaaatctactgtggatgtgagaaaatatcccagtgacaatgaggtaattttccctatcttcatggtctatttccttagagaaaattgtttttccaatgctcaccaaagaactttcttcagatttagtacttttttcttttttttcttttttaaatttaggaatgccatgccacaatagctaccaaaatgacaaagttgtttacactttc

SEQ ID NO: 21041 - DNA, 548 bp, Homo sapiens
gcccagcacatttgctgagatccagagaggcagcttctgtctgtcccctctccctacccgtggacaggaaaccacagatggcccagcaatttgatacgttgcagtgtttccaaagctcccagagtgggaygtgaagctgaattgcacgcttccaggaaagtgcccccaatgtggaaaacctgtcattttgtctctagatccattacaagctttgtagtggcacaaaccccgggcagaaatggcctttttataaatgccatggaaatcactgggttgagatgccctatgtttgtagaaaggagcaaagtcagagtgatttctcacacctggtacccaccctaaatctactgtggatgtgagaaaatatcccagtgacaatgaggtaattttccctatcttcatggtctatttccttagagaaaattgtttttccaatgctcaccaaagaactttcttcagatttagtacttttttcttttttttcttttttaaatttaggaatgccatgccacaatagctaccaaaatgacaaagttgtttacactttc

SEQ ID NO: 21042 - DNA, 548 bp, Homo sapiens
gcccagcacatttgctgagatccagagaggcagcttctgtctgtcccctctccctacccgtggacaggaaaccacagatggcccagcaatttgatacgttgcagtgtttccaaagctcccagagtgggacgtgaagctgaattgcacgcttccaggaaagtgcccccaatgtggaaaacctgtcattttgtctctagatccattacaagctttgtagtggcacaaaccccgggcagaaatggcctttttataaatgccatggaaatcactgggttgagatgccctatgtttgtagaaaggagcaaagtcagagtgatttctcacacctggtacccaccctaaatctactgtggatgtgagaaaatatcccartgacaatgaggtaattttccctatcttcatggtctatttccttagagaaaattgtttttccaatgctcaccaaagaactttcttcagatttagtacttttttcttttttttcttttttaaatttaggaatgccatgccacaatagctaccaaaatgacaaagttgtttacactttc

SEQ ID NO: 21043 - DNA, 1033 bp, Homo sapiens
ggttcaagtgattgttgtgcctcagcctcctggttagctgggattatgggcactggccaccacgcccagctaatttttgtatttttagtagaggtggggtttcaccaggttggccaggctggtctcgaactccttatctcaagtgatccatcccatcctcggcctcccaaagtgccgggattacaggtgtgagccactacacccagccagttaattaactttcaaaaatctagagtaaattttggagtatggtatctggttacactataactttttttccccaaataaacaatatccctttcttctcctactgcctagtatttattttattttcttaaattgctctatacatgcatgcatgtttaaacttcatgtaagtatgtatatgttattacatatacatttattttttatttttattttaaaaaattttttgaagagacagagtctcgctgtgtggcccaggctggtctcaaacttctggcctcaagcaatccttataccttggccacacaaagtgttgggattataggcatgatccactgcacccagcccacatatactttaacaaaaattccgtttgtggaataatttctctcatgcacttttttgtgttatttcctttacaatataataaggttttataagcatgtatgttagggccaattcaatgaccattttattctattactcttttgagatttgtagcaacactacactcttatattctttataacattataattgccatgaaaaatttagaaaaattttccatcacttttcattttttctctgcttattcttcaagrtgggttttaaaataattattttaaaattattagagtccagtccattgtaatttctagtggaatagcattttaccaatgcatgatttgggggagaactgtcactttttgaattacagtcatgccatagagaaatttgtatagaacttcttttttgtaagtcttttatatctttcattaaagctttatagttttcatcatctgggtttctattacatatttcttct

SEQ ID NO: 21044 - DNA, 547 bp, Homo sapiens
cccaaacaactattyaaatgcatttttttttttgagatggagttttgctcttgctgcccaggctagagtgcagtggcacaatctcagctcacgatgacttccccctcccgggttcaagcaatcctcctgcctcagcctcccgagtagctgggattacaggcgtgcgctgccacacccagctaattttgtatttttagtagagacggggtttccccatgttggtcaggctggtcttgaactcccaacctcaggtgatccgcctgcctcgacctctcaaactgctgggattataggtgtgagccactgcgcctggcctcagatgcattttatatgtgcccacacctagcagatcattgagtgtgactaaaattatgtaactattttagtcagagagaactcacgcatttatgtacttatgtgagtgggtcccctttgaagttgtcacattaagacactatagacatatccctatgatgctgccatttctcaaaaacttcttggcatttttaagtaattgatttcaaagctaaatgtgtatttctttggc

SEQ ID NO: 21045 - DNA, 571 bp, Homo sapiens
ggtttaattggctcacagttctgcagactttacaggaagcatgttgcttggcttctgggaggccttgggaagcctgcaatcatgacggaaggtgaaggggaagcaggcacgtcacatggtgaaagcagaagcaaatgagagacacacttctaaataaccagatctcacgagaacacattcactatctcaaggacagtgctaaggggatggtgctaaaccattcatgagaaatccacccccatgtttcaatcacctcccaccaggccccatctccaacactggggattacaattcaatgtgagatttgggtggggaaaatatccaaactatatcaggtgctatttcttaacttctcatatacaggaacatcctaacaatagtgtgtgtgtgtgtgtgtgtgtgtgtgtacatatatatgtatcaataggaaaaatagtrcctgatatagttcagatacttaccctgcccaaatctcatgttgaaatgtaatctccaatgttagaggtggggtctgacaggagatgattggatcatgccggtagatttcttatgaatggtttagcaccatcct

SEQ ID NO: 21046 - DNA, 539 bp, Homo sapiens
tgatcttatcaggaaaaggaaggaaatgactgctttaattcagtgaatgactagtggtagaaattttgaacaaagtccacattatttttacatggtgcatgaatgttaagttatgtatagttgcaaaatctgcctttttttcttccttcccccctcccttcctttcttcctccctcttttcctttcttcctccttccctcccttccttcctttcttcctccctccctcccttcctttcttcctgcctcacttctttccttctttgctttctttccttctgtacttttcccttcttttcttcctttcttcattttttttccaaattatttgtaaatctccagcaaggtattcttaytaacaagaaaaaaagagtactggacttaataagtcagaaggcttagggtttgcaactcaaggcccatgctcatgaatgacgttggacaaatcatttaaattctctgtatatccttgaggatcatccccatcttacagatatggaactaatgctcaaagagggtcctgtagccaaatgtggcata

SEQ ID NO: 21047 - DNA, 539 bp, Homo sapiens
tgatcttatcaggaaaaggaaggaaatgactgctttaattcagtgaatgactagtggtagaaattttgaacaaagtccacattatttttacatggtgcatgaatgttaagttatgtatagttgcaaaatctgcctttttttcttccttcccccctcccttcctttcttcctccctcttttcctttcttcctccttccctcccttccttcctttcttcctccctccctcccttcctttcttcctgcctcacttctttccttctttgctttctttccttctgtacttttcccttcttttcttcctttcttcattttttttccaaattatttgtaaatctccagcaaggtattcttattaacaagaaaaaaagagtactggacttaayaagtcagaaggcttagggtttgcaactcaaggcccatgctcatgaatgacgttggacaaatcatttaaattctctgtatatccttgaggatcatccccatcttacagatatggaactaatgctcaaagagggtcctgtagccaaatgtggcata

SEQ ID NO: 21048 - DNA, 572 bp, Homo sapiens
tcactctccacccctaaaagtggtgggatgggtatgaaggggcttagaaaggttgttttcacctttcatgcaagtccaggatggtgaatggccgaactgcaagccttaagccaatttactagtcaacatggacaaaatggactttgtaaacccgcccctaccaggattacctgttcccacagggtaaatccccactgctctgctgcaggagacagacaaacgctgtctscttatcccattagcctttcttcatctttgcatccaaataacctccgggcctttcccggaaggacataacctgtcctgtctgtactgcagactcacagagcccaaaatcccatgatgcaagagtcagcaggaactgaggcttggcaagtctggggctgggactctgaggccaggattcgggcgctaaaccactgtgtgacactaggaagccatcgcccctctcccagactcagctccccagcctgaaacccaaaggagctggctgcgacgaccactaaaacgccttcaacccactctatgaaatcatgaccttgggtgaaaaaatgttaatgtagagaaaagca

SEQ ID NO: 21049 - DNA, 554 bp, Homo sapiens
gaaatgcycaagagaatataaaaatagaacatctgtatctgtattagaaggacatttatattttgtgaaatatcagcaagatacagcgcaaatatgcccagattgaagggaatattaatcagcttttaatttcaggaatgtagaagaaaaactcacttggaaaataagtagattaaagtctcccaaagaggtcccctcacaaactcaagttcagaggagcagagctgggagtgagagtgggctgtgggatagcatggggaggggaccaatgaccttggactctgaccgtggcccagtcttggagcagctctctccttgctcactctcagcatttcctcagagtagatacctctgggcactactacagtaccatcgctgcaggccccccaacaaagaactgtgcctcaactaacttacggttgtcacaccatcacagaaaaaaagcaactgccagctacgtcaccaaatgtggtgtacctactcttttttaaaatttatttttattttgtattttttttatagagacagggtctctctatgttgcccaggctggt

SEQ ID NO: 21050 - DNA, 532 bp, Homo sapiens
tagatagagtgacataaaacaagaattcagatatagcagttgtttttatttgtttaagaataaattcaaaattcagaattataattgtatactcttataagagaaaacagattcattttatataaaatatattgtgctaatttacacactttttgatccctaataataaatacaactctgttagatggcttaaaagcaatctttacattgcttagagaacgttaaatatcaattgtgtatttaaattttctacttatatgaaagcatgctatttttccttaactttgggtaaataattttatggtgtgattaaaccgatctgactttttgaaaaagggcatgttttttaatgaaatataaaagagtkgtaattttagttattcagtgttgcgcaaacctacttttttggcttcatttgcgaaaggttgttggataacctttatcttttaccactaacttcttactctgatccaaaatatttggcttttaaaattctccttatttcattatttgtcttcatatttaaaatatc

SEQ ID NO: 21051 - DNA, 532 bp, Homo sapiens
tagatagagtgacataaaacaagaattcagatatagcagttgtttttatttgtttaagaataaattcaaaattcagaattataattgtatactcttataagagaaaacagattcattttatataaaatatattgtgctaatttacacactttttgatccctaataataaatacaactctgttagatggcttaaaagcaatctttacattgcttagagaacgttaaatatcaattgtgtatttaaattttctacttatatgaaagcatgctatttttccttaactttgggtaaataattttatggtgtgattaaaccgatctgactttttgaaaaagggcatgttttttaatgaaatataaaagagttgtaattttagttattcagtgttgcgcaaacctacttttttggcttcatttgcraaaggttgttggataacctttatcttttaccactaacttcttactctgatccaaaatatttggcttttaaaattctccttatttcattatttgtcttcatatttaaaatatc

SEQ ID NO: 21052 - DNA, 537 bp, Homo sapiens
ggaataacaaatttataacccggrtgggcgcgggggctcatgcctgtaatcccagcactctgggaggccgaggcaggcagatcacttgaggtcaggagtgagaccagcctggccaacatggtgaaactccatctctactaaaaatgcaaaaaaattagccagggcgtggtggtgcgcacctgtcagctactcaggaggctgaggcaggagaatcgcttaaacccaggaggtggaggttgcagggagtggagattgcaccactgcacttcaacctggttggcagagcaagactctgcctcaaaaaaaaaatattattaccaaaaatctcactaattctgtacgtcagcatttattaaaataaggataagagagagctactgtagatatctctaagaaaataaataaatgattattgaatgtgtagttaatcttctttttgtttgcccatttctctttagagccatgcgcatgaattgcacttgcgggctggattaccaagggcttctctgaaatggcaaagaaaataatgtttgattt

SEQ ID NO: 21053 - DNA, 537 bp, Homo sapiens
ggaataacaaatttataacccggatgggcgcgggggctcatgcctgtaatcccagcactctgggaggccgaggcaggcagatcacttgaggtcaggagtgagaccagcctggccaacatggtgaaactccatctctactaaaaatgcaaaaaaattagccaggkcgtggtggtgcgcacctgtcagctactcaggaggctgaggcaggagaatcgcttaaacccaggaggtggaggttgcagggagtggagattgcaccactgcacttcaacctggttggcagagcaagactctgcctcaaaaaaaaaatattattaccaaaaatctcactaattctgtacgtcagcatttattaaaataaggataagagagagctactgtagatatctctaagaaaataaataaatgattattgaatgtgtagttaatcttctttttgtttgcccatttctctttagagccatgcgcatgaattgcacttgcgggctggattaccaagggcttctctgaaatggcaaagaaaataatgtttgattt

SEQ ID NO: 21054 - DNA, 537 bp, Homo sapiens
ggaataacaaatttataacccggatgggcgcgggggctcatgcctgtaatcccagcactctgggaggccgaggcaggcagatcacttgaggtcaggagtgagaccagcctggccaacatggtgaaactccatctctactaaaaatgcaaaaaaattagccagggcgtggtggtgcgcacctgtcagctactcaggaggctgargcaggagaatcgcttaaacccaggaggtggaggttgcagggagtggagattgcaccactgcacttcaacctggttggcagagcaagactctgcctcaaaaaaaaaatattattaccaaaaatctcactaattctgtacgtcagcatttattaaaataaggataagagagagctactgtagatatctctaagaaaataaataaatgattattgaatgtgtagttaatcttctttttgtttgcccatttctctttagagccatgcgcatgaattgcacttgcgggctggattaccaagggcttctctgaaatggcaaagaaaataatgtttgattt

SEQ ID NO: 21055 - DNA, 537 bp, Homo sapiens
ggaataacaaatttataacccggatgggcgcgggggctcatgcctgtaatcccagcactctgggaggccgaggcaggcagatcacttgaggtcaggagtgagaccagcctggccaacatggtgaaactccatctctactaaaaatgcaaaaaaattagccagggcgtggtggtgcgcacctgtcagctactcaggaggctgaggcaggagaatcgcttaaacccaggaggtggaggttgcagggagtggagattgyaccactgcacttcaacctggttggcagagcaagactctgcctcaaaaaaaaaatattattaccaaaaatctcactaattctgtacgtcagcatttattaaaataaggataagagagagctactgtagatatctctaagaaaataaataaatgattattgaatgtgtagttaatcttctttttgtttgcccatttctctttagagccatgcgcatgaattgcacttgcgggctggattaccaagggcttctctgaaatggcaaagaaaataatgtttgattt

SEQ ID NO: 21056 - DNA, 537 bp, Homo sapiens
ggaataacaaatttataacccggatgggcgcgggggctcatgcctgtaatcccagcactctgggaggccgaggcaggcagatcacttgaggtcaggagtgagaccagcctggccaacatggtgaaactccatctctactaaaaatgcaaaaaaattagccagggcgtggtggtgcgcacctgtcagctactcaggaggctgaggcaggagaatcgcttaaacccaggaggtggaggttgcagggagtggagattgcaccactgcacttcaacctggttggcagagcaagactctgcctcaaaaaaaaaatattattaccaaaaatctcactaattctrtacgtcagcatttattaaaataaggataagagagagctactgtagatatctctaagaaaataaataaatgattattgaatgtgtagttaatcttctttttgtttgcccatttctctttagagccatgcgcatgaattgcacttgcgggctggattaccaagggcttctctgaaatggcaaagaaaataatgtttgattt

SEQ ID NO: 21057 - DNA, 537 bp, Homo sapiens
ggaataacaaatttataacccggatgggcgcgggggctcatgcctgtaatcccagcactctgggaggccgaggcaggcagatcacttgaggtcaggagtgagaccagcctggccaacatggtgaaactccatctctactaaaaatgcaaaaaaattagccagggcgtggtggtgcgcacctgtcagctactcaggaggctgaggcaggagaatcgcttaaacccaggaggtggaggttgcagggagtggagattgcaccactgcacttcaacctggttggcagagcaagactctgcctcaaaaaaaaaatattattaccaaaaatctcactaattctgtacgtcagcatttattaaaataaggataagagagagctactgtagatatctctaagaaaataaataaatgattattgaatgtgtagttaatcttctttttgtttgcccatttctctttagagccatgcgcatgaattgcayttgcgggctggattaccaagggcttctctgaaatggcaaagaaaataatgtttgattt

SEQ ID NO: 21058 - DNA, 638 bp, Homo sapiens
acaaaaagaacatacaaaattactcgcattcccatacaccaacaagagtcaagcggagagccaaatcaggaatgcaatctgattcacaattgctgcaaaaagaatcaaatacctaggaatacagctaactagtgaggtgaaagatctctgtaagaactaaaaacaccaaagatatcagagaggatgaaacaaatgaaaaaacattctatgctcatggataggaagaatcaatatcattaaaatggccatattttccttattttcaagtatgctattgygctctatgactgccagatgtaattctaaaaatctgtttgttaattttattattttatttttggaatttcttcagacattgatggtcttgtcccagttattaacaacatctacatgtttaagaataaattttcttttctatctacttcttattccattgaaaattacctttctatcctcctactctggaagtctttatgattctgtcctaatcgttagtatcccattgcttcttcaagagatgtctatcagtagaatttctccattaatataagttcatacttctatgaaaactttaaatctcaagtctacagtatttctagttctaaaaaatatttaaattagttctttaattatttcca

SEQ ID NO: 21059 - DNA, 558 bp, Homo sapiens
ttttattttttgtaatgtaagcaagattctttccctcctttgccttaaatcctttagttacttgtggagtacaattacaaatctccaggatgctaaagctctgctctgctgtctacaatcaaaggcaccattcaagaccctcactcctaacgagacagggctctttccactcttgaaacacagtttttccccatgtcagggttttgcacaaggtaacatcttgtctttgaagcttcatagtttggcttgttaatcaaatggttccttttccatatttaagtcatcactttacatttcattttcttggagaggtcttcgcatgactccaagctatcaccagttatgtgctatygtagaacatggtttatccagaaatagtgataactttcatcactattgatcattctttggttttctttacatttattttatatcttaaacactgtaatataaaagacctcagggatggaccatgaattttatatttagcacaatacttcagaagatccatactatcctttttcttttttattcattttattttaaaattttcatttt

SEQ ID NO: 21060 - DNA, 733 bp, Homo sapiens
atggtcaaggcagggagggactgtctccctgcccttagttctttcttagagatgcagcgtcttatttgctttttttagtggtacatacttatatttttaaaaaattagcagtaagacatatgttgaataaaaactgagagtgtttctcaccactccctacctgatttctctctaggagtaattgctattattgtgacatgtacccatttagacaatttctatgcacatatgaacatgcatatataaaattttgtttttataaaaataggatcatttgttctggagctttctttgtttctctcatcaatatatcatggacctcctacagcactctcagacctacatcattatttttaagacatttcagaggatattagatgtaccacaagttctaaacatttccacatttccccctcatgccacttactggaattcctttataacttgagctaawcaaaaatttaggcttttgttttcattttatatgcatacaagtcccccacatgcaggcatttggcaaaaacaaacaacaattctgagagtggataatgaactagtcagggcatgaacattttgtgaagatgattaaagatgactgatatcactggttctctcctcatccatttcaaaatgtaaacatggcaacaatgaagtcttgggctgagagacgctatagtggttgggctctcaggagactgatccactcccagctctgagtcttggggtcaggatc

SEQ ID NO: 21061 - DNA, 598 bp, Homo sapiens
  misc_feature (1)...(598): n = A,T,C or G
atgtatacctaaaatagtgtacaacttgcttaatttacagaaaatnnnnnnnnnnnnnnnnnnnnnnnnnnnnnnnnnnnnnnnnnnnnnnnnnnnnnnnnnnnnnnnnnnnnnnnnnnnnnnnnnnnnnnnnnnnnnnnnnnnnctagcaccgtaaaaatgcccccacccttccttccacacaccytcccatctactacttgacaacatcccactaccctgacttctatgagcagaaattagcttcacctctttatcttatttttagaaattgaaccacacagtttgggtcatcttgtgtctggcttctttcaactcagcattgtttgtgagatttattcatattgcagagtataatgctgtatattatactctgttgtatagtatcgtagagttcaatgacgtgttttgaaagttaggaaaagtttaaattgaagtatattttatttaaaggtaaatatatacaaaataaattattttgattttagattacattctttcatcctttttgtgataaaatgttctttatttgaaatcccttgttaattgctgaagtttcattttgtcattgtatttacttttactttgtcttaatttt

SEQ ID NO: 21062 - DNA, 440 bp, Homo sapiens
gctctgtgtacctgtcttccaccccctctcctgaacagtatttccctggggctcccattaccaatttgcagagcaaaggcatgcacaggcagttcaggggtggcgcaagctcagcgactctggtattgtttttaattcaatattttgtccctgtgcgccagcctcctttattggatgagaacactgttattggatcctgccctgcaggagaaaatgcaggcttccccrgatgatggcagctacgttgttctagagtctgatgagtcaaggcagggcgagaagacagaagagagttccagaaaatctggtggttacaagctgttctgtgacacgcacaaaaaaattaacatatgtattattgacccttcttcttcccctctcttctagggaggacaaaagcccaggaggcagctgtcgcatcatcctcttcctttccctgc

SEQ ID NO: 21063 - DNA, 601 bp, Homo sapiens
catattgaccaggctggtctcgaactcctgacctcaggtgatctgcctgcctcggcctcccaaagtgctgggattataggcatgagccactatgcccggcccaaaatactgcctctctaaatagatgcagagtaaatgtattccactcatcttgttgtcagttgctttaagtttttatacattgtttttagaatcttaaaaggcatattaaatgatagagcgattgtgagagaaaaagagcattattatgattkttcacttaatgttttcaatgaagtcaaatcacatactgtgaatagcttgtggcagtgtcctaggcaaacacattatgagaactataataatgatgtattcatatcttaattactcaagcatgtgttctttgtgaacagattcccaattttagccagtatcttcacttatctttaagtaacaagtgtagctgcctacattcacagcaaagcagatagagaagagaaggtcggggaaggaatcggagaagacaccgaaaagccttttgacattctgagagctaagttacctctagaaaggccacctccaaagacttcagtgttcagagcccaggatcacagtacatggc

SEQ ID NO: 21064 - DNA, 532 bp, Homo sapiens
aattatgttaaactgttatgacagataactytcatcagagtctcagagataaacaattattatcttttctttcataaacttgtcctttaattattttggccaaactctttccagagttttcctcttccaaaatctgctaacattggaactccatccacccttgccttttgcaatctaggaactaagtttaatttaataagcatatacttttcagtgatcatgatctcaggacattgataaaatataaattgtgtttgcttattttgacttttattctctccttttctttctagttcttttgttacaattactcattatctaccaatgctatataggcatctaagtccataaacactttctcaagtacatttacttcctccattcttattcttcataaagtctgtgttattgtaatagcattggtagaaaattattgtatagatttatctgcaggttaaactgttctcttccacaaccatattcaattaaacaaaaaagaattcttaaaaattttaaggagtcttattgatat

SEQ ID NO: 21065 - DNA, 566 bp, Homo sapiens
cactggatggcgggtggtgctgaccagtgctcaggccccaggccagaggacagatgagaaaagccaggctgacatcacatgaaaccacagctgcttcaagaacccagacaggcatagcattatacatggactctggagtcacacagacctgggtttgaatcttgcccctcttgcttcttgtgtggccttgggcaggttgcatagcctgcctggcactccgtttcctcatctgtgatacagggatgggttgtaatgccacttacagagtctttgtgaacattaaattagataatagacacaaagtacccagtatggttttggcacatgatacctgctcaggaaattaactcttagaatagcatgtgaatcccctagttcaccttcccagtgattctaaaagttaacaacttcagagtttacatctgttatctccttaggagcagagattcttataatcctcattttacaagccaggaaackgaggctcagggaagtaaatgtttttgaaccagggtattcagctaaggtaagggcaatggttagcatgggctccatcttggactctg

SEQ ID NO: 21066 - DNA, 566 bp, Homo sapiens
cactggatggcgggtggtgctgaccagtgctcaggccccaggccagaggacagatgagaaaagccaggctgacatcacatgaaaccacagctgcttcaagaacccagacaggcatagcattatacatggactctggagtcacacagacctgggtttgaatcttgcccctcttgcttcttgtgtggccttgggcaggttgcatagcctgcctggcactccgtttcctcatctgtgatacagggatgggttgtaatgccacttacagagtctttgtgaacattaaattagataatagacacaaagtacccagtatggttttggcacatgatacctgctcaggaaattaactcttagaatagcatgtgaatcccctagttcaccttcccagtgattctaaaagttaacaacttcagagtttacatctgttatctccttaggagcagagattcttataatcctcattttacaagccaggaaacggaggctcagggaagtaaatgtttttgaaccagkgtattcagctaaggtaagggcaatggttagcatgggctccatcttggactctg

SEQ ID NO: 21067 - DNA, 584 bp, Homo sapiens
aacctcctgtagcactccagaacttcctatacaactgaccctacttgggtggcccacaggtgcctcaagtgccacaggttgtaaactgaactctgtatctcccctcttcctgctcctcccttgccatccatcactaatggcaccgacaccacttagtgtctgaggttaccctgcttcactcttctacctcactctcacagccaatcagtcacaggcatccccttctaccctctcccctgcccacctgcctcgagcctttccccaccccgcccaccctcctgccatcacctgggctatgattagcagtctccaagcctgcagaataaaaacccacccactccctggatcagagagcacagtaggtggggagggagtgcacaaggtgccggatgtggccagagcctgaccttcctgtggggatggaacaccacagcagtgggacagaaactagacaggagcagcagagaagtcgggggaggcagggagtggggcaaagggctctgaatatcagrccaccttctggagttttgggggtagtttttgaagatcatatggaaacacatatgaagatggagggcatgggg

SEQ ID NO: 21068 - DNA, 445 bp, Homo sapiens
tctcctcccctcctgctttccctctctgcctcacttccacctcacagtattcttgggacttcttttcagcccataacggaattctgttctttaagtagggctttaaaaaattgtgacccttagtttattttaattccatttcagcctttgatatgtcggcagtaaatggttcttatgttcattccttccacacacaatctcagcccccattgtgccattagatttgtgcatctcctctgctattctgccttatatgtgtgtatgcgtatatatatgcatataaaatataaaatgtctacatatataggttacacacacacattcactgctagctcayagttttgaggtttgagggttgctgggttttctttcccaatcataaacaatgtttccattctacagcccttctctagggaagacccataaaatttgactcatgaagaga

SEQ ID NO: 21069 - DNA, 485 bp, Homo sapiens
caaacaaaaaagcaaaaaaaaaaaaaaaccaaaaaatcagacttcatctccccacttttaactttttttgtttccatttatatcttaactgtattgtctatatcttgaaaagtcattatagttattatttttgattggttcatcttttcctctttctaaatatatgtctaaattcaaactctctgattcacacagctcacaacagacaacataccataccaccctctggggtgtggtagctctaattcccccaaatcatcaatcttccacctttcctgcacttgtaaaggatgtattaaatccccagaatgtgtgtgtgaactgtaaatagttgtgacatcattttccatccctcagaaacctaggcttcaaacaatttgrtgatctttaggcaacattagtataaaatcagtctatatatagagagagcagaaagaatcagtttttttaaataaaccaaataaattgtattattgattattttc

SEQ ID NO: 21070 - DNA, 526 bp, Homo sapiens
tgaggtgagatggtgccatgaaaagatgaaaataatgctggttttggaatttaaattccctcacccattatacctgaaaataactaggatttgcacaatgaatattggcaccaactgaaagagtcattataccaataagaaaagagtggaagagagagccacctctactacaatcctggacacttgtcccaggtgcaggccttccagaagtgaaaactattgtgttcctgatttaaaagggaaacatggtraaagatcttcagatagcttgaggaccaagattcacacactacacatgtagccaggccagtagcacctacaagattttcagtggcctcctccatctttataacaatggtgctagcaatgttcttaggcctccctgcagcattcatggctgtgaaccaccaaagagccaaggtttgatcagcaggggaatatttatgcttcagagacaatgaggagactttctttcctcctgtctaatgaacagatatgactttgtacttcctgggggcagtacaaa

SEQ ID NO: 21071 - DNA, 679 bp, Homo sapiens
gcaaaaactttttgttcrcctttaaagttacaggaaaacttgaggtaaaaataaatgaactataattctgtccatttgttaaaacctgtggaactatgcaccaaaaggtgtgaattttactgtatgtaaatttttaaaaactcaaccacattggcagtagataccaggattgaatctagatgatgacaaattaatgtaattgatgtatgacataaccactctgaaagtgacaaatactctgtctagccatgtggtgactagatactttaaggtgaaacacaaaagggttgtacacaaacactgtatgctagttggtagaattgtttctcacagaaattctagttagtagttccgaaacattatgtgtattattagacttgagtaaataggtaaaaatattgttactaacaaaaaccaagtatctcagagttggaaaaagaagtttcaaataatgaaaatggaaaggctagaattaaccttattgtgctggattagaatcaaagatatttgtatagtctcatgtttgctttagtctttacttagatataggtgtggacagaaataaatataggtatgtgtatataaaaaattagtatacgtatatgtactacttatattcctatctctgtcatgagaggacctaaaagcagtacatcctagtactgctaagcacatgtag

SEQ ID NO: 21072 - DNA, 460 bp, Homo sapiens
catagtatatcctatgtcataactgtgcacagaagaaaaattaaagataaattgaaatgtgaataatagccctgcacagtgggatgagagagtttctctttccgcttttatttcccaaatcttctttcactaatgggtattgacaatagaaaaataattaaaataattattggcttttgccgggcgcggtggctyacgcctgtaatcccagcactttgggaggctgaggtgggtggatcacgaggtcaagagatcaaggccatcctggccaacatggtgaaaccctgtctctacaaaaatacaaaaattagctgggcgtggtggtgggtgcctatagtcccagctacatgggagactgagtcaggagaatcacttgaacccaggaggcagaggttgcagtgagccgagattgcgccactgccctccagcatggtgacagagcaagactctgtctcaaaaa

SEQ ID NO: 21073 - DNA, 460 bp, Homo sapiens
catagtatatcctatgtcataactgtgcacagaagaaaaattaaagataaattgaaatgtgaataatagccctgcacagtgggatgagagagtttctctttccgcttttatttcccaaatcttctttcactaatgggtattgacaatagaaaaataattaaaataattattggcttttgccgggcgcggtggcttacgcctgtaatcccagcactttgggaggctgaggtgggtggatcacgaggtcaagagatcaaggccatcctggccaacatggtgaaaccctgtctctacaaaaatacaaaaattagctgggcgtggtggtgggtgcctatagtcccagctacatgggagrctgagtcaggagaatcacttgaacccaggaggcagaggttgcagtgagccgagattgcgccactgccctccagcatggtgacagagcaagactctgtctcaaaaa

SEQ ID NO: 21074 - DNA, 548 bp, Homo sapiens
tgaatcatgggggcaatttctcccatactgttctcgtggtagtgaatacatttcacaagatccgatggtttgataacccatttcacttggctctcattctctctcttgccgctgccatgtgaggtgtgcctttcaccttcctccatgattgtgaggcctccccagctacatggaaacgtaagtccaataaacctctttcttttgtaaattgcccagtctagggtttgtctttatcagcagtgtgaaaacagactaatacataccattgtagtttttacttawtggcactattagttgcctatcattcttccttggtacaagaatctctgttttgttcaggtggcaggtataagtcccttgtctcacaaaaggtgtacccagcccagtgccagggcctgaaccacgattcatctaagtcaatttggctattccattcaactttgccagtgactggtctaagggtaggcatatgacccagttcctatcagagagaagcaagaggaagtttgctgagacctttatcaaaataatcttcttgttacaagaaa

SEQ ID NO: 21075 - DNA, 548 bp, Homo sapiens
tgaatcatgggggcaatttctcccatactgttctcgtggtagtgaatacatttcacaagatccgatggtttgataacccatttcacttggctctcattctctctcttgccgctgccatgtgaggtgtgcctttcaccttcctccatgattgtgaggcctccccagctacatggaaacgtaagtccaataaacctctttcttttgtaaattgcccagtctagggtttgtctttatcagcagtgtgaaaacagactaatacataccattgtagtttttacttattggcactattagttgcctatcattcttccttggtacaagaatctctgttttgttcaggtggcaggtataagtcccttgtctcacaaaaggtgtacccagcccagtgccagggcctgaaccaygattcatctaagtcaatttggctattccattcaactttgccagtgactggtctaagggtaggcatatgacccagttcctatcagagagaagcaagaggaagtttgctgagacctttatcaaaataatcttcttgttacaagaaa

SEQ ID NO: 21076 - DNA, 830 bp, Homo sapiens
aattcattacataagaattctgaaatagattggattaaaacttatgggttacatgtttacaaatgataaaatagtcaatttggtggttctgattaattttctattagactaggaaaatactaagtttgtatagagtcacttttatgtgtccaaagacactgtaaaacttgaatgggtaaaggtgaagccttggaaactctgtccagttttcttatgtcatatatgatatctatatacacaaggtttataaaatattccttgcttactgtgtttttactgaaatttggaatatttgatcaaatattttgacccacgatatattttttaaagataactgatcacacgcattgcaccctgtaaatgctgggtttttttctttttttttttttgagacggagtctcactctatcactcagtctggagtgcagtggtgtgatctcggctcactgcaacgtccacctcccgggttcaagcgattctcctgcctccgcctcctgagtagctgggactagaggtgcatgccaccatgccctgctaattttttgtatttttagtagagatgggrtttcaccgtgttagccaggctggtctcgatctcctgaccccgtgatcttcccgcctcagcctctcaaagtgctgggattgcaggcataagccactgcgcccggcctaatgctggatcttttaatattcattttaaagagtatcaggttttccagcaacaaatatttggggctggtgtgtgtgtgtgtgtgtgtgtgtgtgtgtgtgtgtgtgtgtgtgtttccataatatctcatccagttttgctccaggaggctggatatgat

SEQ ID NO: 21077 - DNA, 647 bp, Homo sapiens
tatactatacatgaaaacgtatctcattttaagaaaaactgtgataggtaaaagatatatactataaaacctaaagcaacttttaaaataaaaaaatagcaaataagcaaataaaataccttggaatcataacaaatatttatttaatgcaaaaaaaagggcaagggaaaaaagtgaaaataagagacagatgaggaaaaaagaaatgcaaatagcaagataacagatttaaacttaaccgtatcactaatcaccttmaatataaatagtttcaactaggggtcagtgaactgtagctcgaaaccaaatcatggctgtttcctggtttgtttgcttgtttgcttgttttttgagacagagtctcactctgttgcccaggttggaatgcagtagcatgaatatggctcactgtagcctcgatctcccaggcccaagtgatcctcccacttcagcttcccaggtacaatttttttttgtatttttttgtagagtctgatctcaaactcctgggttcaagtgattctcctgctttggcctcaccaaattactgggattacagtcatgagccaccataccccgccatctgttgcctgtttttgcggtgctcatgaactaaaagcagtttttacattttttaatggtaaatt

SEQ ID NO: 21078 - DNA, 506 bp, Homo sapiens
tatcaaaattcttgacacatgaccccatggtaattacggaactaatattacatgttcctcaggtaaagaagttaaagaaaggagtgaacatgaatgataacgcatcttttgctagattggtgcccttccctcctcctgtgctgtgtatatgcagaggacagagatggggctgtgtttggaagaatgccgtgggtttttctccatcacttggttcaggcagccaaggctagtcatagttcactttgcatttattctgtggctactttcgtggctgacatgaatagctgcatcatctttatcttcatttatttttaaattgttcaactgaaggaaatgaatttctatccattgcatcaaaagttacaaccagtcctgctggcaaaaggtaataagacatgtggaagagataatttctgcaaacttcaayagctccttacccactaatgattagagcaacaaaacgtattcattttcttttcctttctttctctctcccccaccccacc

SEQ ID NO: 21079 - DNA, 549 bp, Homo sapiens
tgtaattgtgtgtggacagtgcctttttgtatatcatcatrgcagccatcacttaaccctagtacctcttttcattaatcgggtccaacaagagtaatagattttattcatatcaatgaagtagaacacatatgtgaatccacttgtttgtatttttccctgtgtacacacatggggctttgcaaatgaaagtaaagaaatctcaaacaagatatcaagggtctagaaagatgaagaaataactaatgaacatttcagctgatctaagagaggcacctcgtcttgtgatgaagacagtggctaaataattggctattcagctgaggaaacactgacatcattataccagcaacataacaatgttgatcaattgctaccatgctttgagtaaccttaaggtaaaaaaaaaaaaaaaaaaagagagagagagagagatttttaaatgtatctgcttttaaaacaaggaaaattgctgaggggaaggaaaaagataacagctaaaaatgctcctattcaatgtttaaaaagaatttctgtattcagctttcc

SEQ ID NO: 21080 - DNA, 541 bp, Homo sapiens
ctttctgttttctcaggtaactcaaactttatgttattttcttaacatataggaaataatagaaattctcctgtctttgagaacgtagacattttaaatttaaactttaatttttttctgccttttttctttccttattactttgtttttctgtctttctacttatctatgtttggcagaaccacaaaacccacttcatgtcatctaatcactactcacaaaagtaaacagcatcatgacttttattacaatagctccgttgcaaaattatctggaaagagagacagcatggcttcttcatattctcaaagcaatctgtatcccccaaaagttaaccaacatttctatataagtataatctttaagataccacataaaaatgttgaaagaaaggcacgttggaaagggccacatcccaggatcactkaattttaacttcatgtgtagtactttgtcctgcataccataaaaatacagcaaaggggaaaagaaggattagagaaataaaatgtgtggattacctaattgtgtcaggcatcat

SEQ ID NO: 21081 - DNA, 582 bp, Homo sapiens
tgataggagaaattgtgagacaatacaggccaatgggaagactttgaaattgagcctaggttagcatcartgtgggaaggaatccaggatgtttaagactgagagggaacctctaagagtcagagcaggtgtgcctagcggaaagaaggcccctgggtccagggatggtgtttcattggtggcaggtacttcaaagcttgtttaagcaaataacatgcaaattaatttaaaatagcttaaatgaacaaaaaagtacattttcccacaaataacaaattctggagtcggtgtgattccagagtcaattaattcatcagcctgccaatatcatcaagaatgcaggtctctctatctcatgctggtgttggtctgtggtgggctgccttcctacacaccacctgccactgtccaggcaccatgtccagccacagtggtggaaagtgaagtggtcagtgccatcccttcccctgccctcttctcaataggaaggacaaccttcctcagaggtcctttctgcagatgtcccctcatgtctcctggatcagaattgtctttcctgtcacacctaattcaatcactggc

SEQ ID NO: 21082 - DNA, 582 bp, Homo sapiens
tgataggagaaattgtgagacaatacaggccaatgggaagactttgaaattgagcctaggttagcatcagtgtgggaaggaatccaggatgtttaagactgagagggaacctctaagagtcagagcaggtgtgcctagcggaaagaaggcccctgggtccagggatggtgtttcattggtggcaggtacttcaaagcttgtttaagcaaataacatgcaaattaatttaaaatagcttaaatgaacaaaaaagtacattttcccacaaatarcaaattctggagtcggtgtgattccagagtcaattaattcatcagcctgccaatatcatcaagaatgcaggtctctctatctcatgctggtgttggtctgtggtgggctgccttcctacacaccacctgccactgtccaggcaccatgtccagccacagtggtggaaagtgaagtggtcagtgccatcccttcccctgccctcttctcaataggaaggacaaccttcctcagaggtcctttctgcagatgtcccctcatgtctcctggatcagaattgtctttcctgtcacacctaattcaatcactggc

SEQ ID NO: 21083 - DNA, 567 bp, Homo sapiens
tcgtacttggcatcaattatttgcacccctctagaatccatcccttcattttctgatgataacaattcctgaggaattacccctctcccattgcatagagtcttggtgaacctggaagtggaggtggcggggcagtcattaaaaccctgtgcggttgcctgcaacagccagcctccactccattccttccctctcctgcctcctccctcacygcacagcctccaggtcacaggtttggaagctactggggttggcaagaaagcaactcataagactgagccgtattcaacagagagacaccaggaaacctggagaagtgggtgtgtgttatctcggggaccttaaatattccctttcctttgctttggggcacaagaggaacataagcatgaaataacaaacttcaatgctatgtggttttgttctttaaaatgtcgtctctttttttcccatcattgaacttgtcagggaggcttctcttggctaaaccccactgcgctgggtcagagcatgcctcactattattaacctgttcgacagctgaggacgctgaagcacccagaagct

SEQ ID NO: 21084 - DNA, 541 bp, Homo sapiens
atatatgcttctttagtgctaagatatgaatattagaggcattctttcttaaaatttctatttagttatactttcacaaataactatataatattaaaattctgcatgtggcataaaacatattttaatggagaaggtaatgtgtagggagtttatttctgtttgctattagaacttgtgtttattcttggttaaaaaaactgcactgattacaacatagaaaaaaacaaaagtatgttgtatatctcttacagtagaagataaagagtagwtctaaatttagaaaggaaaaataaatatacacagtgaaaatatgtgtcagtgagatgttaatcaaagatcaactattgctgagaccagcaatattaaatccctgcacaattactcatattataatgagaattttaaaaagaaaatatgaacacataacataatgaaggcagaagtcactctcatccttcatctttgtattcccaattcaggaagctggtatagtatcttcattataattactattcaacaaacatttgtaaaatgaatg

SEQ ID NO: 21085 - DNA, 527 bp, Homo sapiens
  misc_feature (1)...(527): n = A,T,C or G
agcctgagtgacagagcaataccctatcttcaaacaatcaacaacctgtgatttttttttctctgcgtattgcaaggatgagaacaaagagctccaactaagatggaaacggtacagatgcgaaaggatttagggggaaacctctggtgttctgtcagggaccactggccttgcttgaaagaaatttcatccaggctgtctggtttcctgcatgtgtctcaggcctgctgttggtggtcccaggggctgagtgcttagccccttctcagcttgggtgcctccccttttgccttctcccagcaacctggtccactgccatggttcctgtggccatctctccagagccatgctgtcacctygaaaaggggcatctctagatcagttttttttcactaaattggaatatgaatatatttattagcatgcnnnnnnnnnnnnnnnnnnnnnnnnnnnnnnnnnnnnnnnnnnnnnnnnnnnnnnnnnnnnnnnnnnnnnnnnnnnnnnnnnnnnnnnnnnnnnnnnnnnnt

SEQ ID NO: 21086 - DNA, 632 bp, Homo sapiens
tttctcgtctttgactattatacaattatagcatattttttcattaataggaaaaagtagaaacaacccaaacatctatcaactgacaaacacaaagtatagtattttgtcatatggtaatccagaaagtggaatattacatggcaataaaaggaaatggaatactgatatgtgcttcagcatggatgaaccttgaaaacattgtaagtgaaagaagctagtcaccaaggaccacatattgtatgactccatttatatgaaatgtttagaaaagacaaatctatasaggtagaaaacagattaatggctgccaggcactatgggaaaatgaggagtggccgccaatgagatttatttttggagtgatgaacatgttctaaaattattgtggtgatagttgtacaactctgtgactatattaaaaaccactgaattgtatactttatatggccaaatggcatggtatgtgaattatctccataaaactgttattttaaaaatccaacctgagaagctactgaccaccttgcaagcttgggaatggggactctcttgtagtcctcacaatgggcgagaactccataaatgggggctgaattaagttactttactatatcacaactccttccaaa

SEQ ID NO: 21087 - DNA, 590 bp, Homo sapiens
agttctagaaaacaacttagaccctaaacaaactatgacaagctactatccttagatcactagtgaaattttcttcattttaagttctaaaagacatgagctgcttttaaatgctagccaaaattttatatacaactgacatggaaattgacagatctgaaaacttgaagcagaaatagataaaaatgaagaaaaatgggagaaaaaacccaaatgaacctggcattgagcagcactgagtaatacagatggcactaagtgcrcaaatggagaaaaacttaattatcccacaaagcactagtctcttattcctaaaaggctattgattttatatgagcttctcttgaaatatttcagactaaattcaatgatcactttttacagatgagaggaaactatactcagtggtgttgagtgactttttaaagtacattgctcaaatatcatattataaaatcataataatgatgtttattagcattaccatgtcatccagattgccccataatcaaaatttactccttcaatgaaatataagaaagaaaacagacccatcacgccatgtttatggatgtattttataaatacca

SEQ ID NO: 21088 - DNA, 752 bp, Homo sapiens
tttttaaagagggatgactcacctgtttataatatttttttgcagactttaatcgttggtacagggccaaaagaactccttggatgtacatcttagctcctgaggggctgaaaccttctcccttagagacccaaagtagtcctcgcaaaggtgtgatggaattttgcaggcatttttcaagcagaggaactatgcaagaaaagaagggaaaaaaattcttttgacccaacccaaccgaaatacactgcctggaacacagccccaataccagagctaactcttaacatctattatttataactgacctgggttaagtcttagagaggcaattcctgcgttactagtggccaccatgaaggatgtatttatattgagacaccccccatgcaagactcataagctttgtgagcacacctgaatagttctgaagtgtgcctaactagctgcacagagygtcatggtgtgcactgattgccttatcttctcatttatcacagatgagttggaaccaaccttgctgaaacctacttgcattgtcctgataaaactgtaagatccatgttgtttctgtacatagcttcttgtagagcactctatatacctaaaacatcgcatctggaaattattcataaaatataatccacacctttataaaccatcctatttcatgatttttgttgcattccttaagtaacccatacaacagcgtggcaagactgtttaaaaacagggggcagaatcttaaacaagca

SEQ ID NO: 21089 - DNA, 752 bp, Homo sapiens
tttttaaagagggatgactcacctgtttataatatttttttgcagactttaatcgttggtacagggccaaaagaactccttggatgtacatcttagctcctgaggggctgaaaccttctcccttagagacccaaagtagtcctcgcaaaggtgtgatggaattttgcaggcatttttcaagcagaggaactatgcaagaaaagaagggaaaaaaattcttttgacccaacccaaccgaaatacactgcctggaacacagccccaataccagagctaactcttaacatctattatttataactgacctgggttaagtcttagagaggcaattcctgcgttactagtggccaccatgaaggatgtatttatattgagacaccccccatgcaagactcataagctttgtgagcacacctgaatagttctgaagtgtgcctaactagctgcacagagtgtcatggtgtgcactgattgccttatcttctcatttatcacagatgagttggaaccaaccttgctgaaacctacttgcattgtcctgataaaactgtaagatccatgttgtttctgtacatagcttcttgtagagcastctatatacctaaaacatcgcatctggaaattattcataaaatataatccacacctttataaaccatcctatttcatgatttttgttgcattccttaagtaacccatacaacagcgtggcaagactgtttaaaaacagggggcagaatcttaaacaagca

SEQ ID NO: 21090 - DNA, 561 bp, Homo sapiens
cttttatggtatcttgtaggaattttattgttttgtgttttatatgtaagtctgtgatccatttttagttaatttttgtgaagagtgtaagggctttatctagatgggtcttttttaaattttatttttatttttatttttgcatgtagatgttccagttgttctagcaacatttgttgaaaaaacaaacaaaacaaaacaaaaaagcaccacattttctccattgaattgcctttgytactttgccaaaaatcaggtgaccaatcatgcaggtccgtttctggactctctattctgtttcatttgtctctttgtctgtttttttcaccagatgccacactgccttgattactgtagctttacagtaagacaatagatttttaagaatacagtactcacctggctggttctcttaaagacagtccagacagcacggtgcagcaacaaaacaggggagacgatggggccaaagagggctttcacatttgtctaactctcctgcacacacacagaagggaagtttgccttacttctggatatatcaagggagtgatataaagg

SEQ ID NO: 21091 - DNA, 554 bp, Homo sapiens
gcaggttttcaatgtgctactatctcctcatgtctgactgggagtgtgcagtaattgtggtacttactccaatacctagtaaggagtagagttggaagattggagaattatacatcactggctctctgagactcttaaatctcatgtgaacagcctgggttttaaacttaagtctagccagccactctatctcataaagacctcttcagattcaaaagcctattctattatttcatccacagaaagtgaagatccatattctttctctaaaagaatctcagatccttggattttattttttgtttgttttaagtttgttagttaatttgtttgttttgagatggagtctcactctgtctcccaggctggagtgcagtggcacgatctcagctcactgtaacttctgcctcctgggttcaagcgattctcctgcctcagcctcctgagtagatgggattacagwcatgtaccaccatgcccagataatttttgcatttttagtagagacggcattgtgccatcttggctagactagcctcaaactcctgacctac

SEQ ID NO: 21092 - DNA, 441 bp, Homo sapiens
tgtggtactggcaaaataatagacatgtagttcaaagaacagatagaactcaaaaatagacccatacaaatrtagtcagctaatatttgtcagaggaacaaaggcaatgaaatggagagaaaaaaactgggttttaacatcttttataaaaattaactcagaatgaaccataaccttcaaataaaatgaatgaatatatatcttctataataaaaaacgtggtaaaatgtgggtgaccttggattttgtgatgagttttatatacaaaatcataaatacaattaataaaataacaaattgataatgtagttttctgcatacagatcctgtcatcttgtgatattattgtcatcttgtgatattattgtgttttaaatttcaaatttcaattatttattgtttttatgtaagaaaataattaacttttaaaaactccttttt

SEQ ID NO: 21093 - DNA, 441 bp, Homo sapiens
tgtggtactggcaaaataatagacatgtagttcaaagaacagatagaactcaaaaatagacccatacaaatgtagtcagctaatatttgtcagaggaacaaaggcaatgaaatggagagaaaaaaactgggttttaacatcttttataaaaattaactcagaatgaaccataaccttcaaataaaatgaatgaatatatatcttctataataaaaaacgtggtaaaatgtgggtgaccttggattttgtgatgagttttatatacaaaatcataaatacaattaataaaataacaaattgataatgtagttttctgcatacagatcctgtcatcttgtgatattattgtcatcttgtgatattattgtgttttaaatttcaratttcaattatttattgtttttatgtaagaaaataattaacttttaaaaactccttttt

SEQ ID NO: 21094 - DNA, 1309 bp, Homo sapiens
gaaggtatatctgaaattggtaaagtgcatgactttatcagttcacactgtttgacaatctagacttctagtcagtctgaagtgactttacgttcttgtttgcatagtgccgaaatatgccttttttttaaaaaaaaatctgtattttattttctctctatttctaatttttcaagtagcgatggatcatttgtatttgatggctatttactattatttacctttatgttctatctggtatatttacactgatactagtaaggcacttttaatgcactttgaaatgcagaatttatgctaaggagactactatcgtccaaatgtttgtgttcgccccctcaaatgcatatcttgaaatcctcacctccagagtgatagtattaggaggtagaacctttgggagctgattaggtcgtgagtagggagccctcataaatgggattagcgcccttattaaaaaaaaagagactccgagggaggttgtttgccccttctaccacatgaggatacagcgagatggcacaatctatgaggaagcaagcccttgccagacactgagtctgtagatatcttgatcttggacctctcaactgtaagaaataaattcctggtgtttatgaactacccagtttataatattgtattatagcaggccaaaaagactaagacaggaactaagatagctttctttgtctaaagtgagccatcaaataaacgtgagacaggagaaaatattgtgaagtttgaagaagaaaatttaaaaataggagtcagtgggaatttggcccaaacctacccagattcaaattccaactaactcttacaggaatgcttgcaccctgaagaaaagagaaaatcagtgagctacgtggtttttctttaccatacaatttcaccttgttaggtatctctccaatggaacaattttattagttatctaatacttaataacatatcttttgcaaagattactaccttaatccaaccatactaacttgatatgtctcacagtgtccctgggtcaggaattttaaagagatttgactgggaagttttgactcagggtacctcctgagggtgtagtcagatgttggcatgggctacagacacctgaaaatttgattaaagttgaagtgttcattttcaggtyatgctgctgcaaagctggcaaattagtgctagatgttaccaagaggcttcagttccttttcatgaaagcctctcaatgtggctgcttaaatgtcctcacgacaggatgggcttcccccatagtaagcagtcctaaagaccaaagcagaaattacaatgc

SEQ ID NO: 21095 - DNA, 649 bp, Homo sapiens
tttaaattwaattaaatttaaatttaaattaaattaaattaaattaaattttttctacaaaattactctttgttttctctctcttcatactgcactctggaaataagtcactatgtgaaacctacactaagttaataaataggggagttatgctcttccttctctaggctggaatatcttttaaaattatttgaaattctcctgcatgggagatttgtttactctccctcatttaattattttatttaattacttatttgaattctaaaattagcactatacattctctcaacatcattttttcatatctctttggtcttttttaatctggggtcaaatacctcttattcaaacttacagtgatcctgttttccacttacagaaatgtacttgtcaaaatttctcttttttgtatttaacctgcatgatttgtaaataaatttactcgctatttggggattttgctatttatttttatttattttcttgaataaaaatctggttagtgaaaaaactagacttcttttaaagtattatgtgttttggcccttggatgaccagggattttgtaatagatttgaactttctaaaatagactgtttgaagaggtattaatgtcactttacatagaagccttccagcatatatt

SEQ ID NO: 21096 - DNA, 520 bp, Homo sapiens
tcccacagcacgtctttaccgtttcccaacgatgctcaggcccaggccccggccagctttcttctgcagatccacagggaaaatctccaagttctcctcatcccggtagtgtgcytcatctctatacaccaccagccgcaccttctggggggtctgcctcagggctgtgatggcttcttcgtggctggagttcctcaggtcaaccccattaacctggaacaatgggcatcctgagctgggctgctgatggcagaggtctctgccttctctgtctgctgaatctccttgatctaaccagtaaagaatctctagaaatttccagccaatctcaaggcaaacaggtagtgaccacaagcagtatgagctgctttgaatataaaggagatggcccttaaaatatcctacccaacatgtgcacaaagggtggatacatgataatgcaattttacatagctataaactttactgtgaaatcaatgaaagagacaggagagtgtgcatgcagggacttaactagctc

SEQ ID NO: 21097 - DNA, 520 bp, Homo sapiens
tcccacagcacgtctttaccgtttcccaacgatgctcaggcccaggccccggccagctttcttctgcagatccacagggaaaatctccaagttctcctcatcccggtagtgtgcctcatctctatacaccaccagccgcaccttctggggggtctgcctcagggctgtgatggcttcttcgtggctggagttcctcaggtcaaccccattaacctggaacaatgggcatcctgagctgggctgctgatggcagaggtctctgcctkctctgtctgctgaatctccttgatctaaccagtaaagaatctctagaaatttccagccaatctcaaggcaaacaggtagtgaccacaagcagtatgagctgctttgaatataaaggagatggcccttaaaatatcctacccaacatgtgcacaaagggtggatacatgataatgcaattttacatagctataaactttactgtgaaatcaatgaaagagacaggagagtgtgcatgcagggacttaactagctc

SEQ ID NO: 21098 - DNA, 520 bp, Homo sapiens
tcccacagcacgtctttaccgtttcccaacgatgctcaggcccaggccccggccagctttcttctgcagatccacagggaaaatctccaagttctcctcatcccggtagtgtgcctcatctctatacaccaccagccgcaccttctggggggtctgcctcagggctgtgatggcttcttcgtggctggagttcctcaggtcaaccccattaacctggaacaatgggcatcctgagctgggctgctgatggcagaggtctctgccttctctgtctgctgaatctccttgatctaaccagtaaagaatctctagaaatttccagccaatctcaaggcaaacaggtagtgaccacaagcagtatgagctgctttgaatataaaggagatggcccttaaaatatcctacccaacatgtrcacaaagggtggatacatgataatgcaattttacatagctataaactttactgtgaaatcaatgaaagagacaggagagtgtgcatgcagggacttaactagctc

SEQ ID NO: 21099 - DNA, 520 bp, Homo sapiens
tcccacagcacgtctttaccgtttcccaacgatgctcaggcccaggccccggccagctttcttctgcagatccacagggaaaatctccaagttctcctcatcccggtagtgtgcctcatctctatacaccaccagccgcaccttctggggggtctgcctcagggctgtgatggcttcttcgtggctggagttcctcaggtcaaccccattaacctggaacaatgggcatcctgagctgggctgctgatggcagaggtctctgccttctctgtctgctgaatctccttgatctaaccagtaaagaatctctagaaatttccagccaatctcaaggcaaacaggtagtgaccacaagcagtatgagctgctttgaatataaaggagatggcccttaaaatatcctacccaacatgtgcacaaagggtggatacatgataatgcaattttacatagctataaactttactgtgaaatcaatgaaagagacaggagagtgtgcaygcagggacttaactagctc

SEQ ID NO: 21100 - DNA, 614 bp, Homo sapiens
tgggggcaaatgaggtcagtcttctctgctcccccttcaacttggatgctcacggtccacacccattgcctgtgaggtagtttctacagagatgaaacaatgagcttcyttaggggccaaggaggcacaagactgacctctttagcttctactgtgctaagtaatattaataagctctaagtctttatgtagaagtcaatgaaattagcagtagggtttagaagccagaaacacggtgctgggttattaaaaaaacaaaaacaaaaaaaccccgaccattcttttcagctaaactccagctccagttctctgggctagaatagtagtgttaatagattccgcctcgactaaaaagggagccagtggcagaaaatctattcctccggcaaggttgctgggcaaccagcaagcttttggcatgtggctgatgtctccaggcagcccggactacacaaagtaagctcttccatcacttacaactaacttgattttgatggattaaaaccgaataaaaatgtactgtaactcacttccaaattcagaaatcagagagagacagaaaatatcccaacacccaactaaagactaacttatcagaaacactaggattcact

SEQ ID NO: 21101 - DNA, 614 bp, Homo sapiens
tgggggcaaatgaggtcagtcttctctgctcccccttcaacttggatgctcacggtccacacccattgcctgtgaggtagtttctacagagatgaaacaatgagcttccttaggggccaaggaggcacaagactgacctctttagcttctrctgtgctaagtaatattaataagctctaagtctttatgtagaagtcaatgaaattagcagtagggtttagaagccagaaacacggtgctgggttattaaaaaaacaaaaacaaaaaaaccccgaccattcttttcagctaaactccagctccagttctctgggctagaatagtagtgttaatagattccgcctcgactaaaaagggagccagtggcagaaaatctattcctccggcaaggttgctgggcaaccagcaagcttttggcatgtggctgatgtctccaggcagcccggactacacaaagtaagctcttccatcacttacaactaacttgattttgatggattaaaaccgaataaaaatgtactgtaactcacttccaaattcagaaatcagagagagacagaaaatatcccaacacccaactaaagactaacttatcagaaacactaggattcact

SEQ ID NO: 21102 - DNA, 539 bp, Homo sapiens
tgtagaattattagaattggagaaaatatttccaaatcctacaccacagcctgcatgaaagtgtgacatcctgtctcacacgcaatttttttttaatcatcaatcaattaggtacttatatcgaggctatgtaaaaaactcttatgactcaataataaaaagacaaacccaattttaaaatgtgaagaggatctaaatagacattactccaaaaaacatatgtaaatgaccaataagcacattgaaagataacacaaacctgtaatccaagcactttgggaagcctaggcaggtggattgcttgagcccaggagtttgacaccagcctgggcaatgtgaggaaaccccatctctacaaaaaaaaaaaaaaaaattcaaaaattagccaggtatgatggtgcacacctatagtcccagctactcaagacctgaggcaggaggatcacctgagccagaaagrttgaggctgcactgagcccagatcatgccactggactctaacctgagtgacagagtgagactctgtctcaaaaaaaaaa

SEQ ID NO: 21103 - DNA, 539 bp, Homo sapiens
tgtagaattattagaattggagaaaatatttccaaatcctacaccacagcctgcatgaaagtgtgacatcctgtctcacacgcaatttttttttaatcatcaatcaattaggtacttatatcgaggctatgtaaaaaactcttatgactcaataataaaaagacaaacccaattttaaaatgtgaagaggatctaaatagacattactccaaaaaacatatgtaaatgaccaataagcacattgaaagataacacaaacctgtaatccaagcactttgggaagcctaggcaggtggattgcttgagcccaggagtttgacaccagcctgggcaatgtgaggaaaccccatctctacaaaaaaaaaaaaaaaaattcaaaaattagccaggtatgatggtgcacacctatagtcccagctactcaagacctgaggcaggaggatcacctgagccagaaaggttgaggctgcactgagcccagatcatgccactggactctaacctgagtgacagagtragactctgtctcaaaaaaaaaa

SEQ ID NO: 21104 - DNA, 534 bp, Homo sapiens
tatatatgggcaataagtcgtgctctttacttatatcaaaggaaaatgctctttacctctctttgttgttgtgtttttatcactattgcctacacaagcagaatatcatacccaggatttaaagccctgtctgcaggattttcaagctcatgtttttatcataagtcactgtgcttccatgtgttttaaatctaatcctcattcctctgcttttacaccagagaattcatcactgacttatttttgactgaccttatagagctgtcaagtacacaatttctgctgtgacctttctcttagagttcagtcatatagcctctccctagatatcatctcctyttatctttcataataatgaattgtcagttaaaactcaacatttttaagattgagcttaccatctacacacaccattattggtgtattctcatagccttgaaacactaatgtcacgttgatgtctgccttttctttctctgctacctcatccctcatccttagattattctaaaagattcaattagatcaagttgg

SEQ ID NO: 21105 - DNA, 534 bp, Homo sapiens
tatatatgggcaataagtcgtgctctttacttatatcaaaggaaaatgctctttacctctctttgttgttgtgtttttatcactattgcctacacaagcagaatatcatacccaggatttaaagccctgtctgcaggattttcaagctcatgtttttatcataagtcactgtgcttccatgtgttttaaatctaatcctcattcctctgcttttacaccagagaattcatcactgacttatttttgactgaccttatagagctgtcaagtacacaatttctgctgtgacctttctcttagagttcagtcatatagcctctccctagatatcatctcctcttatctttcrtaataatgaattgtcagttaaaactcaacatttttaagattgagcttaccatctacacacaccattattggtgtattctcatagccttgaaacactaatgtcacgttgatgtctgccttttctttctctgctacctcatccctcatccttagattattctaaaagattcaattagatcaagttgg

SEQ ID NO: 21106 - DNA, 534 bp, Homo sapiens
tatatatgggcaataagtcgtgctctttacttatatcaaaggaaaatgctctttacctctctttgttgttgtgtttttatcactattgcctacacaagcagaatatcatacccaggatttaaagccctgtctgcaggattttcaagctcatgtttttatcataagtcactgtgcttccatgtgttttaaatctaatcctcattcctctgcttttacaccagagaattcatcactgacttatttttgactgaccttatagagctgtcaagtacacaatttctgctgtgacctttctcttagagttcagtcatatagcctctccctagatatcatctcctcttatctttcataataatgaattgtcagttaaaactcaacatttttaagattgagcttaccatctacacacaccattattggtgtattctcatagccttgaaacactaatgtcaygttgatgtctgccttttctttctctgctacctcatccctcatccttagattattctaaaagattcaattagatcaagttgg

SEQ ID NO: 21107 - DNA, 592 bp, Homo sapiens
tacctgttttttttgkttttttttttggctcattcttagaactgtagctgttcttgaatctttgatgggttgaagctaatccacattcagattttacaatctcatataattgccaaaattctacccttcaaaacacttgtttctttctttttttctcttacatttcctaaaagaaaattagtgaaaaaacaattttttatttggtctgaaactttatggcaaatctgaggacaggaagaaattagggacttctttgtgcacttttgatttggcgaatacctggaatatatatttttctctctgcacaatgcaaagtagttgcactcacaaagtatcaattagaaaaagaaattcttcccacatttcatcagagttttaagtggttacactacaataatccccagctatttgggaaatggtaaaaaaaactttgaagatcaagccatcattattattttcactaaaacctaaaaattcagccacaatatgtcaaaccagttgggacaggacttccttcctctaatttagtttttactgctggatacctgatgggctacttactatatccggtgtctcatagggcaaattgtac

SEQ ID NO: 21108 - DNA, 592 bp, Homo sapiens
tacctgttttttttgtktttttttttggctcattcttagaactgtagctgttcttgaatctttgatgggttgaagctaatccacattcagattttacaatctcatataattgccaaaattctacccttcaaaacacttgtttctttctttttttctcttacatttcctaaaagaaaattagtgaaaaaacaattttttatttggtctgaaactttatggcaaatctgaggacaggaagaaattagggacttctttgtgcacttttgatttggcgaatacctggaatatatatttttctctctgcacaatgcaaagtagttgcactcacaaagtatcaattagaaaaagaaattcttcccacatttcatcagagttttaagtggttacactacaataatccccagctatttgggaaatggtaaaaaaaactttgaagatcaagccatcattattattttcactaaaacctaaaaattcagccacaatatgtcaaaccagttgggacaggacttccttcctctaatttagtttttactgctggatacctgatgggctacttactatatccggtgtctcatagggcaaattgtac

SEQ ID NO: 21109 - DNA, 592 bp, Homo sapiens
tacctgttttttttgtttttttttttggctcattcttagaactgtagctgttcttgaatctttgatgggttgaagctaatccacattcagattttacaatctcatataattgccaaaattctacccttcaaaacacttgtttctttctttttttctcttacatttcctaaaagaaaattagtgaaaaaacaattttttatttggtctgaaactttatggcaaatctgaggacaggaagaaattagggacttstttgtgcacttttgatttggcgaatacctggaatatatatttttctctctgcacaatgcaaagtagttgcactcacaaagtatcaattagaaaaagaaattcttcccacatttcatcagagttttaagtggttacactacaataatccccagctatttgggaaatggtaaaaaaaactttgaagatcaagccatcattattattttcactaaaacctaaaaattcagccacaatatgtcaaaccagttgggacaggacttccttcctctaatttagtttttactgctggatacctgatgggctacttactatatccggtgtctcatagggcaaattgtac

SEQ ID NO: 21110 - DNA, 537 bp, Homo sapiens
aacattagcagtagcactcagcgatgtacacaaagaattacacatcatgtcccagtgacgtttactccagtgactgcacacctagacattcatcccactgaaataaaaactttttttttgcacttgtaattggcttcccctctgcttttgttggcaagagcaggtcggtgtcccaggcttagaatccatttttctctctttctctccatctgtctctctgtctccgtctctgtctttgtctctcyctctctctctctttttttgacagagccttgctttgtcgcccaggttgcagtgatgcgatctcggctcactgcaagctccgcctcccgggttcacgccattctcctgcctcccgagtagctgggactacaggcgcccaccaccatgcccgctagtattttgtatttttagtagagatgaggtttcaccgtgttagccaggatggtctttatctcctgaccttatgatccgcccgcctcagcctcccaaagtgctgggattacaggcgtgagccacagtgcccggccagaatgc

SEQ ID NO: 21111 - DNA, 537 bp, Homo sapiens
aacattagcagtagcactcagcgatgtacacaaagaattacacatcatgtcccagtgacgtttactccagtgactgcacacctagacattcatcccactgaaataaaaactttttttttgcacttgtaattggcttcccctctgcttttgttggcaagagcaggtcggtgtcccaggcttagaatccatttttctctctttctctccatctgtctctctgtctccgtctctgtctttgtctctccctctctctctctttttttgacagagccttgctttgtcgcccaggttgcagtgatgcgatctcggctcactgcaagctcsgcctcccgggttcacgccattctcctgcctcccgagtagctgggactacaggcgcccaccaccatgcccgctagtattttgtatttttagtagagatgaggtttcaccgtgttagccaggatggtctttatctcctgaccttatgatccgcccgcctcagcctcccaaagtgctgggattacaggcgtgagccacagtgcccggccagaatgc

SEQ ID NO: 21112 - DNA, 534 bp, Homo sapiens
ctggagtgcagtggtgcggtcacagatcaccacagccttgacgtccctaagctctggtggtcctccaatctgtttttgtattttttttttaagtagagatgaggtttttgccgtgtttctcaggctgatcttgaactcctgggctcaagtgaatcacccacctcaggctcccaaaatgctaagattacaggtgtgagccaccattcytggcctagtctgacttatctctgtcgttgagacattaaaatgaatattattggcactatctatcagcttacagaataatagcttttcctttctaccatcagttattcactgccattcagaaggtctttagaaatttgcagtgagtagtcttccaataagtagaggatggctctctcaggactttgtgtccctttgttcactcattcaagtgcttaggtcagtaagtcgtttttaagagcagagttttctcagaattgtagcaaattctaaaccttttttgtcaattgaagctgtattatgggctatccagtatgtctcttaagtttg

SEQ ID NO: 21113 - DNA, 534 bp, Homo sapiens
ctggagtgcagtggtgcggtcacagatcaccacagccttgacgtccctaagctctggtggtcctccaatctgtttttgtattttttttttaagtagagatgaggtttttgccgtgtttctcaggctgatcttgaactcctgggctcaagtgaatcacccacctcaggctcccaaaatgctaagattacaggtgtgagccaccattcttggcctagtctgacttatctctgtcgttgagacattaaaatgaatattattggcactatctatcagcttacagaataatascttttcctttctaccatcagttattcactgccattcagaaggtctttagaaatttgcagtgagtagtcttccaataagtagaggatggctctctcaggactttgtgtccctttgttcactcattcaagtgcttaggtcagtaagtcgtttttaagagcagagttttctcagaattgtagcaaattctaaaccttttttgtcaattgaagctgtattatgggctatccagtatgtctcttaagtttg

SEQ ID NO: 21114 - DNA, 1134 bp, Homo sapiens
tcagttcctttttcctgagaatattctctagatattctgtttttctaaaaaatatagttaattgtgagaattatatttatgaatgtttgataagttgagacattgtaacaagcacttttagttatcacaattctgaaaggaaaagattaaaaatataatcaagttgtaggattttctccaagtcttctgagtctacatccaggacttctccaccaaatctcagttaattctactgggtaaatatgtaaatataaaagaagtcttctatctcaaaacaaaagtggtaaagaagataaaatctagacagccctacttagaaaaccatgagcttatttactactacactaacttttgcttcctcttgataatgtttgagtcagtattaaatgttaactaggaaaaatacactaaactatgttgctaggaataaaatacttaccaataaattatcactaagtatatggtagggattatcattattttcaaaagctctttgtactgaaataagatactatttgcatgccataatttataataaataactgtagctacaaaagttatagttaattttaagacaatacttttgtttgatttagacctgaataacacatactaaatcaaagggatgttaaaagtaatactgatgaaataaagtcagaaatataaaatttttgccagagattgatttacctgattcaaattacttgttacacttttcaattctatatcttgtattctgagagyctgttcaagttgttgtttcacttctaactttttcctaagttgctcttcaggtctaattttttcttttaatatatcgacatctcttctcttcttcttgatttaaagtcaatctgccattaaacatacttatcttaaaattcattttgttagaaaatagaattcactttgagatctacttcttcctatactggtttattattccaataaaattcctatattcctgaatttttttttctttctatttctctggtattcattactctgtaacctcttccaaatgacatacatacttgaaaaatagtgagaaaaaacttcttctagttagaaagtttctgttactagtaactttgacaactgttatggaaaagaatattggaagctatctagtaa

SEQ ID NO: 21115 - DNA, 1134 bp, Homo sapiens
tcagttcctttttcctgagaatattctctagatattctgtttttctaaaaaatatagttaattgtgagaattatatttatgaatgtttgataagttgagacattgtaacaagcacttttagttatcacaattctgaaaggaaaagattaaaaatataatcaagttgtaggattttctccaagtcttctgagtctacatccaggacttctccaccaaatctcagttaattctactgggtaaatatgtaaatataaaagaagtcttctatctcaaaacaaaagtggtaaagaagataaaatctagacagccctacttagaaaaccatgagcttatttactactacactaacttttgcttcctcttgataatgtttgagtcagtattaaatgttaactaggaaaaatacactaaactatgttgctaggaataaaatacttaccaataaattatcactaagtatatggtagggattatcattattttcaaaagctctttgtactgaaataagatactatttgcatgccataatttataataaataactgtagctacaaaagttatagttaattttaagacaatacttttgtttgatttagacctgaataacacatactaaatcaaagggatgttaaaagtaatactgatgaaataaagtcagaaatataaaatttttgccagagattgatttacctgattcaaattacttgttacacttttcaattctatatcttgtattctgagagcctgttcaagttgttgtttcacttctaactttttcctaagttgctcttcrggtctaattttttcttttaatatatcgacatctcttctcttcttcttgatttaaagtcaatctgccattaaacatacttatcttaaaattcattttgttagaaaatagaattcactttgagatctacttcttcctatactggtttattattccaataaaattcctatattcctgaatttttttttctttctatttctctggtattcattactctgtaacctcttccaaatgacatacatacttgaaaaatagtgagaaaaaacttcttctagttagaaagtttctgttactagtaactttgacaactgttatggaaaagaatattggaagctatctagtaa

SEQ ID NO: 21116 - DNA, 1134 bp, Homo sapiens
tcagttcctttttcctgagaatattctctagatattctgtttttctaaaaaatatagttaattgtgagaattatatttatgaatgtttgataagttgagacattgtaacaagcacttttagttatcacaattctgaaaggaaaagattaaaaatataatcaagttgtaggattttctccaagtcttctgagtctacatccaggacttctccaccaaatctcagttaattctactgggtaaatatgtaaatataaaagaagtcttctatctcaaaacaaaagtggtaaagaagataaaatctagacagccctacttagaaaaccatgagcttatttactactacactaacttttgcttcctcttgataatgtttgagtcagtattaaatgttaactaggaaaaatacactaaactatgttgctaggaataaaatacttaccaataaattatcactaagtatatggtagggattatcattattttcaaaagctctttgtactgaaataagatactatttgcatgccataatttataataaataactgtagctacaaaagttatagttaattttaagacaatacttttgtttgatttagacctgaataacacatactaaatcaaagggatgttaaaagtaatactgatgaaataaagtcagaaatataaaatttttgccagagattgatttacctgattcaaattacttgttacacttttcaattctatatcttgtattctgagagcctgttcaagttgttgtttcacttctaactttttcctaagttgctcttcaggtctaattttttcttttaatatatcgacatctcttctcttcttcttgatttaaagtcaatctgccattaaacatacttatcttaaaattcattttgttagaaaatagaattcactttgagatctacttcttcctatactggtttattattccaataaaattcctatattcctgaatttttttttctttctakttctctggtattcattactctgtaacctcttccaaatgacatacatacttgaaaaatagtgagaaaaaacttcttctagttagaaagtttctgttactagtaactttgacaactgttatggaaaagaatattggaagctatctagtaa

SEQ ID NO: 21117 - DNA, 1134 bp, Homo sapiens
tcagttcctttttcctgagaatattctctagatattctgtttttctaaaaaatatagttaattgtgagaattatatttatgaatgtttgataagttgagacattgtaacaagcacttttagttatcacaattctgaaaggaaaagattaaaaatataatcaagttgtaggattttctccaagtcttctgagtctacatccaggacttctccaccaaatctcagttaattctactgggtaaatatgtaaatataaaagaagtcttctatctcaaaacaaaagtggtaaagaagataaaatctagacagccctacttagaaaaccatgagcttatttactactacactaacttttgcttcctcttgataatgtttgagtcagtattaaatgttaactaggaaaaatacactaaactatgttgctaggaataaaatacttaccaataaattatcactaagtatatggtagggattatcattattttcaaaagctctttgtactgaaataagatactatttgcatgccataatttataataaataactgtagctacaaaagttatagttaattttaagacaatacttttgtttgatttagacctgaataacacatactaaatcaaagggatgttaaaagtaatactgatgaaataaagtcagaaatataaaatttttgccagagattgatttacctgattcaaattacttgttacacttttcaattctatatcttgtattctgagagcctgttcaagttgttgtttcacttctaactttttcctaagttgctcttcaggtctaattttttcttttaatatatcgacatctcttctcttcttcttgatttaaagtcaatctgccattaaacatacttatcttaaaattcattttgttagaaaatagaattcactttgagatctacttcttcctatactggtttattattccaataaaattcctatattcctgaatttttttttctttctatttctctggtattcattactcygtaacctcttccaaatgacatacatacttgaaaaatagtgagaaaaaacttcttctagttagaaagtttctgttactagtaactttgacaactgttatggaaaagaatattggaagctatctagtaa

SEQ ID NO: 21118 - DNA, 550 bp, Homo sapiens
tgaggtctatgtattaacaccacattgaatataaactctataagtgrgaagcattgtttccaggaagagcaaataccacattccaaccatattgatggttgttgagtcagggccctcttattctatgagattcctgtcgaaactaccttatcagcaactgtctggctgagagcaagaataatcttttgcctcttttatacacagattttatgtagttaattaaataaatgttaatttaaattaataaaaatcatactaaagcaatttctaaaaatatatttatcagccacttttttttgtaggtcttcaatagaataatgaaatccatgaaaaatcctcgggttttcagagtttcatcttgatatcttagcattctgtcaaactataggctgagggagaaacattctgcagcttcccttagaagacccactttggatccacctttccgcagaggcatttttcaggatttctgtgtctagatttctccctgggaaaaccagggataaaaccatcagtcacatcacttgcagcccagggaatgttcagctgg

SEQ ID NO: 21119 - DNA, 550 bp, Homo sapiens
tgaggtctatgtattaacaccacattgaatataaactctataagtgagaagcattgtttccaggaagagcaaataccacattccaaccatattgatggttgttgagtcagggccctcttmttctatgagattcctgtcgaaactaccttatcagcaactgtctggctgagagcaagaataatcttttgcctcttttatacacagattttatgtagttaattaaataaatgttaatttaaattaataaaaatcatactaaagcaatttctaaaaatatatttatcagccacttttttttgtaggtcttcaatagaataatgaaatccatgaaaaatcctcgggttttcagagtttcatcttgatatcttagcattctgtcaaactataggctgagggagaaacattctgcagcttcccttagaagacccactttggatccacctttccgcagaggcatttttcaggatttctgtgtctagatttctccctgggaaaaccagggataaaaccatcagtcacatcacttgcagcccagggaatgttcagctgg

SEQ ID NO: 21120 - DNA, 550 bp, Homo sapiens
tgaggtctatgtattaacaccacattgaatataaactctataagtgagaagcattgtttccaggaagagcaaataccacattccaaccatattgatggttgttgagtcagggccctcttattctatgagattcctgtcgaaactaccttatcagcaactgtctggctgagagcaagaataatcttttgcctcttttatacacagattttatgtagttaattaaataaatgttaatttaaattaataaaaatcatactaaagcaatttctaaaaatatatttatcagccacttttttttgtaggtcttcaatagaataatgaaatccatgaaaaatcctcgggttttcagagtttcatcttgatatcttagcattctgtcaarctataggctgagggagaaacattctgcagcttcccttagaagacccactttggatccacctttccgcagaggcatttttcaggatttctgtgtctagatttctccctgggaaaaccagggataaaaccatcagtcacatcacttgcagcccagggaatgttcagctgg

SEQ ID NO: 21121 - DNA, 610 bp, Homo sapiens
ttctaaaggttttattagggaatgaatgttgtcatcttaaaagaacaatttctcagtgcttcataaacagctctaaatgctggttgcttatcatcatggtaaacacctctgttccctgaagaatcaagattccttcttctgcttcttggcaactgcttccatatagacaatgatctggatgataattccattgacacggaaaggcaaaaagactttctggattatgaaaaaacatgatatccaacaaatcttgattgcccatgtaaatcttgattgcctatgtaatgtttagtttgtattctttaagccatgtcataagtatatctcttcattgtagtcacacagtttgtcatatcattcttgaaatacttccttctcattygagtcatattcatcaacataattccagggtttactccagtttttccacagtatggttgcctagcaaagcgactataccatcttatttgaggttccttgtgttctgaggccactggagcaatttatgtggaattaaatttctttagtaaagaacaaatatgatcaactggtcgtaaaaaaggctattagtgtgggagtcaacttctttcaggaataacggcaagaacaa

SEQ ID NO: 21122 - DNA, 528 bp, Homo sapiens
tcaaattggggaccaatcagggaagggaagaaaatgagaagaaatgatttagcacctaatattaactaaacactttacatatattatascactaaaaataaatgtacagaatggcgagacaaatatagaaagaaaagcaaccattttatgaataagaattattgaatgcatttatatatatttgtaatatatcttaatcaaattttgttaagatgtgtattgattattgaatacctaggtaataactataattgtgtcccacaacagttagtgaaaatatgtgttgtaattttcaggatttcaaactaaaaaattcttaagatgtgtacccaattatacaattaccacctagaattatgtcataacaacttctaggcaaactaaagagagaatcatttattttaattatttgtattttaaaattcttatgtaatataactgcagaaaaaaattaataaaaacagtttgatgtcatggaagaatgaagtcagaaaaaagaaaaaaataacaattttaaaagtcgattgt

SEQ ID NO: 21123 - DNA, 528 bp, Homo sapiens
tcaaattggggaccaatcagggaagggaagaaaatgagaagaaatgatttagcacctaatattaactaaacactttacatatattataccactaaaaataaatgtacagaatggcgagacaaatatagaaagaaaagcaaccattttatgaataagaattattgaatgcatttatatatatttgtaatatatcttaatcaaattttgttaagatgtgtattgattattgaatacctaggtaataactataattgtgtcccacaacagttagtgaaaatatgtgttgtaattttcaggatttcaaactaaaaaattcttaagatgtgtacccaattatacaattaccacctagaattatgtcataacaacttctaggcaaactaaagagagaatcatttattttaattatttgtattttaaaattcttatgtaatataacwgcagaaaaaaattaataaaaacagtttgatgtcatggaagaatgaagtcagaaaaaagaaaaaaataacaattttaaaagtcgattgt

SEQ ID NO: 21124 - DNA, 561 bp, Homo sapiens
gggtgacaaatcctccttgaaggttgtctgggtggtgcagcttcatgtcccccactgggtcattccctgattgcttttattacagattctctccctgcagtttttctttgtttctttcttttttttttttttttttttgagactgagtgtcactcctgtcgtccargtgggagttcaatgcaatggcgcgacctcagctcactgaaacctccgcctcccgggttcaagcgattctcctgcctgtaatcccaagtagctgggattacagccacctgccaccatgcccagctaattttttgtatttttagtagagacagggtttcagtatgttggccaggctgctctcgagctactgacctcaggcgatccacctgccttggcctcccaaagtgctgggattacaggcgtgagccaccgcgaccagcccctccctgcagttttgaaagagaacttattcatagttactacctatagtattgatggagaatttatcaatagttcctatctgaagttttgaaatagaacttattgatagtttcccaaattctggctccttctggg

SEQ ID NO: 21125 - DNA, 565 bp, Homo sapiens
ctcttgaaagtttatcattattaaacgtgcaaaagcactaatacctgtttcatagagcccctgggctgaacaaatgtggtaatgctcacatagcctagccacagagtcgctgctcagtaagagttccttgcgtaactccaacagtatgaaattctgccttgcactgagctataatctgttgagttttagtctgactattggtctttttggggacacaaaaaacaaggctaatccatcagttacctttcaaacattagaaacctgctgccaggttccactgaccaggtctgtcaccttgttaaggccaagataagatagtkaaaacccattgttgacaggggcttagcaaagggcaatcaaaggaagacaaatgttcctggggccagtctgtggtgggtgctgcagagatgcaattctttacaaattcttgactggccaaaacagtgtataaaacctcctgggagctcttgtcactgaccgttgattcctacaaagtgtattttacattttaaaagccctgctttatcacaggtgctttaagccatactcacccttcctcgaatga

SEQ ID NO: 21126 - DNA, 446 bp, Homo sapiens
aaaagcaaaactatagagacagaatcagattggtttcagcctggaactaaggcaagagcatggattaattgtattctggcatgagggacaattttgggttaatagaatggttccaaaactggattgtgatgataattgcacatctatataaatttaataaaattaaacctcaaaacaataaagaaaggaaatattacagaactatagcttacaatttataggaatttcaagtaagctgtttatttgctgatatcagtaagcagatcttccttttggatgtctctgtctctstctctctctctctctctctctctctctgttttacctcctgaactttgctagcacgtggggagtattctgttctttatctgcttctttatctgttttcacttatggattctgggttttcatttagtatccctgaatcaaaaggaagtctagttcct

SEQ ID NO: 21127 - DNA, 509 bp, Homo sapiens
gctgattgggctcccttttaattcatatgttacaacgctaaggttgttcctttttagagcctgtaaatcatgttactcttacttttctcatctctcaagtgattctttcaaatctttacgtatgttctgttgtgaaataccaaacacttgcttttattccaactgctaacttcaatttctatttgcttgaagacagaagcaattaggagagaatccytttattgctttcccactatatttagcaaactcttggtatgtaggcacactgtcttctgtgtcatgcaagaacaagagactaaaatgctaatgcctattcttctgcttctgcacctgacctcacctcttctttcctatacaaggactttgctcttaatcattattcctctttcctaaattatctattttttctctactgtatctttatgatcagttcaaaaattacatatatgcataatatgagcaactcccacatggtagcctctttcactcattgtggtattcattcaaga

SEQ ID NO: 21128 - DNA, 543 bp, Homo sapiens
tataagtgtgtgtgtgtctgtataagtatacatatgaatatgcatgtgagtgtttttacgagcttttcaggggactatttctaccgttttacccctacctcctagaatagggctctaacacaaaggaaaagctaaataaatgttactaaaccactgactgcagtaacartgattttagttattaggataaaaacataattagcacttgtagatcacattagggcttaacaaaagctttcagatatatcagctaatatgttcattattttataatatatagtttagtttatctgctgacaattaaagtgtataataacaatgatttgtatttagctttgaagtgtggggatttcttttgtatttatgtatgaagatatcctgggaattaataacattgcaaactaataatggattctttaactaaccagctgagcaatcccattatgcttctctgcttcagacagttctactatgtacaccatctacctccattctgttttcttatttgagtcagatttctttccatccttgagtaacaataaa

SEQ ID NO: 21129 - DNA, 550 bp, Homo sapiens
gaatgcaatctagatatcttggtaaaatctcaacaagaataaaaayagatttaaattttaaaaaattgttgttttttgtgtgtatgtgtttttaacatagcccattttccatttctttttccattagttaatagttccatggggctttcccctgggccaatagctgggctttgatctcacatttctagcaaatctctgccagtggaggcaatagtgttgcctgccagttcaattcagttcttacctctttttctaattgttctgatgtcctcagaatcccatgtgccaaaataaacccttgtctgtctgtttcacagctctatgtgcctgagctggtttccacaaacacagaaacatctcctgcactaatgatcttctacacaagtataggtatgaaaagagctgtatatgggattctcttcagaaaagtattcctctgttcagttatgaaggtaaagattgggttcaacttttcaagttattctatgttatgaaaacttttgttttctttaataaccttgatattagcctttcatcttaatacatatag

SEQ ID NO: 21130 - DNA, 550 bp, Homo sapiens
gaatgcaatctagatatcttggtaaaatctcaacaagaataaaaacagatttaaattttaaaaaattgttgttttttgtgtgtatgtgtttttaacatagcccattttccatttctttttccattagttaatasttccatggggctttcccctgggccaatagctgggctttgatctcacatttctagcaaatctctgccagtggaggcaatagtgttgcctgccagttcaattcagttcttacctctttttctaattgttctgatgtcctcagaatcccatgtgccaaaataaacccttgtctgtctgtttcacagctctatgtgcctgagctggtttccacaaacacagaaacatctcctgcactaatgatcttctacacaagtataggtatgaaaagagctgtatatgggattctcttcagaaaagtattcctctgttcagttatgaaggtaaagattgggttcaacttttcaagttattctatgttatgaaaacttttgttttctttaataaccttgatattagcctttcatcttaatacatatag

SEQ ID NO: 21131 - DNA, 639 bp, Homo sapiens
tgctaattagcgaagggatgataaaaatattctaaaattagatactgatgatgcttgcacaaccctgtgaatatacactgcaaaagggtgaattttatgtgtgaattatatctcaataaaatataaaacaatattttaattaataaataaaatacatctgtttacccccccccaaaaaaaaacccagatcaatggctagaaggcaaagaagctagaaaatacactattcctattctaaagctgataatcattttaccatgttgtagatatctctaagtaagaagttgacaaagatcaacaaaaagatgtgttccattccaaaaatttctcgattctatgattcagcgcagaaagattgtgcaagtttatactttagtaatacagaacaaagtgrgtactggtgatagcagcagaaggcagacacatttctaggcagacaggggtgagtccccagtaaaactagaccttcaaaccaagcacagcttaaagcctgaaaactgagttaccagcgtccacaaccagagtgagaacttcctcagtgccttttagccaatttaatggtgctttgtccaggcccacttatggaccaatcagcacacactcccccattctgatcccataaaaaccctggactcagcc

SEQ ID NO: 21132 - DNA, 780 bp, Homo sapiens
aaaacttgtgtggagttgaataaaaaagtacattatagatttcctttgctttaatttcattgagaactacattgtagactgcaataaaacaraggtcagattcagagaaaattgcattttactagtggtagcagcaaaaatatgaaccagaatttactacagttttatgagtttttattaatatcagtgatagcactgagaaacaatgatactaattgaattacttatttttgctatacttgaagttttataataaatgagattattccaggagtttaagtttttatttatttcgctgaagatactaaaatctgtttcattaattaataaattagcctatatgttctgttattaatgatgttggtagctgaaatattttgtttattaatggatatatcttttataatgacttctgcaaaacaaagcaaatgcatcgcttatgttccattttcaccatgtagattgcattgtaatttaatatcagcattgctataaaaacttaattggtcacaagacctgagtaaactggaaaataatggcattttcaccaggatgtttttgagactgttctaatatagtgaaagcaagcaaaaattgaagtaaaactgtcaatcagtaggtttctttttttttttttttttttttttgagagggagtctcgctctgtcgcccaggctggagtgcagtggcgcagtctcggctcactgcaagctccgcctcccgggttcacgccattctcctgcctcagcctcccgagtagctgggattacaggcgcccgc

SEQ ID NO: 21133 - DNA, 504 bp, Homo sapiens
caacatcatttgtttaaaaaatcctccaattaaaaaaatatttatgcacggggtacatgttcaggtttgttacataagtaaactgcatgtaacagggatttgktgtagatattatttcatcaaaaattgacaaatgggatctaattaaactacagagcttctgcccagcaaaagaaactatcaacagagttaacagacaacctatagaatgggagaaaatattcgcaaactatgcatccaaaaaaggtctaatagccagaatctataaagaacttaaacaaattaacaagctaaaaacaaacaaccccattaaaaagtgggcaaaggacatgaaaaaaacattttcaaaagaaaacatacataaagtcaacaagaattctccagatttatccaatcttggaaggaggttgatcttgtatcagacattttgggggaacattaaacatctaaattttaacttaaattttcataatatttagaaaagaggaggcaagttcaatgctt

SEQ ID NO: 21134 - DNA, 532 bp, Homo sapiens
acacaaactatgttgaaacatttaaaaagagcttatttttagtttgaggagcaagtggaccagcaacctatcaactaaacatgtgcaacttgaactcaatagaggtcaaagtgaggaaggaatgcagattagtgaccaaagttatggacgtgatgtctgaaatcatgggagtgtctgaccattccaagataatatgctgtagaaagttgaaaagtagagctcccagttgtatttagttccaccaaaattaaaggaaaataattatatactttaaatagcatttattaattacagctgtatgtaaggtgctacgaatgtattaaagatagagggcttaaaacaaaagttactctcatgtaacataatcaaacaaaacgtagattagtaaaaggaatataatctatttttttcagccttgaattgtgttgggtatttgggatgatttctcmtaaatcacatgcagctaaatagcctttcaaaacaccttatctaaattcggtgtataaagaggaaaaggacttgttgaaactga

SEQ ID NO: 21135 - DNA, 535 bp, Homo sapiens
actataagtatgtgtagacacacacatataattatgtgtatatatgtgttttatgcatacatgtatgtactttattctgataaaaacatatatctatcttaaatcaactgtaattttacttaacttttttagtggttaaatttttttttgaataatttcctgatcttagcttccttggggaagtgtatatgccctgagtatggaagagattcaaagtaaatagtagtttccatgggaacgaataaacttcacatcctgacataataaattagacctggtttgagtgtggcaratcattttggctttctgaattcagcttctcatatgtaaaaaaagggtatgaacttttatcttataacctaatgcagctgacccgtgagtaacatgggggttggggcgccaactcgcatgcaggaaaaaatctgcatataacttttgactccaaagtcttaactactaatagctcactgtacactggaagccttaccgatagcataaaagtcaattaacacatatgttgtaggtgatatgtatt

SEQ ID NO: 21136 - DNA, 550 bp, Homo sapiens
aaataatggcaatagagatttaccaagtagcttattgggattcaatcaggctggtgggaaaaatattagagacagttatagagatagacacaaatcttctcggaaggccgagaagtttgcgtaactttggtagtagacctggctgaaggcggcctggtccctttacctttagttaaacaaattaaagtagtagcaaaggaaggcagagtagtttacctagctagcttgtttactcatgtgatcttaagactaacctttgatgtaccgcaggtgctgaagtgctttttactcaagaagtccacaatgtcaattattaccctctaatggtgttgactcaagcctttgttaattaatcatactgaataaatgcgagtctcactaggtgatcagggccgagtcccaactgtttagaggactctgctggagtctgtaagccattcgaacactcagcaggactggcaaagcagagtatctgtgtgccagtgtacttcattcatctgtcgtgkgtcagaggtatgcaagggacagactccctgcagctggtgctccc

SEQ ID NO: 21137 - DNA, 561 bp, Homo sapiens
gtatgattttgtagtctactaaaatacaataaaggaactaaaatgagtgtgatagttaatagtgagtgttaacttgattggattgtaggatacaaagtattattcctgggtgtgtctgtgtgggtgttgctgaaagagattaacatttgagtcagtgcgctggggaaggcggatccacccttaatctagtgagcacaatctaatcagcttccagcaaacatgaagtaggcagaaaaacatgaaaaagagaggcaggcctagcctcccagcctacatctttctactgttctggatgcttcctgatctcgaacaacagactccaagttcttcagttttgggacccggactggctctccttcctcctcagcttgcagacagcctgttgtgggaccttgtgatcatgtaagttaacacttaataaactyatatataaatatatatatatatatatatatatatatatatatatatatatatatatatatgcaccactgcgcccagctaatttttgtattttttgtagagatggggtttcaccatgttggccaggatggtctcaac

SEQ ID NO: 21138 - DNA, 561 bp, Homo sapiens
gtatgattttgtagtctactaaaatacaataaaggaactaaaatgagtgtgatagttaatagtgagtgttaacttgattggattgtaggatacaaagtattattcctgggtgtgtctgtgtgggtgttgctgaaagagattaacatttgagtcagtgcgctggggaaggcggatccacccttaatctagtgagcacaatctaatcagcttccagcaaacatgaagtaggcagaaaaacatgaaaaagagaggcaggcctagcctcccagcctacatctttctactgttctggatgcttcctgatctcgaacaacagactccaagttcttcagttttgggacccggactggctctccttcctcctcagcttgcagacagcctgttgtgggaccttgtgatcatgtaagttaacacttaataaactcatatatawatatatatatatatatatatatatatatatatatatatatatatatatatatgcaccactgcgcccagctaatttttgtattttttgtagagatggggtttcaccatgttggccaggatggtctcaac

SEQ ID NO: 21139 - DNA, 552 bp, Homo sapiens
tttaataaatctcctcttagatataaatctgtatctaacctattggtcctatgacttgtacatccttcatgtaaagcattcacttgacaacttaatcatcaacagagcctaccagtctttagagccaatgctgtttgattatagagaaaaattaattcctatgtgtcttsacttttgaatatccttcccatcttcttcagtatttttgtgactctcgagaggatgaactgccagtagtaccactgaagttcccaactactagggctgtcttccatgttaattcttcagttggcctcatttataggcatcactgtctcatcttgatgtcactggaagccaaactctttgtgacatttcatttattttgtagcacatgttggaccatacattaacttcattttctgtgtagtttttattgagaagtagaaccatgcacagttggatggcactgtgccttccaaatgggaagaagatcaataatgcagactaaagggcatagaaaaggtgacttttctaatctgcaacatgcatttcatgccatggagagcccca

SEQ ID NO: 21140 - DNA, 552 bp, Homo sapiens
tttaataaatctcctcttagatataaatctgtatctaacctattggtcctatgacttgtacatccttcatgtaaagcattcacttgacaacttaatcatcaacagagcctaccagtctttagagccaatgctgtttgattatagagaaaaattaattcctatgtgtcttcacttttgaatatccttcccatcttcttcagtatttttgtgactctcgagaggatgaactgccagtagtmccactgaagttcccaactactagggctgtcttccatgttaattcttcagttggcctcatttataggcatcactgtctcatcttgatgtcactggaagccaaactctttgtgacatttcatttattttgtagcacatgttggaccatacattaacttcattttctgtgtagtttttattgagaagtagaaccatgcacagttggatggcactgtgccttccaaatgggaagaagatcaataatgcagactaaagggcatagaaaaggtgacttttctaatctgcaacatgcatttcatgccatggagagcccca

SEQ ID NO: 21141 - DNA, 598 bp, Homo sapiens
tatttgtaatgctggggagatctttagttgttagtcctttcatagcaagctacctatataaatggtcttgtcaaacaacttactattttctaaaaatcctgttaacttcaccactgaatatttgataaataattttagatacatttgcagcctcaggagattgctagaattccagrtaagataaactggagcatgagaccgagcttacagatcaagctgaaaccccaaacacataggaaaatgttatgcaaatttatttgtaggcaagaaaacacatccttttgctatcttcaacctgctcctatggccatagcgaaggatgtgtttatttgccctcttcttgacacttcatttatcagaaaatgagttgtcaaagctagaggcattaattggacacattataccagagggccacaacccttgggctgtggactggaactacttgtctgtggactggtaggaacccggttccacagcgggaggtggtcagcagctgagcgagcattaccacctgagcaccaactcctgtcccatctgtggaggtattcgactctcataggagcacgaaccctactgtggactgtgcatgcgagggatc

SEQ ID NO: 21142 - DNA, 598 bp, Homo sapiens
tatttgtaatgctggggagatctttagttgttagtcctttcatagcaagctacctatataaatggtcttgtcaaacaacttactattttctaaaaatcctgttaacttcaccactgaatatttgataaataattttagatacatttgcagcctcaggagattgctagaattccaggtaagataaactggagcatgagaccgagcttacagatcaagctgaaaccccaaacacataggaaaatgttatgcaaatttatttgtaggcaagaaaacacatccttttgctatcttcaacctgctcctatggccatagcgaaggatgtgtttatttgccctcttcttgacacttcatttatcagaaaatgagttgtcaaagctagaggcattaattggacamattataccagagggccacaacccttgggctgtggactggaactacttgtctgtggactggtaggaacccggttccacagcgggaggtggtcagcagctgagcgagcattaccacctgagcaccaactcctgtcccatctgtggaggtattcgactctcataggagcacgaaccctactgtggactgtgcatgcgagggatc

SEQ ID NO: 21143 - DNA, 515 bp, Homo sapiens
tcccataatatataccattttattcatccatatatatatatatatatatatatacatatgctattagttcttttcctctgcggaatcctgctacagtacctgaaggcaatattttaatggatttttcaaaactttcatagtgaaaaagaaaaataaactatattgacaaawcttttctattgaagaactcctggaactgatgcattgataagaatgttattttaaatgtgaaagaatatatttttgcttatttgaaaatactttaagaaagcattttttaaaaagcagagacatatttaatttgtattactttaaacatttgtaaactctgtttaaaaattccccaaaaccaaacaggaaaaggatatttaataataaagaaaattttaaatctttcatgtatttcaggtgtcattagctaaatttttgtagaatagttggacaccttctaagataaaaaatttattgccttctcacttgtgtaagtaataaaacaacccaacaaagataaatca

SEQ ID NO: 21144 - DNA, 532 bp, Homo sapiens
tgttctatttatagcacacaggatttgacaracaggtactttttaattccatccctaaggttgaatttccctttatgtttcatgaataagggaactcaatagaagaaagcaacttacccgttgtagaaatggcatgaaaataacaaatggaatcaccctcccacatttccatttacttttactcttctaaaataaagtttcttaacactcaatgttgacattgagtttttcttctgggaggctgtcctgagcattgtaggatggttagaagtatccctggcctctacctactagattctagtagcatccccatgctcccagtggtgactgtcaagaatgctttcagacattccccactgctgttattgcagcatctgttaaaaaccacatatttgtgccaaatagattaaactatcttcttcccagtaaacatactcttcctcgaggacattgtctttcaaagtccagtctctattgttacaaataatatttaagtgatcatgagaactatttctggtattttattttattt

SEQ ID NO: 21145 - DNA, 533 bp, Homo sapiens
actcctcctggacccttagagtactgggtttgcacttaatgaacaagaaaactcattaaaaaatatattaacattataatgggactttgagagtacatggtgaaatgtacaaagtcagtcactgaccctggcaggatccggaagtcacgctagtgctttaagcacttccaggaagagagtccttagcmcagacagcagtctcaggttcaggcattactgtcaggggcacagatggcagcccaggccccatcacagtgaggccaatgcctttgccaggtatgagtgccttagtagtttctccaggcacaaaagcacaggtggaatagaagagaaaactgccagttgccaggaaatgcccaaggagactaatttatagagaagattcaaaacaatccctgaacttcccagatttttttgagaagtgtttggctggaatcccaatacagcgattggaagcagaactagagaaaattattttcttgtgtttataattagctacatagttttgtatagagtttgatggtttggtttcc

SEQ ID NO: 21146 - DNA, 548 bp, Homo sapiens
gggtcaatgattcacttttccctgagataatgactttgaactgagatattatttacgtgacatgagggaaagatgtctgccacccgggcacacgaggtccatttggcttggaacacaaggagagacagagatgaggctgcaaattaaccacttgatatctgtccttctgcagatcaacagccagggtcactgggtgtctagctawcctcctactcaactgcactgaaatttctcccaaatctccaaaacatgtttagtaattctgccagttatatttatcaagagcttaaacaatcagattgttaatagccttttcttaaaaagtgttagaattttagttgttagtgaatgattcttaaaaggctgttctgtctttgggttagggccaattgttcatttactgaaagatatacacggaaaagaaaaggatctgattctgcattgccactacttaagcgctgtgaaatgcttgagcttttgtcaggtgtctgtagcctcatttcatcttcactgtagacttgtggaaatgcattattatgacgccaatt

SEQ ID NO: 21147 - DNA, 482 bp, Homo sapiens
ctgttttatctctgtatggaaaaattttgacttgccatctcaagagagccatcacagatgtctcctaagaaagaactggttcacattttggctttaayaccatcagaatgatctgattatagattctcatccataaggagatagtatatagtggttaaaagcatagactgctcaattcagagcacagttctgtcatttttttttcttagtgtccttgggaaaatcaagctctgtgtttctcagttttctcatctctaaaaatgggtataataatattgttataataatagtacctccctcattgcattttaaagattaaatgataaatatatgtgcatgacagaggaagtgatttgcaggtgtttgctattatactgctctgttttttttttttttaaataagaatgagccagctttttctgtattaaattactgtaccatttgtcaatttgctggaggtgcaccttttgctgtaaggaaaa

SEQ ID NO: 21148 - DNA, 482 bp, Homo sapiens
ctgttttatctctgtatggaaaaattttgacttgccatctcaagagagccatcacagatgtctcctaagaaagaactggttcacattttggctttaacaccatcagaatgatctgattatagattctcatccataaggagatagtatrtagtggttaaaagcatagactgctcaattcagagcacagttctgtcatttttttttcttagtgtccttgggaaaatcaagctctgtgtttctcagttttctcatctctaaaaatgggtataataatattgttataataatagtacctccctcattgcattttaaagattaaatgataaatatatgtgcatgacagaggaagtgatttgcaggtgtttgctattatactgctctgttttttttttttttaaataagaatgagccagctttttctgtattaaattactgtaccatttgtcaatttgctggaggtgcaccttttgctgtaaggaaaa

SEQ ID NO: 21149 - DNA, 539 bp, Homo sapiens
acttactttttctcttttwtttaaagattagcactcatcaggcatttgtggtaatatgcaaatatatacataggacatatatgtatatttataagcaaaatgtgaattggaaaaacatttgaatgtagaaacaagaccacaggagtaaatttgtacaaggcactagtaaaagtgacatgtaatatggggttcttgtagtgagtttcataatccaatttttgctccttgatttgaatgggcacccaaaataacacatgctatcctaatccctactccccatattttgggttttatttttatagaatacatatgggcttatataaacattaatctcaacatgttctaatttacatatgtaagctaatttttatttctagagataacagaacaaaactcaaaacatttgacataaaattattggaacaattaacagtttgacctattaaacacattattgtcctctatgaacagagggactgtctgaaaaaaagaacaagttgtctgcattttaaagtgagagataagcatcaaggtgtcaa

SEQ ID NO: 21150 - DNA, 539 bp, Homo sapiens
acttactttttctcttttatttaaagattagcactcatcaggcatttgtggtaatatgcaaatatatacataggacatatatgtatatttataagcaaaatgtgaattggaaaaacatttgaatgtagaaacaagaccayaggagtaaatttgtacaaggcactagtaaaagtgacatgtaatatggggttcttgtagtgagtttcataatccaatttttgctccttgatttgaatgggcacccaaaataacacatgctatcctaatccctactccccatattttgggttttatttttatagaatacatatgggcttatataaacattaatctcaacatgttctaatttacatatgtaagctaatttttatttctagagataacagaacaaaactcaaaacatttgacataaaattattggaacaattaacagtttgacctattaaacacattattgtcctctatgaacagagggactgtctgaaaaaaagaacaagttgtctgcattttaaagtgagagataagcatcaaggtgtcaa

SEQ ID NO: 21151 - DNA, 539 bp, Homo sapiens
acttactttttctcttttatttaaagattagcactcatcaggcatttgtggtaatatgcaaatatatacataggacatatatgtatatttataagcaaaatgtgaattggaaaaacatttgaatgtagaaacaagaccacaggagtaaatttgtacaaggcactagtaaaagtgacatgtaatatggggttcttgtagtgagtttcataatccaatttttgctccttgatttgaatgggcacccaaaataacacatgctatcctaatccctactccccatattttgggttttatttttatagaatacatatgggcttatataaacattaatctcaacatgttctaatttacatatgtaagctaatttttatttctagagataacagaacaaaactcaaaacatttgacataaaattattggaacaattaacagtttgacctattaaacacattattgtcctctatgaacagagggactgtctgaaaaaaaraacaagttgtctgcattttaaagtgagagataagcatcaaggtgtcaa

SEQ ID NO: 21152 - DNA, 808 bp, Homo sapiens
atgcagggcctaacttcttttgctactgagaacgtgtcccaaaccatgtgaacaagcccaggcaagactcttggagggtgagaggacactcagagagggggcccacctgtccccccatttcctcttagccattccaccagttggatataaagattagttacatgagcgcagactgggaccattacccagctgaactacagaatcaaagacaaatatgtgatgattgtttttgccactaagcattggagtattttttaatatgacaaaatgcatttatcatcattatattttcaataaaacagaaaatacaaaagaaagcaatttgtggtgagcttattaatctgatctttattcttaccttaatatgtatttccaagaactgagttttgacaaattctcacatttgcacatttatacactaatggaacatgcagtcttacatacaacttttttatagaatgacttgaacactacaactagctaaattaaatttttaaaaatggttcatgtataattctgaattaaaattttaaaattaatttttaaaagccatcttaatacattttatgtactgaaattatgtttatgttactatgaaatggaatctttgtttagagcttttatctttggataatctgttgtttgtatcactctacccaagacagaatttgcatgtgattttgaatgccctatagggatgcaagatttttctagacttctttgtcagacttgcaatgggggtgcctcatttacttggcccaccktgctcaaccacttgcgggagggagcacatgagtgagccactatg

SEQ ID NO: 21153 - DNA, 557 bp, Homo sapiens
tgatatcacatatacatatattaagccaggataactttaagaaaatgataccagttatcattactctttatctcatttatctgaagaaaatgcacttgaagcataggaatctctcctccctattacaggggatgcaagcaagaaacacattttgttcttgtgaaagacttaatgggaggaaaaaacagaggctggaaagccctaatctgaccttcaaacaaaaaagtcctttgaaaataatgaagtaagtaatttcctcccctctattggcaatgccatctcaatctctaagaatttcctattcactccttgacctttccaatgaggtcatcacyaaaggaaatgtcttacttcaagagtaagagcagactttaaagatcttaaacaatttcagagtatagaccttgttagatcctgttctcttgaagggaaagagtaagcaagagttttttgccaaagaaataacttctcaatgaatttcaaagcacttgtgtgtgttcggaaagtaaaaagctggactccatataaattctaacatttcaatacattttacattg

SEQ ID NO: 21154 - DNA, 875 bp, Homo sapiens
taattaaaaatcaactcaggctgggtgcartgaccgatgcctataatcccagcactttgggaagccaaggtgggtggatcacctgagatcaggaattcaagaccagcctggccacgatggtgaaacctcgtctctaccaaaaatacaaaaactagctaggcacggtggcacgcacctgtaaccccagctatgtgggaggctgaggcaggagaattgcttgaacccaggaggcagaggttgcagtgagccaagatcgcgccactgcaccccagcctgggcaacagaacaagactccgtctcaaaaaaaaaaaaaaaaaatcaactcaacaaatattgtttgtttaaaataaatcattggttacatatatcatggtacattggttatacaaattgtagtgtcctcattcttgagagttatacaatatagctgcaaacagtttaacacattggaaacactactagatatcatgccattcactgaaaatgtgggtgtcacatatcaaaaatgctacagaaggggaagattaacatgtgcttgagtagtcagataggctttccaagccaaagcccaaagcttggaaaacattaggaaaagtaaaataaaagggagaacattcaaaatggggacgagagagggacagagacagtgagttggattagcatggatttcggaaaggacagtcaagaatctagcctaacttcagtgcagacttacccagggggaaaaaaaaaaaaaaaacttgaaggacaagactggaatgattttctgtgctcctatttactaattgtttcctaaattttgtctgttcttgctggaaatatctcttcatttcatttccttgtattctgacgagactttccaccttttgcaacag

SEQ ID NO: 21155 - DNA, 875 bp, Homo sapiens
taattaaaaatcaactcaggctgggtgcagtgaccgatgcctataatcccagcactttgggaagccaaggtgggtggatcacctgagatcaggaattcaagaccagcctggccacgatggtgaaacctcgtctctaccaaaaatacaaaaactagctaggcacggtggcacgcacctgtaaccccagctaygtgggaggctgaggcaggagaattgcttgaacccaggaggcagaggttgcagtgagccaagatcgcgccactgcaccccagcctgggcaacagaacaagactccgtctcaaaaaaaaaaaaaaaaaatcaactcaacaaatattgtttgtttaaaataaatcattggttacatatatcatggtacattggttatacaaattgtagtgtcctcattcttgagagttatacaatatagctgcaaacagtttaacacattggaaacactactagatatcatgccattcactgaaaatgtgggtgtcacatatcaaaaatgctacagaaggggaagattaacatgtgcttgagtagtcagataggctttccaagccaaagcccaaagcttggaaaacattaggaaaagtaaaataaaagggagaacattcaaaatggggacgagagagggacagagacagtgagttggattagcatggatttcggaaaggacagtcaagaatctagcctaacttcagtgcagacttacccagggggaaaaaaaaaaaaaaaacttgaaggacaagactggaatgattttctgtgctcctatttactaattgtttcctaaattttgtctgttcttgctggaaatatctcttcatttcatttccttgtattctgacgagactttccaccttttgcaacag

SEQ ID NO: 21156 - DNA, 875 bp, Homo sapiens
taattaaaaatcaactcaggctgggtgcagtgaccgatgcctataatcccagcactttgggaagccaaggtgggtggatcacctgagatcaggaattcaagaccagcctggccacgatggtgaaacctcgtctctaccaaaaatacaaaaactagctaggcacggtggcacgcacctgtaaccccagctatgtgggaggctgaggcaggagaattgcttgaacccaggaggcagaggttgcagtgagccragatcgcgccactgcaccccagcctgggcaacagaacaagactccgtctcaaaaaaaaaaaaaaaaaatcaactcaacaaatattgtttgtttaaaataaatcattggttacatatatcatggtacattggttatacaaattgtagtgtcctcattcttgagagttatacaatatagctgcaaacagtttaacacattggaaacactactagatatcatgccattcactgaaaatgtgggtgtcacatatcaaaaatgctacagaaggggaagattaacatgtgcttgagtagtcagataggctttccaagccaaagcccaaagcttggaaaacattaggaaaagtaaaataaaagggagaacattcaaaatggggacgagagagggacagagacagtgagttggattagcatggatttcggaaaggacagtcaagaatctagcctaacttcagtgcagacttacccagggggaaaaaaaaaaaaaaaacttgaaggacaagactggaatgattttctgtgctcctatttactaattgtttcctaaattttgtctgttcttgctggaaatatctcttcatttcatttccttgtattctgacgagactttccaccttttgcaacag

SEQ ID NO: 21157 - DNA, 535 bp, Homo sapiens
cctctctcaaatttaatttaatgtcttcttaattcttgtctctctttttctcacttttccttttgttttacctattttctacctctaatttcatccctgtttttaaattctaaagaatatccttttgtggaaatagtaaatctttttgtttcttttgggctcaactattgatttaatttattttaagtattctggcctactgctttatttttctctatagccaaactaagtatctcagatttatttyttcttctttataaaaatgtttatgccttttacactcattatcttctatttcaattatgggtaaaatttgaataaactctcctctccatatgacagttaataaaagttaatgttgattttatttgttatttcttgaatctaaagttcccaacaaaaataagatttgatttgtacatatgaacaacttgctctctgatagggtagcacatagaattttaagatcctttaattctatatttctgtaaatgtttctctaaatatagcatgtatctgatttctatggaaaaat

SEQ ID NO: 21158 - DNA, 535 bp, Homo sapiens
cctctctcaaatttaatttaatgtcttcttaattcttgtctctctttttctcacttttccttttgttttacctattttctacctctaatttcatccctgtttttaaattctaaagaatatccttttgtggaaatagtaaatctttttgtttcttttgggctcaactattgatttaatttattttaagtattctggcctactgctttatttttctctatagccaaactaagtatctcagatttattttttcttctttataaaaatgtttatgccttttacactcattatcktctatttcaattatgggtaaaatttgaataaactctcctctccatatgacagttaataaaagttaatgttgattttatttgttatttcttgaatctaaagttcccaacaaaaataagatttgatttgtacatatgaacaacttgctctctgatagggtagcacatagaattttaagatcctttaattctatatttctgtaaatgtttctctaaatatagcatgtatctgatttctatggaaaaat

SEQ ID NO: 21159 - DNA, 587 bp, Homo sapiens
taagtgcagaccatccagaaatacttgctgaatgaaggactagatcttctaaattgccaagctgggtaatttttagagaaatgaaattttaggacattgatgctaaggttaggagggcctatcaatgccaagacttgagaaatagtagaggattggaaggacytctcagactgaactggattgtggatgcttgaagaaaaacttccaccgctgtttagggagtgtgttcttcataattctgtcctcttatgctatactttttttctccttttaagcagcaatatataggattcctctcccagttcaaatatagacagtctctaaagaccatctctctgatcccaaaaaacagaaaaaaaaactagttaaattacaaaatcaccatttattctttttaaaccccaaaagaagggagaattacaaaaccatcatttatctttttaaaccccaaagtaagagacactgggttttgcaaaatgcttttgcaaaaatatctttttgctggcaaatacccatcttggcttcatattttttaccacttgtaaatgaagtccaattctgctgaaattctgaaacgcattaatgca

SEQ ID NO: 21160 - DNA, 538 bp, Homo sapiens
aacattctcagcataggcagtaaagcactcacactgtaaaatggttctcatttcttgtcccattcatccrctcattcattcactgaggaaacatttgctgaatacctaccatcggccaggtgctgttctaagacagcagacttaaaatacacaaagggctgtgatgtgaatatgatcagcatctagaactataaccactgaagggaaattgccaggaggagatttcagttcaatattaagaactttctgacaattaaaactgcctcaaaggaatggcctctctgttctaaggtagtaaaggcctagtactacagaaattacctagcaacttacttacttacttctgacacatcagaagccctgatgcatcagttagcagagtttgaatattcaccaggttcaattttatatttatatttgatgattccaatatattatatgctatctgtgagattttgagactctatattctgtctgtattctaaggtgactatgagatatagtaggattatatagtagtctcagaataataccaaaa

SEQ ID NO: 21161 - DNA, 538 bp, Homo sapiens
aacattctcagcataggcagtaaagcactcacactgtaaaatggttctcatttcttgtcccattcatccgctcattcattcactgaggaaacatttgcygaatacctaccatcggccaggtgctgttctaagacagcagacttaaaatacacaaagggctgtgatgtgaatatgatcagcatctagaactataaccactgaagggaaattgccaggaggagatttcagttcaatattaagaactttctgacaattaaaactgcctcaaaggaatggcctctctgttctaaggtagtaaaggcctagtactacagaaattacctagcaacttacttacttacttctgacacatcagaagccctgatgcatcagttagcagagtttgaatattcaccaggttcaattttatatttatatttgatgattccaatatattatatgctatctgtgagattttgagactctatattctgtctgtattctaaggtgactatgagatatagtaggattatatagtagtctcagaataataccaaaa

SEQ ID NO: 21162 - DNA, 1003 bp, Homo sapiens
gcagtgatgtgacccaatgtgtgtttcttaaagattatagaggccatgcaggaaagatggtttatatatggtctgtggtcgcttttgcactacaatagcagagctgttatatttgcaacrgagaccatatggcccataaacctgcaatagttcctatccggccattcactagaaaaggcgggcaagagaggaggatggggaccaggtgcctgcagggaagatggagcagaacagtgtttcatccctggttttcagataatttcacaaggttgaaagacatcttaatgaaagtgaaagtacaaggcacttaccaggagatattcacaccagatgccatggctcacacctgtaatcccagcacttggggaggccaaggcaggaggatcactttcagccaggagtttaagaccagcccgggcaacaaagtcagacctcatctttacaaaaaaatataataaaaagttagctaggcatggtagtacatgcctgtagtcccagcttctaaggaggctgaggtgagaagattgtttgagcccaggaattcaaggctgcagcaggctatgattgtgccactgcactccagcctgggtgacaaagggagactctctctctctccctctctctctctctatctatatgtatacacaatatatttgctgtcaaaggattatcatcaagagtctatagaaaatatacacatccttggactaggcacggtggctcacgcctgtaatcccagcactttgggaagctgaggcgggcagatcacctgaggtcaggagttcaagaccagcctggccaacatggcaaaccccgtctctactaaaaatacaaaaattagctggtgtgatggcatgcacctgtaatcccagctacttgggaggctgaggcaggagaatcacttgaacctggggtggggggcggaggttgcagtgagccaagatcatgccacttacactccagcctgggcaactgagcaaaactccgtctcaaaaaaaaaaaa

SEQ ID NO: 21163 - DNA, 491 bp, Homo sapiens
atatcaaaccaaaatgcagcaaatgagattattccattgcaagttggcatataaccacaatattgaaggggcataaagctaatttctcttattaggagaaataaccaaggagaaaagaggaattagagaagtccaattacattgcatgagagaaactgacagaacaaaatcttcctgtaatattaaaaggcttcaaacaaagcccgaaacctctgtgagacttgaagctaacacttccattcccaacagcttggagagcaacactcctgttgcactggaactcaggtgcaactacagacacatgcattacttgtctatttttgcaagtaaatagttgcaaaatacacaagtaatgcatacgtattgcaaactttgcaattacttgtctattttttaaagtacacctagtaaagagtagatgcatattttgctttattttaaattagytctttctccctgatatacaagtccaggaaagatcccagcagcct

SEQ ID NO: 21164 - DNA, 586 bp, Homo sapiens
attctatctctcctatggaaacttcttagtcaacaagacccctcttttttgaacccctgctaactaaaacttcattgaccttttgggaaacttaagattctcccaaactgactcccctaagacttggtccatttactttttctcctctttccttttggcaccttcaatctttcatccagttaatcccctccctccttcatttggtaatcagttgataaaaattactaaaaggaagcaacagcactctggccaccacaaagatctaaaggaaactttcagcaatgctgagaacccgagcagaacacagaaaaggcactattgaccctctcttttggggtcctctgtcttcctcatgagcctcaaaagtcataatcagcttcttctcagatctaaaggtctgctctcttttgcactgaattcctggatctctttggtttttagatacatatcatgtatgcatgtggtggtgtatgttgtgtckacatgtatgtagattattatacctgtgtttctatattgtctacataataccaaattgatcttaaaataaacactcttgaattaagtagataagcttaaatgctat

SEQ ID NO: 21165 - DNA, 511 bp, Homo sapiens
ctcaaaaaaaaagagtgctaggttcctccatagttgttgctagctaactataaaagttgagacttacattcctataagacttcctactgccccccaggctagctctacggttgacaktatctggttaattcatttgtttcaactgaatataactaataaaaataattggattcagaagaatgtaaaactctacataaccaataattctatggtacatataatgaattttattctgatcctatgtgaagaagaagaaaatcaaagttctttgagatccaaagagttactaacagatttcatgtgttcttctatccaatcactaacacctatttatcgagcttgcctgttggttccagaaagtggcctggaggggccagacagttcccagagatccaaaaatgaataagacacaggttatgcccccaaacacacagactagtgagggagacagataagtaaatgatgattatgggagcaagtgagaaggtccttaactcaaccttatgggtta

SEQ ID NO: 21166 - DNA, 540 bp, Homo sapiens
gtcaaagatttaactcatcttgattccaaagcaattttcatcttgatgccaatatctaatctttcagcctttcagccattgtgccctggcactgtcttaaaaacttttttcttgttacaaaagcaacatatgttcatattttttaaagaagatatagataagtaaaaaataaacataaaataatttataatctctgtgcccagaaatagccattaatatcattgtaacgtatyttgccattatttttctacacaatcatcagaacttcatgtacatgtagcatgttcttatccatgctatccaagtctttgcttattcgtccgactatgtccacatgcctgagtcttacttgtaggttaagacccagcttgaggtcacgtctgtcattaagctttactcactattgccatcagagagtatttactactccatacttgacctctcagagcattttaactaacctttctcgtgatacaaatcattttcatgtaagtcagagctctccttcagtccagtagtttttaattttttttttttttt

SEQ ID NO: 21167 - DNA, 540 bp, Homo sapiens
gtcaaagatttaactcatcttgattccaaagcaattttcatcttgatgccaatatctaatctttcagcctttcagccattgtgccctggcactgtcttaaaaacttttttcttgttacaaaagcaacatatgttcatattttttaaagaagatatagataagtaaaaaataaacataaaataatttataatctctgtgcccagaaatagccattaatatcattgtaacgtatcttgccattatttttctacacaatcatcagaacttcatgtacatgtagcatgttcttatccatgctatccaagtctttgcttattcgtccgactatgtccacatgcctgartcttacttgtaggttaagacccagcttgaggtcacgtctgtcattaagctttactcactattgccatcagagagtatttactactccatacttgacctctcagagcattttaactaacctttctcgtgatacaaatcattttcatgtaagtcagagctctccttcagtccagtagtttttaattttttttttttttt

SEQ ID NO: 21168 - DNA, 1559 bp, Homo sapiens
gcatctgaactttggcttagaaaaatataatggcatgaggcctacccattatagacactaatgtggagggttcaggaatctcttgccatatagaatagctttgttcctgaaagaatttgagtttttaaaactttatgaaacttgatggcattgaaaattactaatgttcgtttatggtagttattcttcagtcttctctaaccagggattatttgcaaaaaaagtgatgaaagcattaacagagctgtcattaagaaaaaattgaataattcttttgtaatgtgaacatccttttgtatgtgaatcaatacaccttaattgaccagtcttgcgatttgtagttttatacattcaatctcctgaaagtgattatgtctttattcctaagaatctgataaacaaattgttaattttattatttatttattttaaattttaaattatttttattcaatattatttttatcatgttgtttgtatatttgaggaaatgggacagacatttacctccagggttctttaaatatataggtcaagaatgcctcatgctctttctgagacccgactcaatcacgaacgcttgacatatttgtaatgtgttgcaacagatttggggataaatctctattttagtgactccccattgaatgcacagggcttattaaacctccacaaagtaatagcattgtggtcccggctggactgcagaatgcgcaggtcttagattggaaggaagaaacgtgtttgaaatcaaaagataggactcataatatctgcatcctgcctgcaggggctcccacttcagatgtagttatcaagagggctccagtcactgaaatggacagatgagaaataaaaatccttcctaatggaaacagctcagtgttacatctttacatgcaatgcctacatgtatttgtttattgcaggtctgacaagtatctctgaatatccaatatctctgattgatccagtttttcaggcaaagctctacaaagttgtgtgattctctaattagctcccttcaacaatgtgtattttctgattagcgtccaaagtagccctttcaactgtgtgcgtgctgcaaatgagttctctcaataattaatgcacttacagagaagagagcaccagagtagtcagcggtamgctctgttattacaggcacttatgttctttaaaaccccagcccatgtgctcatcaacaaagcctctgaggacctggattctctaattgtcctcctatatgcttaagatgcctacacatagcaagacaactcatgcagttattgatccagaaagagacacatgatgtgtgagactgtggtgaccatggggacattggcacagcattccccagtgccctgcctgccatctgcctgtgtcacatgggagaaaccagcccttggctttaattgtggtgatgaggaatagaggccaggataacattgcctgcatttatctgacaggtctagatctgggctcagtttccttatccataaaatgggagtaatagcagaatctagcatagagggctgtggtgaagagtaacttagata

SEQ ID NO: 21169 - DNA, 526 bp, Homo sapiens
tgaagtagcaggcacacaatcagcagctcgctgagattttaggaaagagaaaaacaaccccaccccaccccagctgctytaatagggtgaattcacattaagaccccaaagtccataagataggatctgccctcagcttaactgcaggcatggaggctctgagcctgggctctgggtctgaccgcccaggtaggaacctggcctccgccttgaagcctctgctctgaggaaggtgcgcggcctccccgaccctcagcctcctcatcggagtgcaggggtgagaattcccacatctgggccttgcttcgtaggagagggtgaagaggcaggttcgaagtctgaggaccaggctcagctgaaagccttgctcaagaggctcggtaggatgagcgtgagaaggctcgcggctccacaccccaagcatactcgctgccctgtgtggacttctcagtgctgcaggcaggttggggtctgtattcgtccgttttcacactgctgataaagacgtacccaagactgggtcatt

SEQ ID NO: 21170 - DNA, 567 bp, Homo sapiens
gatgggacacagggctgtgacatcctgaccagcaggtggtctctgtggatgtccggccccagccctgccctgcgctgacccactgtcccggcagcctgaccagctctgggtgcccactcggagggtcccccagacacctgcccccatcccgtgtctcccgcagggtcctgctcccaytccagagcccggggaacctatggcaggaaccgctggtctcgctgtcggccccaacacaccacgaggttgagcttgtagctgggatacgggcctgacaatggatccctgtagttcagcaaatgttcactttacaaaagcagcggccctcccgggcactttccttccccaaaccccgagtatgtctcctcagcctaagcagcagggcaggggctgtgaggctgcccagctgggcagagccccaggcagggggaagagggggccctggtttcctgcgtgccattttgaagaagatggcggtgatggccctggaatggccagcaggtcggtcactgtccggatgaggataatcgggccctttagggcggctgctctgtgaattccctgagtggg

SEQ ID NO: 21171 - DNA, 573 bp, Homo sapiens
ccaacctaaaaacatctttaagtcaaaaagcaccatgaagaactgccagcccctcagctgtgtggaaacatcgcaacgttgaggccgggtgagtgtcggtgtcctgggtccatcagggaattgcccccatctgtgtatttaggtcggtgaggtgtcaccacgcaccgacaaggagacaaacacacacactgaaaatggccaggggtgtgggcgagtcccccatggggaccagcggtaggcagcatcctccggagaccacgggaaggccaggtcttccagctccaacttgcaaagatttgctaagatttatatttttttccagttgtttttcagtctttattttattgaggcccctgcaggtacctgtggattctgatttgcagctctgtccagggagcatccrgccaaacctggagcccggggcgtgcggatggacctctggacgtggggccacacctgtgcgcgagttttctcacttactggctcggaggtggttccacatcagcacacgcagagcttccgtgttccttattaacagcagtgaagaactagtcattcaaatgcgcatcattc

SEQ ID NO: 21172 - DNA, 573 bp, Homo sapiens
ccaacctaaaaacatctttaagtcaaaaagcaccatgaagaactgccagcccctcagctgtgtggaaacatcgcaacgttgaggccgggtgagtgtcggtgtcctgggtccatcagggaattgcccccatctgtgtatttaggtcggtgaggtgtcaccacgcaccgacaaggagacaaacacacacactgaaaatggccaggggtgtgggcgagtcccccatggggaccagcggtaggcagcatcctccggagaccacgggaaggccaggtcttccagctccaacttgcaaagatttgctaagatttatatttttttccagttgtttttcagtctttattttattgaggcccctgcaggtacctgtggattctgatttgcagctctgtccagggagcatccggccaaacctggagcccggggcgtgcggatggacctctggacgtggggccacacctgtgcgcgagttttctcacttactggctcggaggtggttccacatcagcacacgcagagcttccgtgttcctyattaacagcagtgaagaactagtcattcaaatgcgcatcattc

SEQ ID NO: 21173 - DNA, 534 bp, Homo sapiens
ctctgtggctcattgaagggggagaagtcggggggctggtttcgggggaagctcacgcccctgctgagcctcaggcggtggccaaggtcctgcccacaggccagccggggagcgrgcaggcggaccaggggtcagcaaactgctctgtaatgagccagagaatgaatattttaggctttttttggccagtcacaactcaactctgccactgtggattctaacctcatggcatctgtgtcacacaaggcgatgtctgccgattcctgaggttaggacggagacaccctagggggcctggttcagccaccacagccacctccaaataacgctctggggtagcgggggctggacgacggagcctcccatccccatcccgccccataacgacatcactgtcccattacttatccccacgccatgaccacccagcacaattaggaatcggaaaacgggccaggcgccgtggctcatgcctgtaatcccagcactttgggaggctgaggcgggtggatcacctgaggtcaggagtttgag

SEQ ID NO: 21174 - DNA, 534 bp, Homo sapiens
ctctgtggctcattgaagggggagaagtcggggggctggtttcgggggaagctcacgcccctgctgagcctcaggcggtggccaaggtcctgcccacaggccagccggggagcgggcaggcggaccaggggtcagcaaactgctctgtaatgagccagagaatgaatattttaggctttttttggccagtcacaactcaactctgccactgtggattctaacctcatggcatctgtgtcacacaaggcgatgtctgccgattcctgaggttaggacggagacaccctagggggcctggttcagccaccacagccacctccaaataacgctctggggtagcgggggctggacgacggagcctcccatccccatcccgccccataacgacatcactgtcccattacttatccccacgccatgaccacccagcacaattaggaatcggaaaaygggccaggcgccgtggctcatgcctgtaatcccagcactttgggaggctgaggcgggtggatcacctgaggtcaggagtttgag

SEQ ID NO: 21175 - DNA, 679 bp, Homo sapiens
tggggcctccctcccccccgcccacgagtcctggctgmactatcagctcacaggctcctgagactcagcagacagtgaggttgaaggtgcggcggaggttctgggcctgcagcgggtcctgcctagttgtgcaagggttggggtggtgcagtcagctgcctcagggatgtagggcacaggggacccaccactaccactgctgctcccacagccactcctgccaccaccacttgtgcctccactctgcagctggtgtgataacagtggctgctccagatggcacactgctgccattagtatccttttctttatgcctgaaggacatcccttaactttttttatagtgcaggtctccaggtagtaaattcgttcagctttttcgagtctgaaaacttctttatttcttcatctattattctctttttgatgaccgttagttaagccaatccattgaactttccatttcaattacgatacttttcatttcgtttccacttggtacttttcccaatctatttggttattttcatgctcaagttatttcaactcctttgtttctttaagtataaaacacactttgtactgtctttgctaacttgactgtcttaagtttttgcaggcctgctccttctgtccattgtttctggtggctcttgccaatttaacatttgtgattttt

SEQ ID NO: 21176 - DNA, 679 bp, Homo sapiens
tggggcctccctcccccccgcccacgagtcctggctgaactatcagctcacaggctcctgagactcagcagacagtgaggttgaaggtgcggcrgaggttctgggcctgcagcgggtcctgcctagttgtgcaagggttggggtggtgcagtcagctgcctcagggatgtagggcacaggggacccaccactaccactgctgctcccacagccactcctgccaccaccacttgtgcctccactctgcagctggtgtgataacagtggctgctccagatggcacactgctgccattagtatccttttctttatgcctgaaggacatcccttaactttttttatagtgcaggtctccaggtagtaaattcgttcagctttttcgagtctgaaaacttctttatttcttcatctattattctctttttgatgaccgttagttaagccaatccattgaactttccatttcaattacgatacttttcatttcgtttccacttggtacttttcccaatctatttggttattttcatgctcaagttatttcaactcctttgtttctttaagtataaaacacactttgtactgtctttgctaacttgactgtcttaagtttttgcaggcctgctccttctgtccattgtttctggtggctcttgccaatttaacatttgtgattttt

SEQ ID NO: 21177 - DNA, 679 bp, Homo sapiens
tggggcctccctcccccccgcccacgagtcctggctgaactatcagctcacaggctcctgagactcagcagacagtgaggttgaaggtgcggcggaggttctgggcctgcagcgggtcctgcctagttgtgcaagggttggggtggtgcagtcagctgcctcagggatgtagggcacaggggacccaccactaccactgctgctcccacagccactcctgccaccaccacttgtgcctccactctgcagctggwgtgataacagtggctgctccagatggcacactgctgccattagtatccttttctttatgcctgaaggacatcccttaactttttttatagtgcaggtctccaggtagtaaattcgttcagctttttcgagtctgaaaacttctttatttcttcatctattattctctttttgatgaccgttagttaagccaatccattgaactttccatttcaattacgatacttttcatttcgtttccacttggtacttttcccaatctatttggttattttcatgctcaagttatttcaactcctttgtttctttaagtataaaacacactttgtactgtctttgctaacttgactgtcttaagtttttgcaggcctgctccttctgtccattgtttctggtggctcttgccaatttaacatttgtgattttt

SEQ ID NO: 21178 - DNA, 519 bp, Homo sapiens
tgtatacacacacatatatacatacrcaaatttaacagtaagattaaaatccaaacaaagcaaacttggatgaaattttagcacgtggattagtgaaaagaaagtaaagaacagaaatgctgaggcaaagatttttagacataaatagaattagtgtctccttatgttaaagctctttcggattttacaatttcagaaagttcattgacaggaagatattatagagagttgtatgtaagaggtaccccattatctactttagtgagtggatgaaaaaagactgacaagatgaaccgggcggaggcagtttccacttctagttgcctggggaggaaatatatactggtacaaacagaaatgctgctaggttgtttagcaaactgactacagtgtcaagactatccagatgctgaaacttcagtgaaagtgggaactcagagagagcaacagaacaccagagcctcattttgtcttgagtgctctttccaaaccagaaggtgagcccagctctcaaggccc

SEQ ID NO: 21179 - DNA, 1219 bp, Homo sapiens
ctagtactcaactctgatagggaaagagatcaacgtggaaagatactgctcttttctttcatccttaaaggaagatgatttaattctttattccttattcacatcttaagaacccacaaaaactgctacaatatataattgtatatattataattgcatatacttgtatatacaaatatataattgtatatgtaattgtataattgtatatattgtagtattaatacagacattcacatataacaaaagttctataaaacctttatatccctttaaaatccccatttctaaattgataataacaaacacaactttgtaaaatccaagacaacagtatgtgcacattatactttatattaaaccaattaaacttaacaagtggtatagagttactgtctaaagacttgaagactatcaactagctgaaattacctatctaagattaaatagccgtctatattccaaaaatgtgcttcctaagacttaactagcaagtcctgaaaaactatagtgatatcctccagataagactcagatatttgttttctgaaagctgattggaatgttgcattgtattccataaccaaaccctttggcgaagaaacaacttcttgtttacattttttttccttgtttgtctaagaaaatgcgtgcttctcactaatatgcaaaagccctcaaacagtataccttataggagaaagtagagattgtaccaaaaaaataaaaataaaaaaaggaaagagataccatgagaaatattttgcattagtgcagcctctcatacatagtaggcactgtyttttaaaaaaaatctttcattattaaagtttatatgaaggaagggtatcttatttcaaaccgagtaagttgaatgagagcaaacggcttccttctttaatagtatctgatatttagtttgtacctgacataaccctttcaaatacattatgttttttggctttgcaacaaaccttatgagataagtacgattaagccaaatttacagaaagagaaacaaactcagaaagattatacagctggtaagatcacctaggtaggaaatggcaaagttagactcaaactcaggtttctaattccacatcctgtgcctttcactttccttccaggccatacggaagcctatctctcacaccacatctttcagggtggtttgtcaactgggtttatgttacaataaaatataactttcctgcat

SEQ ID NO: 21180 - DNA, 1219 bp, Homo sapiens
ctagtactcaactctgatagggaaagagatcaacgtggaaagatactgctcttttctttcatccttaaaggaagatgatttaattctttattccttattcacatcttaagaacccacaaaaactgctacaatatataattgtatatattataattgcatatacttgtatatacaaatatataattgtatatgtaattgtataattgtatatattgtagtattaatacagacattcacatataacaaaagttctataaaacctttatatccctttaaaatccccatttctaaattgataataacaaacacaactttgtaaaatccaagacaacagtatgtgcacattatactttatattaaaccaattaaacttaacaagtggtatagagttactgtctaaagacttgaagactatcaactagctgaaattacctatctaagattaaatagccgtctatattccaaaaatgtgcttcctaagacttaactagcaagtcctgaaaaactatagtgatatcctccagataagactcagatatttgttttctgaaagctgattggaatgttgcattgtattccataaccaaaccctttggcgaagaaacaacttcttgtttacattttttttccttgtttgtctaagaaaatgcgtgcttctcactaatatgcaaaagccctcaaacagtataccttataggagaaagtagagattgtaccaaaaaaataaaaataaaaaaaggaaagagataccatgagaaatattttgcattagtgcagcctctcatacatagtaggcactgttttttaaaaaaaatctttcattattaaagtttatatgaaggaagggtatcttatttcaaaccgagtaagttgaatgagagcaaacggcttccttctttaatagtatctgatatttagtttgtacctgacataaccctttcaaatacattatgttttttggctttgcaacaaaccttatgagataagtacgattaagccaaatttacagaaagagaaacaaactcagaaagattatacagctggtaagatcacctaggtaggaaatggcaaagttagactcaaactcaggtttctaattccacatcctgtgcctttcactttccttccaggccatacggaagcctatctctcacaccacatctttyagggtggtttgtcaactgggtttatgttacaataaaatataactttcctgcat

SEQ ID NO: 21181 - DNA, 543 bp, Homo sapiens
atgatggttaacagaaaagctaaattatcagaacatcatttttatcccatttctaatacctctaaaaataagctccttgcttaaaatgtttaaggttggtttacttactcaaaaaagagatatgttggaagggttaaatgaatttacatctgcaaaaaagcttaacatagcatgttgtacatagtcaatatttaataacttaaggacatattggtgtaccctagttacaaaaactttttcctgtctaaacacataaagaagttattgaaggcattttttttcattttgtcagcatrcaagtattttatttttctaaaatcctggttaattgatcgtacatttttgtttcatattagagttgtatttcacatcaatgcagtaagtataattgcttcaatttatataaactcaaatgtttgaaagataaaatataatgtaaatatttaaaaactattaacatttctaattctgaaataatgatgggaagcgataattccctaacgttgatcagttaagattttcacattcttgatcattttatat

SEQ ID NO: 21182 - DNA, 518 bp, Homo sapiens
ttttatatatatatttatgtatatatggtaagtagatagatataaaatatatatgtgtgtgtgtatatatatagtaagtgtatttatctatctacttaccttatctattatctacttaccctatatatattatatattttaaatattaatattaaatatgtattttaaaatattttaatgatcaggattcttttatgatttcaaatctttgctgtgttaataggatttttggtttttttcatctcaattacttcagactgacagtgcaattacctgaattaattgctcagtaatctgactaaataaattatatatatataatatattgtatatataatartatataatatatatatttatattttttaaggtagagacagggtcttaccatgttacccagactggcctcaaatcctgacctcaagtgctcctcctgctttagcctcccaaagtgctgggataagaggcttgagccactgtaccttgtggcaataaagttttaaaatgaattttaaagc

SEQ ID NO: 21183 - DNA, 1544 bp, Homo sapiens
tcaatacactggaatactatactacaacccacagaaatattaaggaagacctgcatgtgctggaagggaaagttctctgagacatttgtactagcaaaaaaaaaaaaaaaaaaaaaatgctggctgaagaacaatatgaagagcatgatgttgctgatggtctgaattatgcaaatgtccatgtaagcaaatgctgtgacagtggctacccctggagaggggaatggaagaggaaagaggtgaagggatgttcacatcttttgcatatacttgtgtaaacttattttaacaaacaaaatttaaaataaatagaattcagcccataaactacctcacagagttggctgaaataatttaatgtgataatataagtaaatggactttggaaagtttcatgtaaacattatgtataaaatatttattgttaaaaaaagaggagagactttgctgaaattttcagtcttctaacttccttaaatcaaatgtacrcccttcaaattgggagacttcatgtatgtctctggaaaatcatatcacagagaggtaactgggtctttccatcggaacacggtattttttaaaatgatctagaatgatatgcttttattatgatctacactcacagcttcctcatataactccaaagttatatggtgagttcctcatataagtccccccaaaattctaatttaatggtgatttatataatacaaagtgattagtaaagctttaaacataatatttataccattaaaaagagtgatttggataagcagagactgactagaaaaaaaaaggaaagaaaaaaaagagtgagaaacaggaatgctttagtgcatggaggtgcttttaggaatctaaaaggagcttacctgtttggtttatttcaattcgagaaccattcgttattttgtccaatagccttatgaagctggcttcaaaatctgtgaagaaaaaaaatctgtgaagaaaagagaagacagactgtcctcatgtcaggtcaacatttccagagcacatgcctgattcaggtactgtggtagagggcaggttacttcctgcatcacacctgggctttcctaaaggactgggtaggttcacaggttgaggaacctgacgcagttgaaaagcactgactggtacatatatgtttagtagaacttagaaacaattcagctttcacattgtaaaaaaaaaaaaaaaaaaaatagctccaccagcaatctaatgggatattactttcagcagcataaaacccttaagacctattcttctgaactcaggaggacatgccaaataacggagaaacagtagaaagtagggaacaattttaaagtcagattcttccctgctccagaatgcctggaaggaaagattaaattgaggaccacccttcagtctcagagacagtaagagatcactatctctgcctttcagcaaagtatccctcccttttcccatcctctaccatcctactgatttaaactatctaaccagttcagttttttattttactaaaagggtgtttgaatgtacagtattac

SEQ ID NO: 21184 - DNA, 552 bp, Homo sapiens
ccctccgaaaatattttcaggcccctattcwtggagactgtgaatatgatcttatttggaaaaagggtcttcatttatataattaagttacagatcttgagatgaggagatgattctggcttatctgggtggtctctacgtccaaaacctactctaaaagttaggcagagagagatttgagagaaaagaaggaggccatgtgaccacggggggaggtattgaagcagccaggagccaaggaacacctggaactcccagaagttggaagaggcaggaaggatccacccgttgagcctggtgtgggtgggccagattccagagtgctggcctccagtggtgagagggaacacttttctcttgttttgagccacctaacttgttatttgttgcagccatcctaggaaaccataaagtatttattggttcatcttgacagatgataagagtagtagttttatcagataacattgtagaatttccttgccacatttgattcgtttttaagtgattcctacacttctctaacccaggtttttgcacgtggttttcctt

SEQ ID NO: 21185 - DNA, 839 bp, Homo sapiens
ttcttgtgcagcccaggctgttgtcccaaatactccctactacccacctgatacggtttggatttgtgtgttcacccaaatctcatatcaaattggaggaaagtcttggcgggaggtgactggatcatgggggcgaatttcccccttgctgttcttctgagagtgaatgagtccccaggagatctggttgtttaaaagtgtggcacctcccagtttcctttctctctcctgctctactgtggcaaaacgtgcataattccccttcaccttctgccatgattgtacgtttcctaaggcctcacaaccaggcttcctgtacagcctgtggaactgtaagtaaagttcttttcttcataaattacccagtctcaagtagttctttatagcagtatgagaatggactaatgcaccacccatattttatttttagaatatttcatttttatatttttcatgtgactcatactaattattatgccccctctagtcctcacacaaatctgaaaagtagaggaacactatttsatctctttgacacttcatgttatttttccatggctcctcatttctcagaccctttatgtatccacattcttctctctttttaaattttatttatttattttaaggtccaggatacatgtgcaagacatgcaagtttgttacataggtaaatctgtgccatggtggtttgctgcacctatcaacccatcacctaggtattaagcccagctgcattagctatttatcctgatgttctgcctctccctgccccaccgacaggccccagtgtgtattgttcccctccccgtgtccatgtgttctcattgttcagcccc

SEQ ID NO: 21186 - DNA, 818 bp, Homo sapiens
aaattccctcttcaacacagtgtaagcatccaatgcattcatcatccccttttcaaaatgcttggtctgtgctgcttctttttcctgaccctgaatgagatatttttgagacttaaaaggaaaagtaaaaaggaaagccagcttagataaggtgctctttggcaaaagaataggataaaatgcattgtaattgcttctaaattagttaccktatctgatttgggtctgtctttttataagcaaagctcaaaacacttaacccctagttgtccagttgtagtgcaactaaagccactaaagctctgaacctagtgagtggatagacaatactgctttttgtgcagagaacataatttcacacccccctcctttgctaccctccattgcctggcaacaatgctgggcacaccatgggagatctgtaactacttgctgaatggaaggaagggctgaacaaccctgtagaccctgtagtttggggtaagaagacatctggatgctgacctgtacaccaagctacatgaagaatttccccatagttcattagagagtgggagcaagagggtacccagatgccacacagaccccaagaaagagctcatcaagtttccttgcctcttgggaactgaaatagttagcactgtggagcttgcctaaatagaatagaaaagaaaatgataccagggagatttctgctgaaaagacagacctatccagtttttcattggaaccatctccctgattcaaaaacagccccatcattagaactgctggaccaactcaacaaaatgtaaatacagctctatccagtaatgtga

SEQ ID NO: 21187 - DNA, 542 bp, Homo sapiens
aaagaaaatgcacccaagagttaattataatcatctctgtgtggcaaggcagaattatgagggatcttaatttaccttttttacatttgcatgaaatagatatagtttccttcttttataataaatatgctttacttttttttttttttttttttttttgagacagggtatcactctgtctgtcacccagcttggagtgtagtagcacaatctcggctcatgacaacctctgcatcccgggctcaagtgatactcccacctcagcctccagagaagctgggaccacaggcgcgagccaccatgcccagctaattttttgtatttttggtagagacgggggtttcgtcatgttgcctaggctggtcttgaattcctgacctcaagtgacctgcccgactcagcccccaaagtgctgggattacaagcatgagccattgcgccaggcctactctcctagactttggttaacctgaccccaaccagtagcagtatctgggactgtttaatgttacctaactacttcartatgtcgcattaacaac

SEQ ID NO: 21188 - DNA, 1578 bp, Homo sapiens
tacctgcttacttataaaactagtccaagcaggatttgacattttctgtatttttcctttttatctgattgcttaatttagaatcttgtgcttctcaagccagcatgcaggaagtagcatagtttagggagaaaatggcaggaacaggaaaggactggagatcagtccttcactctggccagtttcaatgctggtgctcttttatcagcagcccgaatggagctcagaggtgacggatgtactagatcccaggggaaagcttacaaaaggcactctggaagaaccacggacactggtagagttcatcttatggaaactgagttggtcacaaggcatgtctcacctacatgtgcgtgcactggagcaaaatgccttcacctttatgttattcatcagacacttgggtgcttaactcatattttcaaaagctccaccgtttaaggccccatgtttacaggtatcataaaaattaaaccagctgtgcttgcattttagcaatgactgtgtgtacatcactatctaacaagagatcatctagcctgggatttccgtatcttccttacctcctgtttttacaatctaggtaacagaactttcgatgggagagcttctgatgcactctacggtttcctggttgaatccatttctgtctctaggaaaagctagaaaggaccttgagctcacagtatttggttagtattccattcagaagaatgcagactgaacagaggctgggattacggaagaacttcactagccgcaccagtccagctcactcctgagctccaggagtcagaattgctataatggttggggacttaacagggccagcccccaactatttgaaactccggcatcgctctgcatcctcattatcttgttctcccttctgctgcttggctcaggccaagtgttacaggaacagatccctgcggctattttgaaacctgctatctttttctttttctttttctgagacgaggttttgctcttgttgcccaggctggagtgcaatggtgtgatctctgctcactgcaacctccacctcccaggttcaagctattcccctgcctaagcctcctgagtagctgggattacaggtgctcgccaccacgcccggctgatttttgtatttttagtagagatggggtttcaccatgctggccagactggtctcgaactcctgacctcaggtgatccacctgcctcagcctcctggastgctgggattacaggcattagccaccgtgcctggccagaaacctgctatcttaatagtctgctgtatttcaaatgttttaattctgagagttgggagaacaagtgacagtatattgtcactgagatgaacacagtgtcctcagctttcaataaaacaaagagtttaaaaaagccaagatcaacttctaatagtagcttttaaataagcaggtgcttctgcatagttcaaatatgagcgaaagggaagtaccatttattcactcatgttggcagagtgaggtcttagagactcatacgtttgaagagtgttactctgttaagacgttcagctctagtttaaccttggaagagtttgca

SEQ ID NO: 21189 - DNA, 1578 bp, Homo sapiens
tacctgcttacttataaaactagtccaagcaggatttgacattttctgtatttttcctttttatctgattgcttaatttagaatcttgtgcttctcaagccagcatgcaggaagtagcatagtttagggagaaaatggcaggaacaggaaaggactggagatcagtccttcactctggccagtttcaatgctggtgctcttttatcagcagcccgaatggagctcagaggtgacggatgtactagatcccaggggaaagcttacaaaaggcactctggaagaaccacggacactggtagagttcatcttatggaaactgagttggtcacaaggcatgtctcacctacatgtgcgtgcactggagcaaaatgccttcacctttatgttattcatcagacacttgggtgcttaactcatattttcaaaagctccaccgtttaaggccccatgtttacaggtatcataaaaattaaaccagctgtgcttgcattttagcaatgactgtgtgtacatcactatctaacaagagatcatctagcctgggatttccgtatcttccttacctcctgtttttacaatctaggtaacagaactttcgatgggagagcttctgatgcactctacggtttcctggttgaatccatttctgtctctaggaaaagctagaaaggaccttgagctcacagtatttggttagtattccattcagaagaatgcagactgaacagaggctgggattacggaagaacttcactagccgcaccagtccagctcactcctgagctccaggagtcagaattgctataatggttggggacttaacagggccagcccccaactatttgaaactccggcatcgctctgcatcctcattatcttgttctcccttctgctgcttggctcaggccaagtgttacaggaacagatccctgcggctattttgaaacctgctatctttttctttttctttttctgagacgaggttttgctcttgttgcccaggctggagtgcaatggtgtgatctctgctcactgcaacctccacctcccaggttcaagctattcccctgcctaagcctcctgagtagctgggattacaggtgctcgccaccacgcccggctgatttttgtatttttagtagagatggggtttcaccatgctggccagactggtctcgaactcctgacctcaggtgatccacctgcctcagcctcctggagtgctgggattacaggcattagccaccgtgcctggccagaaacctgctatcttaatagtctgctgtatttcaaatgttttaattctgagagttgggagaacaagtgacagtatattgtcactgagatgaacacagtgtcctcagctttcaataaaacaaagagtttaaaaragccaagatcaacttctaatagtagcttttaaataagcaggtgcttctgcatagttcaaatatgagcgaaagggaagtaccatttattcactcatgttggcagagtgaggtcttagagactcatacgtttgaagagtgttactctgttaagacgttcagctctagtttaaccttggaagagtttgca

SEQ ID NO: 21190 - DNA, 523 bp, Homo sapiens
gagacggggtttcaccatcttggccaggctggtctcaaactcctgaccccgtgatccacctgcctcggcctcccaaagtgctgggattacaggcgtgagccaccgtgcscagccgggtttttttttttttgagatggagtctcgctctgtcatccaggctggagtgcagtgatgtagtgtaggctcactgcaacctccacctcctgggttcaagtgattctgctacctcaggctcccaagtagctgggattacaggcatgtgccaccatgcccggctaattttttgtatttattggagacggggcttcaccatgttagtcaggctggtctcgaactcctaacctctggtggtccacccatcttggcctcccagagtgctgggattacagatgtgagccattacatccggctgttttttttttttttccccagagttctatttgtgtttactagatccaccttattagccatgatattaaaattctctttctaccataattttgtaggtgtgtgtgcaatctac

SEQ ID NO: 21191 - DNA, 1790 bp, Homo sapiens
tcaatgtgctctgatcctgtctttgaaaatttcctgggaaggagatgtcttccttctttcttcttttgtttctcccccagcccagtgcaaagctgaaaaagatgtctttctaatgtctctgcaccaacattgggtcatggttggttgagagtccacctgtgcctggtgccacgacaagtggtttcatggacactgtcacacaatctgcctgaggcaggagttctcatctccatcctataggtgaggggacagaggacaactattaggacaacccattgagattcctcaaacgaggacacttgaacacacacttccagctctattaaggggaaatctacacacaataaaattcatccattattcatgtatagtatgatgagttttagggaatttgagcctaggccttcaggataaccatcccaaaaccatgtgcactactaaacatcgatttcagccatttctaggcagagaggaccgtggcagttgcatcttggataagtaactgaccttgggatagtcgggactccaaatgaaatactggaaatgtgaagttttctcgaggccatcagacatctcaaaatgtaggcaccgttaattacgataattgaactaggaccttctcacttttaagacagaatcatgtggttcaggaacccagtgaatcccctgcattccacagcttcaaattccattttgcttgtcattgaagacttctgttccaacacttacaggtttgctacatttctcgtgcgtagcattttgacagcctgatccaagaccttttggtggcatatttgagaaatgtaaaatattttaactggaaaacttaggcctcaggtttcaatttcaacacaatgcagaactacttcttcacctgacattcactttgcataatgagaaatctctagaaccctaatgggcacacagaaggatcagttcatctggaaataacaaaccccctgttctaggagtttcacttgttgactggccataatgtcttttgggctgtcgattataactaaaaaacttcttgaaatggtgcagctgaaatgacttacctacatggtgagtctagccctcagcctcttcacatccccacctctgctggctactccagttattttgcagaactcagagctggtcatatctccctctcttcccattccaccgccatgacaacaccttcaggaaattctcccaggccacaggtataaatcccaaactctgaaggttgcacataacacacttcacttggcaatgccagcttggtttccaacacctgttcttgtcatctcagactctgagcatgatgccccctccaaataaccaggttttttttatatctcagaactatgcacaggctgcaacgtctgccaaaaacactctcccctattttgaagtgtctgtctttgttaagttggcctgactcttcctgctgcagtgtacattgctctggtacagacactgatgacatagtattgtcatgaggggtccccacagcgcaggacaggacatggtccatagtgggtggccagcatatgtgaccgtaaggggcaggaggacttggggtgattcccgaggcaatcgcgctagtggccgtgctagtgtgggtggttccatttcactatgactygggccgtttccttctcctggtttccctgtttgctttgagagagggtggtgggaagggaggactgccaggtggaatgaattggatttaggagcggtggctctggccttgagcatagcattatacttttccaaatgtctgataataataaaaacagtta

SEQ ID NO: 21192 - DNA, 1009 bp, Homo sapiens
ttcctcggccaatcataggacgtacctaaagttctgtcaaaagagattaactcctttgggcattcaaatgcagagactccctaagaatcacattaaaatatgaatgtccacaacccctgttctcttcttctctgtatttccaggctctggaaatgtaatctataaataaatattagatgaatgtaattgaatgaaaattcccgaatgaggtcatgtcttaaggtcttctcaggtaacatctgaacagatactcttttcccatgacggttggctaggagggaaggaggcactggaacggggaggcaagcctgtgtgaactgtcacagagtaggctgctgcttcagattttgttgcacacctaccctagaaataaatcagcctttcctaatcctctgcatagtgggcagggggcttaggcaaagcgggaggggacagcccttagggtgacacttcgcctgtataatcacatgggccgtctgtcagaagcatgattcccagagaggtcaacatgttcctttcgggcctttcagatactttgtaggcaagtcagtgcccaacataagccattggttattttcagggatgtggaaacattgacttgctctggtttcagatctaaccatcctatttcacagtacatttcatgcagaacctgcctcaaattttcctggcaatagggggaatatgaagtctaattaaataagtaaatatctgatgtatatttgtattggacaggctccacaaactggaagaagaggctttgcattawtaccttttgggtttgtgaacaagtttgttttctagaatgaagttgcagagtgtactgcaaatataaatggagaagtcagttcctttatttgaggcccctgaccatcttccattgtcaccatggagatgccatatctgctgctcctaggggaaaacatggccctttgtcattatcaagttatttgatcctctcttcttttcagcagacacacaagcatacacatataggacattttaatgc

SEQ ID NO: 21193 - DNA, 566 bp, Homo sapiens
agaaatacacctttgttgctttaagccgctgagatttccacagccttgtttgaatgatacagagtcaagcgttagttattttcagaatggaaaagttcgttccaactttggctcagaatacctggcttctagttctgcctcttcctagaagggagatattagccaaggtttttaaactttgtgagtctctgcccagcctatcaatctcacagggtcattgaacaaaatgagataacaagatgcttctgctttacaaatatactagcgagagtattagcactagcgagagtttctgaaaaccagaaagagcaagaattcgggttctttccctyctgagtcctccaagggcttcctttccctccattgttctaggcagtgaaggggagtgctgtccaacttagatgtgacaaatggggacctgtcgaggcttgatgataggatggtgacaaagaaagagaaagaatggcttctgtcctcaggaggctggcccctataagaaatagcacaaaaatccaagaaagttgtgcaggacactttcaatggacacgttttcaatggtgggggca

SEQ ID NO: 21194 - DNA, 649 bp, Homo sapiens
  misc_feature (1)...(649): n = A,T,C or G
gtaaactctttaaattacattttatgtctcagcctcttccttttaggtcaacacagttgattactatttcccaaaacccctctgaacagagccttctaactcctgctctggctgatgcatgcacctctagacannnnnnnnnnnnnnnnnnnnnnnnnnnnnnnnnnnnnnnnnnnnnnnnnnnnnnnnnnnnnnnnnnnnnnnnnnnnnnnnnnnnnnnnnnnnnnnnnnnnactcccagtggcttctcacaggcagctggcctcactgcagtggatatgcatgctccccctggggaaatcccctgggatttccacctccaagcatctctcccacaccgcccctcacctggagggccctctacacccctgcaggcccatgctgccgaccttcaggcccaggctaaagggcacttccatggagcttgttacctgctgygggacacaagttctctcatgccccactaacctctgcttccaactgcccatagcacacattacctgtgcattccaggaggcctgggctcctaccagtgggatggagcagggacccctcacatgggcctgctggaccaccccacacaaggaaataaaggaaaatcttgagttatttcgagggtctaatgaggctggacctgcagtcagacagc

SEQ ID NO: 21195 - DNA, 564 bp, Homo sapiens
ggttgaagatgtttgaggacttcttttctatactgcagagttccagggattttggaggatgctgggttgaaggcataagaatgaacacagaaaattggataagggccacgggatggaagaccaaagggaccaaaatcttgggtgatgactgagacacagggagactgcctccgagtttccatggggtgccaaataatggcttaatgatggcagacactggagaagtactcttgtaaggggaccgtagtggcctcccatctgagccaggacaatgaacatgttttccacaagacatcagctttctcttagccatgcctgcaagctatgaatgagcttattctgagtcacacayactgtccctatggaacaagggtttttaaacttttctgtgccatagagctctttcataatctgaggaagcttatgggctctttttcagaatatttttcaatcccaacattttgggaggctgagatgggaggatcaattgagcccaggaggtcgaggctgcagtgagctatgatcacgcccctgccctccagcttgggtgacagagttgagacc

SEQ ID NO: 21196 - DNA, 564 bp, Homo sapiens
ctgcccttaggcaggcatcctattggccacatggaaacttccagagaaaagctctgggcaggcaaatgccagaggtacccaagcacctgggaggcgctgagtgctgcaggcctgagcggggcctgcctatgaggagtctgttgctttggggctgccctgtaagacattctctttggttcttcttcaaagaaaatatggcagtacctgtttcagcttggcctggcctttccctgctcttctcagtttaccaaaaaataccacaaagcaaattgagcaaatagcgtatctggacctttttttctttttaaagcagttttaaaaggagatggatttcatttggaaagcattccaaagaaagcatttcttaaagaaacacacattttggaaagcacagctctcctctagaaattcttgctttcttaaacacaggattttcttttgaggtgatagctgggatgccagagggctccatcggctccatcagcagtggcttggttattttatggcgttagcctcaattcrcatgacacaggctccccctactcagaggcatggcccactttg

SEQ ID NO: 21197 - DNA, 596 bp, Homo sapiens
tcctgcctcagcctcccaagtagctgggactacaggtacccgccaccacacccggctaatttttttgtttttttagtagagayggggtttcaccgtgttagccaggatggtcttgatctcctgaccttgtgatccgcccgcctcagcctcccaaagtgctgggattacaggtgtgagccactgcgcccggccgagctctgcatttttatttgtcagaactggcaacttatagtgcaggtggcacaaaggagatagatttgaggactaagtaggaggtcaaggtggtgagactctgggatgacttgggaatgggtggggtaaaaatatacgagaaggagaaatggcaactggatggatgatggtgtagttgccagggccatctggacctcatgtagcatctttgtacaactagagaatgatgccctcttggtggacacagccctgtggatgcacagcttagtgagctgtgtgcaagctggatttaaatccccatgtccttgttgtgcagtgaacttcttacacaaccatatgcagcagccttgtgctatttgctgaaatgaggcatgctggggaagtacagattttttggcaggagg

SEQ ID NO: 21198 - DNA, 700 bp, Homo sapiens
ggctgactcccgcactcgggcgctgagctcatggccggttctgaagaactctggttctgctcatgccccacatcaaaacggccaagtcttcagatttgggatttcccaagccaaaagcattttcatagaattgcatttcaatatttacattatctttaaagaaagtccagctaaaaataaaaaataagtaaaaatgttaaaaataaaacaaccccagagagaagtggggtctacctgaatgcaatgcaagatgaagtggacatctggacgcccctcctccagggcttcgcatgctccccggggctcaggggctcgggtggggcagctcctcatggcgtggggtagggagggtgaccccaggttcttagtcagggcaggtgcaggcctgtgagacaccaggcgaaggaggcagagcaggccgtcctgtgtggagtggcttattctaattcaaactcccctsttttcttcctcttccttttgggggaactcatccctctgagacctcagacagacatgcaccaggctatgggtgggggtaatgcagggcaggcagggtggtgcaggagaagcattctgctcttttctgcagtaaggtaaatatcgtggccgtcatctgttccacctccttcctgctgtctggcttcgttagtgcagatcaagagcataggtcagtgccctggagggtgttcaggatgaccgt

SEQ ID NO: 21199 - DNA, 700 bp, Homo sapiens
ggctgactcccgcactcgggcgctgagctcatggccggttctgaagaactctggttctgctcatgccccacatcaaaacggccaagtcttcagatttgggatttcccaagccaaaagcattttcatagaattgcatttcaatatttacattatctttaaagaaagtccagctaaaaataaaaaataagtaaaaatgttaaaaataaaacaaccccagagagaagtggggtctacctgaatgcaatgcaagatgaagtggacatctggacgcccctcctccagggcttcgcatgctccccggggctcaggggctcgggtggggcagctcctcatggcgtggggtagggagggtgaccccaggttcttagtcagggcaggtgcaggcctgtgagacaccaggcgaaggaggcagagcaggccgtcctgtgtggagtggcttattctaattcaaactcccctgttttcttcctyttccttttgggggaactcatccctctgagacctcagacagacatgcaccaggctatgggtgggggtaatgcagggcaggcagggtggtgcaggagaagcattctgctcttttctgcagtaaggtaaatatcgtggccgtcatctgttccacctccttcctgctgtctggcttcgttagtgcagatcaagagcataggtcagtgccctggagggtgttcaggatgaccgt

SEQ ID NO: 21200 - DNA, 465 bp, Homo sapiens
ggagggatggtccatgggatgtggggtagaggtgattccaggaacacttttacattctgcaacagacacctcaatttccatgtttttgtgatctggggaaagagagctggcagcaggctccaggagggtggcactatagttgtctccctcgctttttagccagatatcatcctcagaaagctggggaggcttctggaataaagagtaaacaaaagtcagggttaaatactgcatctcttatggatgtgaatgctgacaaactgactcataaytaagaggaaggaaaatggaaaccacagtgacaaattcttttgaatagatattttctaataatcccttaaatgttcattttcttgtagtaacaggtgcccaatcctctctaatttatggattccattttgtttacatgctagtgccatttttaaattttatctactaaggtggaagagattacatcattattgt

SEQ ID NO: 21201 - DNA, 418 bp, Homo sapiens
tttattcatgtttccccctcattaagtcatctttttttgaaggtactcattgatgtaatgtggaaaaatagagcattttaatcttgaataaaattgctacctttataaggaaagcttttctgctctcactcacggtgtgttacccaaaggatacaaaggacaagagaaagctgtaaatatcaaacaaggaaaagtgactaatgccagccaaggtacaaaaccctttttcagatagaggggtcacttttcacagcatccatgctaacctgcccggcttgtaaagttgccatgctgcaaccacagcttggctggtatttaacyactctgtgatatcattcggctataatttcgactctccaagcatctgcctgtgtctacttcaagctggctgaccagaatacagatgaaagaacaaaat

SEQ ID NO: 21202 - DNA, 536 bp, Homo sapiens
tgacctcatttgatccacccgccttggcctcccaaagtgctgggattacaggcatgagccactgcgcctggcttcatttagaatatttttaaacagattagataaccatgagttttgagtgtgctgatagaatttttataggtgacacatgtacattgtttttgatagcaaaagaaaaatcacataatgcaaaagtgttcaaacatctatttttagtaggggagtaggtgtcagtttgtatgttaactataagtaaagcttaatatcaattcactttcttgttaagacttattgtaataattttaaacagaatcaagcctctgaattctgaaatttggaatgtattaacacagaaaagactttacatgctttgtgttaaaaaaaaaaaaagggggagaaagaaagtaaacgtaaaactcaataagtaaccataattattggttagtgtttgcttatggatggcagcatattattattttcaaactactgtcagatttcatgaaatgatttccstaatagacagaaaaaaagcttga

SEQ ID NO: 21203 - DNA, 397 bp, Homo sapiens
tatatttctcttttccaggttaaataaatctttcttggggcatcaagtgagacaggaaattttayattggctgatagtattatcatttgtatttttgtgtcacacacattgtcaaagataaagaaaataattgaataaaaacttaatacaatattagattatagggtacaacaaagaaataaatgtgatttattggcttaattatttaaggaatgaagaaataaatgactgataaaataattccttcagttagctggctgaaaacctatgcagcagcctaaagtcattctggcctattggggtttatcatctacaaaaatgtagggattggaatttatttattcatcatattaagcttagcgagctcccactttctatatgctgtagataaaggggt

SEQ ID NO: 21204 - DNA, 397 bp, Homo sapiens
tatatttctcttttccaggttaaataaatctttcttggggcatcaagtgagacaggaaattttacattggctgatagtattatcatttgtatttttgtgtcacacacattgtcaaagataaagaaaataattgaataaaaacttaatacaayattagattatagggtacaacaaagaaataaatgtgatttattggcttaattatttaaggaatgaagaaataaatgactgataaaataattccttcagttagctggctgaaaacctatgcagcagcctaaagtcattctggcctattggggtttatcatctacaaaaatgtagggattggaatttatttattcatcatattaagcttagcgagctcccactttctatatgctgtagataaaggggt

SEQ ID NO: 21205 - DNA, 768 bp, Homo sapiens
agtccctgctcttcttggccttacattttgggggaggagacagattagtaattattaggagaattattagtaattattaggagaaagcaggaaatttctgctttcatgggtgggataccagaaggtaaatcattatgaaaggatattttgggacaagtttctatagcatagatgtattttaggatgattggggctgtgtgttgtgagcacgggatctctgaggcagtcaaagggcaccaggaacctcatctcttaagacatgcatgcaccgtaggctgccgtttgtgtccctcactytggccaagctcccttcttcatcatggcctttgcacttgctgttctctgtctggggaagaatgctctttccctagagatccaaatggctcactccttcagtgtcttcaaatctctgtcaaatatcacctaaacagagaggctttccctggcctctagaggacaaagtagcacattttctcacccacttaccctgctcatccttctttatagcacccctcaccacctgctgtattatttgcttatcgttcagctttctctctaaaatggaagatctatgagaacaagaacctgtctgctcattgaggtgttactccagaaaaatgtctggcccatggcaggtgcttaatcaacaatttttgaaggaaaagtggaggaaaaaaagataggagaaagcaaactcatgaagaagagtgcttgggtggggtgggaggagaagagggcaatggatccaggccctacagggattcactg

SEQ ID NO: 21206 - DNA, 986 bp, Homo sapiens
agaacattttccttgtttgttaccatgaatacttttttttggtcaaattattagatcctctacttcatgacaccagtttttttaatactgaattttcttttgttcttcgtatgtattctaattgctttgatttgtcttttacctttgcatttactgtgatcatctgaagcctttctttttgtcaataattctgttttctccagtatctgtcctgtttttgatattttaaatgaattaattggttaagtcattgtgttatataggctctaagtttctttagcactacaaactgcattttcatcttattctgcttcttgcttttgagcttgtttattataaggttgtattgttttcaagttcttcattatgatgaagttgttgagaattttctttagtttttattgggttatgtatccttccagaatgggttctttgccayttgtatgccctattcatttcttcattttgtgttctttcttgctttttattccctgtatgtgtgtatttctttttgtcaggctgtaatacatatgcatacaagtttcttcttgatatgggagaacttctatgtggtgctgatgggaaatatttttaatactccactctccttacccaagtttgtttttctcctgagccctagtttgaaagctgtatattgttggagtggagggaaagagaagggaaaagtggtgattcagagagccaaatggggcaatgtggcttttaggctctgctctcttgaagtaccaagtatttcactcttgggtctgcccaactgcttatgaataaaattcctttgccttgtatggggacatcattcgacctcagacctctcatttctctttgttctgagccctagaatgtgacctgaccttctccttcccaaagcatggagatggttaaaactcactcttgaaatttttttgttgacttttccctctgttgcttattcattcctcggctctactttttgccattttggagtg

SEQ ID NO: 21207 - DNA, 986 bp, Homo sapiens
agaacattttccttgtttgttaccatgaatacttttttttggtcaaattattagatcctctacttcatgacaccagtttttttaatactgaattttcttttgttcttcgtatgtattctaattgctttgatttgtcttttacctttgcatttactgtgatcatctgaagcctttctttttgtcaataattctgttttctccagtatctgtcctgtttttgatattttaaatgaattaattggttaagtcattgtgttatataggctctaagtttctttagcactacaaactgcattttcatcttattctgcttcttgcttttgagcttgtttattataaggttgtattgttttcaagttcttcattatgatgaagttgttgagaattttctttagtttttattgggttatgtatccttccagaatgggttctttgccacttgtatgccctattcatttcttcattttgtgttctttcttgctttttattccctgtatgtgtgtrtttctttttgtcaggctgtaatacatatgcatacaagtttcttcttgatatgggagaacttctatgtggtgctgatgggaaatatttttaatactccactctccttacccaagtttgtttttctcctgagccctagtttgaaagctgtatattgttggagtggagggaaagagaagggaaaagtggtgattcagagagccaaatggggcaatgtggcttttaggctctgctctcttgaagtaccaagtatttcactcttgggtctgcccaactgcttatgaataaaattcctttgccttgtatggggacatcattcgacctcagacctctcatttctctttgttctgagccctagaatgtgacctgaccttctccttcccaaagcatggagatggttaaaactcactcttgaaatttttttgttgacttttccctctgttgcttattcattcctcggctctactttttgccattttggagtg

SEQ ID NO: 21208 - DNA, 986 bp, Homo sapiens
agaacattttccttgtttgttaccatgaatacttttttttggtcaaattattagatcctctacttcatgacaccagtttttttaatactgaattttcttttgttcttcgtatgtattctaattgctttgatttgtcttttacctttgcatttactgtgatcatctgaagcctttctttttgtcaataattctgttttctccagtatctgtcctgtttttgatattttaaatgaattaattggttaagtcattgtgttatataggctctaagtttctttagcactacaaactgcattttcatcttattctgcttcttgcttttgagcttgtttattataaggttgtattgttttcaagttcttcattatgatgaagttgttgagaattttctttagtttttattgggttatgtatccttccagaatgggttctttgccacttgtatgccctattcatttcttcattttgtgttctttcttgctttttattccctgtatgtgtgtatttctttttgtcaggctgtaatacatatgcatacawgtttcttcttgatatgggagaacttctatgtggtgctgatgggaaatatttttaatactccactctccttacccaagtttgtttttctcctgagccctagtttgaaagctgtatattgttggagtggagggaaagagaagggaaaagtggtgattcagagagccaaatggggcaatgtggcttttaggctctgctctcttgaagtaccaagtatttcactcttgggtctgcccaactgcttatgaataaaattcctttgccttgtatggggacatcattcgacctcagacctctcatttctctttgttctgagccctagaatgtgacctgaccttctccttcccaaagcatggagatggttaaaactcactcttgaaatttttttgttgacttttccctctgttgcttattcattcctcggctctactttttgccattttggagtg

SEQ ID NO: 21209 - DNA, 986 bp, Homo sapiens
agaacattttccttgtttgttaccatgaatacttttttttggtcaaattattagatcctctacttcatgacaccagtttttttaatactgaattttcttttgttcttcgtatgtattctaattgctttgatttgtcttttacctttgcatttactgtgatcatctgaagcctttctttttgtcaataattctgttttctccagtatctgtcctgtttttgatattttaaatgaattaattggttaagtcattgtgttatataggctctaagtttctttagcactacaaactgcattttcatcttattctgcttcttgcttttgagcttgtttattataaggttgtattgttttcaagttcttcattatgatgaagttgttgagaattttctttagtttttattgggttatgtatccttccagaatgggttctttgccacttgtatgccctattcatttcttcattttgtgttctttcttgctttttattccctgtatgtgtgtatttctttttgtcaggctgtaatacatatgcatacaagtttcttcttgatatgggagaacttctatgtggtgctgatgggaaatatttttaatactccactctccttacccaagtttgtttttctcctgagccctagtttgaaagctgtatattgttggagtggagggaaagagaagggaaaagtggtgattcagagagccaaatggggcaatgtggcttttaggctctgctctcttgaagtaccaagtatttcactcttgggtctgcccaactgcttatgaataaaattcctttgccttgtatggggacatcattcgacctcagacctctcatttctctttgttctgagccctagaatgtgacctgaccttctccttcccaaagcatggagatggttaaaactcactcttgaaatttttttgttgacttttccctstgttgcttattcattcctcggctctactttttgccattttggagtg

SEQ ID NO: 21210 - DNA, 720 bp, Homo sapiens
ccttatgtggggttaggaagtggaaggactgagctgatgaaagagagttgggatctcttggcagagcagtctgtttttgtaagttttcacatttctcttcattttgaacattataatgtggcttccaaaaatcaggtacacacctatgttttggaagtagacaaagccatcaaacaaatgtygtacatcttacatagtttgactatgaaattggtgtgatgatagtggtgtgcaatttaattggtaaattatttaaaacgttgttaaaaacaagcatggatttaatttggagtataaataaatatttggatgactttttttctaagattaaaaaaccgtggctatattctcttgcctcaggcatgtggtcattcaactctgatgtcaggatcacttgggtatacgtttgataccactggataatgacttctacaagatgcctagagataaataaatttcattgacaagtcaagtcttgtactttatataatcatcttatttccaatagctgatattggactggtgccctgttaatttgagttttcaggtaaaaattaggttacttggttcatgaaaccagaggagtatttttaattaacatagtgtgtataaagactgtgtgttaatcaaacggaaacatttctatgtatgagaaaagaattaaaaatgaaaagccaagagggagaacttatgttgtttctctgtaagtcttttcagaat

SEQ ID NO: 21211 - DNA, 720 bp, Homo sapiens
ccttatgtggggttaggaagtggaaggactgagctgatgaaagagagttgggatctcttggcagagcagtctgtttttgtaagttttcacatttctcttcattttgaacattataatgtggcttccaaaaatcaggtacacacctatgttttggaagtagacaaagccatcaaacaaatgtcgtacatcttacatagtttgactatgaaattggtgtgatgatagtggtgtgcaatttaattggtaaattatttaaaacgttgttaaraacaagcatggatttaatttggagtataaataaatatttggatgactttttttctaagattaaaaaaccgtggctatattctcttgcctcaggcatgtggtcattcaactctgatgtcaggatcacttgggtatacgtttgataccactggataatgacttctacaagatgcctagagataaataaatttcattgacaagtcaagtcttgtactttatataatcatcttatttccaatagctgatattggactggtgccctgttaatttgagttttcaggtaaaaattaggttacttggttcatgaaaccagaggagtatttttaattaacatagtgtgtataaagactgtgtgttaatcaaacggaaacatttctatgtatgagaaaagaattaaaaatgaaaagccaagagggagaacttatgttgtttctctgtaagtcttttcagaat

SEQ ID NO: 21212 - DNA, 720 bp, Homo sapiens
ccttatgtggggttaggaagtggaaggactgagctgatgaaagagagttgggatctcttggcagagcagtctgtttttgtaagttttcacatttctcttcattttgaacattataatgtggcttccaaaaatcaggtacacacctatgttttggaagtagacaaagccatcaaacaaatgtcgtacatcttacatagtttgactatgaaattggtgtgatgatagtggtgtgcaatttaattggtaaattatttaaaacgttgttaaaaacaagcatggatttaatttggagtataaataaatatttggatgactttttttctaagattaaaaaacygtggctatattctcttgcctcaggcatgtggtcattcaactctgatgtcaggatcacttgggtatacgtttgataccactggataatgacttctacaagatgcctagagataaataaatttcattgacaagtcaagtcttgtactttatataatcatcttatttccaatagctgatattggactggtgccctgttaatttgagttttcaggtaaaaattaggttacttggttcatgaaaccagaggagtatttttaattaacatagtgtgtataaagactgtgtgttaatcaaacggaaacatttctatgtatgagaaaagaattaaaaatgaaaagccaagagggagaacttatgttgtttctctgtaagtcttttcagaat

SEQ ID NO: 21213 - DNA, 357 bp, Homo sapiens
attagataaggaaattgatcccttcactactgtctgtgatcatacatgctttggaaagtctcaggataatcccagaggtatgagcagcccagttttaatcttagaacatctgagactcagttttttcaaatgtaaaaagaggataatagtgatatcctcacagagctattttatgacttgccaaaaaagtagacttttgagcatatagtaggcactcactagacagcagctttgagataattcttcgcttgattttcttcaacttttaacaaataatccattagttttcttggagcasagactaagaataagatattaaacactactgttaggtgtgggaaaatattcaaatagaaa

SEQ ID NO: 21214 - DNA, 523 bp, Homo sapiens
ctatttacatgattctcatctattttaaatagagcatttataatatttataacattttaaataaagactcactatatcattttaagtaaacaatttattttgaaataatagattaacaggcagtggtaagaaataatacagagacttccggagtaatttttgcctacttttcttcctattggggaaagtataatgtattattggcctaggatattgacatggatgcagtcaaattacagaacattttcatcaacacaagcctcccacatgttgccgttttgaagcctctcctgcttcccactcacctcttgcttttgccctggaaaccactaagctgttttctatttatttaattttgttactccaagaattttacttaactggaatcatacagtatgtggccttttggaattggcttttttcactcagcatatttccttggagattgatccaggtcattkcatgttatcaatattcacttttcattgcagagtatatttcatgctataaatgtcccaggatt

SEQ ID NO: 21215 - DNA, 602 bp, Homo sapiens
ttttttgagacagagtttcactcttgttgcccaggttggagtgcaacggtgcggtctcagctcactgcatcctctacatccctggttcaagcaatcctcctgcttcagcctccccagttagctgggattataggtgccagccaccatacctggctaatttttgaatttttagtagagacagggtttcaccatgttggcccagctggtctcaaactcctgacttcaggtgatctgccagcctcagtctcccaatgtgctgggattacagggataaggcatcgtgcccggccttaactaaattgtataaacagaagtaaagaggacataccatatattgagtgaaattttttccatgagcatcttggaccaatattacttcgtagaactttaatatttttctgatcctttccttgcttagcatttgtaccattattaataattttgagccttaattcactacgacttgctaagccatttcttcctctctctccatatgtgctttataatcacaaatccttcagatttctactgtagacagattattatttcataatgctagaaaaattgtgaacacattcagscctttaaattaaaaccaaaaa

SEQ ID NO: 21216 - DNA, 1651 bp, Homo sapiens
tgctgagctattttggggtartcatttcacctagctggcctcaggggtaccagttttttaggatggttagcatcgtatatcaggaacagattccaaaattacttacgaatcaaatgtccatttaaaagccgttgtttttaatggatcctatgacgaaccctttagtaaaataactaattctatcttcatttcctggtacaaattttaattttgtcatttttcttttctaatacaagatttttttaaaagaataaaaaaacaaatccggtgcttttgtaggatggaaaagtctgaaaaaatagttgggaaggaaaagggaaatagaaaagttgaagttaggagtaaaaagttgagagaataaaaaatgatacttagggcaaactccaaaaatactggtgcttttgatgccttctttcctttgcattgtctctgctctacttacacgttgatgcaaattaagtctgatttcaatttaactgttttctttcagattttagtatgaaaacttttagtatttgtggaggaacaaaaatatcattttgaagaatgcatgtccagtagcaataagacaacctatgactagaaacaatggacttttcacagcctatacaaatttgtatgaataaatcagctaacagatatgtcagaaatattgtttataaatagcggagttcaaataataatatcccatggaacagattgtagcagttcgctattaccattgtaaaaactccacaccatgctatatatattctatttgccataatatattctatttgtcaaagaatttccctccataaataaaattgtcattttacagagaagtacacatagtaatagttacttggactttgcttaagtatggaaaagcatgtaatgctattcttaattaattgaaatatcagtatatgcccaaagagtttctctgtataaaaaatctcaattgtaaatatcatatatgaatagccaattcaaatatttaccataagagattggtgacttaattatgagagttcgataatatggagatgaatgtacgtagtggttcatgtagtaaaatatgtttcttaaaacaacattaaaatttttaaaatttggcagaggtatcagtgaaataaggcttttcatgctttgttgtaatgaattttaaagacagatgtactatttctttcatttgagggggaattgtttagtctactgagcctaagtaagggccactagttttttgtttgtttgtttgtttgtttgttttgagacggagtctgtctctgttgcccaggctggagtgcagtggcacgatctaggctcactgtaagctccgcctcccgggttcacgccgttctcctgcctcagcctcccgagtagctggggctacaggcgcccgccaccatacctggctaattttttgtatttttttggtagagagggggtttcaccgtgttagccaggatagtctcgatctcctgaccttgtgatccgcccgcttcggcctcccaaattgctgggattacaggcgtgagccaccatgccaggcctggccactagttttgaaggttgtgaattttcctaaatcttgcatgatttgggtaaagtccatctgtacctaatctgcaaatgtgcaaattactacataaagtacatcagtaccaat

SEQ ID NO: 21217 - DNA, 520 bp, Homo sapiens
tgcctcatcaatcattaaatgtgccccttctaaagtgaaaataatttttatcaggtgatcattttcttttgctagtttaccaaatactttttgttagcatttcttctctgagttcttttgaatgaaaagaaaacatttgtagccgggcatgctggctcatgcctgtaatcccagcactttgggaggctgaggcgggcrgatcatgaggtcaggagatcgggaccatcctggcttacatggtgaaatcccgtctctactaaaaaaaaattagccgggcgtggtggcacgcacctgtagtcccagctactagggaggctgaagcaggagaatcacttgaacctgggaggcggaggttgcagtgagctgagactgtgccactacactccagctcgggcaacagaaagagactctgtctcaaaaaaaaaaaaaaaaaaaaaaaagaaaacgtttgtaaatttgtaagtgtcacagttccaggttttgggggttaaataattttctctaataaccttctgactct

SEQ ID NO: 21218 - DNA, 526 bp, Homo sapiens
tgaaatgtgaaatatcgtaggtttaatcctggcacagaaccaaaactgagtgcattgcacttgaacagctgaccaatccccagcacaggtccatatgaagaaacggagaagaaagaatccttttaaccacagaaaggkcttcatttgcccaaactgaaaaccaaatttcactcaggaaactaatgttgggtttaattaaaatataaatcggtcatacgttttcaaaattaaattatatatgtgtttgtctctataaatatgtccccaactttgctcctggcttatcttccatattttttggctgaatttcagtggttgtcttatcttgtgaggatgaatagtcattgaaataatcttaatttcacaatgagtttaattataaatctatacttcctttgtgtgagagaaaatcttttgtgaacaaaatttaatttttggaaagatttataagtccatattttttccttttaaaaactgcgattgtggtaaaaacacataatgtaaaatttaccattttaattctttt

SEQ ID NO: 21219 - DNA, 573 bp, Homo sapiens
tctacagggactggttacagctttttgctaataggaagatcacattactagaaaatatggagtaaactgtttgcctgtggtagacatcctcacgcataggattgaagacagtaccgggtcctgtacagagaagcgtctctcacatctgaactgcatattgagcgggcaagttggttgtaagttcagtaaaagcctccgataatgcaaaaaaaaaaaaaaaaaaagtattaamtttcacacgctgtttgtaatcaagtatattttcttagtttcagatcctctggtattttatttagtgggaagtcttgcactaaaagggttcaagaaaaataatattgcactttcttatgtcacaggaaacacttttaatggtaacttgtcagattgtctatgaacaaacccactttttaagacattgataaagtcttcttttcttcacgttgtgttttatacaagaacacttcagctgtattggatgtgactgattttaacaaattatattagatttgcatcaattagttacatgttctattcatagtcttttgtgaatattgtctttttgtttaaaaagat

SEQ ID NO: 21220 - DNA, 573 bp, Homo sapiens
tctacagggactggttacagctttttgctaataggaagatcacattactagaaaatatggagtaaactgtttgcctgtggtagacatcctcacgcataggattgaagacagtaccgggtcctgtacagagaagcgtctctcacatctgaactgcatattgagcgggcaagttggttgtaagttcagtaaaagcctccgataatgcaaaaaaaaaaaaaaaaaaagtattaactttcacacgctgtttgtaatcaagtatattttctyagtttcagatcctctggtattttatttagtgggaagtcttgcactaaaagggttcaagaaaaataatattgcactttcttatgtcacaggaaacacttttaatggtaacttgtcagattgtctatgaacaaacccactttttaagacattgataaagtcttcttttcttcacgttgtgttttatacaagaacacttcagctgtattggatgtgactgattttaacaaattatattagatttgcatcaattagttacatgttctattcatagtcttttgtgaatattgtctttttgtttaaaaagat

SEQ ID NO: 21221 - DNA, 573 bp, Homo sapiens
tctacagggactggttacagctttttgctaataggaagatcacattactagaaaatatggagtaaactgtttgcctgtggtagacatcctcacgcataggattgaagacagtaccgggtcctgtacagagaagcgtctctcacatctgaactgcatattgagcgggcaagttggttgtaagttcagtaaaagcctccgataatgcaaaaaaaaaaaaaaaaaaagtattaactttcacacgctgtttgtaatcaagtatattttcttagtttcagatcctctggtattttatttartgggaagtcttgcactaaaagggttcaagaaaaataatattgcactttcttatgtcacaggaaacacttttaatggtaacttgtcagattgtctatgaacaaacccactttttaagacattgataaagtcttcttttcttcacgttgtgttttatacaagaacacttcagctgtattggatgtgactgattttaacaaattatattagatttgcatcaattagttacatgttctattcatagtcttttgtgaatattgtctttttgtttaaaaagat

SEQ ID NO: 21222 - DNA, 573 bp, Homo sapiens
tctacagggactggttacagctttttgctaataggaagatcacattactagaaaatatggagtaaactgtttgcctgtggtagacatcctcacgcataggattgaagacagtaccgggtcctgtacagagaagcgtctctcacatctgaactgcatattgagcgggcaagttggttgtaagttcagtaaaagcctccgataatgcaaaaaaaaaaaaaaaaaaagtattaactttcacacgctgtttgtaatcaagtatattttcttagtttcagatcctctggtattttatttagtgggaagtcttgcactaaaagggttcaagaaaaataatattgcaytttcttatgtcacaggaaacacttttaatggtaacttgtcagattgtctatgaacaaacccactttttaagacattgataaagtcttcttttcttcacgttgtgttttatacaagaacacttcagctgtattggatgtgactgattttaacaaattatattagatttgcatcaattagttacatgttctattcatagtcttttgtgaatattgtctttttgtttaaaaagat

SEQ ID NO: 21223 - DNA, 544 bp, Homo sapiens
cacttgtaaggggtagttcttttgatacttaaaattttcttttatgtgcctttatgaaaatatatacttaactacagagaacagaactctgtgcttccttttagtatgtccttgrcctcacaaaaataattcatggaatcttatatttatgttataaattaatttaatgaaacaaaatttgtgcatggctaaatattacttgttgagtacaatttagaatttctactgtcattttagtgtcctaaaagatatgagctgttgaatttctgctctcataaaatgaatgatattgttaggcctaaacccttgccatttattttccccctctgtcatacagtgtgtatctttggttcactgctgaaaaattttattaatttttctctcttgctagtagtcatactttctaataaagttatcattacttgtgtttatttagttactgtatgttaaacatttgatttctgatggtcttaatgtcatttaatataattgtaaatatttcaatttgtcattattaacaaatttctgtattatatattttaga

SEQ ID NO: 21224 - DNA, 544 bp, Homo sapiens
cacttgtaaggggtagttcttttgatacttaaaattttcttttatgtgcctttatgaaaatatatacttaactacagagaacagaactctgtgcttccttttagtatgtccttgacctcacaaaaataattcatggaatcttatatttatkttataaattaatttaatgaaacaaaatttgtgcatggctaaatattacttgttgagtacaatttagaatttctactgtcattttagtgtcctaaaagatatgagctgttgaatttctgctctcataaaatgaatgatattgttaggcctaaacccttgccatttattttccccctctgtcatacagtgtgtatctttggttcactgctgaaaaattttattaatttttctctcttgctagtagtcatactttctaataaagttatcattacttgtgtttatttagttactgtatgttaaacatttgatttctgatggtcttaatgtcatttaatataattgtaaatatttcaatttgtcattattaacaaatttctgtattatatattttaga

SEQ ID NO: 21225 - DNA, 544 bp, Homo sapiens
cacttgtaaggggtagttcttttgatacttaaaattttcttttatgtgcctttatgaaaatatatacttaactacagagaacagaactctgtgcttccttttagtatgtccttgacctcacaaaaataattcatggaatcttatatttatgttataaattaatttaatgaaacaaaatttgtgcatggctaaatattacttgttgagtacaatttagaatttctactgtcattttagtgtcctaaaagatatgasctgttgaatttctgctctcataaaatgaatgatattgttaggcctaaacccttgccatttattttccccctctgtcatacagtgtgtatctttggttcactgctgaaaaattttattaatttttctctcttgctagtagtcatactttctaataaagttatcattacttgtgtttatttagttactgtatgttaaacatttgatttctgatggtcttaatgtcatttaatataattgtaaatatttcaatttgtcattattaacaaatttctgtattatatattttaga

SEQ ID NO: 21226 - DNA, 544 bp, Homo sapiens
cacttgtaaggggtagttcttttgatacttaaaattttcttttatgtgcctttatgaaaatatatacttaactacagagaacagaactctgtgcttccttttagtatgtccttgacctcacaaaaataattcatggaatcttatatttatgttataaattaatttaatgaaacaaaatttgtgcatggctaaatattacttgttgagtacaatttagaatttctactgtcattttagtgtcctaaaagatatgagctgttgaatttctgctctcatraaatgaatgatattgttaggcctaaacccttgccatttattttccccctctgtcatacagtgtgtatctttggttcactgctgaaaaattttattaatttttctctcttgctagtagtcatactttctaataaagttatcattacttgtgtttatttagttactgtatgttaaacatttgatttctgatggtcttaatgtcatttaatataattgtaaatatttcaatttgtcattattaacaaatttctgtattatatattttaga

SEQ ID NO: 21227 - DNA, 544 bp, Homo sapiens
cacttgtaaggggtagttcttttgatacttaaaattttcttttatgtgcctttatgaaaatatatacttaactacagagaacagaactctgtgcttccttttagtatgtccttgacctcacaaaaataattcatggaatcttatatttatgttataaattaatttaatgaaacaaaatttgtgcatggctaaatattacttgttgagtacaatttagaatttctactgtcattttagtgtcctaaaagatatgagctgttgaatttctgctctcataaaatgaatgatattgttaggcctaaacycttgccatttattttccccctctgtcatacagtgtgtatctttggttcactgctgaaaaattttattaatttttctctcttgctagtagtcatactttctaataaagttatcattacttgtgtttatttagttactgtatgttaaacatttgatttctgatggtcttaatgtcatttaatataattgtaaatatttcaatttgtcattattaacaaatttctgtattatatattttaga

SEQ ID NO: 21228 - DNA, 530 bp, Homo sapiens
atacaatttaaaaaatcaaattgatagaaattaaaaacacatgatattatgatactgaatatgataaattgtttctttggatgtaatagaaaatttaaacatctgaaaaagataataggaaaatcagaagacaggtacataaaaattattcaagccaaaatgaaacatgaaaagaaattgaacaaagttgatttatggcatacaagagctattggatgatacctaatgataaagcatgcatatagctgaaagttgaakaagagacagaaaaaaatgggcaaaaattttatttgagtaaaaacaaaatagataataatctaaaattattgaaagacaaaatatacatactcaaaaagctctgcgatttctaagcataataaaacacacactcacagacatcatagtcaaaattaaatttaaaactctgagctatttcttttagtttctcatttgacaccagactaacacaatttagttattgtttgtttcagaatgtgtttattggtcaagaaaggtaaaataaacaggca

SEQ ID NO: 21229 - DNA, 1170 bp, Homo sapiens
  misc_feature (1)...(1170): n = A,T,C or G
tgtctcctctctttttctaaatttgtaaattgtatttattaatttttttaagttaatagaggcaaagctagaaattgagttktttttttttttttttttttttttttacaagagcatgagttcacatttctgcttccatttgaactacacatttgaattttatgtattgtccttatagagaaaaaatttccggcccggtgcggtggcccactcctgtaatcccagcactttgggaggccaagacgggcggatcacgaggtcaggagatagagaccatcctggctaacaaggtgaaactccttctccactaaaaatacaaaaaaaaaaaaaaaaattagccgggcctggtggcaggcgcctgtagtcccagctactcaggaggctgaggcgggagaatggcgttgaacgtgggaggcggagcttgcagtgagccgagattgcgacactgcactccaacctgggcggcagagcgagactccgtctcaaaaaaaaaaaaaaaaaaaaaattcactccattttctgagcctctgttacagacaacattcttttaacatatgtgtcataacactgtgacttatgctagattataatagtgcctaaagtttttataacaaattgcgtgcctacaggcttggttgttggacgcctcattaagggtatgattctacttcttttcttttatgggactgacgcgttttttcaacaaatactattgtatgctttattatgttccccttaaaattatcccgaatagacgccacattatattgacaaagagggacaaattcatcgctactcatttctggaaatttcaatgagaataagcacaataataatagtttaaagtatatttctagatatttttcaatctccccagnaattgaaagttgtagtttttttctctttcacaattgaagtgttgtttttggatgagtgaaaggaggatgtagaaaatgattccacagctaccggattgtctagaatgggatttccttttctgattgacagtttaccatgttagaataacagattctcaagaggaggacagtgcatcacaaaaattggtcagaacatgttgtcatgaggttgatgctttcattctggggcctataatagggatgtttgggaaaagttcaaaaaagggaaccttgttgctcaaagctatcctct

SEQ ID NO: 21230 - DNA, 1170 bp, Homo sapiens
  misc_feature (1)...(1170): n = A,T,C or G
tgtctcctctctttttctaaatttgtaaattgtatttattaatttttttaagttaatagaggcaaagctagaaattgagttttttttttttttttttttttttttttacaagagcatgagttcacatttctgcttccatttgaactacacatttgaattttatgtattgtccttatagagaaaaaatttccggcccggtgcggtggcccactcctgtaatcccagcactttgggaggccaagacgggcggatcacgaggtcaggagatagagaccatcctggctaacaaggtgaaactccttctccactaaaaatacaaaaaaaaaaaaaaaaattagccgggcctggtggcaggcgcctgtagtcccagctactcaggaggctgaggcgggagaatggcgttgaacgtgggaggcggagcttgcagtgagccgagattgcgacacygcactccaacctgggcggcagagcgagactccgtctcaaaaaaaaaaaaaaaaaaaaaattcactccattttctgagcctctgttacagacaacattcttttaacatatgtgtcataacactgtgacttatgctagattataatagtgcctaaagtttttataacaaattgcgtgcctacaggcttggttgttggacgcctcattaagggtatgattctacttcttttcttttatgggactgacgcgttttttcaacaaatactattgtatgctttattatgttccccttaaaattatcccgaatagacgccacattatattgacaaagagggacaaattcatcgctactcatttctggaaatttcaatgagaataagcacaataataatagtttaaagtatatttctagatatttttcaatctccccagnaattgaaagttgtagtttttttctctttcacaattgaagtgttgtttttggatgagtgaaaggaggatgtagaaaatgattccacagctaccggattgtctagaatgggatttccttttctgattgacagtttaccatgttagaataacagattctcaagaggaggacagtgcatcacaaaaattggtcagaacatgttgtcatgaggttgatgctttcattctggggcctataatagggatgtttgggaaaagttcaaaaaagggaaccttgttgctcaaagctatcctct

SEQ ID NO: 21231 - DNA, 1170 bp, Homo sapiens
  misc_feature (1)...(1170): n = A,T,C or G
tgtctcctctctttttctaaatttgtaaattgtatttattaatttttttaagttaatagaggcaaagctagaaattgagttttttttttttttttttttttttttttacaagagcatgagttcacatttctgcttccatttgaactacacatttgaattttatgtattgtccttatagagaaaaaatttccggcccggtgcggtggcccactcctgtaatcccagcactttgggaggccaagacgggcggatcacgaggtcaggagatagagaccatcctggctaacaaggtgaaactccttctccactaaaaatacaaaaaaaaaaaaaaaaattagccgggcctggtggcaggcgcctgtagtcccagctactcaggaggctgaggcgggagaatggcgttgaacgtgggaggcggagcttgcagtgagccgagattgcgacactgcactccaacctgggcggcagagcgagactccgtctcaaaaaaaaaaaaaaaaaaaaaattcactccattttctgagcctctgttacagacaacattcttttaacatatgtgtcataacactgtgacttatgctagattataatagtgcctaaagtttttataacaaattgcgtgcctacaggcttggttgttggacgcctcattaagggtatgattctacttcttttcttttatgggactgacgcgttttttcaacaaatactattgtatgctttattatgttccccttaaaattatcccgaatagacgccacattatattgacaaagagggacaaattcatcgctactcatttctggaaatttcaatgagaataagcacaataataatagtttaaagtatatttctagatatttttcaatctccccagnaattgaaagttgtagtttttttctctttcacaattgaagtgttgtttttggatgagtgaaaggaggatgtagaaaatgattccacagctaccggattgtctagaaygggatttccttttctgattgacagtttaccatgttagaataacagattctcaagaggaggacagtgcatcacaaaaattggtcagaacatgttgtcatgaggttgatgctttcattctggggcctataatagggatgtttgggaaaagttcaaaaaagggaaccttgttgctcaaagctatcctct

SEQ ID NO: 21232 - DNA, 571 bp, Homo sapiens
atcttataatcataaaaatatggtattataatcatgtggggccaccatcatatatgcagtcagccactaaccaaaacagtatgtggcacatgactgtacctattttgaaacgttactgtaagcattaaataaaatgatgctgcctggcccagtactcaataaaggctagcttcctccaacttgtttcccacccattcccatattccaaacaaggacatatctagggttgccacactagaagttktacctggcacatagtgggtctgaaataaatgttagtttccattttcctccctttaaagccctaaactaaagctatttcttccctgggtttttccttacccggcccctggtatttcctggaaaacccctttgacaatatcacagagccgtggagcctctcctttgagaaacgcccatatatatataaagaggcaccacacacaccctctcacccacacaattttgcttatgattttaagaagttcagattccctgaagcttaatttagaagcctgtgatagcacccatatgacacaaaatatcttctgccacaaagtacagttcttca

SEQ ID NO: 21233 - DNA, 692 bp, Homo sapiens
tcacacaactgggcctgcccgatccaaagcacacacgacagtctcacagcccagtgctagtccgctacccacagtgcaatcactgcaaacagctccagttgtttcctcaagttcctttggttctgggatataacccactagggctatatgtaagctccgaggattggcttttaatattcctggcagctgagaagaacaaggtgccgtgaagagccacagcccctccagaaactgcacctgggcagcgggccgtgtggccacagctgagaccctgaggagtgggtccccaggggactggtctcggggagaggggctgcctcttaaaacacgacgatggacagacagatggatacgttcaacagcagcatgaacaagttctacaactagaaatcattatttgtaaaggaaaaacccatttacgagttgaatcagaggagaggctcgtgtctctgagttctgaattcatgtggggaggaacaaatagaggaattacctgaaacgtaaagcaaaaatactgcctcgaggaagttatgagggaaaagagattttgagaacagatccagtagccccatatgcaaataatagggaaataaaatataatagaaaaaaggccgggygcgatggctcacgcctgtaatccctacattttgggaggctgaggtgggcagatcacttgaggtcaggagttcgag

SEQ ID NO: 21234 - DNA, 553 bp, Homo sapiens
atttcttaataagtttttaatgtatatatttatcttatttataatgatatggtctggctctgtgtccccagccaaatttcatcttgaatcgtaatcccaattgtaatccccatgtgctgggggagggamcttgtgggaggtgattagatcatgattccccatgctgctctcatactgagtgagttctcatgagatctgatggttttataaaggtcttttcctccctttgttctgcacttctcctgcccccatgtgaagaaggacgtgtttgcttccccttctgccatgattttaactttcctgaggcttccccagccacgcggagctgtgagtcaattaaacctctttcctttataaactacccagtcttgggtatttcttcatagtagcatgagaacagactaatacaggatacaaacatgaggtttctggatcaaggcaaattattattacttatagtaataaccacatcagttcctcttgccctaatatcctaggcacaaagcacaaaaaccaaatgttaccctatatatatatatatgaggtgggtcct

SEQ ID NO: 21235 - DNA, 534 bp, Homo sapiens
tagaatatagcaagctttggccagcagaccacccaaaaatgaacaagtgcaataaagagttcttagctttctatgctactcatccaggaggcgctggtgccccagacagctgaagcatttaagagamagtagattctcatgtttgttgaacctcactcaaaccaagggcaagaccgaaatgtctccatcaatatgcaaaactttttactttgaattggacatttattatagataagacattctgataggcactttacataccttaaattgtttaaagtttaagcatctttatcatttttagatgtataaaagatgatttttaaaaatagaacacttgctggtaaccaacttagtgttaagattattttcttaaattcaactagttgattaaaattaggtggagggaatgagggattgacacgaggtgatgtcttttaagttatctacttaatagaattgaaagatcccaacaggttcttcctgctcaatacacaaacaaagaccatagcattgcagtaaagaaagagtttaatg

SEQ ID NO: 21236 - DNA, 534 bp, Homo sapiens
tagaatatagcaagctttggccagcagaccacccaaaaatgaacaagtgcaataaagagttcttagctttctatgctactcatccaggaggcgctggtgccccagacagctgaagcatttaagagacagtagattctcatgtttgttgaacctcactcaaaccaagggcaagaccgaaatgtctccatcaatatgcaaaactttttactttgaattggacatttattatagataagacattctgataggcactttacataccttaaattgtttaaagtttaagcatctttatcatttttagatgtataaaagatgatttttaaaaatagaacacttgctggtaaccaacttagtgttaagattattttcttaaattcaactagttgattaaaattaggtggagggaatgagggattgacacgaggtgatgtcttttaakttatctacttaatagaattgaaagatcccaacaggttcttcctgctcaatacacaaacaaagaccatagcattgcagtaaagaaagagtttaatg

SEQ ID NO: 21237 - DNA, 617 bp, Homo sapiens
atatttatggcagctttatatatgatacccaaaaccagaaacaacccaaatgtccaccaagagctgaatggataaattttgcaggcttgtcacacaacagaatgctattcaacgtcaaagagaatgaaataccaacatggatcaatatggatgaaatggacaaatctcaaaaacatttacattgtatccaagaagccagatatgaaatagttcataatgtatgattccaattatatgaagttctataacaggccaaactaatgtatggtgatataaatcagaacaatgttcactctcatggaggggtgacaggataaggacaatgtttactytcatggaagggtgactggatagggacacaagagaattttctggggtgagggaaatgttgcatatatttattgaagtgacagtaacacacacacacacacaaatgtacatacagtcaaaagccattgagttatatatttaaaatatatgcatttattttatgtagtatatactttaatgaaaacaacaattagggaaagtaaattaaaggtcagtgccagtggaagcataaccaaggttaaatattgtgatggttaatacagtgtgtcaacttgattggattgaag

SEQ ID NO: 21238 - DNA, 1244 bp, Homo sapiens
tctcataaactcgattagattgataattatcttttcacttcccagctcaaaataccctaatgcaaaattttacaaaggttcagagatcaggtgaaggcctcctgtcatccatgtgctactaagcaatgaaattggcatgataattaaatgcccagtattctaaagtataagtgcaaaaaaaatggatgctggttgtaaataaaaataggccaatggctggaaagaaaagtccaggtgggctcacatcacagttttaattattttaattcattggtatatgttgaataaatcactaaattaaaataaacctaccctgagtaggtttacttaatctccacatggacatatataagaccattggaatggcaatataaaaagggaaacctactggcaaatatgtcgtggactctttggagaactggactcatgggatttcttaagtatgtaaaaggaatgagaggcaatgtctcatacataagactcaagagccaagtttcaatccagctccaccattagcaacctcagtttctcatctgcaaaatgaagattttaaatagtactcaactcatagcattattgtgaggacgaggaacaagttattgtgaagactgggaacacagagttattgtgaagactaggaacaagataatggcatgtcaagcctctggcacacagtaagtgcgcagaaattattaacagaaggaacggaaagttctgttcaataagagaagagaaggaaagtattcagctagctcttcrggtttattttttaatctttactgcctctatatttagtgtttctgaggatctcattaatgctccccaggaactttatgcccaagcatctactaaagttgaccatagtcatacagtatggcagaaaatttattcctaggtatttacccaccagaaacgtgtacagatgttcataaaagacaaccgcaagaatgttcacagtagcactttttgtaatatccccaaactggaagctacctaaagactagaatggatagtacctagccatcaccaatagaatgaagaaaaggactgctatgggcgctccatcagtagtagaatgcatacgtggtggtatgctcaccaacggattactatccggctgtgaaaatgagcaaaccacagtgacaatacaaaagaatctcataaacataacattgacaagagaagccagacaggaaagagggcatagtgcatggttctatttacacagtatacaaagatgggtg

SEQ ID NO: 21239 - DNA, 1244 bp, Homo sapiens
tctcataaactcgattagattgataattatcttttcacttcccagctcaaaataccctaatgcaaaattttacaaaggttcagagatcaggtgaaggcctcctgtcatccatgtgctactaagcaatgaaattggcatgataattaaatgcccagtattctaaagtataagtgcaaaaaaaatggatgctggttgtaaataaaaataggccaatggctggaaagaaaagtccaggtgggctcacatcacagttttaattattttaattcattggtatatgttgaataaatcactaaattaaaataaacctaccctgagtaggtttacttaatctccacatggacatatataagaccattggaatggcaatataaaaagggaaacctactggcaaatatgtcgtggactctttggagaactggactcatgggatttcttaagtatgtaaaaggaatgagaggcaatgtctcatacataagactcaagagccaagtttcaatccagctccaccattagcaacctcagtttctcatctgcaaaatgaagattttaaatagtactcaactcatagcattattgtgaggacgaggaacaagttattgtgaagactgggaacacagagttattgtgaagactaggaacaagataatggcatgtcaagcctctggcacacagtaagtgcgcagaaattattaacagaaggaacggaaagttctgttcaataagagaagagaaggaaagtattcagctagctcttcaggtttattttttaatctttactgcctctatatttagtgtttctgaggatctcattaatgctccccaggaactttatgcccaagcatctactaaagttgaccatagtcatacagtatggcagaaaatttattcctaggtatttacccaccagaaacgtgtacagatgttcataaaagacaaccgcaagaatgttcacagtagcactttttgtaatatccccaaactggaagctacctaaagactagaatggatagtacctagccatcaccaatagaatgaagaaaaggactgctatgggcgctccatcagtagtagaatgcatacgtggtggtatgctcaccaacggattactatccggctgtgaaaatgagcaaaccacagtgacaatacaaawgaatctcataaacataacattgacaagagaagccagacaggaaagagggcatagtgcatggttctatttacacagtatacaaagatgggtg

SEQ ID NO: 21240 - DNA, 620 bp, Homo sapiens
tggagatagagaatagaaggatggttaccagaggttgggaagtgtaatgtgaggctgggaggaatagtgatggttaataggtacaaaaatagaaagaatgaatgagacttagtatgttacagcacaacagggggacaattgccaataataatktaactgtacatttaaaaataaccaaaagggtataattggattgtttgtaaagtaagggataagtgcttgagaggatggatgccccattttctattaattttccatcacatggaaatattatgtattacaggcctgtatcaaaatatctcatgtaccccataaatatatatacctactacgtacccacaaaaattaaaaataaaataaataacaataataataatatagacgctaaaaaactggtggaaatatagacatgttaaacagagaatttcagcatatttatggaaataaagaccacgacgagaccagtcagtcaaaacagagaaaatacactttcaaggttttcatcttgtgttattagtttttttctcattaacttaggttagcttctttattttacatatgtaaagaatcgttttaaaaagcaaacttttctaacaagccaaagaaaattgtgtgtgcta

SEQ ID NO: 21241 - DNA, 584 bp, Homo sapiens
gactataaatgattctgtattaaattgtgtatctagacacttgccagagtctcaagttaattctggaaattttctatgtatctttttattttagagataaagattataacacccacaatggtgggagatttgttttcaactgttaaaactttctttttctgacttagtgcactgactacgatcttcagtacaatttgaaataacagtagtcataacagttactttcttgcttctgatttcaaagggaaatataacattttacaattaagcatggtatctgctgaacrgtgttctatatactctttctgaattaggtagttcctttcttactactcatttgttaaaagattttttaaaaaatcacaagtgatatgcattttatcataagctttttctttattcattgatatgatatttgattttttaaaattaatatcttaaggtggctaattacattaattccaaaccaatctttaaacttaccttgcttttctggaataaacccaatttggtcctaatgcattatcttttttatatattactagattcagtttgctagtattttgtttaggattttggcaact

SEQ ID NO: 21242 - DNA, 616 bp, Homo sapiens
ggccgatggatcagttttcccagagagttttcctcctttctcctgcctggggaaggtaaaagccctgcaggggaaggatctgggaatagcatctcagtacccaaatgttcacaaaattcccttttttggaacaatatctggtgtctagctatgttttgatattsaggctccaaagtcttcctttggagttaataaacttcccttagtggtggaggtggtgtagttgcatggctgcgtgggctgggaaaggagatctggggttcttatctattctttttaaagactatcatcaacactgctgctcagcatccgattcctgaccactcctgggtcccgcagcacaaaccagcttactttacaggtggcacgggcccctccattttacatcttccaaaatttcattgatgtcttttgtctgatatcatcttctcttccattccttttgtccataagcatttataaatgtttcttttttttaaaattttactgagatttctggagggaacaaatgtaagctctggcatgagttttcatcaggaataatgaaagtccctttgtacaacataatattatgccacttgtccatttgtacaacttatatttcatttccaaattt

SEQ ID NO: 21243 - DNA, 525 bp, Homo sapiens
gggtgctgggattatttccatgttaattcaagcagctgtgtaaagcacagccttaagacttgtgcaaagattctcaaagcacaattttcttcagtgacaaaagatgtctttctttttcctcttgtcaaacacaatcactcccagataaagtcaatttgctcttttgccttcgagttgggctatttccttttgccagctgactaaygttttctagggcaggttggaattaatcattcagcaccctgagatttttcaggccagccagggctgaggattagaaacaataaaattcacagttcgccctctaacaaaaggatctcacacttggccagaagtggatcgtaggcctccttggaaggaacagtacgggaaattttaccaaatagctcaatcttcattctccagatgtgccaaatcttgtttacttgtcaccttcaccaggcgtcttgtgctaatttattccagaagtggtgtgtgtttctcccttccccacgaggtctcaccatcaaggctgagcacaattca

SEQ ID NO: 21244 - DNA, 1089 bp, Homo sapiens
aaagactaactttccttaagtcattcccagaattagtctggtctatttatgttaatcccactttttttttcctctcaaagaagaattttgtcatagttaccttgctgaaaattgagtgttgtttttctttttttcttttctttctttctttctttttttttttttttgaggcagggtctccctctgtcacccaggcttcagtgcagtggtgtgatcttggctcactgcaacctctgcctcccgggttcaagctattctcgagccccagccccctgagcagctgggcttacaggtgtccgtcatgacacccggctgatttttgtatttttagtagagacgggattttgccatgttggtcaggctggtctaaactgttgtgtcccttaatacagtgctaaactcaattcctaaccacttgtcagaaccaaggcaacccctttctcttccctaagtgacttgtttaggcagccctttgcatctcggagagctgtggagatggcgctggcggtccttggagtggactccacatgttggcttcagagctatgttgggtgctctaagctgcggtcccccagcccaaaatacagacttaaaaatatgtgaaattgacttctttagacatgacatgcatgcttttatttgccgcactytcactgtgtcatactgtctttttacactctgatacatcactgagtgagtggcctgattgatccacaaagacattctcctttgcatcctctgggacaagaactggtctccccttggtaagtgacagtatatctcagctttgctgttaactcttctgtgctgagctcagtagactcccacttgctgaataaagatctatcttttggaactaaagtctagacacaggtattattcatatgcagggttggagaagggaaaaggccctgctttaaatagggacaagttctccttcacattattaatatgctgagataattacaggtctcctgacaaaatttcaggggcagaataattgatttagggacttcttggagtcaaagtcaagctgccctctgatataatctccccaggaacttggtgagcatcatcactaaggccatc

SEQ ID NO: 21245 - DNA, 1089 bp, Homo sapiens
aaagactaactttccttaagtcattcccagaattagtctggtctatttatgttaatcccactttttttttcctctcaaagaagaattttgtcatagttaccttgctgaaaattgagtgttgtttttctttttttcttttctttctttctttctttttttttttttttgaggcagggtctccctctgtcacccaggcttcagtgcagtggtgtgatcttggctcactgcaacctctgcctcccgggttcaagctattctcgagccccagccccctgagcagctgggcttacaggtgtccgtcatgacacccggctgatttttgtatttttagtagagacgggattttgccatgttggtcaggctggtctaaactgttgtgtcccttaatacagtgctaaactcaattcctaaccacttgtcagaaccaaggcaacccctttctcttccctaagtgacttgtttaggcagccctttgcatctcggagagctgtggagatggcgctggcggtccttggagtggactccacatgttggcttcagagctatgttgggtgctctaagctgcggtcccccagcccaaaatacagacttaaaaatatgtgaaattgacttctttagacatgacatgcatgcttttatttgccgcactctcactgtgtcatactgtctttttacactctgatacatcactgagtgagtggcctgattgatccacaaagacattctcctttgcatcctctgggacaagaactggtctccccttggtaagtgacagtatrtctcagctttgctgttaactcttctgtgctgagctcagtagactcccacttgctgaataaagatctatcttttggaactaaagtctagacacaggtattattcatatgcagggttggagaagggaaaaggccctgctttaaatagggacaagttctccttcacattattaatatgctgagataattacaggtctcctgacaaaatttcaggggcagaataattgatttagggacttcttggagtcaaagtcaagctgccctctgatataatctccccaggaacttggtgagcatcatcactaaggccatc

SEQ ID NO: 21246 - DNA, 1089 bp, Homo sapiens
aaagactaactttccttaagtcattcccagaattagtctggtctatttatgttaatcccactttttttttcctctcaaagaagaattttgtcatagttaccttgctgaaaattgagtgttgtttttctttttttcttttctttctttctttctttttttttttttttgaggcagggtctccctctgtcacccaggcttcagtgcagtggtgtgatcttggctcactgcaacctctgcctcccgggttcaagctattctcgagccccagccccctgagcagctgggcttacaggtgtccgtcatgacacccggctgatttttgtatttttagtagagacgggattttgccatgttggtcaggctggtctaaactgttgtgtcccttaatacagtgctaaactcaattcctaaccacttgtcagaaccaaggcaacccctttctcttccctaagtgacttgtttaggcagccctttgcatctcggagagctgtggagatggcgctggcggtccttggagtggactccacatgttggcttcagagctatgttgggtgctctaagctgcggtcccccagcccaaaatacagacttaaaaatatgtgaaattgacttctttagacatgacatgcatgcttttatttgccgcactctcactgtgtcatactgtctttttacactctgatacatcactgagtgagtggcctgattgatccacaaagacattctcctttgcatcctctgggacaagaactggtctccccttggtaagtgacagtatatctcagctttgctgttaactcttctgtgctgagctcagtagactcccacttgctgaataaagatctatcttttggaactaaagtctagacacaggtattattcatatgcagggttggagaagggaaaaggccctgctttaaatagggacaagttctccttcacattattaatatgctgagataattacaggtctcctgacaaaatttcaggggcagaataattgatttagggacttcttggagtcaaagtcaagctgccctctgatataatctccccaggaacttggtgagcrtcatcactaaggccatc

SEQ ID NO: 21247 - DNA, 426 bp, Homo sapiens
ttttttggtctttactattgctatcattattattaataataaggcayttagtttgtataggaaacaccggtcagggcaggtgttaggtacattaccatacatacagagaatttgtgtgtgtaaggcagtaaatagccttataatttctggaaaaatgatttattcactaatttattcattcagccaatactgatagttaacaaaattcagaaacaatcaaataaaatactgacagataggtgccagaaagaaaatgctcaggaagctgcagtagtagagaaagaactactttggacaagatagttaggaactttctgaagagatgacctaaagctcacacatagatgttgaagggcaagccatgaaagtgactgggaagagcattctgagcagaggacgttttaaaaaaggctctgacgcacaccg

SEQ ID NO: 21248 - DNA, 543 bp, Homo sapiens
agattaagattttcagaattgagcaacttagcttattcgaacatgtaactaagaaaattgtgcattggactgcacattcaatgacagaagggaccttatcttcaatgaataaattgatatctagcacagaggagactgtcactaaatattggatgaatggatgggtggatggataaatggattgatggattgtattgacaacttctyttatctttatggatcttggttttgtgtgtgtgtgtgtgtatcactctctgccaggtcaacttcaatgtgtatgtatatatattaggagggttgagctacatatctcttccttttactcagatgactttcctgagagcccgttgtaatgggtctagctagtgtttgtttcctcaaatgcaagggccttaatcataggaactaggaatatttaaatatccaataaaggctataataggtttaataatttttgctgaattaaatgcaaatttttatattttgtaaaatcctttgtaggaattttctatttttattcttttaaatgtaaccatggattca

SEQ ID NO: 21249 - DNA, 523 bp, Homo sapiens
aggaggttttgaaagctgtcataagtatggtatgtttggtatgctacaaagtcccatctttggcttccacattattattaacgtctttgataaggttattttggttgctgatgacacagatcagccagagcagggggraaaaaaaaaatcacacttaatgagtgtagcttttcatataagctgaattaagaggaaaagacacaaaataaaacaaaggggcatatacttacacacgtgcatacacacacgtgcgtggatttactcacatgctacacaaattgcatttccaattcgttatccgaggatagacaatcacaacagaaataacttttcaactgtggcaaaacagatgtagccatataatccttaataagggaacgtagttgcctgtagcgcaatgcctaaacaaggtagagtatactggggccctaaaaaggcaacttgtgctgtaattctaactttttatgcatagaactttgacatttgtcttaacttatcagtcaatatgcttttttttcataaa

SEQ ID NO: 21250 - DNA, 544 bp, Homo sapiens
catgaagaggaggatccacatgcctcacccaagggagaaaccaagcactgagatgccagcctgtctcaaggcctgcactctcctgtgcggctcccctacaccaccaagaccccttaactctgtgcttcccaaacattttgcaccatggcacacagggaaatgttaatatttgtacaatacactgggccacacagaggggacctggaggccacgatgaggctgcacaagggttgaagacaacgtgcccagtggcccaggtcactctccatccccraagtccgagagtatcatcagcacactgcttgaaaagctctgccttaacttatgaaagggtctttacagcaaattcttttgacaatggcagtcccttggggataaagttaaactcctccttctgagcagtccaccatggacctgctctttcttcaggacaacacctcctcttttccatttccacagcctgccctagtcccagctttttctgacatagccccctgcaccatctctgtgctagctctcacacaccttcccttttacgccactt

SEQ ID NO: 21251 - DNA, 1090 bp, Homo sapiens
tgcctaggcagatatgaacagcctgaattaagctccacaaataattaaatcaaattgccaggcatgtaatcttcattgtgggtgagtaacattgtaaattcttgttcccatgccaggtaggtcagaatcgaggcagagattttaaatgcattccaagacagagaatcagagaatattaatcmgggatctaagaagcttgagaaggcacttaactcattgcttctccttctagcaaaagagaggtggtgcaggagtcatctggagcaatgagaacttgcccagagtttaggacctaaaggctactgaacacattttaataacagtcacttgctttatgcgatggaagtattcactttaatataaagtgtactgagtgccgactctgtgccaggcagtgatgacatgcatgagagtgagacacaacctccagtggctgaggatggagacatgtgcaagaaaagaatgacagtgtgattgcagaggccagctgcccagtgttcaaagattcccagagaaaatacaaagaagtcacaatctgggggagttaaggatctatttggatcctcatgatcatataggatcatatttgagacagctggtaatactgtaatatatcctttctcttgaattcaaagtgactctcccaaaatagtttgatcctctttaagcatctctttttctgatatttagagatttataaacagatataacatgatagaatgatcctctgaaaagggactaagtaaattattttgtactaggaaaaaacctaccttctaatcagtttgcagctttttcaaggaacttttggagacactttgagagaatagccccctttgtcttttttttgttacctctcacccaacaaacacattatatcttcactgttatgggctagattgtgtatctctctccccatataacatggtaagtgccatatacaaacatgaacaggctataaattaaataacatttcatccccacggcgattgattaccaaagcctatgattagaacttccattttccctcttggtttgtttgtgactatgttctgaagaaagaaattcaagttaataaatcaacaagaac

SEQ ID NO: 21252 - DNA, 543 bp, Homo sapiens
aatgctttaacaattatatttgtctttgggaggccgaggcaggtggatcttgaagtcaggaaattgagaccattcctggctaacatgatgaacccccgtctctactaaaaatacaaaaaattagctggcgtggtggcaggcacctgtagtcccagctacccgggaggctgaggcagcagaatggcgtgaacccgggaggtggagcttgcagtgagccragattgcaccactgcactccagcctgggcgacagagtgagactccatctcaaaaaaatataaataaaataaaataaaacaattatatttgttcttatactttaggagaattacctaagttttattaatattggtaaaataaagatactatgtcatatgatcagaaggaaattcaagttaaagtacagacttattgaaggaggcacaattattacaattacaaccaagagaaaaagaattacctaaatttttctatttaaatacaatacaaaacatatcttgcttttatttggagaaaaatctgagttttaaataaatctgccaac

SEQ ID NO: 21253 - DNA, 543 bp, Homo sapiens
aatgctttaacaattatatttgtctttgggaggccgaggcaggtggatcttgaagtcaggaaattgagaccattcctggctaacatgatgaacccccgtctctactaaaaatacaaaaaattagctggcgtggtggcaggcacctgtagtcccagctacccgggaggctgaggcagcagaatggcgtgaacccgggaggtggagcttgcagtgagccgagattgcaccactgcactccagcctgggcgacagagtgagactccatctcaaaaaaatataaataaaataaaataaaacaattatatttgttcttatactttaggagaattacctaagttttattaatattggtaaaataaagatactatgtcatatgatcagaaggaaattcaagttaaagtacagacttattgaaggaggsacaattattacaattacaaccaagagaaaaagaattacctaaatttttctatttaaatacaatacaaaacatatcttgcttttatttggagaaaaatctgagttttaaataaatctgccaac

SEQ ID NO: 21254 - DNA, 561 bp, Homo sapiens
tgttctttttagatccagggcagtggttctcaagcttgaatatacrtaaacataaccaggggagcatgttttaaaaggcggattttcagtccctgcccctagagggtctcagtctatctacattcttgacaaatatttcagatgatttggggcccatggaccacacttttgggaaacacatccctattttgttgcatttgttgtctaagcatgttcattgttatgtgggggcaaattcacttatttataagatgcccttattgtcctgattcactgtgttgcccttcctcagattcttgactagtgttagtctttgggagggaccagaccagattgttccaggatgccctgtgggttgaagtcagtggacctctattgtccccactactacccctgggactcccctttggggaccatgacactgtgggctcatcttgaagcagcagccatctcttttgatcctaggcttttcttacattggtcacaagctccagtctttggctttactctttagggtactctatagctaaagcatgggggactgggtcctcttaagcccag

SEQ ID NO: 21255 - DNA, 561 bp, Homo sapiens
tgttctttttagatccagggcagtggttctcaagcttgaatatacataaacataaccaggggagcatgttttaaaaggcggattttcagtccctgcccctagagggtctcagtctatctacattcttgacaaatatttcagatgatttggggcccatggaccacacttttgggaaacacatccctattttgttgcatttgttgtctaagcatgttcattgttatgtgggggcaaattcacttatttataagatgcccttattgtcctgattcactgtgttgcccttcctcagattcttgactagtgttagtctttgggagggaccagacyagattgttccaggatgccctgtgggttgaagtcagtggacctctattgtccccactactacccctgggactcccctttggggaccatgacactgtgggctcatcttgaagcagcagccatctcttttgatcctaggcttttcttacattggtcacaagctccagtctttggctttactctttagggtactctatagctaaagcatgggggactgggtcctcttaagcccag

SEQ ID NO: 21256 - DNA, 560 bp, Homo sapiens
ctccagcctgggtgacagagtgcgattgtctcaaaaaaaaaaaaaaaaggaatagctagagtagctactgtttgtggagtgatcacactgtgtgtcaggtgctggaccaagtatttcacagccattatctcatttaatccttaccaggtcctgtaaagtgggtgccagratgatccccattttgcagataagcaaaactgaggctttgggagggttaaagactgtgctcaaggtcacacacatcccctgcagtttcaggactcaacccagacagtccgggcccagggccaccgctctcagccactgccctagatcactcctaagatactgcttattggagtgcagaaggaaggtcaaaggcccaggctacaggaggtggcttcctggagcttaagtggcctggccttggtcccctggcatgtcatgtggctggcaggcttccatcacccctttcccaagtccattaactcctgtctgtgtttagggagctcataaagggaatctgcgtgaaggacaggaatgaaaatgagattggtcattcccgggtgagcagaggcctc

SEQ ID NO: 21257 - DNA, 593 bp, Homo sapiens
tgtcctgaaggagtcggggaagagtgcccattgggggacagtgggtgtgtggggggaaatgttccagacagatcgtttagtgttttttttgttttgtttttgttttggctttatgttttatttaagacagggactctgcagtttctatcctgacttcaattaagaaggcaaaggctcttgcataattagcaaatgtttagattaccccttgatgatagtccctccattctgagaagcagaggactttgcaatgttgtgttaaggtgaacagagatgtcagagaaggtctggctctgtgtgtatgtgtgtgctgagggggaggcatagcattttgctcagtcaggctgtctccagcatgtatgagcctggggctctgtaagccaaggcagcgtgtgttcagccagccaagctgactccttttaggttcatgtagagcatgggaaagtgaactcttkcccctcctcccactcttgcttcagctgggactgagataaatgcctttggtctttgaagcagcctgcaggaggccaggtggcagggagaggggaagtctgttttggcagtggactctttctgtctgccttctgacttct

SEQ ID NO: 21258 - DNA, 542 bp, Homo sapiens
gctggtctcaaactcctgggctcaagtgatccttccaccttggccacccaaagcactgggattacaagcgtgagccactgcacccagcctcagtctctaaattctatgttccatttctccctcagcagccttgctcacctgccctgaaacccccagtactgtaccggaagggtaggcatagtcagccaaacacaggatagggacmaacagcttgcatccccgaagagctggaagaggagaagatatgctggcagggtctcttcatttttccacgtttctctgaacatttatgcaatctcagataagagtaggattttccccaaaattctctcttcactaaaaattgagggcaaacgtcgtaagttaatctttcactttatccactaagcaaaggttggaaatggatgtgtgtgtcaaagaaaatgaaagaccaagttttgcagggtggaagaaaggttatggttaaaacgccactactagacctgttcaagtaagactgagaatgctgggattggaagagcacttttgattctcatgggatt

SEQ ID NO: 21259 - DNA, 596 bp, Homo sapiens
tgtgactgtcacagtagatatgggcatgggacctggacagggaaaaagagcagctgaataatgttaacagtggtggtaactagggtaggatgcaatagtccacactagttatttgtataaattttatattacaattttaaatcaatacctttcctcytctgcacctacaacttgacaatgactgattttttaatgtttctagaatttggccttttccagaatcccttatcattaaaatcatacagtatatcatcttttcagactggcttctttcactgagcaatgtgcatttaaggttttgccatgtattttcatggcttgataattaacttttttattgctgactaatatttcagtgtgtacataccaagtttgtttacccttacacaatttgaatgatgattggttccttccaatttttggcaattatgaatcaagctgcaataagcatttatatgcagcttttgtgtggacatgtattttcaacccatttaggtaaatacctaggagtgaaatcgttgaatcatttggcaagactcaaactgtgttccaaagtggttgcatcattttgcattcccaccaggaatgaatgacag

SEQ ID NO: 21260 - DNA, 596 bp, Homo sapiens
tgtgactgtcacagtagatatgggcatgggacctggacagggaaaaagagcagctgaataatgttaacagtggtggtaactagggtaggatgcaatagtccacactagttatttgtataaattttatattacaattttaaatcaatacctttcctcttctgcacctacaacttgacaatgactgattttttaatgtttctagaatttggccttttccagaatcccttatcattaaaatcatacagtatatcatcttttcagactggcttctttcactgagcartgtgcatttaaggttttgccatgtattttcatggcttgataattaacttttttattgctgactaatatttcagtgtgtacataccaagtttgtttacccttacacaatttgaatgatgattggttccttccaatttttggcaattatgaatcaagctgcaataagcatttatatgcagcttttgtgtggacatgtattttcaacccatttaggtaaatacctaggagtgaaatcgttgaatcatttggcaagactcaaactgtgttccaaagtggttgcatcattttgcattcccaccaggaatgaatgacag

SEQ ID NO: 21261 - DNA, 596 bp, Homo sapiens
tgtgactgtcacagtagatatgggcatgggacctggacagggaaaaagagcagctgaataatgttaacagtggtggtaactagggtaggatgcaatagtccacactagttatttgtataaattttatattacaattttaaatcaatacctttcctcttctgcacctacaacttgacaatgactgattttttaatgtttctagaatttggccttttccagaatcccttatcattaaaatcatacagtatatcatcttttcagactggcttctttcactgagcaatgtgcatttaaggttttgccatgtattttcatggcttgatrattaacttttttattgctgactaatatttcagtgtgtacataccaagtttgtttacccttacacaatttgaatgatgattggttccttccaatttttggcaattatgaatcaagctgcaataagcatttatatgcagcttttgtgtggacatgtattttcaacccatttaggtaaatacctaggagtgaaatcgttgaatcatttggcaagactcaaactgtgttccaaagtggttgcatcattttgcattcccaccaggaatgaatgacag

SEQ ID NO: 21262 - DNA, 596 bp, Homo sapiens
tgtgactgtcacagtagatatgggcatgggacctggacagggaaaaagagcagctgaataatgttaacagtggtggtaactagggtaggatgcaatagtccacactagttatttgtataaattttatattacaattttaaatcaatacctttcctcttctgcacctacaacttgacaatgactgattttttaatgtttctagaatttggccttttccagaatcccttatcattaaaatcatacagtatatcatcttttcagactggcttctttcactgagcaatgtgcatttaaggttttgccatgtattttcatggcttgataattaacttttttattgctgactaatatttcagtgtgtacataccaartttgtttacccttacacaatttgaatgatgattggttccttccaatttttggcaattatgaatcaagctgcaataagcatttatatgcagcttttgtgtggacatgtattttcaacccatttaggtaaatacctaggagtgaaatcgttgaatcatttggcaagactcaaactgtgttccaaagtggttgcatcattttgcattcccaccaggaatgaatgacag

SEQ ID NO: 21263 - DNA, 1114 bp, Homo sapiens
attgtcggccctggagcccatcgattcttgaaacatatagtcataaatgagattttctcaaaacctgcataataacgcaggcaaaacacattgaaattttacattctgaatataaattctgaaaatgaatatgtctacttgcttttacaatgagaaaccatatatagtccggagagttttcagttttgatatctgtgtgtgtgtgtgtgtgtgtgtgtgtatgtgtgtgtgtaaatgatcatcacatagatatctctggctagaagaaactttgtcatatttgttctaagattaaatgtttgtcccatatttccaatactcattttcaatctgatttaaattttttgatctatgatattaactgtctagaaatgactggggaaaagaaattagttttgagcccttactttgtgttcagcataaatggtgattatattttttcttttaattcaaaataacattaagagatatgaattgctatttctattttatgtatgagaaaaactcatattcagagacattcggtaaaattcttacacactgcctgtaaatggatcatcaaaaatttgaaagcggccaggtgcagtggctcactcctgtaatcccaacactttgggaggctgaggggggctgatcacctgaggtcaggagtttgagaccagcctgaccaatatggtgaaaccctgtctctactaaaaatacaaaaattagctgggtgyggtggcgggtgcctatagtcccagctacatgggaggctgagacaggagaatcgcttgaacccaggaggcagaggttgcagtaagccaagatcgcgccactacactccagcctgggcaacagaatgagactccatctcaaaaaaaaaaaaaaaagaaatcgaaaccacaattgtctttattttcatcaaagtataaagttgaatttgagctttcagtcttcaaggatcagggaggaacaatgcttcagttaacgtttcatagcataatgcatttgtttttattactccctgatgcatcccttttagctttactctcttaaggaccacggaatttatgaccagtgctgatgatcaggtacccagattagaataggaactctgttgcatagtatgata

SEQ ID NO: 21264 - DNA, 1114 bp, Homo sapiens
attgtcggccctggagcccatcgattcttgaaacatatagtcataaatgagattttctcaaaacctgcataataacgcaggcaaaacacattgaaattttacattctgaatataaattctgaaaatgaatatgtctacttgcttttacaatgagaaaccatatatagtccggagagttttcagttttgatatctgtgtgtgtgtgtgtgtgtgtgtgtgtatgtgtgtgtgtaaatgatcatcacatagatatctctggctagaagaaactttgtcatatttgttctaagattaaatgtttgtcccatatttccaatactcattttcaatctgatttaaattttttgatctatgatattaactgtctagaaatgactggggaaaagaaattagttttgagcccttactttgtgttcagcataaatggtgattatattttttcttttaattcaaaataacattaagagatatgaattgctatttctattttatgtatgagaaaaactcatattcagagacattcggtaaaattcttacacactgcctgtaaatggatcatcaaaaatttgaaagcggccaggtgcagtggctcactcctgtaatcccaacactttgggaggctgaggggggctgatcacctgaggtcaggagtttgagaccagcctgaccaatatggtgaaaccctgtctctactaaaaatacaaaaattagctgggtgcggtggcgggtgcctatagtcccagctacatgggaggctgagacaggagaatcgcttgaacccaggaggcagaggttgcagtaagccaagatcgcgccactayactccagcctgggcaacagaatgagactccatctcaaaaaaaaaaaaaaaagaaatcgaaaccacaattgtctttattttcatcaaagtataaagttgaatttgagctttcagtcttcaaggatcagggaggaacaatgcttcagttaacgtttcatagcataatgcatttgtttttattactccctgatgcatcccttttagctttactctcttaaggaccacggaatttatgaccagtgctgatgatcaggtacccagattagaataggaactctgttgcatagtatgata

SEQ ID NO: 21265 - DNA, 1114 bp, Homo sapiens
attgtcggccctggagcccatcgattcttgaaacatatagtcataaatgagattttctcaaaacctgcataataacgcaggcaaaacacattgaaattttacattctgaatataaattctgaaaatgaatatgtctacttgcttttacaatgagaaaccatatatagtccggagagttttcagttttgatatctgtgtgtgtgtgtgtgtgtgtgtgtgtatgtgtgtgtgtaaatgatcatcacatagatatctctggctagaagaaactttgtcatatttgttctaagattaaatgtttgtcccatatttccaatactcattttcaatctgatttaaattttttgatctatgatattaactgtctagaaatgactggggaaaagaaattagttttgagcccttactttgtgttcagcataaatggtgattatattttttcttttaattcaaaataacattaagagatatgaattgctatttctattttatgtatgagaaaaactcatattcagagacattcggtaaaattcttacacactgcctgtaaatggatcatcaaaaatttgaaagcggccaggtgcagtggctcactcctgtaatcccaacactttgggaggctgaggggggctgatcacctgaggtcaggagtttgagaccagcctgaccaatatggtgaaaccctgtctctactaaaaatacaaaaattagctgggtgcggtggcgggtgcctatagtcccagctacatgggaggctgagacaggagaatcgcttgaacccaggaggcagaggttgcagtaagccaagatcgcgccactacactccagcctgggcaacagaatgagactccatctcaaaaaaaaaaaaaaaaraaatcgaaaccacaattgtctttattttcatcaaagtataaagttgaatttgagctttcagtcttcaaggatcagggaggaacaatgcttcagttaacgtttcatagcataatgcatttgtttttattactccctgatgcatcccttttagctttactctcttaaggaccacggaatttatgaccagtgctgatgatcaggtacccagattagaataggaactctgttgcatagtatgata

SEQ ID NO: 21266 - DNA, 1429 bp, Homo sapiens
ccaactactcgagaggctgaggcagaaggatcgcttgagtccaggtggtcaaggctgcagagaaccatggtcacaccactacactacatgtctcattctratgttacccaatttgttggcaaaagcctgttagacgcttggttttcctgacttcaaggcccatgtacttcatccttcatgcccttgaatctgcccttttgtattaggtttaatttgtcatttgagctaagtttcagaaatcttgggcagattttaagtaaactgaataaaaaatagtccattctctcaaatttggattttctttctctagttaaaatggtagcattttcataacagtttagtagagaaaataatttcataaaaagggagttttttaaaaaatcacatctctttatgaatataatgccatgccaaaggcatgtaccttttctcctaaactagggctttttagggttatatagaaagaatcttcacagtctaaagcattttgagtatgttgtgggccagaatacattaactgataatttactatgcatgaatcaattgactaatgtgtcagtgaaggacagatagcaagcaaacacctgcctactataatttattactcaatataaatgaaacttatcacattctctttttctgattaccagaaaaaaaatccttttagttcattttggaagaaaattgaaacctacattaaaagcattacaatttttggtaaaatatacccttgagcaaatatatatgaaaaatgttaattgtaagttggctgtcattcctacctaacatgtagtttatctcaacacaaagctgagcagccaagcacaaagataatgctaatttttttatagccattaatagttaatgctagaaaagctgtcatattttgttttaaaatattccctagaatgtagtatttcatatctatgacatttcataggaatacaaaaatgcatacctctcaacatttataacaacaacaaaatccttcagtgtgatattttggcaaaaataagggagaaagttccaaattttgaataaattaatctttagtactttttcttatagttgaaaaatgagacagaaaaattcttgtgtaagactagacaaatattaaactgctttcacattttgtcttaattactcacttggttacattcctattgaagaaaaagtttatcagtgagtcagtgaggcaccaagatgtcaaagcattaatactacagaataaaaaagcctaataaatacaaatgtccacagaactatttgtacacaaatgtttatggcagctttatttttaatagtaagaaatgagcctagatgttcatcaactgttgaatagataaatgcttgtagtataaccgtccaatggaatagtaatccaatatttaaaaggaatgaattattaatgcaaatgagttaatttcaa

SEQ ID NO: 21267 - DNA, 1429 bp, Homo sapiens
ccaactactcgagaggctgaggcagaaggatcgcttgagtccaggtggtcaaggctgcagagaaccatggtcacaccactacactacatgtctcattctgatgttacccaatttgttggcaaaagcctgttagacgcttggttttcctgacttcaaggcccatgtacttcatccttcatgcccttgaatctgcccttttgtattaggtttaatttgtcatttgagctaagtttcagaaatcttgggcagattttaagtaaactgaataaaaaatagtccattctctcaaatttggattttctttctctagttaaaatggtagcattttcataacagtttagtagagaaaataatttcataaaaagggagttttttaaaaaatcacawctctttatgaatataatgccatgccaaaggcatgtaccttttctcctaaactagggctttttagggttatatagaaagaatcttcacagtctaaagcattttgagtatgttgtgggccagaatacattaactgataatttactatgcatgaatcaattgactaatgtgtcagtgaaggacagatagcaagcaaacacctgcctactataatttattactcaatataaatgaaacttatcacattctctttttctgattaccagaaaaaaaatccttttagttcattttggaagaaaattgaaacctacattaaaagcattacaatttttggtaaaatatacccttgagcaaatatatatgaaaaatgttaattgtaagttggctgtcattcctacctaacatgtagtttatctcaacacaaagctgagcagccaagcacaaagataatgctaatttttttatagccattaatagttaatgctagaaaagctgtcatattttgttttaaaatattccctagaatgtagtatttcatatctatgacatttcataggaatacaaaaatgcatacctctcaacatttataacaacaacaaaatccttcagtgtgatattttggcaaaaataagggagaaagttccaaattttgaataaattaatctttagtactttttcttatagttgaaaaatgagacagaaaaattcttgtgtaagactagacaaatattaaactgctttcacattttgtcttaattactcacttggttacattcctattgaagaaaaagtttatcagtgagtcagtgaggcaccaagatgtcaaagcattaatactacagaataaaaaagcctaataaatacaaatgtccacagaactatttgtacacaaatgtttatggcagctttatttttaatagtaagaaatgagcctagatgttcatcaactgttgaatagataaatgcttgtagtataaccgtccaatggaatagtaatccaatatttaaaaggaatgaattattaatgcaaatgagttaatttcaa

SEQ ID NO: 21268 - DNA, 1429 bp, Homo sapiens
ccaactactcgagaggctgaggcagaaggatcgcttgagtccaggtggtcaaggctgcagagaaccatggtcacaccactacactacatgtctcattctgatgttacccaatttgttggcaaaagcctgttagacgcttggttttcctgacttcaaggcccatgtacttcatccttcatgcccttgaatctgcccttttgtattaggtttaatttgtcatttgagctaagtttcagaaatcttgggcagattttaagtaaactgaataaaaaatagtccattctctcaaatttggattttctttctctagttaaaatggtagcattttcataacagtttagtagagaaaataatttcataaaaagggagttttttaaaaaatcacatctctttatgaatataatgccatgccmaaggcatgtaccttttctcctaaactagggctttttagggttatatagaaagaatcttcacagtctaaagcattttgagtatgttgtgggccagaatacattaactgataatttactatgcatgaatcaattgactaatgtgtcagtgaaggacagatagcaagcaaacacctgcctactataatttattactcaatataaatgaaacttatcacattctctttttctgattaccagaaaaaaaatccttttagttcattttggaagaaaattgaaacctacattaaaagcattacaatttttggtaaaatatacccttgagcaaatatatatgaaaaatgttaattgtaagttggctgtcattcctacctaacatgtagtttatctcaacacaaagctgagcagccaagcacaaagataatgctaatttttttatagccattaatagttaatgctagaaaagctgtcatattttgttttaaaatattccctagaatgtagtatttcatatctatgacatttcataggaatacaaaaatgcatacctctcaacatttataacaacaacaaaatccttcagtgtgatattttggcaaaaataagggagaaagttccaaattttgaataaattaatctttagtactttttcttatagttgaaaaatgagacagaaaaattcttgtgtaagactagacaaatattaaactgctttcacattttgtcttaattactcacttggttacattcctattgaagaaaaagtttatcagtgagtcagtgaggcaccaagatgtcaaagcattaatactacagaataaaaaagcctaataaatacaaatgtccacagaactatttgtacacaaatgtttatggcagctttatttttaatagtaagaaatgagcctagatgttcatcaactgttgaatagataaatgcttgtagtataaccgtccaatggaatagtaatccaatatttaaaaggaatgaattattaatgcaaatgagttaatttcaa

SEQ ID NO: 21269 - DNA, 1429 bp, Homo sapiens
ccaactactcgagaggctgaggcagaaggatcgcttgagtccaggtggtcaaggctgcagagaaccatggtcacaccactacactacatgtctcattctgatgttacccaatttgttggcaaaagcctgttagacgcttggttttcctgacttcaaggcccatgtacttcatccttcatgcccttgaatctgcccttttgtattaggtttaatttgtcatttgagctaagtttcagaaatcttgggcagattttaagtaaactgaataaaaaatagtccattctctcaaatttggattttctttctctagttaaaatggtagcattttcataacagtttagtagagaaaataatttcataaaaagggagttttttaaaaaatcacatctctttatgaatataatgccatgccaaaggcatgtaccttttctcctaaactagggctttttarggttatatagaaagaatcttcacagtctaaagcattttgagtatgttgtgggccagaatacattaactgataatttactatgcatgaatcaattgactaatgtgtcagtgaaggacagatagcaagcaaacacctgcctactataatttattactcaatataaatgaaacttatcacattctctttttctgattaccagaaaaaaaatccttttagttcattttggaagaaaattgaaacctacattaaaagcattacaatttttggtaaaatatacccttgagcaaatatatatgaaaaatgttaattgtaagttggctgtcattcctacctaacatgtagtttatctcaacacaaagctgagcagccaagcacaaagataatgctaatttttttatagccattaatagttaatgctagaaaagctgtcatattttgttttaaaatattccctagaatgtagtatttcatatctatgacatttcataggaatacaaaaatgcatacctctcaacatttataacaacaacaaaatccttcagtgtgatattttggcaaaaataagggagaaagttccaaattttgaataaattaatctttagtactttttcttatagttgaaaaatgagacagaaaaattcttgtgtaagactagacaaatattaaactgctttcacattttgtcttaattactcacttggttacattcctattgaagaaaaagtttatcagtgagtcagtgaggcaccaagatgtcaaagcattaatactacagaataaaaaagcctaataaatacaaatgtccacagaactatttgtacacaaatgtttatggcagctttatttttaatagtaagaaatgagcctagatgttcatcaactgttgaatagataaatgcttgtagtataaccgtccaatggaatagtaatccaatatttaaaaggaatgaattattaatgcaaatgagttaatttcaa

SEQ ID NO: 21270 - DNA, 516 bp, Homo sapiens
atttattgtttatcagttaaccaatattcagtagaactcaactcttaactgtggtgacatgtagatacagtttcctgtctattaccttgacatggcaacatggtcaaaacccttcacttttgcttctcttagctgaatagctctaatcaaaaatgtatggtgacctgtctgcctccctttctgggctttctcaacttcggggtcctgcacccagcccccttccaattctctattctgttccatcaaagcctgctcccgagtaaattcaygtttgcacaaattcctggtcatggcttttgataacactttcaggggcatatgtattttggcagaagagtcaaaagaatggatctctaatacagaatttgaaatactggcacttgacgttgtgggaaaaaaaatatttgagatagggttgtcttcccagcccactgaagtcatgccaaatagacagatgtctatccttacaaaagggtgccacttggttgaactaaaggaaaaaacgactagataagt

SEQ ID NO: 21271 - DNA, 516 bp, Homo sapiens
atttattgtttatcagttaaccaatattcagtagaactcaactcttaactgtggtgacatgtagatacagtttcctgtctattaccttgacatggcaacatggtcaaaacccttcacttttgcttctcttagctgaatagctctaatcaaaaatgtatggtgacctgtctgcctccctttctgggctttctcaacttcggggtcctgcacccagcccccttccaattctctattctgttccatcaaagcctgctcccgagtaaattcacgtttgcacaaattcctggtcatggcttttgataacactttcaggggcatrtgtattttggcagaagagtcaaaagaatggatctctaatacagaatttgaaatactggcacttgacgttgtgggaaaaaaaatatttgagatagggttgtcttcccagcccactgaagtcatgccaaatagacagatgtctatccttacaaaagggtgccacttggttgaactaaaggaaaaaacgactagataagt

SEQ ID NO: 21272 - DNA, 516 bp, Homo sapiens
atttattgtttatcagttaaccaatattcagtagaactcaactcttaactgtggtgacatgtagatacagtttcctgtctattaccttgacatggcaacatggtcaaaacccttcacttttgcttctcttagctgaatagctctaatcaaaaatgtatggtgacctgtctgcctccctttctgggctttctcaacttcggggtcctgcacccagcccccttccaattctctattctgttccatcaaagcctgctcccgagtaaattcacgtttgcacaaattcctggtcatggcttttgataacactttcaggggcatatgtattttggcagaagagtcaaaagaatggatctctaatacagaatttgaaatactggcacttgacgttgtgggaaaaaaaatatttgagatarggttgtcttcccagcccactgaagtcatgccaaatagacagatgtctatccttacaaaagggtgccacttggttgaactaaaggaaaaaacgactagataagt

SEQ ID NO: 21273 - DNA, 516 bp, Homo sapiens
atttattgtttatcagttaaccaatattcagtagaactcaactcttaactgtggtgacatgtagatacagtttcctgtctattaccttgacatggcaacatggtcaaaacccttcacttttgcttctcttagctgaatagctctaatcaaaaatgtatggtgacctgtctgcctccctttctgggctttctcaacttcggggtcctgcacccagcccccttccaattctctattctgttccatcaaagcctgctcccgagtaaattcacgtttgcacaaattcctggtcatggcttttgataacactttcaggggcatatgtattttggcagaagagtcaaaagaatggatctctaatacagaatttgaaatactggcacttgacgttgtgggaaaaaaaatatttgagatagggttgtcttcccagcccaytgaagtcatgccaaatagacagatgtctatccttacaaaagggtgccacttggttgaactaaaggaaaaaacgactagataagt

SEQ ID NO: 21274 - DNA, 510 bp, Homo sapiens
ccactgaatcctggttaatggaccaagttagaacaatcttagaattttctatcgaagagaatcttgatgataacttagtgcagcctcctcattttaccaataaaggactaattgatataatcattgctctttcttggaaaaaaaaacccacaaaatctcctatcttcttgactttttatagggtttttaggtgttttcattctgtaatgttgaaagaggcaatccaccattggctctgagtgtctcctcatgctttgctgggtttgccaagaagtgcaagatgctgacagcactttactcaggccacttctcaaggctataattgaagcaagcaacattgagggataaggtcatgaccccctccaggacaaagaayagacttgcttagtgcttgttacaaaatcggtggattccccaaactcagtgttcctctgctgcagtggaaacctggccacaggtgcagccttcatctgcacccatcactgccccgtaaggcttcagggccaaggg

SEQ ID NO: 21275 - DNA, 1245 bp, Homo sapiens
catcttcctgctagctgtgactcccttgcaccctcgaggattatttcaagtttttctagcctctggtgatacagtaaacttctctgccctccagtgggctacaataatattttctccaattacatctgaaccttgaccttgagaagagggccctccttccaagttcgtccttctttcgtctgctccctctgttttagggtacacttcagtgttctctttacatctttgtagctgctttcctctcacaacggaaaattcttcattttaaacatctcctgcttaaattactgtgtgatttttgtctcccgattgggcccagactcatacattgactgacaaagtatgacattatcatataaaaaactatgatggttgtaattgtaccctcagttatacttcttatttatattaacatattcaacgttttaaaatgtcatcaagtttctttgtgcttactatcatcacagaaataatttatataatgtcactgagcaccagtgatataaatggtattaataccataggtttgttttcaattttattcaaatttctactttgcttgtaatctgatttctataagaccaacatttataaaacagtcaataaatcatatttataaatatttctatctcagctgttgagcttttaaattttgggagatagatctaaaaagtacagtgtaagtgataaaatattttcttgtatctatagtgttacataactaggaagtattttttwattccaaatagtaactatttataatttttactaccttgggatcaaggtgacattgatttctattgtactagtcaagatttttactttgaccacaagacagcaactccttcacaggtaaaacatgtgatgaaccatcgtgcagataacaggaaaatagtagatgtctccatatcaaaaatgtctgtatatcaaagatgccattggctgagaatcacaatgtaattatttatgtaatgtaggaagaaaagaaagtgctgaaactaattgtaagacactgtaaattgtaaggcacagtaaatgtaaaatattctgatttcacagatgttaaaatgtgaaaaaatatgtctcttagagttgatgaaatatggtagaactctagataatttttagaatcaatatcctcggtattgctgcccttacaaaattatcaatattttagctgaaggaaaaactactttgtgaaaatttaccaaaatacatgcattgcagatattctacaaaagactt

SEQ ID NO: 21276 - DNA, 523 bp, Homo sapiens
aagatttaggggctccttcaggagaacaatgtttccgaacatatccgctcaacatttatcatctcatctcagatgtcccctgacatgaatcatgtctttgtgttctgtctgacctgtagagcaatgctgagaattgctgtgatcagatgctagagcccaagaagaagcagaatgttatcatatggagtacacatgtacatattggtctgatattccgcacactttttagcagagaatttttgactaaaagctcattgaggaccwtatccacaaaacccttcttggaactttttaaagatgaaaaaaaaaaatagaaagtatcttatctactttaaaaatgaatagcagggaaagatgaaaagatccactaagtcacagtagaaaggaatattattcatgaaaactgaaggtgttgagaaaagggagatggagatttggttccctgccttcattcttgtcctgtgtttcagtattaatacaaaggcaatgaaatggagataaagaatgtattgataattatgct

SEQ ID NO: 21277 - DNA, 588 bp, Homo sapiens
aatacgtaccagtgtgtgaaaactcagattgagccataatgtcactggagtgcctttcgcaagcagtcacaacagttgacttcctaaatggaagctgggtcggtgtggcgctgtggagcaggaggcctggttcccgtcccgagtcttgtgcttctgtaaatgagagttactcttgtccagtactgttacagagttcggagcctcagattttgaaagcagctgaacaacaaggccctttccacaaatcggtgactcttcttcastgtctcagtggctggtcttaagcaagtttaaagtactgttttaagttctatggctgtgttgtgccaaccccctattaacctcagtaggggaggcaccaggttcaaggggcctgagaagagacccacagagccagcaaacagggatgtgggctttattaggggcttacatacaggggaacagtccagaggcggcaggctggacaggagaactgcttttcgtacagaaacagatggttcagtggcagcggctgaacaacacagcccacggcccaggtggggcaggaaaaccatcaccacttataaacagcatgcagtttatatagca

SEQ ID NO: 21278 - DNA, 574 bp, Homo sapiens
atgagctcatctactagaaggcctaggctccttcccaaatccagaattcctccgagtatcatttcttctttgtgtcccacagctccaaatttctttgagttctctcttctgcaccaaactagctctgcatcagatacagttcccacaaatcccatctttctaggttctctcaaaaataagcacatagacaatatttcttttcacagtttttctactattatctttgatgctgtctaactgcatagtcacaagggaacttcatgagcacagactcatgataaagagaagatggagtaggactgccattttctaattcagcaagaagtcaagaagtataggataggtgtgaaggatggygagatctgtaaatgtgtaagcttcataacttctctgtgacttgcttagctttattctgtttttttttttgttggcaaactgtagctaagcatgaaataaaatagaagttttcagggtcaatgagaacattttatctggctacataaaaaagatgattgcctttagcatattcggtgcataaactatgtcatgtaccagacactatagtaggtgctat

SEQ ID NO: 21279 - DNA, 580 bp, Homo sapiens
aaaacatgttcagtgtcatcagtcattggggaaatgccaatcaaaaccacagtgaaatgctacttttcacccactaggatgcatgtaatttttttttwaaaaaaaaggaaaaataactattgttgagtatgtggagaatatgaaacagcttttacaaaaatgtccacttaaaagtaattttttaaaattgaggtaaaattcacatgatataaaattaaccaatttaaaatgtacaattcagtagcatttagtacattcacaatattgtgtaacattacctgtgtctagttccaaacagtttcatcaccccaaaaggaaatcttgtatgcataaagcatccattccccattttcccttacctctagcccctggcaaccatcaatttgctttttatttctgtggactgtcttttctggatatttcatataaatggaatcatacattatgtgatattttgtgtctggcttctttcacttagcataatgtttttattcatgttgtagcaagtatcagtaccttattcctttttatgtctcaacaatattctgttatgtcaatataccacattctatttatttat

SEQ ID NO: 21280 - DNA, 612 bp, Homo sapiens
gaaataaaaagcatgtagactacaagtaactttggtatgcatgaatatcagaacatacaattatttttcaaatgtgactataaagattaaagcaattgctttgaaagaatttatggagaaataatgtaaaaaataacaaaaagaaaaatctgtaactaaaattccagatagtttcagcaaagttggtagggaaagtttttagcagagtgaaaacaaagttaagagagagtctaagataaaatgtttacagcatacatgcccacaaaacaagaaaagcaacaaaataaagcagatcataaaatagcaaactgagcagagaatagagatacacaaatcacagaagaataagattcataatactcagtgttaaagagtaggtgggggaagtaagcactttcatgttgatatgttggttcagcctttgtgcagagcaaattgacagtatctatgaaaattttataccccttttcccataaattctgcttctatgaccccatcctatagacatacccttatctatactcaaaagaagatattcctataatcccagcactttgggaggcccaaggtgggcgaatcgcttgrgcccaggaatttgagaccatactgggc

SEQ ID NO: 21281 - DNA, 554 bp, Homo sapiens
agcctgtgctttagcaagcaggaggctgccagcatgtgaagttagttagtacatgataggttaggtgaggttaagaagaaatagatagtgttatacccacaaactgtgtggtagtgtcagagaggtgtttcacatgtgtttcaatgtgatagatctaatgtactcttctgtttttaaaagagaaaaaaaaatagtacatttcccacccccaacacccgtgcagtagtttttacttgtagcagttctgaatcctggtaacatattaaaattacctgtagaattttaaaaaattgctaggggacaaacttcattcctagcartctaagataacagacctgggcattagtattaagggctctacagctaatctaacttgcaaccaagaataggaaccactgctttatagcagtgcatcagaatttcctgcagggctatttattaggtctgggctagggcttgagaatttgcatttctaacaagttcccagttgatcttactagtaaggcatcacattttgagaatcaccatgaaggcaatcttaaaaaatcatctga

SEQ ID NO: 21282 - DNA, 554 bp, Homo sapiens
agcctgtgctttagcaagcaggaggctgccagcatgtgaagttagttagtacatgataggttaggtgaggttaagaagaaatagatagtgttatacccacaaactgtgtggtagtgtcagagaggtgtttcacatgtgtttcaatgtgatagatctaatgtactcttctgtttttaaaagagaaaaaaaaatagtacatttcccacccccaacacccgtgcagtagtttttacttgtagcagttctgaatcctggtaacatattaaaattacctgtagaattttaaaaaattgctaggggacaaacttcattcctagcagtctaagataacagacctgggcattagtattaagggctctacagctaatctaacttgcaaccaagaatakgaaccactgctttatagcagtgcatcagaatttcctgcagggctatttattaggtctgggctagggcttgagaatttgcatttctaacaagttcccagttgatcttactagtaaggcatcacattttgagaatcaccatgaaggcaatcttaaaaaatcatctga

SEQ ID NO: 21283 - DNA, 624 bp, Homo sapiens
tgactaagttggaattactgcacaggttgagtatsccttgtgtgaatgcttaggaccagaaatgtttgggatttcagaatattttcatatttataatgcagtatcttggggacaggacctgagtctgtacaccctatacacatagcctgaaggcaattttatgcaatattttaaagaattttctgcatgaaacaaagtttcaaatgcaccccatcacacaaggtcaggtgtggaattttccacttgtggcatcacgtcagtgctcaaaatgtttcagattttggagcacttcagattttggactttgggattagggatgctcaacctgtattacactaaattcgtttcaattcattattattcttttttactggaaaaagcattgagtgcttgctggctttgtaacaggcacatgctaatgctgtccagagggcttcataaccacgagatatagtgcagttatttcaaatgttgacctaatttttctaaagttacacatgtggagtagaatatcaaatggtttatttacacattatattttgctaaaaatatgctatcatctgtagtgtggaaatagatgacattattagaacagattcatttaccttatctagcattaatttc

SEQ ID NO: 21284 - DNA, 514 bp, Homo sapiens
cggaggttgcagtgagccgagatcgcgccactgcactccaacctaggtgacagagagagactcttgtctcaaaaaaaaagagacaataccaccatctatgtatgcagaccagaatacttccctagatgtaaaaatttaaaaattgatgacttcatggaggaaagatgccatactgtcttgagactgtgaatgggctggcaagtggagcataatcacagggtcagcaacagccaggatcagcacagaccattcctggtcaatagtgagtggagaacacaggcyttgagacagcagtatgggtgggttggagaagatctcttccctttagtgccttggtgttgccttcactctacgtgatttttaacgctatcctgtgtttcctgcttgctaagtgcaaggctctgccaggtgctttagctcatttagttgtcacaacacccctgtgagggaattgactttatcctcattttatagatgagccaacactggacaaagatgttaaataattttccca

SEQ ID NO: 21285 - DNA, 569 bp, Homo sapiens
acaattaccactgcaaaccaggtatcactgtcattttacagatgacaaagcagaagctcagggtaggcaaataccttatcctaggtgataaagctagtaagtgacagagcagagacctgtcactccaacacatgggaaagcacttacagggaaaaacaaatgaaccagtaagttagatctcataattacattttcgctaaaattcagaatttgtgatcaggagaaccttcatgtggttctagttctaccacttctgacctatactatgtttctaacccctccaagcctgtttaaaacacaggtattttgggcctaatagctacataaccccaagacgacaatttaagggctgatatgaacatcataaatggaaaattgtaaactgcaaaatacagtgcctgctctttgtatccagaagtgcttttggtgccatttctctccatatctaaaaagaaccagagtttcaggtagagaaactgtgataaaacaaaagatttcaaagaccaagaattaaatagtattayttaatactagcttaaaatagataaggagacaggattttttagcca

SEQ ID NO: 21286 - DNA, 687 bp, Homo sapiens
acagcaaggtctcttttaattcatgattccaagtctcaggccacagcaggacaagtatcaaaacatctactcttaattcggagttgagatttctaataagaattctattttctccataatcataaaatagcaccaggaaaagtcaatatcttaaaatacagatcattgaaaagtagatctttctgcccttaacataaacaagctgtaaaatctgaagttaaaattattccttgtaccaacctccgaatttacccagagttaacagaaaagttatagcagtgcatgaagctctgaggttttgatgggtgtagatatagacatccaaagctgtcatttcacactagtcagaataccagtcatagaaatcccacaggaaaaatcatttctgaaggtatctggtcttatggattataaaattaaactttcttatcattgtacctaaaccaaaatatgcttcctatacaaagaagttttctttcaagagttaagaccacctcccgacatcccccttaacacacacacacacacacacacacacacasagagagagagagagagagagagaattgagagcattagtggctttctcccttagactgattttttcttactgttattttcagccactttgttaacagtggagttaaagggcaggatagatgtaacacccatttcacatacatgttg

SEQ ID NO: 21287 - DNA, 1358 bp, Homo sapiens
  misc_feature (1)...(1358): n = A,T,C or G
agttagggatagtggttacctcttgtggaaagagtgagtggcattgaagaagggcaatgggagtttctaagatactggaaatattctatttcataacctgaaggaagggcgcatatgctcattttatattcttcttaagctgtacacacacacttttatatttatgatctatttcattaagtaacaagacatatatatgcatttgtaaataagtgagattaacacatttttggatacatataacatatcaaagttgactcaaataattagaaaatctagatggaaatcataccattaaagtaattgagttaataattaataattctacaaagaaaacatgatgcctagatgatgtcaccagtagttccaatgttacactaataatctgcgaggggaaaaaaragagaccattctttaattcatatgatactaggataaccttgctatggtgtacctcatccatgcacacagacaaatagtgtaaacaaaatactaggaagtatacctagcaaagtataaaaaccatgaacaagctcggttagtaatgcaaatttagttcagtgttagaaaatctactgaaattatctccttatcaacaaattaaagccaaaaattatatgattgtctcaaaaggcctataaaattattttacagctgggcacagtggctcacgtctgtaatcccagcactttgggaggctgaggcgggtggatcacgaggtcaggagattgagaccatcctggctaacacaatgaaaccctgtctctactaaaaaaaaaaaaaacaattagctggacgtggaggcgggcgcctgtagccccagctactcgggaggctgagccagaagaatggtgtgaatccgggaggcggagcttgcagtgagccgagatcctgccactgcactccagcctgggccacaaagtgagaatccctctcaaaaaaaaaaaaaaatttacgaaaattaaattattgatatttccacctatgaataaagggtaacttccttaacctgataaaaggagtcgacaaataacttacagcacctatcatgttttgtgattaaaaatattgaaatcactccttttaaaatcaagaaaaagacaagagtaccattgtcactaaactgcttccaaagcttatatggaagagaaaagggcccagtataactaagacaatcccatagaagactaaagtgtgcgaaggtgggaggtggagcttatgtgagtctatctcgtaccagatttgctgtgaagttannnnnnnnnnnnnnnnnnnnnnnnnnnnnnnnnnnnnnnnnnnnnnnnnnnnnnnnnnnnnnnnnnnnnnnnnnnnnnnnnnnnnnnnnnnnnnnnnnnnat

SEQ ID NO: 21288 - DNA, 513 bp, Homo sapiens
atgtaaatgctcacattaaacataaattgcctttatcagaggcaaaccattcatttagcagataaccccagagtactgactattttacaatcccttggtaaaatatgttataaatattgaatctatttagaaaaaatacagtttcccatatcaattcaatctgaaaaaaagatgcttccttaatgaatcttaaagtataaaccatattaataagtagtgctaggtagctatttttacaacaaatagttatrgaatgatattcactgcagctataattccattttcatccatttgagaggactacctaaaatgctggataaaaaatagtaaaaacattcttgtaatatatggctgatatgttgactactaaggaagttttaggtggcaagaaagaaaataagtattgtatcttgtgtttgccctaaaggtttctggtagctttagtagattagaacttgagtgtaattaaagctgcttctagaaaacagggacaaaacagaatctttaactgca

SEQ ID NO: 21289 - DNA, 551 bp, Homo sapiens
  misc_feature (1)...(551): n = A,T,C or G
tgccctcgaggctccaacaatagacctcgctcaatctgcaggttttcttctctaatcgtatttgaattgtaaggtttcctatggcaccatttagtgctagacaattctgttgggaagtcaaatatttttctttcttctttaaagaaaaagtagactattgttcctttcatatttggaaagagagagagagaaagaaactgtatagatttcatgtgacagttaaacaattttttttcttctttggtgcctgaaaacagaggactcanaggaagcaggaatggtgaaatttcctaactctgtgttttgcaaactgaatgtggcagacattgttaggtagtcccctcttatctgctgtgatgctttccatggtttcagttacccacggtcaactgccttcaaaaatagatgagtacaayccagcaagatattttgagaaagagagagagagagactgcattcacataacttttattacagtatattgttataattatttatattagttgctgttaatcttttactttatcaatttatgaattaaactttatcat

SEQ ID NO: 21290 - DNA, 499 bp, Homo sapiens
gtttgttacataggtatacacctgccatggtggtttgctgcacccatcaacccgtgatctacattaggtatttctcctaatgctatccctcctgtagccccccatccccaaaaggccccagtgtgtgatgttcccctccctgtgtccatgtgttctcattgttcaactcccacttatgagtgagaacgtgcggtgtttggttttctgttcctgtgttagtttgctgagaatgatggtttccagcttcatccatgtccctgcaaaggacatgaactcatccttttttatggctgcatagtattccatggtgtgtatatgccacatcttctttatccagtctatcattgatgggcgtttgggttggtttcaagtccttgctattgtgaatagtgctgcaataaacatgtgtgcatgtgaaagaccaaaatcttcaacatcackcttaaggtcccacatggattgattcccacacacatcaccactcttatctcttcctttg

SEQ ID NO: 21291 - DNA, 635 bp, Homo sapiens
gaattcatgcttacttaaatatgtattctctgctattttgtttcaagataataaatttcatttttttaaaaaaacttaaagcatatgtagacattcttgtacataatgtgatagattttcaccaaaatcagacaccctttagaaaattactgtgaaaagctagacacataacttgaaatgcaagccagtcagttgaagaaactgcccagtctaagatctgagaatgatggagcaatatagaagataagttaataaaaaaaataggctattctgcttgactgaatagaaatggaatgttttaggagaatggaactcttgaacctaatcttgtataagaagacatgggatgtatayagttaattcacttgtttatggagtgatgatttgcttaattatctcatttcctttttacagtaagaaatctaaaagctaaagcccatgtaagtattttatataaggaagagtgttggtgtccacaaaatgtataataactggtgtatattttctgcaagaaaaaaatacacagataacagccactgacattatcatcactaaaaatagacaacaatagcaacagctacatgaattggtgtcatgcttttggcaatatttactaagttcttttataccattca

SEQ ID NO: 21292 - DNA, 463 bp, Homo sapiens
ggtgtggtgggtcacacctgcaaccccagcactttgggatactgaagcgggaggattaattgaggccaggagtttgaggccagcctgtgcaacacagtgaggccctatctctacagaaaattatgaatttagctgactgtggtggtgctcgcctttagccccagctactcaggaggctgatgcaggaggatcacttgagcccagacataccagactaacagactaaagtgaacagttattgcaccactgcactacagcctgggtgacaagcaagacactgtctccaaaaaaaaaaaaaggtatatgcccagatactcccatcattcctgaagcaactccaagtagatgtctctttgtaatgtgatagtaaactcacctgggaagagmaaacaaaacaaattcatttattcaatgcatgtttgttgatcacctttcaagatccaagtaccatttcacatgttgg

SEQ ID NO: 21293 - DNA, 1466 bp, Homo sapiens
tttagtagagacagggtttcaccatattggtcaggctggtctcaaactcctgacctcaggtgatcagcccccctcagcctcccaaagtgttgggattacaggagtgagccactgcacctggccactttcaaatttttgatgatccatttacaggcagtgtgtaagaattttaccgaatgtctctgaatatgagtttttctcatacataaaatagaaatagcaattcatatctcttaatgttattttgaattaaaagaaaaaatataatcaccatttatgctgaacacaaagtaagggctcaaaactaatttcttttccccagtcatttctagacagttaatatcatagatcaaaaaatttaaatcagattgaaaatgagtattggaaatacgggacaaatatttaatcttagaacaaatatgacaaagtttctcctagccagagatatctatgtgatgatcatttacacacacacatacacacacacacacacacacacacacacacacatatcaaaactgaaaactctccggactatatatggtttctcattgtaaaagcaagtagacatattcattttcagaatttatattcagaatgtaaaatttcaatgtgttttgcctgagttattatgcaggttttgagaaaatctcatttatgactatatgtttcaagaatcgatgggctccagggccgacaatgccctagcggaaatcattacctgccagggatgaaacagcactgcatctacattttcctcatatcccactgtatttctaaaagcagcacttagcatagggcattggctgcacacgcagcatcatagatggtcttaatgaaatcagatgcaatccagtcaaagcaacgcaaaggcacaggacccaagaaagcatttcgtgggcatcctcctagggtttcacagccagaatcagaaaggaagcaatccaaggaaaaaagccacagtttattatggaaaatgtgttctgggtgtatggaagggctaactgtctgaacaaaatgctggaagccaggcatctcactgttctgctttgaaaaagtgagagtcccatggaatggattaagtatgaaacttcccccatgtgtgataaagtcccactgggaggtggtaacacacgctttccacgttttcaaagtgttccatcccagaacgtcaggaggattagggggtctgtgtyaccacagacagcagtcacatttgttgatggatcttcagtcttggccaatgttatcctgcctgctgatggcagaacaccctccaagacagtttctttgtaaagcctgaatagatgccttccctggccacttctctcagttcctagaaaaaatgcccacctttttttttttttttttttgagacggagtctagctgtgtcgcccaggctggagtgcagtggtgcaatctcggctcacagcaacctctgcctccaaggttaaagcgattctcc

SEQ ID NO: 21294 - DNA, 1466 bp, Homo sapiens
tttagtagagacagggtttcaccatattggtcaggctggtctcaaactcctgacctcaggtgatcagcccccctcagcctcccaaagtgttgggattacaggagtgagccactgcacctggccactttcaaatttttgatgatccatttacaggcagtgtgtaagaattttaccgaatgtctctgaatatgagtttttctcatacataaaatagaaatagcaattcatatctcttaatgttattttgaattaaaagaaaaaatataatcaccatttatgctgaacacaaagtaagggctcaaaactaatttcttttccccagtcatttctagacagttaatatcatagatcaaaaaatttaaatcagattgaaaatgagtattggaaatacgggacaaatatttaatcttagaacaaatatgacaaagtttctcctagccagagatatctatgtgatgatcatttacacacacacatacacacacacacacacacacacacacacacacatatcaaaactgaaaactctccggactatatatggtttctcattgtaaaagcaagtagacatattcattttcagaatttatattcagaatgtaaaatttcaatgtgttttgcctgagttattatgcaggttttgagaaaatctcatttatgactatatgtttcaagaatcgatgggctccagggccgacaatgccctagcggaaatcattacctgccagggatgaaacagcactgcatctacattttcctcatatcccactgtatttctaaaagcagcacttagcatagggcattggctgcacacgcagcatcatagatggtcttaatgaaatcagatgcaatccagtcaaagcaacgcaaaggcacaggacccaagaaagcatttcgtgggcatcctcctagggtttcacagccagaatcagaaaggaagcaatccaaggaaaaaagccacagtttattatggaaaatgtgttctgggtgtatggaagggctaactgtctgaacaaaatgctggaagccaggcatctcactgttctgctttgaaaaagtgagagtcccatggaatggattaagtatgaaacttcccccatgtgtgataaagtcccactgggaggtggtaacacacgctttccacgttttcaaagtgttccatcccagaacgtcaggaggattagggggtctgtgtcaccacagacagcagtcacatttgttgatggatcttcagtcttggccaatgttatcctgcctgctgatggcagaacaccctccaagacagtttctttgtaaagcctgaatagatgccttccctggccacttctctcagttcctagaaaaaatgcccacctttttttttttttttttttgagacggagtctagctgtgtcgcccaggctggagtgcagtggtgcaatctcggctcacagcaacctctgcctccarggttaaagcgattctcc

SEQ ID NO: 21295 - DNA, 535 bp, Homo sapiens
gcccaggctggagtgcagcggtacaaccttggctcactgyaacatccacctcccgggttcaagcgattttcctgcctcagtctcccgagtagctgcgactacaggtgctcgcaaccatgtttggttaatttttgtatttttagtagagtcagggtttcaccatgtgggccaggctggtctcaaactcctggcctccagtgatctgcctgccttgtcttcccaaaatgctggggttacagacatgagccactgcgcctggcccctaattattttttatctccttaacttttcactgaaagaggtgtgttgaatctctcacagtgatgatagatttgttagtatcttctgagagtttagcaatttttgtgtaattttgatgctatttttaagattgcttaaactttagaataattatatacacaatttatctttatgtagcactctctatcatctctaataatgctttccattctagtgtattttgtcggctgtttttatatcaaatttaggtttcttttgagtggttttactggca

SEQ ID NO: 21296 - DNA, 535 bp, Homo sapiens
gcccaggctggagtgcagcggtacaaccttggctcactgcaacatccacctcccgggttcaagcgattttcctgcctcagtctcccgagtagctgcgactacaggtgctcgcaaccatgttyggttaatttttgtatttttagtagagtcagggtttcaccatgtgggccaggctggtctcaaactcctggcctccagtgatctgcctgccttgtcttcccaaaatgctggggttacagacatgagccactgcgcctggcccctaattattttttatctccttaacttttcactgaaagaggtgtgttgaatctctcacagtgatgatagatttgttagtatcttctgagagtttagcaatttttgtgtaattttgatgctatttttaagattgcttaaactttagaataattatatacacaatttatctttatgtagcactctctatcatctctaataatgctttccattctagtgtattttgtcggctgtttttatatcaaatttaggtttcttttgagtggttttactggca

SEQ ID NO: 21297 - DNA, 535 bp, Homo sapiens
gcccaggctggagtgcagcggtacaaccttggctcactgcaacatccacctcccgggttcaagcgattttcctgcctcagtctcccgagtagctgcgactacaggtgctcgcaaccatgtttggttaatttttgtatttttagtagagtcagggtttcaccatgtgggccaggctggtctcaaactcctggcctccagtgatctgcctgccttgtcttcccaaaatgctggggttacagacatgagccactgcgcctggcccctaattattttttatctccttaacttttcactgaaagaggtgtgttgaatctctcacagtgatgatagatttgttagtatcttctgagagtttagcaatttttgtgtaattttgatgctatttttaagattgcttaaactttagaataattatatacacaatttatctttatgtagcactctctatcatctctaataatgctttccattctagygtattttgtcggctgtttttatatcaaatttaggtttcttttgagtggttttactggca

SEQ ID NO: 21298 - DNA, 535 bp, Homo sapiens
gcccaggctggagtgcagcggtacaaccttggctcactgcaacatccacctcccgggttcaagcgattttcctgcctcagtctcccgagtagctgcgactacaggtgctcgcaaccatgtttggttaatttttgtatttttagtagagtcagggtttcaccatgtgggccaggctggtctcaaactcctggcctccagtgatctgcctgccttgtcttcccaaaatgctggggttacagacatgagccactgcgcctggcccctaattattttttatctccttaacttttcactgaaagaggtgtgttgaatctctcacagtgatgatagatttgttagtatcttctgagagtttagcaatttttgtgtaattttgatgctatttttaagattgcttaaactttagaataattatatacacaatttatctttatgtagcactctctatcatctctaataatgctttccattctagtgtattttgtcggctgtttttatatcaaatttaggtttcttttgagtggttttaytggca

SEQ ID NO: 21299 - DNA, 1169 bp, Homo sapiens
agtcaaatcctcccctggggagcagctaggtgcyagtgtggttctgaccattggcatgcacccgagagtcagactgagaccacatgactagtttgggccaataggtaatgaatggacgtactgtgtctcgttgaggctaaggcagctaagaaccattggtgcctcttgagccactctggtgactttggtggccacatagtccaggtgccatacccaggaaatggaggagtgtggcccagtctgcatcagactttccatgaatgagaataaacctattcctcacttgaggtactgagagttggggggagttgaggaaaccagcaatgaatatagtcaaaatcacccttaaaaacattcacggctgggagcgctggctcgtgcctataatcccagcactttgggaggccaaggtgggtggatcacctgaggtcaggagttcgagaccagcctggccaacatggtgaaactccgtctctactaaaaatacaaaaaattagccgggcgtggtggcgggtgcctgtgatcctagctacttgggaggctgaggcaggagaattgcttgaacccaggaggcggaggttgcagtgagccaagatggctcactgtgctccagcctgggcgacagagcgagactccatctcaaaaaaaaaaaaaaaaaaattcaaatttctgtttgggaggctgagagaggagcatggcttgagcccaggagtctgaggctgcaataagctctgatcatgccactgcactccagcccaggcaagacagtgagatctggtctcttaaaaaacaaattccaattgaccttgaactcgactatataatagatttgtgcctctgcactatcactcaatatctaacactaccattatgttcctttctgcattggagctgattgctactgctgcttctcaaagtcaactggtgtgtgtttggaggcagtgctgcataaaaatagatatttaatttatgtgcatgttggggagaaggtttgctgagtacatgtccacagatttgtgtaagttaatgtggaagtgttatgccaccagaaacatttattattagcaaaaatactaatgaaaattctctctatagatggtaagattaaaatgcatctttattttttctcctctaagctattatctcccaacttgccaatattgactaca

SEQ ID NO: 21300 - DNA, 1169 bp, Homo sapiens
agtcaaatcctcccctggggagcagctaggtgctagtgtggttctgaccattggcatgcacccgagagtcagactgagaccacatgactagtttgggccaataggtaatgaatggacgtactgtgtctcgttgaggctaaggcagctaagaaccattggtgcctcttgagccactctggtgactttggtggccacatagtccaggtgccatacccaggaaatggaggagtgtggcccagtctgcatcagactttccatgaatgagaataaacctattcctcacttgaggtactgagagttggggggagttgaggaaaccagcaatgaatatagtcaaaatcacccttaaaaacattcacggctgggagcgctggctcgtgcctataatcccagcactttgggaggccaaggtgggtggatcacctgaggtcaggagttcgagaccagcctggccaacatggtgaaactccgtctctactaaaaatacaaaaaattagccgggcgtggtggcgggtgcctgtgatcctagctacttgggaggctgaggcaggagaattgcttgaacccaggaggcggaggttgcagtgagccaagatggctcactgtgctccagcctgggcgacagagcgagactccatctcaaaaaaaaaaaaaaaaaaattcaaatttctgtttgggaggctgagagaggagcatggcttgagcccaggagtctgaggctgcaataagctctgatcatgccactgcactccagcccaggcaagacagtgagatctggtctcttaaaaaacaaattccaattgaccttgaactcgactatataatagatttgtgcctctgcactatcactcaatatctaacactaccattatgttcctttctgcattggagctgattgctactgctgcttctcaaagtcaactggtgtgtgtttggaggcagtgctgsataaaaatagatatttaatttatgtgcatgttggggagaaggtttgctgagtacatgtccacagatttgtgtaagttaatgtggaagtgttatgccaccagaaacatttattattagcaaaaatactaatgaaaattctctctatagatggtaagattaaaatgcatctttattttttctcctctaagctattatctcccaacttgccaatattgactaca

SEQ ID NO: 21301 - DNA, 514 bp, Homo sapiens
gaactattttaaaataaaattttcctaaaaaagaaagaaataaacaagaagcccttttgttggcaatgtaaacctcacagccgtgcttgggaatgacaaccttggagatataaatcactggaacacctcartacagactggtgtaggctttcccttttggaagtctttaaagaaataagctatttctctctaggaattccttagtgtactgctgtcttaagatggataggttggaatccaaaagctctgatgccctctggctccactgttttatgagtctgtaatttagttaatgatattggatatcaattacctatgggtaaacataatttccattcatattaacattctcacagaggcctaatttctttcagacctgtgttgaatcatgcattcatgtgataatagtataaaaagctttattctcatcaagctattctaaatgttttactgtctccaactgtacgaaggagtcaggcttgtttagcatgtgttgctttccagataattttat

SEQ ID NO: 21302 - DNA, 550 bp, Homo sapiens
aagttgtcagtaaatttgtgttgattaatcacctgatttctaaattattttcctaacttttaataccttttaaaacgtaaactttaaaaaataattcatataaaacctgaatatacagaactacaaattgttaacattttggcacttttgatttctctatctccatcttcgtatattttgagttacagatactgagaatctttcctccctaattcagcatgcatatctttctaaatgccctcccccactttttttattccagagtctagtcaaggttcacacgttgcttcaaattctttgtctgtagtttcttctaaccaagagagtcccccctccccctctttgtttttcctgatctttactttttgagggatacggattagttgacataaaatgttccaaattttgttyaggtcttttgatttctaattaaattgttttctctataagaacactacatgaaccatgttgtatagttgtgattgcttcttattagtcattaataatgtcatgtttattagacatgatgttaagtcacttggttagtata

SEQ ID NO: 21303 - DNA, 542 bp, Homo sapiens
tgcaggggtctgtcatggagaagaattcaagctggaagcacctgacctatgattaggtggggttctgctgatcatttttgatgcagagagacttttttttaaatgtctctggtgtctgcttggtccagcatagagacagatggaggtagatgataggccagcaacagtggcaagaagacaaagtgagtcactgctttaggaatgaacccccgagggttctctctgctttctttctccaagtggagtgactatagttcaacaaccaacgtggggaacctagaaacaagaaaagcaaaactcctaatgagcacgctccattggaatcttggagaagtaccaggggactccagccagatcagagctcactgccttggtcacagggggaacccctagacaaggcaggcttggatgaggagccctggaaagggagcatcctgctttccagaggcagagaataaggatggactgtagagtggatattctgggtggaagccagatgtttgtacaataatgayaatcatgtatggtctgtatctgtgcgt

SEQ ID NO: 21304 - DNA, 538 bp, Homo sapiens
  misc_feature (1)...(538): n = A,T,C or G
tttaannnnnnnnnnnnnnnnnnnnnnnnnnnnnnnnnnnnnnnnnnnnnnnnnnnnnnnnnnnnnnnnnnnnnnnnnnnnnnnnnnnnnnnnnnnnnnnnnnnncagcagaaaggagcaaactagaagtgtgccaggccacagggaaattattgagattaaattttgcctaaaaaaaaatctacaaaatggatcttgtacatgcagatggttgagaattaactttagctgatcctagcacatatttaattccattggggattttgtgtttagggatagttcaacttggctgagaatgtgacttttatgtattttacagcaaaactacttgctgctcataatggatgaaattggagaccaaagaggaagaaccttctgggttcctgtcagtctaaatcctgattttaaaagacattcacctgccatgctagtgttgtgtgcttctactggtaggaaaagctaataactaccctgacgagctsaacgagtggcccgaggactgtgatctcacagtttaccgtttttgcagagagcctct

SEQ ID NO: 21305 - DNA, 581 bp, Homo sapiens
atatgaaacaaaacacaggctcaaaatagagtagatggccattgctgcatgtgagtagtttttgccccgacccctggtcagttgattccagtcacgcctctccatgccttcctggggggtgattttgtagggccgttctgcttaatgtttcctgactcaacctgtccctgggttcagaacccagggatcttcttcctcctaattacccttgccctctttagtcctcccaggcttcaggcttccctccaagtggggatcccttcccagataaaagagttgagaagtggyttattgcttttctcaatgtttaaggaaaaccactagaaggctgcttagtatagagtgaaaaccatgtgctttgtagccgttgccatgggctctggagacagctctgcccctgctagctttatgaccttggacatgaataataattagcactgtgggtgcatatactctgtgctgtcatcagaacagcccattaaggtggagtttgctattatctccgtgttgcagatgaggaaagtgagacacagtgagactaagtaagttgcctctggttcacccagaacataagtgatgag

SEQ ID NO: 21306 - DNA, 581 bp, Homo sapiens
atatgaaacaaaacacaggctcaaaatagagtagatggccattgctgcatgtgagtagtttttgccccgacccctggtcagttgattccagtcacgcctctccatgccttcctggggggtgattttgtagggccgttctgcttaatgtttcctgactcaacctgtccctgggttcagaacccagggatcttcttcctcctaattacccttgccctctttagtcctcccaggcttcaggcttccctccaagtggggatcccttcccagataaaagagttgagaagtggtttattgcttttctcaatgtttaaggaaaaccactagaaggctgcttagtatagagtgaaaaccatgtgctttgtagccgttgccatgggctctggagacagctctgcccctgctagctttatgaccttggacatgaataataattagcactktgggtgcatatactctgtgctgtcatcagaacagcccattaaggtggagtttgctattatctccgtgttgcagatgaggaaagtgagacacagtgagactaagtaagttgcctctggttcacccagaacataagtgatgag

SEQ ID NO: 21307 - DNA, 637 bp, Homo sapiens
tctcctaatgctatccctcccctagcccccaacctcccccacaggccctggtgtgtgatgttcccctccccgtgttcatgtgttctcattgttcaactctcacttatgagtgagaacctggagcaattggttttctgttcccgtgttagtttgctgagaatgatggtttccagcttcatccatgtccctgcaaaggacatgaactcatcctttttcatggctgcatagtattccatggtgtatatgtgctacattttcttaatccggtctatcattgatggacatttgggttggttccaagtctttgctattgggaacaatgctgcaataaacatatgtgtgcwtgggtctttacagtagaatgatttataatcctttgggtatatacccagtaatgggattgctgggtcaaatggcattcctggttctagatctttgaggaattgccacactctcttccacaatggaggccaatagtaaatgttctcataattatggaattaaagtaatgttaattttaattttaaagtaaatttaattcctctgaagggtaatcttttcccttttactccatcctagtaaagtataagtcccctaaattatttttcttaaaaaaaaaatcaaacattattcctct

SEQ ID NO: 21308 - DNA, 683 bp, Homo sapiens
atccttagatgtcactacatctaggtgtatatataraatcagcatttagtagctgaagaagtgggtcatttaataggactttagacatctctgagtgtgtttgatcatgatgtccctgtctccactttccttgggcctctgaatgttaggagtactgttctttttctacatcatttgatgactccccctgggttccctggccctctcctttataatcacacacatccatgtgggagggactggattcttgcttgtcttccaaggtggtattattgttttacaggaaaggaaactgaggccgcttccgggaccaaccaagactggactctctgtctccagtataggcccaaatcacactgtctccttcaacattgaacctggccatttagccacacatggatggttcaaaactgagatccaaagctcaaaggaaacctttttgatgtcataactatttgacagttacctgagtagccgtgagggcattaagccaagcaagtagaggttaagctgtctcctgacctgccctcagcccactgctgtctgtgcctttcttacctactgcccaatcaaccctaaaaaaggcttgagcaagggagacatgttgggttaactgtgatccagcgacttgtctttgtgtcttacatgactttgcatctggttattcattgatgtctgatgtt

SEQ ID NO: 21309 - DNA, 533 bp, Homo sapiens
  misc_feature (1)...(533): n = A,T,C or G
atattgatattatgctaagcactacatgtaggtcattgtatttcatttaagccttacaacgatgttatgaggaaagtgtcatcatcatcatcaccatcatcatcatcatcatcatcatgtcatgattagagttgagcaaattgaggcttacagagnnnnnnnnnnnnnnnnnnnnnnnnnnnnnnnnnnnnnnnnnnnnnnnnnnnnnnnnnnnnnnnnnnnnnnnnnnnnnnnnnnnnnnnnnnnnnnnnnnnnatgttattaggcaaaagtggactgtcaaagccaaaaaacccaatttttggcctatttaaattataatgagaatgcaagacttttattagattaattcacactcagatccaattaaatgtcatggacaccaggtaaagtttgastattatcttgttggagcttttggttgagagctggcactacatgttttattgctagtgcattcatctccacaacgtggagggtggctttgttcatagccccttaactaccgaatgcatggccactgctgtctttca

SEQ ID NO: 21310 - DNA, 533 bp, Homo sapiens
  misc_feature (1)...(533): n = A,T,C or G
atattgatattatgctaagcactacatgtaggtcattgtatttcatttaagccttacaacgatgttatgaggaaagtgtcatcatcatcatcaccatcatcatcatcatcatcatcatgtcatgattagagttgagcaaattgaggcttacagagnnnnnnnnnnnnnnnnnnnnnnnnnnnnnnnnnnnnnnnnnnnnnnnnnnnnnnnnnnnnnnnnnnnnnnnnnnnnnnnnnnnnnnnnnnnnnnnnnnnnatgttattaggcaaaagtggactgtcaaagccaaaaaacccaatttttggcctatttaaattataatgagaatgcaagacttttattagattaattcacactcagatccaattaaatgtcatggacaccaggtaaagtttgagtattatcttgttkgagcttttggttgagagctggcactacatgttttattgctagtgcattcatctccacaacgtggagggtggctttgttcatagccccttaactaccgaatgcatggccactgctgtctttca

SEQ ID NO: 21311 - DNA, 632 bp, Homo sapiens
tatattcatttaaaaaaaaatcctggcccarggcccaaaacattcatttccagatcttttaatgggaaacaaacccagagtttgagagtttgaaacacattgattggtgctggggtagttaagaactgtaagtatatttctaaagtgggatgagcatgaagccagggctttcttacaaagcacctttttctctacccttattatctatatttcttttggttttggttgggttttttgtgtggtttaggtttttcatacccagaggttaaaacttccttgatgtactcttttgttgtgaacaaagaggagtcacaggatagagaaatgttagaatgttagaaaactggagtctgatttttataaaaacttaaactttgctgctagtaagattctttcatcttagtaaatggaaacagagactattaaaaatttctgtgctggaggtgattactgacaacaacaacaaaaatacttgctcacaatatttgttatttttcccatctcagaaaaaaacatcagcgaaacaaagagaaagtatactaataaatagaagttttcattctattatattaatgggggaaaactaagtgaaggaataggggaccaaccttggcatttctgaaatttatgca

SEQ ID NO: 21312 - DNA, 522 bp, Homo sapiens
agacatttgggaaatctcagagaaatccagtagaaaggatggccaaaaagagctctgaggggatttcttggccctctctggcctccaaagcactttctaactattctcagaagagcctggagagattgtcartaagacagggacaggaaagttactgttgaaaactcttagagatgctgatgatagaatcgttgatgttcaagaaatattttttctttgatgtttatgagtttatttgctttctacttttctttttcaagccttttgcttcttctgctttttgcatgacatgtcctctatttatgtgaaatccttcctgttgcatgcagtcagatcttattgtcagctgtctcccccggggtcaaagacatccaaacataaatcctctcttgtcggcctcttgcttttctcctaccctttgtgttttgccattttcttcccgccttttgctttcccgcttttgtttttttggggctgtttgatccacctccactccttttttttaggtcataaagttttttt

SEQ ID NO: 21313 - DNA, 286 bp, Homo sapiens
ttctatggtaattggtaaccctcgaggaacctgagaatccatcaccttaatcaagragccattgcaattttccatgttcagttataacttgcaaaaataggatcaaataaagagaaaaatattaagctgcaactacattgtaaatttgttgtatctgcttttcccaaaatgcatagcagagaaaatcaatatcataattttatttattcctactgaaccaattgtgagttttagattttgaaagaaattgggaggaaatgaaggagagtgtttcctataagaaatg

SEQ ID NO: 21314 - DNA, 531 bp, Homo sapiens
ataaagggagggcggggttctgaacactgactcgaggaagtttgggaattctcgtgcccacgttcctgctaaggagtggctagtggagcgtgagagcagttactrtgagccagacccgtgctaagccccacattgaaggcatttcgtgctccaaggaatccgatcactctcattttacagaggacaaaatcagggctcagcgaggcctggtcatttgccaaagcttacacacctaggctctgccagaggcacccttgtcacttaactccccgactgagtccccttaacctccacccagagaggagaggttcccggagtggtttaagagataacaactcccctattgacgggggcgaggagtaggcaaagtgggatccccaagccattgccagagacttccgggttcaagagtggttcaagagtccttgtgtacaaaaagagcagataaagagtttgcttcaggcactctcagcatcaaagtcacctaacatttgcccagcttagggggtggggggagtttggggggtatat

SEQ ID NO: 21315 - DNA, 783 bp, Homo sapiens
tcttacataactgtaactttgttccctttgacttccatcttcccatttctccaccccaacacctggtaaccactgcacagttctactctgtatgtattaaaagttcaaaggtttttaaattacacatataaatgagattacacagtatttatctttttgtgtctggcataatgtcctctaggttcatctatgttttccttcttttctccttcttttctgaggctgaataacattcccttaccacaaattatttatccattcatttgttggccartactttagttgtttcatatctcggctactgtgaataatgctgcaatgactatgggagtgcagatgtctttacaaggtggttatttcatttctttaggtatatatccaggaaaaaaagatctgtgttagatgaagatcttgatggtcaaacaaagaagccaaagccagaagacctgtggcctttattcattcacaggtgacctgggagcctgttagaaatgcagtatcatggcactgcccactccaggcctactgaaccagaatctgcatcagaacagttccccaggattccccagctgatgctgattcaaatgcacattaaagtgtgagaagcactgctctaagtcacttgatatatgcttttcttttgtcagaatatgtagttttcaacatttagtcagaaaggcatatgcgctaagtggttttttacaaccatgatactaggttacgtaaaatcagatttttataattggaaaaaattagagaaattcaagtctagatatctattta

SEQ ID NO: 21316 - DNA, 783 bp, Homo sapiens
tcttacataactgtaactttgttccctttgacttccatcttcccatttctccaccccaacacctggtaaccactgcacagttctactctgtatgtattaaaagttcaaaggtttttaaattacacatataaatgagattacacagtatttatctttttgtgtctggcataatgtcctctaggttcatctatgttttccttcttttctccttcttttctgaggctgaataacattcccttaccacaaattatttatccattcatttgttggccaatactttagttgtttcatatctcggctactgtgaataatgctgcaatgactatgggagtgcagatgtctttacaaggtggttatttcatttctttaggtatatatccaggaaaaaaagatctgtgttagatgaagatcttgatggtcaaacaaagaagccaaagccagaagacctgtggcctttattcattcacaggtgacctgggagcctgttagaaatgcagtatcatggcactgcccactccaggcctactgaaccagaatctgcatcagaacagttccccaggattccccagctgatgctgattcaaatgcacattaaagtgtgagaagcactgctctaagtcacttgatatatgcttttcttttgtcagaatatgtagttttcaacatttagtcagaaaggcatatgygctaagtggttttttacaaccatgatactaggttacgtaaaatcagatttttataattggaaaaaattagagaaattcaagtctagatatctattta

SEQ ID NO: 21317 - DNA, 783 bp, Homo sapiens
tcttacataactgtaactttgttccctttgacttccatcttcccatttctccaccccaacacctggtaaccactgcacagttctactctgtatgtattaaaagttcaaaggtttttaaattacacatataaatgagattacacagtatttatctttttgtgtctggcataatgtcctctaggttcatctatgttttccttcttttctccttcttttctgaggctgaataacattcccttaccacaaattatttatccattcatttgttggccaatactttagttgtttcatatctcggctactgtgaataatgctgcaatgactatgggagtgcagatgtctttacaaggtggttatttcatttctttaggtatatatccaggaaaaaaagatctgtgttagatgaagatcttgatggtcaaacaaagaagccaaagccagaagacctgtggcctttattcattcacaggtgacctgggagcctgttagaaatgcagtatcatggcactgcccactccaggcctactgaaccagaatctgcatcagaacagttccccaggattccccagctgatgctgattcaaatgcacattaaagtgtgagaagcactgctctaagtcacttgatatatgcttttcttttgtcagaatatgtagttttcaacatttagtcagaaaggcatatgcgctaagtggttttttacaaycatgatactaggttacgtaaaatcagatttttataattggaaaaaattagagaaattcaagtctagatatctattta

SEQ ID NO: 21318 - DNA, 830 bp, Homo sapiens
aaccccaatttccagggagggtggagagccccaggtggttttgatcaccaatagcctatggtttaacccatcatgcctatagaatgaggtctccatcataacccaaaaggactgggttcagagagcttctggataacacttcctggaaggtagtgcgcccctccccacatgccgggccccacatttatttctgaactttgtgcaatgtccgctaaaatacaatggcaaatgtaagtgtttccctgcgtgctgtgagctcttccagcaaatgaatgcaactaaatctgggagtggtggcaacctgatttatagccagtggctgagaagcacaggtaaagcaacgtagggcttcccattgttattagtgtgggaggcctgtctggcgggactcggccctttggaatctaatgctatgtcccggtagwtagcgtcaccattgaattagaagacacacatatgttgagaataatcattctggtcatttgctgcatgtcttatcgacaatatgtaatcacatcctttatcctgaccttatggcacctgggttgagaaccatgatttgaaccagacgttggtctgtcactttctcagtttgaaactttattttgcctttagcgttttgctattgctttttcgttgtcttttgtttcgtttcgttcctaagttctggggtatatgtgcaggatgtgcagatttgttactaaggtaaacgtgtgccatggtggtttgctgcacctgtcaacccatcacctaggtattaggcccagcatgcagtagctgtttttcttaacgctctgtctcccggaaggccccagtgtgtgttgttcccc

SEQ ID NO: 21319 - DNA, 830 bp, Homo sapiens
aaccccaatttccagggagggtggagagccccaggtggttttgatcaccaatagcctatggtttaacccatcatgcctatagaatgaggtctccatcataacccaaaaggactgggttcagagagcttctggataacacttcctggaaggtagtgcgcccctccccacatgccgggccccacatttatttctgaactttgtgcaatgtccgctaaaatacaatggcaaatgtaagtgtttccctgcgtgctgtgagctcttccagcaaatgaatgcaactaaatctgggagtggtggcaacctgatttatagccagtggctgagaagcacaggtaaagcaacgtagggcttcccattgttattagtgtgggaggcctgtctggcgggactcggccctttggaatctaatgctatgtcccggtagatagcgtcaccattgwattagaagacacacatatgttgagaataatcattctggtcatttgctgcatgtcttatcgacaatatgtaatcacatcctttatcctgaccttatggcacctgggttgagaaccatgatttgaaccagacgttggtctgtcactttctcagtttgaaactttattttgcctttagcgttttgctattgctttttcgttgtcttttgtttcgtttcgttcctaagttctggggtatatgtgcaggatgtgcagatttgttactaaggtaaacgtgtgccatggtggtttgctgcacctgtcaacccatcacctaggtattaggcccagcatgcagtagctgtttttcttaacgctctgtctcccggaaggccccagtgtgtgttgttcccc

SEQ ID NO: 21320 - DNA, 529 bp, Homo sapiens
gatgcacctaaggcataggaaagagagagggcagaaggagtaagagagaaataggaggaaggagggaaggaaagaaggaagtmaggaaggaaggaaggaaggaaggaaggaaagaaggacgtaaggaaggagaaaacaccggtgttactaaaagcccccaaaaaaatggtttccccctgtgggtaagcctacaatgtggacgaatcttgaaaatattgtgctacgtgttatgtcagtcataacagctcacctattgtgcaattccgcttataggaaatgtccacaatatggtaatctatgcatatgggattgatcgcactaggtagttgctacctagggctgagggtcagggagagggtttgagacagaatgaggagtgactaatgtctacagggtttttctctggccgggagtgataagacgttctacaatgaattgcgaattaaatttgaatgtgcacaaccacaggtatactaaaagccactcaattcacgacttttaattggggaatcttatgtggcgcactctc

SEQ ID NO: 21321 - DNA, 529 bp, Homo sapiens
gatgcacctaaggcataggaaagagagagggcagaaggagtaagagagaaataggaggaaggagggaaggaaagaaggaagtcaggaaggaaggaaggaaggaaggaaggaaagaaggacgkaaggaaggagaaaacaccggtgttactaaaagcccccaaaaaaatggtttccccctgtgggtaagcctacaatgtggacgaatcttgaaaatattgtgctacgtgttatgtcagtcataacagctcacctattgtgcaattccgcttataggaaatgtccacaatatggtaatctatgcatatgggattgatcgcactaggtagttgctacctagggctgagggtcagggagagggtttgagacagaatgaggagtgactaatgtctacagggtttttctctggccgggagtgataagacgttctacaatgaattgcgaattaaatttgaatgtgcacaaccacaggtatactaaaagccactcaattcacgacttttaattggggaatcttatgtggcgcactctc

SEQ ID NO: 21322 - DNA, 547 bp, Homo sapiens
aggcaatgtactttgaatttaatgtacttaaattattttatgtaaaattaaaaccagtatttctagagacatcccatccagcaacctgttctccatctttgcagtttcagtggatttttcacaagtctcaaagtaactataaacacaaaaataaaaaattcccgaattgtacttaaaactttcttctgtgtctctcccatttatctacattgagctattattctatatattttttaaaaatcaatgataggaaaacagaagaaaaaatagaaatgctgggccctgcatttaaatcctgggaagtatcacacactttgtacccacctcccaggatgctgtgagaattaacacacataatgtgagcttcccagcacagtgctctgtgacatactcctgagcacatagtacatgctccacaaatatcgcattaatgcatgtggatgtgctstttttcaaatgcagacttactcagacattgccaccatctccagcctctgtaacctttaaagggcttgcagataatgccacgtttcaggatgttgattgc

SEQ ID NO: 21323 - DNA, 550 bp, Homo sapiens
ggtcacaatgagctatgatcacaccactgtactccagcctgggcaacaaagcaagaccctgtctcttagaaaaaaaagagagagaggaggggtattgcttgctcctttgtccaggctgaacctgaactcctggactcaaatgacccccctgccttagcctcctgagtagctaggacgacaggcatgcaccacggctcctggcttccttcaatagtttttaaagatggcacataggcagaaaagcatggtatgacagccttcagcctgccagtctctttaaccatactgctgcaatcaggactggtggatagttatcaacctcctattcttattcrttgtcatgttgagatactacttgcttctctcctgtattggagcacctgtttttttaaatactgtatgctttttgttttcttggtttactttctattatgaactgagtgtgtctccccaaagttattttatgttgaagccttctatctgagtgtgctgtatttggacataggacctgtgaggaaagtgataaagattaaatgaggtaataagggtg

SEQ ID NO: 21324 - DNA, 629 bp, Homo sapiens
tcccttgaggcctttcaataagaccttacagtttgaatcatacaattacttttctttcctgtaaattttttatgtaccatgtactcttttttttctaatttaacaaggtactttctatttctgtttctaacatataattgctataatataaatttgtttttatatactatagttgtttcgtttgtagacaaggatttctttttattttctggttattttatattattttattattgcttattttcttattcaaaaacttaaatatagtattttataataatgtataatgatrtttattataggtctttaattttaacacagttgtatatgaaaatatgcatcatgaactatttaatgcagtatacatattggctaggaagttttggaattagacaccaccagacatcacttactagtttggtaatctttgaaatcttatttaacctctctaaacatctaagatattttctatcaaacagaataataatcatacctacttcctggttgatatgaaaattaaataaaataatgtacttagcacatttaataatttataaatcagtaaacacataagaaaaaatcagctaaaacaaaaatataagaatacatatattatttttgtggatatc

SEQ ID NO: 21325 - DNA, 638 bp, Homo sapiens
  misc_feature (1)...(638): n = A,T,C or G
tgaatattagttacacattgtggctgcaaacatcttttacataaccttcatgtgtataaagaattcatcatattatcaatcttacctctaaaatgtaggagccagaatgtggccttgactattccaatcagatgagcccccagaaatcttagagtaaatagaaacctgagyaaagagctttgcagactctatatcctggtaaaggttctaagtagaacatctggcttttgacatgactggtaatggggttgcaagctcttcatctgtataaccagttgtggtatcaatgacaggaagcaatgctatacatgctgtaaaggagctgatgtgaactaaattttttttactggctacaaatactcaaatccagttttggtttggtgagcatttctgggtatattgtgagcattatacttnnnnnnnnnnnnnnnnnnnnnnnnnnnnnnnnnnnnnnnnnnnnnnnnnnnnnnnnnnnnnnnnnnnnnnnnnnnnnnnnnnnnnnnnnnnnnnnnnnnntttttctttctttctttctttctttttttttttttttttttttcttgacagggcctcagtctgtcacccgagctgtagtgcagtggtgcaatctcggttcactgcaacctctgcctcccggg

SEQ ID NO: 21326 - DNA, 892 bp, Homo sapiens
gcctactattagatagcagctcctataattgatcttaattgcttgatttgcatgaaaaactatgaagtattgagaatgtataattgaaaatattgcaataataattaccttaaatatttaaatgtgtaaaaagaaaataatattggagcgtcctcttagatttggacattttaaaaatgacaaagtgagattaccaaaattatgctatgtttcataaattaacatttaatgaatcaatgctttgtataaaaagacaaaaataattttttttttttttttttttttgagacggagtctcgctctgtcgcccaggctggagtgcagtggcgggatctcggctcactgcaagctccgcctcccgggttcacgccattctcctgcctcagcctcccaagtagctgggaccacaggcgcccgccactacgcccggctaattttttgtatttttagtagagacggggtttcaccgttttagccgggatggtctcgatctcccgacctcgtgatccgcccgcctcggcctcccaaagtgctgggattacaggcgtgagccaccgcgcccggccaaaaataattttttaaattgagtatgtgctggagttatatacaacctagcaaaggagatatgttaactaatcaatccacaawgaaacaaataaagtgctattttaaaattataaataaaatattacacatgtacagaggagaaaatacttgattgcttgtacctcaagtcataattcatatttatttgtttttggataatttttgaaataaaactaacagtattttcatatataacaaaattagtttacccagagtcttttcttaactacaatggtgtctgtgtagagcatttgggatatcaagaaaagtaagcaaataaaggttc

SEQ ID NO: 21327 - DNA, 892 bp, Homo sapiens
gcctactattagatagcagctcctataattgatcttaattgcttgatttgcatgaaaaactatgaagtattgagaatgtataattgaaaatattgcaataataattaccttaaatatttaaatgtgtaaaaagaaaataatattggagcgtcctcttagatttggacattttaaaaatgacaaagtgagattaccaaaattatgctatgtttcataaattaacatttaatgaatcaatgctttgtataaaaagacaaaaataattttttttttttttttttttttgagacggagtctcgctctgtcgcccaggctggagtgcagtggcgggatctcggctcactgcaagctccgcctcccgggttcacgccattctcctgcctcagcctcccaagtagctgggaccacaggcgcccgccactacgcccggctaattttttgtatttttagtagagacggggtttcaccgttttagccgggatggtctcgatctcccgacctcgtgatccgcccgcctcggcctcccaaagtgctgggattacaggcgtgagccaccgcgcccggccaaaaataattttttaaattgagtatgtgctggagttatatacaacctagcaaaggagatatgttaactaatcaatccacaatgaaacaaataaagtgctattttaaaattataaataaaatattrcacatgtacagaggagaaaatacttgattgcttgtacctcaagtcataattcatatttatttgtttttggataatttttgaaataaaactaacagtattttcatatataacaaaattagtttacccagagtcttttcttaactacaatggtgtctgtgtagagcatttgggatatcaagaaaagtaagcaaataaaggttc

SEQ ID NO: 21328 - DNA, 539 bp, Homo sapiens
tgtaaaatataatttatatttgtgtcatacatcttaatggattttttatttttaataggttttgagtgtctagctggctctttttttatttatacatagagatagtactgctgaaaatatagcaaagcaagcagcaggcattcaataaatgttagctaatagacttcttcatcatcatcgttatcaccatcttttgtcaatgagtaatccaatttggttcccaagaaattcctaatgaagggagaaactgtctgtatcatggttaaaataatgattttctagacagactgatatccatgtgccttatgagaatgtactgtgaaaatccacagaattgagataaatctggttgataatgaccattgtgggaacataaacccagggattgaatctcasgttaataggacagtagaatctaagaaatttgccaaattattaaatgtgaaagaggtggaggagaagtaggtaatattttgaactgggaagttggtaacactacattgctatgaatttaaataagaaagtagtaagatggagct

SEQ ID NO: 21329 - DNA, 1721 bp, Homo sapiens
  misc_feature (1)...(1721): n = A,T,C or G
atgtcatttacttatttaaaagcaatatggcatagcatagataagcaggggtttttttctgatttgagagtaagtttttattcttccttttttwaaaaatatgtttgtttccacaggtttctggggaacaggtggtatttggctacacgcataagttctttagcggtgatttgtgagattttggtgcacccataacctgagcaatatatactgaacccagtctgtagtcttttatttctcacccccttcccaacctttccacctgagttgccaaaggccattgtgtcattcttaagcctttgcatcctcatagcttagctcccacttatgagtcacaacatatgatgtttggttttccatttctgagttacttcacttagaataatagtctccaatctcatccagattgctgtgaatgccattaatttatttcttttaatggctgagtagcattccattgtgtgtgtctgtgtgtgggtaccgagggctcgaatttcgataatacatnnnnnnnnnnnnnnnnnnnnnnnnnnnnnnnnnnnnnnnnnnnnnnnnnnnnnnnnnnnnnnnnnnnnnnnnnnnnnnnnnnnnnnnnnnnnnnnnnnnnctacgttttcttaagtgccttaatttactgaattaccctgcatcctgcagttttaagaggttaatactatcctagtatttgatattcaatttgttgtaaactacatattacactcactgaagtagaaaaataaacaaacaaataaatacattctagtcatttgtattttgagctttaaaataatcggtaacaccaatggtggcaaacatcttactgcctatttggaagggccaattttatatctgaaggacatcagcattatggaccgtagcaacttatggctttcctatgaaagacatttctatatatcacttttctttcgaatgttttatctcaatttgataattcaaacattgtgtctaattcatatatctagtatcagtttctttataaattactttcaagaggtttttttttccatatatgacttgtggtaggcttgagtatgcaatagagtgcacattaattcattcaccaactttacttttagtatgggacttttttagtctagaagagggtgaaaaactaggcatgacatctgctgttggagattacattcttaacagcaaacctagcaaataaatataaagtattaactctgataattgttgtaaaggtgtggtgctatgagatcagataatactgggaattaattaacctagtaagtgtggccagtgaagactcctcttttactggtgacttcgctgagatcatttttcattttctaaactcagtttaacttctcctcctataatatggccagaatggtggggatttcaatttgctagggctaaaaagccctgacttcttgaatttattcttcagtgtacaacaacccccaactcttccatgtaagattttgctactgtcgccacttactgggacataggcaagggtttttgcttctattcagatcctaaatcctgtcattccctatattgatggaaaattttccaatcttgagggaagctgtttcacattctgatgattttggtcaccctttttttagtcttcaagacctagaatcactttcttattacaaaaaaagtaagtttttcctaaattctttggttttttcacctaaagacacctaattctacattaaggacgaggg

SEQ ID NO: 21330 - DNA, 1721 bp, Homo sapiens
  misc_feature (1)...(1721): n = A,T,C or G
atgtcatttacttatttaaaagcaatatggcatagcatagataagcaggggtttttttctgatttgagagtaagtttttattcttccttttttaaaaaatatgtttgwttccacaggtttctggggaacaggtggtatttggctacacgcataagttctttagcggtgatttgtgagattttggtgcacccataacctgagcaatatatactgaacccagtctgtagtcttttatttctcacccccttcccaacctttccacctgagttgccaaaggccattgtgtcattcttaagcctttgcatcctcatagcttagctcccacttatgagtcacaacatatgatgtttggttttccatttctgagttacttcacttagaataatagtctccaatctcatccagattgctgtgaatgccattaatttatttcttttaatggctgagtagcattccattgtgtgtgtctgtgtgtgggtaccgagggctcgaatttcgataatacatnnnnnnnnnnnnnnnnnnnnnnnnnnnnnnnnnnnnnnnnnnnnnnnnnnnnnnnnnnnnnnnnnnnnnnnnnnnnnnnnnnnnnnnnnnnnnnnnnnnnctacgttttcttaagtgccttaatttactgaattaccctgcatcctgcagttttaagaggttaatactatcctagtatttgatattcaatttgttgtaaactacatattacactcactgaagtagaaaaataaacaaacaaataaatacattctagtcatttgtattttgagctttaaaataatcggtaacaccaatggtggcaaacatcttactgcctatttggaagggccaattttatatctgaaggacatcagcattatggaccgtagcaacttatggctttcctatgaaagacatttctatatatcacttttctttcgaatgttttatctcaatttgataattcaaacattgtgtctaattcatatatctagtatcagtttctttataaattactttcaagaggtttttttttccatatatgacttgtggtaggcttgagtatgcaatagagtgcacattaattcattcaccaactttacttttagtatgggacttttttagtctagaagagggtgaaaaactaggcatgacatctgctgttggagattacattcttaacagcaaacctagcaaataaatataaagtattaactctgataattgttgtaaaggtgtggtgctatgagatcagataatactgggaattaattaacctagtaagtgtggccagtgaagactcctcttttactggtgacttcgctgagatcatttttcattttctaaactcagtttaacttctcctcctataatatggccagaatggtggggatttcaatttgctagggctaaaaagccctgacttcttgaatttattcttcagtgtacaacaacccccaactcttccatgtaagattttgctactgtcgccacttactgggacataggcaagggtttttgcttctattcagatcctaaatcctgtcattccctatattgatggaaaattttccaatcttgagggaagctgtttcacattctgatgattttggtcaccctttttttagtcttcaagacctagaatcactttcttattacaaaaaaagtaagtttttcctaaattctttggttttttcacctaaagacacctaattctacattaaggacgaggg

SEQ ID NO: 21331 - DNA, 1721 bp, Homo sapiens
  misc_feature (1)...(1721): n = A,T,C or G
atgtcatttacttatttaaaagcaatatggcatagcatagataagcaggggtttttttctgatttgagagtaagtttttattcttccttttttaaaaaatatgtttgtttccacaggtttctggggaacaggtggtatttggctacacgcataagttctttagcggtgatttgtgagattttggtgcacccataacctgagcaatatatactgaacccagtctgtagtcttttatttctcacccccttcccaacctttccacctgagttgccaaaggccattgtgtcattcttaagcctttgcatcctcatagcttagctcccacttatgagtcasaacatatgatgtttggttttccatttctgagttacttcacttagaataatagtctccaatctcatccagattgctgtgaatgccattaatttatttcttttaatggctgagtagcattccattgtgtgtgtctgtgtgtgggtaccgagggctcgaatttcgataatacatnnnnnnnnnnnnnnnnnnnnnnnnnnnnnnnnnnnnnnnnnnnnnnnnnnnnnnnnnnnnnnnnnnnnnnnnnnnnnnnnnnnnnnnnnnnnnnnnnnnnctacgttttcttaagtgccttaatttactgaattaccctgcatcctgcagttttaagaggttaatactatcctagtatttgatattcaatttgttgtaaactacatattacactcactgaagtagaaaaataaacaaacaaataaatacattctagtcatttgtattttgagctttaaaataatcggtaacaccaatggtggcaaacatcttactgcctatttggaagggccaattttatatctgaaggacatcagcattatggaccgtagcaacttatggctttcctatgaaagacatttctatatatcacttttctttcgaatgttttatctcaatttgataattcaaacattgtgtctaattcatatatctagtatcagtttctttataaattactttcaagaggtttttttttccatatatgacttgtggtaggcttgagtatgcaatagagtgcacattaattcattcaccaactttacttttagtatgggacttttttagtctagaagagggtgaaaaactaggcatgacatctgctgttggagattacattcttaacagcaaacctagcaaataaatataaagtattaactctgataattgttgtaaaggtgtggtgctatgagatcagataatactgggaattaattaacctagtaagtgtggccagtgaagactcctcttttactggtgacttcgctgagatcatttttcattttctaaactcagtttaacttctcctcctataatatggccagaatggtggggatttcaatttgctagggctaaaaagccctgacttcttgaatttattcttcagtgtacaacaacccccaactcttccatgtaagattttgctactgtcgccacttactgggacataggcaagggtttttgcttctattcagatcctaaatcctgtcattccctatattgatggaaaattttccaatcttgagggaagctgtttcacattctgatgattttggtcaccctttttttagtcttcaagacctagaatcactttcttattacaaaaaaagtaagtttttcctaaattctttggttttttcacctaaagacacctaattctacattaaggacgaggg

SEQ ID NO: 21332 - DNA, 1721 bp, Homo sapiens
  misc_feature (1)...(1721): n = A,T,C or G
atgtcatttacttatttaaaagcaatatggcatagcatagataagcaggggtttttttctgatttgagagtaagtttttattcttccttttttaaaaaatatgtttgtttccacaggtttctggggaacaggtggtatttggctacacgcataagttctttagcggtgatttgtgagattttggtgcacccataacctgagcaatatatactgaacccagtctgtagtcttttatttctcacccccttcccaacctttccacctgagttgccaaaggccattgtgtcattcttaagcctttgcatcctcatagcttagctcccacttatgagtcacaacatatgatgtttggttttccatttctgagttacttcacttagaataatagtctccaatctcatccagattgctgtgaatgccattaatttatttcttttaatggctgagtagcattccattgtgtgtgtctgtgtgtgkgtaccgagggctcgaatttcgataatacatnnnnnnnnnnnnnnnnnnnnnnnnnnnnnnnnnnnnnnnnnnnnnnnnnnnnnnnnnnnnnnnnnnnnnnnnnnnnnnnnnnnnnnnnnnnnnnnnnnnnctacgttttcttaagtgccttaatttactgaattaccctgcatcctgcagttttaagaggttaatactatcctagtatttgatattcaatttgttgtaaactacatattacactcactgaagtagaaaaataaacaaacaaataaatacattctagtcatttgtattttgagctttaaaataatcggtaacaccaatggtggcaaacatcttactgcctatttggaagggccaattttatatctgaaggacatcagcattatggaccgtagcaacttatggctttcctatgaaagacatttctatatatcacttttctttcgaatgttttatctcaatttgataattcaaacattgtgtctaattcatatatctagtatcagtttctttataaattactttcaagaggtttttttttccatatatgacttgtggtaggcttgagtatgcaatagagtgcacattaattcattcaccaactttacttttagtatgggacttttttagtctagaagagggtgaaaaactaggcatgacatctgctgttggagattacattcttaacagcaaacctagcaaataaatataaagtattaactctgataattgttgtaaaggtgtggtgctatgagatcagataatactgggaattaattaacctagtaagtgtggccagtgaagactcctcttttactggtgacttcgctgagatcatttttcattttctaaactcagtttaacttctcctcctataatatggccagaatggtggggatttcaatttgctagggctaaaaagccctgacttcttgaatttattcttcagtgtacaacaacccccaactcttccatgtaagattttgctactgtcgccacttactgggacataggcaagggtttttgcttctattcagatcctaaatcctgtcattccctatattgatggaaaattttccaatcttgagggaagctgtttcacattctgatgattttggtcaccctttttttagtcttcaagacctagaatcactttcttattacaaaaaaagtaagtttttcctaaattctttggttttttcacctaaagacacctaattctacattaaggacgaggg

SEQ ID NO: 21333 - DNA, 527 bp, Homo sapiens
atttccatccactgcagaaacaaatgtgtttagtttattaaagtatatgtttaacagcaaaaaataaatagaataaatttattatccctatccagtgayaaacacaattttaaaataaaaatgaaaacatcctgcttatatttgctatactatttcatgcattaggctaagatatatggttatttccatgctttcaggatgtgtttaacaaatctcttatacattttcccattgttgtcattttaatatcttgaatataatattaaataaacatttctacaaataatttgaacctcaaagtttcataaacatctatccttcaatatttaggcctaaaaagtaatctccattatctatcaaattctaaatttgaacttactatggtttactcctactttttaattattactttggttaaagatacttcatgatattattaagttccttactaataatgtatatggttgtattacattcatttatccatcaagactaactttgagctactatgaaatataattcaaatc

SEQ ID NO: 21334 - DNA, 527 bp, Homo sapiens
atttccatccactgcagaaacaaatgtgtttagtttattaaagtatatgtttaacagcaaaaaataaatagaataaatttattatccctatccagtgacaaacacaattttaaaataaaaatgaaaacatcctgcttatatttgctatactatttcatgcattaggctaagatatatggttatttccatgctttcaggatgtgtttaacaaatctcttatacattttccyattgttgtcattttaatatcttgaatataatattaaataaacatttctacaaataatttgaacctcaaagtttcataaacatctatccttcaatatttaggcctaaaaagtaatctccattatctatcaaattctaaatttgaacttactatggtttactcctactttttaattattactttggttaaagatacttcatgatattattaagttccttactaataatgtatatggttgtattacattcatttatccatcaagactaactttgagctactatgaaatataattcaaatc

SEQ ID NO: 21335 - DNA, 566 bp, Homo sapiens
ttttttaaaacaaagaaaagcttcaaattaaccagaattgttatattcaaattagagaatatgaattactgacaaaataaatttgttgaatcaaaaagccaaagctaagcaataataataagacaaaaatgaatataaacatttaagagtaatgatatcatagtctattatcaattttcagtaaatataacaaaaatgattatacgaatatatatgtataaataagaatagctagtaattttgagagcctacttaatgccagtcatagcactttatgaaaccacataagttctgcttgggttaactggactttccagaacatgaaacccctgagttggccagtgtgtccagacttcttgaggcctgaaagaagctctccaactgagtgagcttccattaggttggcaagtgtattagtccgttctcacactgcyaatgaagacatacctgagactgtaatcaatgaaggaaagaggtttcattgactcacagttctgcagggctgaggaggcctcaggaaacttacagtcatggtgaaaggggaagcaaacacgtccttcttcaca

SEQ ID NO: 21336 - DNA, 529 bp, Homo sapiens
acctaggctggagtgcagtrgcatgaacacggctcactgcagcctcaatctcccaggctcaagtgatcctcccaactcagcctcccaaatagctgagaccacatgtgcacaccaccacacccagctatttttctttattttttgtagagacagggtctcactgcattgctcaggctggtcttgaactcctgggctcaagcaatcctcccaccatggctataatctcaaagtgctgggattatagtcatcagccactgcacctggcctgggtatcctactttaaaggaaatacaaattgctatgaaaattcagagaaagaatagacactgtggttttggaggactctaggttgccttgtcagaaaggaagtatttgagcttggctttaaagaatgcatggattttgacaagtgaagatgagcattatttagaaattccaagagcaaagaaaatatgatattggccaggcgcggtggctcacgcctgtactcccaacactttgggaggccgaggtgggcggctcacctgag

SEQ ID NO: 21337 - DNA, 394 bp, Homo sapiens
  misc_feature (1)...(394): n = A,T,C or G
annnnnnnnnnnnnnnnnnnnnnnnnnnnnnnnnnnnnnnnnnnnnnnnnnnnnnnnnnnnnnnnnnnnnnnnnnnnnnnnnnnnnnnnnnnnnnnnnnnntcaaaggctatgtaactaacatcatgtcactgcacctatgtctttttaaagccaagtacctctagtgcccctcattatagctcatatttcaaggttttctgttcctgcattagtttgctgaggataatggctttcngctccatccatgtccctgcaaaggacttgatctcatttccttttatggctgcatagtattccatgttgtatatgtaccacattttatttrcccagtctatcattgatgggcatttgggttgatttcatgtattagctattgtgaatagtgctgcaat

SEQ ID NO: 21338 - DNA, 807 bp, Homo sapiens
acttttagacatatacatcaaaagaaaaatgatttgtgtcattgccattcatatttcatctttttgtttcctatgtccagcttacattggatcctttccatgtctccctttccccacacagaaatacacaagcattccccattgggaagaaatccacacatgtgatccttattaaaaatataagaaaagcaaaaaccagagtagccagaacccgactatgaattccttgctaggaaaagaggggcatgtggcttttgctggtggagggaaaagaggctttgaaacaggaagttttagggattagaattagaaaaagacaccataaagcaaccatgatgctggttcattgaaactgtattttagttttgttatttatacacacttaccctaggagttgaataatgacaacattttactactgtatattaaaactattattgccacatgtcatgggcttcccaacatgctttcctgcatacacatgyaaacaagaaacacatgcagcagaactctgcgaccacggttgtgctacaaacagaagctgctgtgataaactgactgggtgatgttcagtgacctaaattgaggcttagaataagtgtgggcgcgtgcctgccttcatcaaatgaaaagtaggccaaatatacatgtttgcttttttttcccaccacagctgcaaaacctctttgtgtgtgtgtatgtgtgtgtgtgttggactagaaaaataaatatgccattaacctgaaaaagaagtgaaccacaaggtgggtttccatcaaaatagacataaaatagattacatattaa

SEQ ID NO: 21339 - DNA, 807 bp, Homo sapiens
acttttagacatatacatcaaaagaaaaatgatttgtgtcattgccattcatatttcatctttttgtttcctatgtccagcttacattggatcctttccatgtctccctttccccacacagaaatacacaagcattccccattgggaagaaatccacacatgtgatccttattaaaaatataagaaaagcaaaaaccagagtagccagaacccgactatgaattccttgctaggaaaagaggggcatgtggcttttgctggtggagggaaaagaggctttgaaacaggaagttttagggattagaattagaaaaagacaccataaagcaaccatgatgctggttcattgaaactgtattttagttttgttatttatacacacttaccctaggagttgaataatgacaacattttactactgtatattaaaactattattgccacatgtcatgggcttcccaacatgctttcctgcatacacatgtaaacaagaaacacatgcagcagaactctgcgaccacggttgtgctacaaacagaagctgctgtgataaactgactgggtgatgttcagtgacctaaattgaggcttagaataagtgtgggcgcgtgcctgccttcatcaaatgaaaagtaggccaaatatacatgtttgcttttttttcccaccacagctgcaaaacctctttgtgtgtgtgtatgtgtgtgtgtgttggactagaaaaataaatatgccattaacctgaaaaagaartgaaccacaaggtgggtttccatcaaaatagacataaaatagattacatattaa

SEQ ID NO: 21340 - DNA, 576 bp, Homo sapiens
accctggtaatgcaaagggaaaagatgccattatggaaacaatggctgaccagatagttacagtgtgtgccaccttggatgaaaatcccggagtaagatataaaaggtaagacactgagcatctgcacatgttatgcttcctatttaccattcattatagaggtaagtaatgtgtctgtaccttggcatgttggtttgcaaaatttattttctttgtatgattaccatgctctacatataggagatttaaagcttgtggtttaaatttcagactagcaaatagcttctgttactgaatttcggagcctaaatttggtacaatttacgracggtttttcatcagtttaaagaacgcttagaggaaatgtctttatagtcacatagggaatacagtgttacagttaatgtttttcattaaatcaccaacaaatttaaatgaccatattctctggatacctgttacaatgtcaaagtatctatagtatctaatctgcctattctaaataaattttggggttttcttaaggggtaaaatttaactttagtactatataccttgacttatatacttctttt

SEQ ID NO: 21341 - DNA, 576 bp, Homo sapiens
accctggtaatgcaaagggaaaagatgccattatggaaacaatggctgaccagatagttacagtgtgtgccaccttggatgaaaatcccggagtaagatataaaaggtaagacactgagcatctgcacatgttatgcttcctatttaccattcattatagaggtaagtaatgtgtctgtaccttggcatgttggtttgcaaaatttattttctttgtatgattaccatgctctacatataggagatttaaagcttgtggtttaaatttcagactagcaaatagcttctgttactgaatttcggagcctaaatttggtacaatttacgaacggtttttcatcagtttaaagaacgcttagaggaaatgtctttatagtcacatagggaatacagtgttacagttaatgtttttcattaaatcaccaacaaatttaaatgaccatattctctggatacctgttacaatgtcaaagtatctatagtatctaatctgcctattctaaataaattttggggttttcttaaggggtaaaatttaactttagtacwatataccttgacttatatacttctttt

SEQ ID NO: 21342 - DNA, 555 bp, Homo sapiens
tatgaaagggcaggagcatgtccctgtactgagaaagatagtgagaggtccctggtgagcacattaaatttatccatgccccgtaccaccctgcagttccagtacctttttttttttttttttcatttttttagagacagggtcttgctattttgccaagcagcctccaactcctgggctcaagcaatcctcccacctctgcctcctgagtagctgagactacaggcatgcaccactgcgcctggctagttccttttatttccggagctgtcttcctagttcacactcttaataataattagcatttaatttaagaattacaatgtataattttaacaatgaacagatacataaatgaataataaacataattaattggcttatctgaaatcacacaagarttaaaagatcaaactagagttaaaacgcatcagtctgatttctactttcaaccaagataggattacaaaaaagggaaaagaactgcatttaccgtccctgactttaagatttaccataaagctaaagtaaaatagagaccgggtggtattggca

SEQ ID NO: 21343 - DNA, 555 bp, Homo sapiens
tatgaaagggcaggagcatgtccctgtactgagaaagatagtgagaggtccctggtgagcacattaaatttatccatgccccgtaccaccctgcagttccagtacctttttttttttttttttcatttttttagagacagggtcttgctattttgccaagcagcctccaactcctgggctcaagcaatcctcccacctctgcctcctgagtagctgagactacaggcatgcaccactgcgcctggctagttccttttatttccggagctgtcttcctagttcacactcttaataataattagcatttaatttaagaattacaatgtataattttaacaatgaacagatacataaatgaataataaacataattaattggcttatctgaaatcacacaagagttaaawgatcaaactagagttaaaacgcatcagtctgatttctactttcaaccaagataggattacaaaaaagggaaaagaactgcatttaccgtccctgactttaagatttaccataaagctaaagtaaaatagagaccgggtggtattggca

SEQ ID NO: 21344 - DNA, 540 bp, Homo sapiens
tgcagttgttacaaaagacatcataaagatggctgcaatacatattgtaaatgaaaacaaaaacaagttacagrataggatgggtactgtctcatttgttgaaacaaaacaaccttaacattgggaactgaagatagaagatggtattataggggacttttactttacttgatattcacttacatattgctttattataatgaacacttactacttttataatcaggaaaaatagatattcccatttatttggtcaaacaaagccaaaaataaaataagcgttaattaattgaccatatcgaccttgctgggtttagaatgaagcagttaggaatcaggacgctgtgttggttagagctgcttctccagcagggtactcctgtcagtgcacgtactgcttcacatgcctgcttttgctgcaatgtatttctttaaagtagttcttcaaaactggtattacttggaaaccaactagcaccatgtttttgttgcactcatcttttaggataaagagcaagtaaactactaaagggatttctt

SEQ ID NO: 21345 - DNA, 540 bp, Homo sapiens
tgcagttgttacaaaagacatcataaagatggctgcaatacatattgtaaatgaaaacaaaaacaagttacaggataggatgggtactgtctcatttgttgaaacaaaacaaccttaacattgggaactgaagatagaagatggtattataggggacttttactttacttgatattcacttacatattgctttattataatgaacacttactacttttataatcaggaaaaatagatattcccatttatttggtcaaacaaagccaaaaataaaataagcgttaattaattgaccatatcgaycttgctgggtttagaatgaagcagttaggaatcaggacgctgtgttggttagagctgcttctccagcagggtactcctgtcagtgcacgtactgcttcacatgcctgcttttgctgcaatgtatttctttaaagtagttcttcaaaactggtattacttggaaaccaactagcaccatgtttttgttgcactcatcttttaggataaagagcaagtaaactactaaagggatttctt

SEQ ID NO: 21346 - DNA, 1604 bp, Homo sapiens
tccaaggctcatagaaattttctttctgtagcataaggcagagctatcttaccagggtatccttagataaagtttcccttaggccttggggyagccaggaaacccctgaaaaagtaaaagcctctgttccagtcacttccagatacaagaaacctcatccggtgctcctcagtgggtagctcctgcacatgctgctctggagttatgtcaactatgaaaagggaagtgctccaagtcctagtaatctacctcatcagacaactgcagaatgcactgctacccattatcatagacaggcttgtgaaactgttggaagattatgttcaaggtgcctaaacagcaaggcacacagtagaataagcagcaagtcaagaatgggggagcccaaaatctagtgagcaaggtttccttaaagcaacagccttaaatctctatattgattatatttttacccatttgccagtgacatgcattttcagcagcatcaaatctagctgcaaggtgactgctcaaacaatgcatatgctttctgtcacctagagctttgtcattaaacacttgaaattagaaaggtcaattgaatttgaaatcctgtcatttgcttatttattcatttgtttatttttgagacagggtctcgctctgtcgcccaggctggattgcagtaacatgattatggctcactgcagcctcgacttcctgggctaaaatgattctcccagatcagcctcctgagtagctgggactaaaagtgtgtgccaccatgcctggctaattttttctattttttttatagagatgggggtctccctatgttgcctaagctggtctccaactcctgggctcaagtgatcctaccgccttagcctcccaaagtgctgggattacaggcatgagccaccgcaactgccccaaatcctttcatttttatcgcaagaaattttctattacatttttgatgaaaagagctgttagattatttaaaaataattccaactgttgtaaattattgaatgcttagataaaaattgtttgtttttattacctactcatacaaatgaaattttaatgggtactcaattctaagaaatcattatttaaaagtctagatcaggaactgaatattcttatttcatggataaactgattttaaaatgaaaagttaatgttcacagaagcaagtacaattctctcattagaaaccctgaaaagagtctgaagttttatagaaattcaacatttagtatctttcctataaatttatattatgttttacttatcctatactataacaaaaacgtttttcacatttttttccatctagttcagtacagacacctttaaatctctttccagttttgggagaatgagatgcctctggttctttatgtcagtaatgcaaaaggcaaatggcagggagcaccagcacaagaccactgacctggagccagaatgcccatcacacccaacttactacttaacgtaagtacttgagcaacctacttgatctctcttgagttgttgtaaagactgaataagttaatatacataaagtacttagaacagtagccagaagcattcaatacactcaagcatcacttaat

SEQ ID NO: 21347 - DNA, 1604 bp, Homo sapiens
tccaaggctcatagaaattttctttctgtagcataaggcagagctatcttaccagggtatccttagataaagtttcccttaggccttggggtagccaggaaacccctgaaaaagtaaaagcctctgttccagtcacttccagatacaagaaacctcatccrgtgctcctcagtgggtagctcctgcacatgctgctctggagttatgtcaactatgaaaagggaagtgctccaagtcctagtaatctacctcatcagacaactgcagaatgcactgctacccattatcatagacaggcttgtgaaactgttggaagattatgttcaaggtgcctaaacagcaaggcacacagtagaataagcagcaagtcaagaatgggggagcccaaaatctagtgagcaaggtttccttaaagcaacagccttaaatctctatattgattatatttttacccatttgccagtgacatgcattttcagcagcatcaaatctagctgcaaggtgactgctcaaacaatgcatatgctttctgtcacctagagctttgtcattaaacacttgaaattagaaaggtcaattgaatttgaaatcctgtcatttgcttatttattcatttgtttatttttgagacagggtctcgctctgtcgcccaggctggattgcagtaacatgattatggctcactgcagcctcgacttcctgggctaaaatgattctcccagatcagcctcctgagtagctgggactaaaagtgtgtgccaccatgcctggctaattttttctattttttttatagagatgggggtctccctatgttgcctaagctggtctccaactcctgggctcaagtgatcctaccgccttagcctcccaaagtgctgggattacaggcatgagccaccgcaactgccccaaatcctttcatttttatcgcaagaaattttctattacatttttgatgaaaagagctgttagattatttaaaaataattccaactgttgtaaattattgaatgcttagataaaaattgtttgtttttattacctactcatacaaatgaaattttaatgggtactcaattctaagaaatcattatttaaaagtctagatcaggaactgaatattcttatttcatggataaactgattttaaaatgaaaagttaatgttcacagaagcaagtacaattctctcattagaaaccctgaaaagagtctgaagttttatagaaattcaacatttagtatctttcctataaatttatattatgttttacttatcctatactataacaaaaacgtttttcacatttttttccatctagttcagtacagacacctttaaatctctttccagttttgggagaatgagatgcctctggttctttatgtcagtaatgcaaaaggcaaatggcagggagcaccagcacaagaccactgacctggagccagaatgcccatcacacccaacttactacttaacgtaagtacttgagcaacctacttgatctctcttgagttgttgtaaagactgaataagttaatatacataaagtacttagaacagtagccagaagcattcaatacactcaagcatcacttaat

SEQ ID NO: 21348 - DNA, 1604 bp, Homo sapiens
tccaaggctcatagaaattttctttctgtagcataaggcagagctatcttaccagggtatccttagataaagtttcccttaggccttggggtagccaggaaacccctgaaaaagtaaaagcctctgttccagtcacttccagatacaagaaacctcatccggtgctcctcagtgggtagctcctgcacawgctgctctggagttatgtcaactatgaaaagggaagtgctccaagtcctagtaatctacctcatcagacaactgcagaatgcactgctacccattatcatagacaggcttgtgaaactgttggaagattatgttcaaggtgcctaaacagcaaggcacacagtagaataagcagcaagtcaagaatgggggagcccaaaatctagtgagcaaggtttccttaaagcaacagccttaaatctctatattgattatatttttacccatttgccagtgacatgcattttcagcagcatcaaatctagctgcaaggtgactgctcaaacaatgcatatgctttctgtcacctagagctttgtcattaaacacttgaaattagaaaggtcaattgaatttgaaatcctgtcatttgcttatttattcatttgtttatttttgagacagggtctcgctctgtcgcccaggctggattgcagtaacatgattatggctcactgcagcctcgacttcctgggctaaaatgattctcccagatcagcctcctgagtagctgggactaaaagtgtgtgccaccatgcctggctaattttttctattttttttatagagatgggggtctccctatgttgcctaagctggtctccaactcctgggctcaagtgatcctaccgccttagcctcccaaagtgctgggattacaggcatgagccaccgcaactgccccaaatcctttcatttttatcgcaagaaattttctattacatttttgatgaaaagagctgttagattatttaaaaataattccaactgttgtaaattattgaatgcttagataaaaattgtttgtttttattacctactcatacaaatgaaattttaatgggtactcaattctaagaaatcattatttaaaagtctagatcaggaactgaatattcttatttcatggataaactgattttaaaatgaaaagttaatgttcacagaagcaagtacaattctctcattagaaaccctgaaaagagtctgaagttttatagaaattcaacatttagtatctttcctataaatttatattatgttttacttatcctatactataacaaaaacgtttttcacatttttttccatctagttcagtacagacacctttaaatctctttccagttttgggagaatgagatgcctctggttctttatgtcagtaatgcaaaaggcaaatggcagggagcaccagcacaagaccactgacctggagccagaatgcccatcacacccaacttactacttaacgtaagtacttgagcaacctacttgatctctcttgagttgttgtaaagactgaataagttaatatacataaagtacttagaacagtagccagaagcattcaatacactcaagcatcacttaat

SEQ ID NO: 21349 - DNA, 1604 bp, Homo sapiens
tccaaggctcatagaaattttctttctgtagcataaggcagagctatcttaccagggtatccttagataaagtttcccttaggccttggggtagccaggaaacccctgaaaaagtaaaagcctctgttccagtcacttccagatacaagaaacctcatccggtgctcctcagtgggtagctcctgcacatgctgctctggagttatgtcaactatgaaaagggaagtgctccaagtcctagtaatctacctcatcagacaactgcagaatgcactgctacccattatcawagacaggcttgtgaaactgttggaagattatgttcaaggtgcctaaacagcaaggcacacagtagaataagcagcaagtcaagaatgggggagcccaaaatctagtgagcaaggtttccttaaagcaacagccttaaatctctatattgattatatttttacccatttgccagtgacatgcattttcagcagcatcaaatctagctgcaaggtgactgctcaaacaatgcatatgctttctgtcacctagagctttgtcattaaacacttgaaattagaaaggtcaattgaatttgaaatcctgtcatttgcttatttattcatttgtttatttttgagacagggtctcgctctgtcgcccaggctggattgcagtaacatgattatggctcactgcagcctcgacttcctgggctaaaatgattctcccagatcagcctcctgagtagctgggactaaaagtgtgtgccaccatgcctggctaattttttctattttttttatagagatgggggtctccctatgttgcctaagctggtctccaactcctgggctcaagtgatcctaccgccttagcctcccaaagtgctgggattacaggcatgagccaccgcaactgccccaaatcctttcatttttatcgcaagaaattttctattacatttttgatgaaaagagctgttagattatttaaaaataattccaactgttgtaaattattgaatgcttagataaaaattgtttgtttttattacctactcatacaaatgaaattttaatgggtactcaattctaagaaatcattatttaaaagtctagatcaggaactgaatattcttatttcatggataaactgattttaaaatgaaaagttaatgttcacagaagcaagtacaattctctcattagaaaccctgaaaagagtctgaagttttatagaaattcaacatttagtatctttcctataaatttatattatgttttacttatcctatactataacaaaaacgtttttcacatttttttccatctagttcagtacagacacctttaaatctctttccagttttgggagaatgagatgcctctggttctttatgtcagtaatgcaaaaggcaaatggcagggagcaccagcacaagaccactgacctggagccagaatgcccatcacacccaacttactacttaacgtaagtacttgagcaacctacttgatctctcttgagttgttgtaaagactgaataagttaatatacataaagtacttagaacagtagccagaagcattcaatacactcaagcatcacttaat

SEQ ID NO: 21350 - DNA, 1604 bp, Homo sapiens
tccaaggctcatagaaattttctttctgtagcataaggcagagctatcttaccagggtatccttagataaagtttcccttaggccttggggtagccaggaaacccctgaaaaagtaaaagcctctgttccagtcacttccagatacaagaaacctcatccggtgctcctcagtgggtagctcctgcacatgctgctctggagttatgtcaactatgaaaagggaagtgctccaagtcctagtaatctacctcatcagacaactgcagaatgcactgctacccattatcatagacaggcttgtgaaactgttggaagattatgttcaaggtgcctaaacagcaaggcacacagtagaataagcagcaagtcaagaatgggggagcccaaaatctagtgagcaaggtttccttaaagcaacagccttaaatytctatattgattatatttttacccatttgccagtgacatgcattttcagcagcatcaaatctagctgcaaggtgactgctcaaacaatgcatatgctttctgtcacctagagctttgtcattaaacacttgaaattagaaaggtcaattgaatttgaaatcctgtcatttgcttatttattcatttgtttatttttgagacagggtctcgctctgtcgcccaggctggattgcagtaacatgattatggctcactgcagcctcgacttcctgggctaaaatgattctcccagatcagcctcctgagtagctgggactaaaagtgtgtgccaccatgcctggctaattttttctattttttttatagagatgggggtctccctatgttgcctaagctggtctccaactcctgggctcaagtgatcctaccgccttagcctcccaaagtgctgggattacaggcatgagccaccgcaactgccccaaatcctttcatttttatcgcaagaaattttctattacatttttgatgaaaagagctgttagattatttaaaaataattccaactgttgtaaattattgaatgcttagataaaaattgtttgtttttattacctactcatacaaatgaaattttaatgggtactcaattctaagaaatcattatttaaaagtctagatcaggaactgaatattcttatttcatggataaactgattttaaaatgaaaagttaatgttcacagaagcaagtacaattctctcattagaaaccctgaaaagagtctgaagttttatagaaattcaacatttagtatctttcctataaatttatattatgttttacttatcctatactataacaaaaacgtttttcacatttttttccatctagttcagtacagacacctttaaatctctttccagttttgggagaatgagatgcctctggttctttatgtcagtaatgcaaaaggcaaatggcagggagcaccagcacaagaccactgacctggagccagaatgcccatcacacccaacttactacttaacgtaagtacttgagcaacctacttgatctctcttgagttgttgtaaagactgaataagttaatatacataaagtacttagaacagtagccagaagcattcaatacactcaagcatcacttaat

SEQ ID NO: 21351 - DNA, 686 bp, Homo sapiens
acaaagtaaacagtttaatgtcttaaaacttagagctaatttagatttgcttaaacaattaaaaaaaaatattattttgtacataccaaaaaggaaaatgtaagccaaataaactgttaagatatttctaagattttttttcacattctgagtcctgctgtcatctagtcaacaggtagaaaaaaattatcctatttctgagatgttaaaaaatattaaaaggatatgtatgttagaatccgtgcaatacagcattcatttcttaggttccagaaatattaatatggacagccagccatcaagatatattaataatgccttaccatttataaaatgcttttatatttgttatatcttttaatcctcataacatttgtatgaagtaggtaagagttatgcctctttagagataagagaactgagccgttgagaactcaggtaaatttgttcarggccacacagctagaaaacagtaatactggaattgatctcaggtttttaccttgctcggcaccatttgacctacccttgtgattatgaaaagtagaggaccaaataaaatttttcttttaaacaaagtgctttcatgcaagagaattaaaattcaaaagcaaaactctgtattgactttgaaataaatgggcaagtagatgaactacagctatgggtcttttaaaagccaatca

SEQ ID NO: 21352 - DNA, 532 bp, Homo sapiens
taagggcactcagtgagttctaaacccaacattcagcctcagctccaggagtctctcacacgtcctactaaaacacaattagtcactcatggttccctaggccaagtcttgtctgttactcaggctttcctttctgcctaaaatgagccctctgtgtttctctgttttgcctttcgaaaccctctgagaacatcagtgtcttaaagcctactctaatctccttatctggatatgattttgcccaattcgaagatgtacagaatttataccttggtataaattgtctttttaggtatttctcttttgtttgagctattctttccaytaggttagaagtttcttaaagctagagaccatgtcttagtcctctgaataaaattaggtagctgctttcacaatattttaattataaattcaacttcaattgaattcaccagtgccctctgtcacaacagattatcaaaacatatcacttctcacctgagtttcttctttgtccgtagataagtttgaaaaaggaattgaatagcaa

SEQ ID NO: 21353 - DNA, 536 bp, Homo sapiens
gtttcctagcaggtaaataaaagttaatgaacaaattgcaaagaaattaaccttttagctgacagcaaaataaaagcttttgggagtgttaggtttccaactattttgtgtacctaargcaaaacaaaaaatatcaaaggaattcacacctactcagaagtcttaaaatgataccagaggtattttaccactgcagtgctatggctctaagataatggaatttagatagttgatgacaagctagacccattgttggaccattctgtttttctattaaatataggtgtttaaaattacacttgaactttttggagataatcattcaaaaacaaatgacagatctggcaggaatcacaagatgcaaattctttaggcttaaatgggctaaaaattcctaggcaattttctgttttggaaatactgcatatattttattttttgacatctgtttattaaacagggtgaacattaagttagtattttcattttgaataagcctcctcagtatgcacgaaaatgtaaaatataatctaaat

SEQ ID NO: 21354 - DNA, 536 bp, Homo sapiens
gtttcctagcaggtaaataaaagttaatgaacaaattgcaaagaaattaaccttttagctgacagcaaaataaaagcttttgggagtgttaggtttccaactattttgtgtacctaaagcaaaacaaaaaatatcaaaggaattcacacctactcagaagtcttaaaatgataccagaggtattttaccactgcagtgctatggctctaagataatggaatttagatagttgatgacaagctagacycattgttggaccattctgtttttctattaaatataggtgtttaaaattacacttgaactttttggagataatcattcaaaaacaaatgacagatctggcaggaatcacaagatgcaaattctttaggcttaaatgggctaaaaattcctaggcaattttctgttttggaaatactgcatatattttattttttgacatctgtttattaaacagggtgaacattaagttagtattttcattttgaataagcctcctcagtatgcacgaaaatgtaaaatataatctaaat

SEQ ID NO: 21355 - DNA, 543 bp, Homo sapiens
caacttaatatttgtagtacttttcaccatttgttactgatgtccttactgatctcagttttaaagagttctaaatgatttagtcaaacggtattactgtgaaatgtatggaactaaacacttttctgtttagctacagtacaatttagcaatatttgagatttttgaaaaattatatatcaataattattgttatggtatactaattaccaattactcatagtttataaaaataatggatttgacaacgtgataatyctctctgttgaaatggttgaaatgataataattgcatgtccagatttaagcaaaaagcgtaatcaatgttgctaaaagtttctcaaattcgcatggcaaagccctcatcagaatgttgaaattgcttttctccaaaaaatagccgaaaaccctggagaagccacagtttcaatttaacccttgatcaatgacatgcactaaaactaattggcatgagatttacagcatttaaaaagtgaaaaatgtatcatagcaggaaaaaagattctgccccttttttgtttg

SEQ ID NO: 21356 - DNA, 543 bp, Homo sapiens
agcctgtaacgttattcagcacaccttctgttgagcagagcacctgacttcaaggaatgtacaacggcttgccctggcgaaaacccaattgtgagctgcaaaggaggactatttgatagcattcccttctgtctgtctttgaaggctgttctcagttgagaacatattgaaacgtgaatgatagataygtttgtgagtatttttaacacagccttaatactcacatatgccattatttctgcagataatgtgcgccattcctcacagctaggaagatcatgagtgtcattaacgctgtttttacacactaaattggtctgttcccggacccctatcaaagatgggatgctaaaaattgtttatctctagagactggatcaggaatacaaaaaggttcctgaaataggaaaagccttgatttgcacagatcaatttgctttataaatgttccttctctcactccagaagaaagtagacgcttgcacgttgaacataaaatcatcttggctccaacacgatggagcaaaaaaggttctgaacttg

SEQ ID NO: 21357 - DNA, 542 bp, Homo sapiens
aaaggcctcacagacaacaacaatagcaatgacaactgcaacatgaayatttatggagcacttaaaatacaaagctctttataggtgcaaagtcatttagtcctttcaacagtgctgggaccattattaaccccagttgcacttgagaagattagggcacagagaaactaaagtataagttcaagttcaagaaaaagtaaatggtcacaggcagtctggctccagaggccatgctttcaaccaccacatgtcattgttgcatagctagaaaagaaacactgtcttcctgtacttctgtaacagaaaatcaaaccaatagtgttggagaggggatgtggtagagtaaaaaaggccatcctccttggagtcagtttaaagaccaattctaatttgtactaagtaaactaactttgaggaattctttgtcttcccctagtctcagggccctcatctgtaaaatgggggtgcttatgtcttctgtacagggttttcgtggcataaaaatatgatggatacaaagttttcagcattgtgtctggcat

SEQ ID NO: 21358 - DNA, 542 bp, Homo sapiens
aaaggcctcacagacaacaacaatagcaatgacaactgcaacatgaatatttatggagcacttaaaatacaaagctctttataggtgcaaagtcatttagtcctttcaacagtgctgggaccattattaaccccagttgcacttgagaagattagggcacagagaaactaaagtataagttcaagttcaagaaaaagtaaatggtcacaggcagtctggctccagaggccatgctttcaaccaccacatgtcattgttgcatagctagaaaagaaacactgtcttcctgtacttctgtaacagaaaatcaaaccaatagtgttggagaggggatgtggtagagtaaaaaaggccatcctmcttggagtcagtttaaagaccaattctaatttgtactaagtaaactaactttgaggaattctttgtcttcccctagtctcagggccctcatctgtaaaatgggggtgcttatgtcttctgtacagggttttcgtggcataaaaatatgatggatacaaagttttcagcattgtgtctggcat

SEQ ID NO: 21359 - DNA, 547 bp, Homo sapiens
gtggaaagaaactggaatcttgccaacaattttctctcaccatctctttctacctttttttttttttttttttttttgagacagtctcgctatgttgcccaggctggagtacactggcatgatctcggctcactgcctcctggsttcaagcaattctcgtgtctcagcctcctgagtagctgggatgacaggtgcctgccaccatgcccagctaatttttgtattttttagtagagatggggtttcaccatgttggccaggctggtcttgaactcctaacctcaagcaacccgcccacctgacctctgtgcccggccctctctctacctttaacaagtgcacatatgcgtgcacacacacacacaggtagaaggaggaggggggaaaggagagagatcttaatgttccacgattttttgtcttttaaggcctgttttaacctacttaaacaagaaaaaaaaagctttcctaatgctaattgcctgatgttctggttatacaaatatttccatttctttctctcctgtttttaatacatacatttgta

SEQ ID NO: 21360 - DNA, 754 bp, Homo sapiens
cattaggtcaaatttctgatttttgaagataaataatcctataggcatataagtagaaaattaggttatcaaaaattcaaaaaaattagctgggcrtggtggtgggagcctgcagtcccagctactcgggaggctgaggcaggagaatactgtgaacctgggaggtggagcttccagtgagccaagatcgcgccactgtgctccagcctgggcgacagagtgagactccgtctcaaaaaaaaaaaaaaagaaaattaggttatctacagatggaaaaaaggctggatggccttatatctgcttattaaaaagcatatttgaaaaaataaactggccagctgagacatgattaaaacatatatttaaataaaaattaatatgtaaatttgcttctaaaacaatgcaaatataatttttgaaaaagacactccataatgaaaaaataatgtaataatatgaaactgggacacaatttccagatcacaagcaacaaaaactgggaagtgtgagaagtcgggtagggggatggtgcaaagatgaatgtgctaattttgtcaacttagctaggggaaatcattagaaatggctattattaatgtttataattaaaaatgaaggtttaaatattatttcaaaagctaaaataacaactagttaaactaaaagcttactacctaacttctaaattaattgtgggtgggatagggagacaacaataaggaaaacataccataaaattaaaagattaagaaca

SEQ ID NO: 21361 - DNA, 754 bp, Homo sapiens
cattaggtcaaatttctgatttttgaagataaataatcctataggcatataagtagaaaattaggttatcaaaaattcaaaaaaattagctgggcgtggtggtgggagcctgcagtcccagctactcgggaggctgaggcaggagaatactgtgaacctgggaggtggagcttccagtgagccaagatcgcgccactgtgctccagcctgggcgacagagtgagactccgtctcaaaaaaaaaaaaaaagaaaattaggttatctacagatggaaaaaaggctggatggccttatatctgcttattaaaaagcatatttgaaaaaataaactggccagctgagacatgattaaaacatatatttaaataaaaattaatatgtaaatttgcttctaaaacaatgcaaatataattyttgaaaaagacactccataatgaaaaaataatgtaataatatgaaactgggacacaatttccagatcacaagcaacaaaaactgggaagtgtgagaagtcgggtagggggatggtgcaaagatgaatgtgctaattttgtcaacttagctaggggaaatcattagaaatggctattattaatgtttataattaaaaatgaaggtttaaatattatttcaaaagctaaaataacaactagttaaactaaaagcttactacctaacttctaaattaattgtgggtgggatagggagacaacaataaggaaaacataccataaaattaaaagattaagaaca

SEQ ID NO: 21362 - DNA, 754 bp, Homo sapiens
cattaggtcaaatttctgatttttgaagataaataatcctataggcatataagtagaaaattaggttatcaaaaattcaaaaaaattagctgggcgtggtggtgggagcctgcagtcccagctactcgggaggctgaggcaggagaatactgtgaacctgggaggtggagcttccagtgagccaagatcgcgccactgtgctccagcctgggcgacagagtgagactccgtctcaaaaaaaaaaaaaaagaaaattaggttatctacagatggaaaaaaggctggatggccttatatctgcttattaaaaagcatatttgaaaaaataaactggccagctgagacatgattaaaacatatatttaaataaaaattaatatgtaaatttgcttctaaaacaatgcaaatataatttttgaaaaagacactccataatgaaaaaataatgtaataatatgaaactgggacacaatttccagatcacaagcaacaaaaactgggaagtgtgagaagtcgggtagggggatggtgcaaagatgaatgtgctaattttgtcaacttagctaggggaaatcattagaaatggctattattaatgtttataattaaaaatgaaggtttaaatattatttcaaaagctaaaataacaactagttaaactaaaagcttactacctamcttctaaattaattgtgggtgggatagggagacaacaataaggaaaacataccataaaattaaaagattaagaaca

SEQ ID NO: 21363 - DNA, 558 bp, Homo sapiens
ggctcatacctgtaattccagcattatgagaggccaaattgggaggactgtttgagctcaggagtttgagaccagcctgggttacttagcaagacctcayctctacaaaaaataaaaaagccagtcacagtggcatgtgctggtgatcccagttgctaaggtgggaggatcacttgagctcaggaggtcaaggctctagtgaaccatgataatgccactgcactccagcctgggcgatagagcaagaccctgcctcgaaaaacaaaactaaaccaaacaaaatgactccacaatttttagaaaacaggattgcttggggaaaaagagagatagaagatagagctgtgagatttttatccattaggagactcacagagtggtgtcctcttcagcttgtcctctttcaatacactgatacttactttataactggaggcactttatatgtgttgaacacctactgcgtgctaggtacttcacaagtagtactgctaatcccagaaacagcctgccaaggtatgattatccctactttagagatgtggaaactgaggctca

SEQ ID NO: 21364 - DNA, 1267 bp, Homo sapiens
cagcaggaaagcctcagttcattaattccaagcaaatctagtaaatggcttcctaccataggctgtgattgcttcagaggagaataaaggaaggttaatcaatggccattttaaaaaatctgaaaaatagatttgactgctaataaaatttagattaaatagtttatttctgaatattccacatcgggtatattacatctgcacatcttagatctgatgcaaagccacactaaatggcttctgtgactaaatagaatccaccttgcatttattggtattgctttattttaaagcattctttaaatcatctatacaatgataaatggtgaaatattacagctttcatgtgcgattaacttaaggagtcttgaattcgtttccaytgatgcctcaatcataaaatagggatatcctcttttaaaaccgaggatagaactttgttgtgtttggccaaatgctgttgcaaaatcccccaagcaagaagatttacaggcaaaaatgttgtagacatgacaaagttagaagcatatttagagtatgagattatgtaatacatcattctataggtttaactgttgtgagttttttcagccacaaagggttaaaatgaaaaaatcgaaatgttatgtctttgtgaaacaaataatttactttcactgaaaatattattgaaaaaataatcataagatctaatgacagtgccaaaatatagaaaacaaaagttaccatggaaggtgctgtggcttaagaacatcacagctatgatcatatagtggttagtactctgtgttgtgcctgcagcaacctcagttgtatccaagttgtggcaccaaaaattaaaaaaaaaataacaatgcaagttcactataagtccatagcctaacatctgcctttggtcacggccttgtacttattatggaagcagattattataaagactggtctgaaatgaaaaacgtaaaattgaacttagcaatcaccatacatactaataagcctgtgaagagagtttgcattttttaaaaaaatcagatattagcttgcttgataacagatctttgaaagtcttaaacggactcaagttgaaacattctctggcacccataagcctggacctaacagttctttggccaaaaatgatcccattttaatagatggtttttaggaagagcttttaagattgggatgggtggtttcgatcattgataaagatcacatgaacacatgaacataagctataactgacagaagtccaatttctgtctag

SEQ ID NO: 21365 - DNA, 531 bp, Homo sapiens
ggtggaacaagtccactgggtccccggtatccaatgtgcaatggctgaaggagtactgctgtaagcttatcctctttgccaggaagtccttgggccccaaaaagggagacagttctgtgaagagttcaaattggccacccaactgacaagaccactaatgcccatacggaatttctacaagaaggagaaaaccagagccatcattgaggaagagaagaacgtcatagtatttgycagtcttcacatggcccacaccaatgcccaaatgaaaatgctagaaatttaaaaaatacaatatcagcaatgaagagtttgtcagatatacttaactgaaagctgagcagagccaaggtaaacataagtgaacctgaagatacgtaaagaaaaaatatctaaactgaaacacaaagagagaaaaactcagagaccctagagaccccagaagttgaggagagagtgaatgtgtgagaagaaatatttaaagagaaaatagctaatttttctccccaaattaatgaaagatattaaccc

SEQ ID NO: 21366 - DNA, 531 bp, Homo sapiens
ggtggaacaagtccactgggtccccggtatccaatgtgcaatggctgaaggagtactgctgtaagcttatcctctttgccaggaagtccttgggccccaaaaagggagacagttctgtgaagagttcaaattggccacccaactgacaagaccactaatgcccatacggaatttctacaagaaggagaaaaccagagccatcattgaggaagagaagaacgtcatagtatttgccagtcttcacatggcccacaccaatgcccaaatgaaaatgctagaaatttaaaaaatacaatatcagcaatgaagagtttgtcagatatacttaactgaaagctgagcagagccaaggtaaacataagtgaacctgaagatacgtaaagaaaaaatatctaaactgaaacacaaagagagaaaaactcagagaccctagagaccccagaagytgaggagagagtgaatgtgtgagaagaaatatttaaagagaaaatagctaatttttctccccaaattaatgaaagatattaaccc

SEQ ID NO: 21367 - DNA, 566 bp, Homo sapiens
caaaacagtgttttggagcccactgagacgttgctgactgctgagagctctgaacttcaggctttgtctgtcccgattaccaagggagattagcaaatattagagaatgttaaagagaccctattcaccaagtgagacttcctcctcgttgtaatcagagtagctraaagacaactgaacagggattattaatgttatttaatgttgatgttaatatactattgttgtttaatatcatatgcatatgcagtatgcaaccaaaacattgtttcccataccactaggagagaatgccccacattttgctaaacattgtcttatcctgagaaatctccataaaaggtcttctattatactgttttcaaaatcttctgaccacagcctataataacaaatacatacccacattcacattcatatttatatctacacctatatctacatccttctctgtatctggaacaatgtataacaaaaatatttatggtgatatgcacagtctttactaagagtctgtgctttgcacgctgatttttcctttccttttctctctttttttctttgtg

SEQ ID NO: 21368 - DNA, 566 bp, Homo sapiens
caaaacagtgttttggagcccactgagacgttgctgactgctgagagctctgaacttcaggctttgtctgtcccgattaccaagggagattagcaaatattagagaatgttaaagagaccctattcaccaagtgagacttcctcctcgttgtaatcagagtagctaaaagacaactgaacagggattattaatgttatttaatgttgatgttaatatactattgttgtttaatatcatatgcatatgcagtatgcaaccaaaacattgtttcccataccactaggagagaatgccccacattttgctaaacattgtcttaycctgagaaatctccataaaaggtcttctattatactgttttcaaaatcttctgaccacagcctataataacaaatacatacccacattcacattcatatttatatctacacctatatctacatccttctctgtatctggaacaatgtataacaaaaatatttatggtgatatgcacagtctttactaagagtctgtgctttgcacgctgatttttcctttccttttctctctttttttctttgtg

SEQ ID NO: 21369 - DNA, 518 bp, Homo sapiens
gcatgaaaaacaactatgacatgatttctaataggtgactggcagagtgattaccgccttaattttgagtgacagcaatttaaatctggtgtctgaagccactgcctccttcaaagggtaaaacaagatggtcaccagccaacccagcagcaacaggcactgaagtagacactgaggatgcaggcgatgagccgtgtccatgaaatcagaaccaggctcaaatgacccaggcagccactaagtgcttctgttggggagwtgaacactctcccatctgtccctcccagctgcttcctgccctgctttaggagttgagggttcccgtaggactgaattcatgagatagtcaaaatcaaatggcctcttggcctctagctttcatctcctcctcaacccccacatccacctggtcgttcatgacctaaaagcagctatgtcatatgacaccttgctcaaagagcagagtggatccctaatatctcctaaataaaagttcagacttaaagcataaagttaag

SEQ ID NO: 21370 - DNA, 728 bp, Homo sapiens
  misc_feature (1)...(728): n = A,T,C or G
tgactttgtgatctgcccgcttcagcctcccaaagtgctgggattacaggtgtgagccaccgtgccaggccccttttctgcttttaacccttttgattacctgtcaattttagattcttcctttaccctttcttgtgcagttgtttgggctagaaagcccagttggtcacagcgtgatgctaatgagaccatagtcaagggcttcttccctgtgtaggcagttatatttatggagaaaccctgtcctgtgtgtcagttcaatccagtacactgttatgtgaggagtaannnnnnnnnnnnnnnnnnnnnnnnnnnnnnnnnnnnnnnnnnnnnnnnnnnnnnnnnnnnnnnnnnnnnnnnnnnnnnnnnnnnnnnnnnnnnnnnnnnntatattcakattccacctctggtttttactaaacaaaaatgctagcttgctgctataagtgttggatttgatatcacgagtgcttccagaggactgaatggaaacatctaccgtaatactcctgagaaaggcaggaaggggcaggggattagcagaaggtttctgctgtttgacctgaggcaagctgaataacctccctgaacctcagtttcctcaacttttaaatggggctgacattttctgtagttgtgaggagggtttaaaagtataaaatgaaataatacatttgaaaatgcttggtacacaataggcaatcaataaatattagttgaatgttaat

SEQ ID NO: 21371 - DNA, 728 bp, Homo sapiens
  misc_feature (1)...(728): n = A,T,C or G
tgactttgtgatctgcccgcttcagcctcccaaagtgctgggattacaggtgtgagccaccgtgccaggccccttttctgcttttaacccttttgattacctgtcaattttagattcttcctttaccctttcttgtgcagttgtttgggctagaaagcccagttggtcacagcgtgatgctaatgagaccatagtcaagggcttcttccctgtgtaggcagttatatttatggagaaaccctgtcctgtgtgtcagttcaatccagtacactgttatgtgaggagtaannnnnnnnnnnnnnnnnnnnnnnnnnnnnnnnnnnnnnnnnnnnnnnnnnnnnnnnnnnnnnnnnnnnnnnnnnnnnnnnnnnnnnnnnnnnnnnnnnnntatattcatattccacctctggtttttactaaacaaaaatgctagcttgctgctataagtgttggatttgatatcacgartgcttccagaggactgaatggaaacatctaccgtaatactcctgagaaaggcaggaaggggcaggggattagcagaaggtttctgctgtttgacctgaggcaagctgaataacctccctgaacctcagtttcctcaacttttaaatggggctgacattttctgtagttgtgaggagggtttaaaagtataaaatgaaataatacatttgaaaatgcttggtacacaataggcaatcaataaatattagttgaatgttaat

SEQ ID NO: 21372 - DNA, 692 bp, Homo sapiens
tatgttgctttattcttctattgtttatccttcttaatcttactcttagtatatctgatacttggtttgaacttgctatatagtcaattgatcttcggtttttaatattttatttgtccttatttataaaagtaatgtctactgaccaaatatggttaatatttgaaggacaaaatttgacagttaaaaaaggtgaaattaaagaaaatttgagaagaattcacccacattgttctggcttttgggtcttcagtcagcacccaagtagaacaggctggtggcactgtctggtattcatagctcattcctagatgggatctcagattttacctgggcatctactgccacccgaaaactccatgagatacagacctcagcaacttaacagtgaaagaacattagatggttcaaatggcacagctgaatgtcagtgccacctcrtgattgtgattgcacgcatctttcaaagttcagccggactgtaagttccacatggaagggagggtgtcagtcttactgtgttcctaagggcagagcatagtacctaccaaccagtagacacacaagttattatcgatggcaaaattctttttaactaaaggaggcctggagtgtctgctctctataggctttagataaacttgagcacatgtgcatagccagaaactgatggtcagcattttctgattgct

SEQ ID NO: 21373 - DNA, 692 bp, Homo sapiens
tatgttgctttattcttctattgtttatccttcttaatcttactcttagtatatctgatacttggtttgaacttgctatatagtcaattgatcttcggtttttaatattttatttgtccttatttataaaagtaatgtctactgaccaaatatggttaatatttgaaggacaaaatttgacagttaaaaaaggtgaaattaaagaaaatttgagaagaattcacccacattgttctggcttttgggtcttcagtcagcacccaagtagaacaggctggtggcactgtctggtattcatagctcattcctagatgggatctcagattttacctgggcatctactgccacccgaaaactccatgagatacagacctcagcaacttaacagtgaaagaacattagatggttcaaatggcacagctgaatgtcagtgccacctcatgattgtgattgcacrcatctttcaaagttcagccggactgtaagttccacatggaagggagggtgtcagtcttactgtgttcctaagggcagagcatagtacctaccaaccagtagacacacaagttattatcgatggcaaaattctttttaactaaaggaggcctggagtgtctgctctctataggctttagataaacttgagcacatgtgcatagccagaaactgatggtcagcattttctgattgct

SEQ ID NO: 21374 - DNA, 546 bp, Homo sapiens
ggtgaaaccctgtctctactaaaaatacaaaaattagccaggtgtggtgacaggcacctgtaatcccagctacttgggaggctgaggcaggagaatcgcttgaacctgggaggcggagatcgcagtgagccaagactgcaccattgcactccagcctgggtgacaagagcgagacttcatctcaaaaaaaaaaaaaaaaagaaaaagaaaaccacaggttagtaacaaactggtaagagacaagagtttatggaatcactagttctcaatcctggctgacatacttcagaagctcckgactaaaagcctctaattcatctggggaagagcctgtacatttgtattttaaaagctccccaggttgtccttatgtgcagacagttcacaaacactgaagcaaagaaataaggtcagagccccccatatacaattctggaatttcagattttaagaagtgtagaagagtcagtgattgagacggtgagtgttttggcaatcatgtagttaaaaaaaaagtatctactcatgcccaaaacacgcaatgca

SEQ ID NO: 21375 - DNA, 555 bp, Homo sapiens
tggggagctgagcaccctctgacccccagaagcgttcctgggtcgtgggactccagcagttgtctggcgagggcagagaggggtctgggagtggatcccaagggtctatcaccaggcgggcgggaggtcactgtcctgcataccaggctaattggggtctggcagagtgcactctcagacagcaggcctggatgtgtagccctgcatgctgacctcccccgccacgacacacaccccaaaatccaaattgacccagctccatcccacctgggctgccccaggaggcctctgagcccggccctttcccagccaggaggcaccagggtgtctgggagcttcccaccccgggatgtcacaacaggcagggggctgggcggccaagagacacgcacgctccaggggctcaggaggagatgggggctggccacataaacagtgacagtgagccgtggctgcgcttatccaaacagtggatgtgaaagcccagctcccagcagacaacgtctcccccacaggaatygcctaacgggtctgtcgcaacggtttcaaattccc

SEQ ID NO: 21376 - DNA, 602 bp, Homo sapiens
ctgttattagaaaaaaagacaggccggacttgatggctcatgcctataatcccagcactttgtgaggcagaggtgggtggattgtttgagcccaggagtttgagaccagccttgggaacacggcaagaccccatctctaacaaaaataaaaaaaattagctgtctgtggtggtatgcgcctgtagtcccggctactcaggatgmtgaggtgggaggactgcctaagcccgggaggtcaaggctgcaatgagctgtgactgtgccactgcactccaagcctggtgacagaggaagaacttgtttcaaaaaaaaaaaaaagacatctgaaaagtttaaaatctggatttcaaaaatttccaggaaaaaaagtaatactgtatttattccctcatccaatagtgtatcaaacctcattgtaaaaaggttttcttacacttaacccatcagacttttttttgaaaaaaaactgggttttattggatttacaaattcctcaagagcaatccctttttgaaatgctttaattttgataattcaatttctaaattgtcttaaggataaggaatgccaataaattatttcttctgtcccaacataatgaa

SEQ ID NO: 21377 - DNA, 1337 bp, Homo sapiens
aaagccatagaggcatttatgaaaagttaatgctacataagggcagttaaacaggcatggcaaaaaaaaatgatgactcacgtcacattgaaatatgctgctggaaaaatgaaggaaaccacttaaaggatcagaggaaaaccatatggagaaaaacgacactcatgatgacacttcattaatgctacttttaaatataggtacatttttatatgtggacaattacacacattttaaagtcatctggccatataggatatccattggtttcatgagaaacactaaagataataggaatgaaattatcgatttaaaatatcctttacagaggtatgcaattatttaatagtgaagatggtaataaacactttttgaaatgtgcttatgagtactagggtgaccacactgcctgttaagatagtgttttacttttgtgcactttgaggccactgtgaaggtaaataaagtttccttggtcacaagtactgcaatctcgtgtcagtaaatctgataaccaagatggctcttaagtgactaaggtttgggaaatggtttcagtgtgcatttgcctgacaaagtgagaatttacgtcccaggtgagatggagtgggacaacgtgagatttcatcgtgctgttcagaatggtgcaaaatttacaacttatgtattatttctggaattttcaatttaatgtttttggaccacagttaagcattggtaactgaaactgatgaaagcaaaaccttggatatgaggagactactgtacttttagtgttttctgtggcagacaatgagggaagacaaaacaatgtaactaaataatttcctatattagatgtatgtttaagtgacatgtaatttgaaggcaatttctggattcagtacaatttcatcttggatttctatgctttttaagctgttaagaatttcaaatttattaaccataaaatatatctttrtagaatattgcagaaaattttattttaaaaataagtataatatatccatacagaatggcatacattttttttcaaaaaaataacagtgtgaaagtattaaagagagatatagtaagtttattaaaatatgtgagaatataccaagaataaatctgctgtttgagttttaatactcaataaaccattgcattggtttgttgaatggtcaattgattggtcagtaatgatatggcttggctttatgtctccacccaaatctcattaagaatttcaaattcattaaccataaaatatatctttgtagaatattgcagaaaattttattttaaaaataagtatagtatatccatactgaatagcatacatttttttcaaa

SEQ ID NO: 21378 - DNA, 522 bp, Homo sapiens
caggtcaaataacacgatagcagaattcataaaagaccattccatgattttcactggttaaagttgaggacagagtagatcaacctttcctacctctaaactttagccatatattgtagcctagtgaatatagtaataaattcattattatattcactttttaaattattgattataataataaattcaatattaatattatcaatataataaattcattattatatccactgggccacaaaagctcagtttaaggttacttcccaggcattaataaataccacttccggtggcatttattaatcatattaattcttgattctcactgagaaacttgtttttgtggtttttgggttagtcttttttaacttgtatgctttcttttttgtttttaacttgcatgcttttttttttcctgatgttaacatttttcccccagctttagtgaggtaaaattgacaatgcaaaattctrtatatttaagatgtgcaatgttatattttgatatacatttacattgtt

SEQ ID NO: 21379 - DNA, 356 bp, Homo sapiens
caccccctgccttcagggactctcctgggtctcccagcttctctccagccttccccagatttctgccacagtcagccccaggcacccaggacaaccctagacactcacaggcctcaccagactatctccctatgacctgtacctatacagggatggctcccacgcatccctcagtgaccccaaacccatctccacttacactcaggcactcccagggcctgacagctactccccgttattgtccttcagttcgaagccctggccaatctaytagcccacatgacgcagttacctggccatttctccacggttcccgggagggccccacacccagccgcacaagagcccctcctgca

SEQ ID NO: 21380 - DNA, 926 bp, Homo sapiens
taagatatattttgtaaagtcatgctggtattgaaaaagtaattactaccattggcaaatgtgaggaaaaaggcattctcatacactgttggtatatgaaattggtaaattatttctgaagggtaactyagtgctgtgtatcaaaatttcaaataacctgacatccctttaactcaacaactccacttctgggactagatttcacaggaaaacataacttgtgtaaacatacacttattaagggcattaattatatattacacataatgaacaatagcttaataaatacataaaatatatgtaataagaaggtgaattggaagtattaagaaagaattataaaaagtgtggggtaacagatgttagaccctttagcctagttttagttgacaatcatctgcagatatagtttgtgtgagagacatcttactctgtaaatcatttggagagacacctgcaatatttcataaagatgaaaatttatttctagtgaacttatacgcttgtcaataaatagtaactttaaaaatttagttgattgtaaatgaccttttctaatcggggagtaattatgactgtgtgatttgaaaaggtaattttgaaattctaactatactgaattatctccagtatccttttttataatatatgctagagtgactagtaacaaaaacttcagcagaatattctttccttactacttttcaagtatatgcattcttttgaagatgttgaagtgagagattaaatatctgagaactaaaaaggaaaaataattcagaacacagaaattttattaggatgataaagagcatctgcagaggtagatcacaggatgaactctttattttttaacaaaatgagttttaagataaatgtctttatctgcagatgcatcttaagataagaaaataaagaaaaaacaa

SEQ ID NO: 21381 - DNA, 926 bp, Homo sapiens
taagatatattttgtaaagtcatgctggtattgaaaaagtaattactaccattggcaaatgtgaggaaaaaggcattctcatacactgttggtatatgaaattggtaaattatttctgaagggtaacttagtgctgtgtatcaaaatttcaaataacctgacatccctttaactcaacaactccacttctgggactagatttcacaggaaaacataacttgtgtaaacatacacttattaagggcattaattatatattacacataatgaacaatagcttaataaatacataaaatatatgtaataagaaggtgaattggaagtattaagaaagaattataaaaagtgtggggtaacagatgttagaccctttagcctagttttagttgacaatcatctgcagatatagtttgtgtgagagacatcttactctgtaartcatttggagagacacctgcaatatttcataaagatgaaaatttatttctagtgaacttatacgcttgtcaataaatagtaactttaaaaatttagttgattgtaaatgaccttttctaatcggggagtaattatgactgtgtgatttgaaaaggtaattttgaaattctaactatactgaattatctccagtatccttttttataatatatgctagagtgactagtaacaaaaacttcagcagaatattctttccttactacttttcaagtatatgcattcttttgaagatgttgaagtgagagattaaatatctgagaactaaaaaggaaaaataattcagaacacagaaattttattaggatgataaagagcatctgcagaggtagatcacaggatgaactctttattttttaacaaaatgagttttaagataaatgtctttatctgcagatgcatcttaagataagaaaataaagaaaaaacaa

SEQ ID NO: 21382 - DNA, 926 bp, Homo sapiens
taagatatattttgtaaagtcatgctggtattgaaaaagtaattactaccattggcaaatgtgaggaaaaaggcattctcatacactgttggtatatgaaattggtaaattatttctgaagggtaacttagtgctgtgtatcaaaatttcaaataacctgacatccctttaactcaacaactccacttctgggactagatttcacaggaaaacataacttgtgtaaacatacacttattaagggcattaattatatattacacataatgaacaatagcttaataaatacataaaatatatgtaataagaaggtgaattggaagtattaagaaagaattataaaaagtgtggggtaacagatgttagaccctttagcctagttttagttgacaatcatctgcagatatagtttgtgtgagagacatcttactctgtaaatcatttggagagacacctgcaatatttcataaagatgaaaatttatttctagtgaacttatacgcttgtcaataaatagtaactttaaaaatttagttgattgtaaatkaccttttctaatcggggagtaattatgactgtgtgatttgaaaaggtaattttgaaattctaactatactgaattatctccagtatccttttttataatatatgctagagtgactagtaacaaaaacttcagcagaatattctttccttactacttttcaagtatatgcattcttttgaagatgttgaagtgagagattaaatatctgagaactaaaaaggaaaaataattcagaacacagaaattttattaggatgataaagagcatctgcagaggtagatcacaggatgaactctttattttttaacaaaatgagttttaagataaatgtctttatctgcagatgcatcttaagataagaaaataaagaaaaaacaa

SEQ ID NO: 21383 - DNA, 926 bp, Homo sapiens
taagatatattttgtaaagtcatgctggtattgaaaaagtaattactaccattggcaaatgtgaggaaaaaggcattctcatacactgttggtatatgaaattggtaaattatttctgaagggtaacttagtgctgtgtatcaaaatttcaaataacctgacatccctttaactcaacaactccacttctgggactagatttcacaggaaaacataacttgtgtaaacatacacttattaagggcattaattatatattacacataatgaacaatagcttaataaatacataaaatatatgtaataagaaggtgaattggaagtattaagaaagaattataaaaagtgtggggtaacagatgttagaccctttagcctagttttagttgacaatcatctgcagatatagtttgtgtgagagacatcttactctgtaaatcatttggagagacacctgcaatatttcataaagatgaaaatttatttctagtgaacttatacgcttgtcaataaatagtaactttaaaaatttagttgattgtaaatgaccttttctaatcggggagtaattatgactgtgtgatttgaaaaggtaattttgaaattctaactatactgaattatctccagtatccttttttataatatatgctagagtgactagtaacaaaaacttcagcagaatattctttccttactacttttcaagtatatgcattcttttgaagatgttgaagtgagagattaaatatctgagaactamaaaggaaaaataattcagaacacagaaattttattaggatgataaagagcatctgcagaggtagatcacaggatgaactctttattttttaacaaaatgagttttaagataaatgtctttatctgcagatgcatcttaagataagaaaataaagaaaaaacaa

SEQ ID NO: 21384 - DNA, 926 bp, Homo sapiens
taagatatattttgtaaagtcatgctggtattgaaaaagtaattactaccattggcaaatgtgaggaaaaaggcattctcatacactgttggtatatgaaattggtaaattatttctgaagggtaacttagtgctgtgtatcaaaatttcaaataacctgacatccctttaactcaacaactccacttctgggactagatttcacaggaaaacataacttgtgtaaacatacacttattaagggcattaattatatattacacataatgaacaatagcttaataaatacataaaatatatgtaataagaaggtgaattggaagtattaagaaagaattataaaaagtgtggggtaacagatgttagaccctttagcctagttttagttgacaatcatctgcagatatagtttgtgtgagagacatcttactctgtaaatcatttggagagacacctgcaatatttcataaagatgaaaatttatttctagtgaacttatacgcttgtcaataaatagtaactttaaaaatttagttgattgtaaatgaccttttctaatcggggagtaattatgactgtgtgatttgaaaaggtaattttgaaattctaactatactgaattatctccagtatccttttttataatatatgctagagtgactagtaacaaaaacttcagcagaatattctttccttactacttttcaagtatatgcattcttttgaagatgttgaagtgagagattaaatatctgagaactaaaaaggaaaaataatycagaacacagaaattttattaggatgataaagagcatctgcagaggtagatcacaggatgaactctttattttttaacaaaatgagttttaagataaatgtctttatctgcagatgcatcttaagataagaaaataaagaaaaaacaa

SEQ ID NO: 21385 - DNA, 565 bp, Homo sapiens
ttgaccaggggaaagatatggtcaaaagttacaggtatgttgggcaaagccttaggaatagcttttctgacaaacaagcaatggggaaaagactccgttcaataaatggtgctgggataactggctagccacatgctgaagattgagctgggcccctttcttacacmatacacaaaaatgaactcaggatggattaaagacttaagtgtaaaacccaaaaatataaaaaccctggaagacaacctaggcaataccatcctggacataagaacaggcaaagatttcatgacaaagacaacaaaagcaatagcaatgaaagcaaaaattgacaagtgggatctagttaaactaaagagcttctacacagcaaaagaaactatcaacaaagtaaacaggcaacttgcagattgggagaaagtatttacaaactatgcatctgacaaaggtctaatatccagcatctataaggaacttaaacaaatttacaagagaaaaacaaccccattaataagtgggccaaggacataaagagacacttctccaaaggagacaaacatgtgtgctg

SEQ ID NO: 21386 - DNA, 565 bp, Homo sapiens
ttgaccaggggaaagatatggtcaaaagttacaggtatgttgggcaaagccttaggaatagcttttctgacaaacaagcaatggggaaaagactccgttcaataaatggtgctgggataactggctagccacatgctgaagattgagctgggcccctttcttacaccatacacaaaaatgaactcaggatggattaaagacttaagtgtaaaacccaaaaatataaaaaccctggaagacaacctaggcaataccatcctggacataagaacaggcaaagatttcatgacaaagacaacaaaagcaatagcaatgaaagcaaaaattgacaagtgggatctagttaaactaaagagcttctacacwgcaaaagaaactatcaacaaagtaaacaggcaacttgcagattgggagaaagtatttacaaactatgcatctgacaaaggtctaatatccagcatctataaggaacttaaacaaatttacaagagaaaaacaaccccattaataagtgggccaaggacataaagagacacttctccaaaggagacaaacatgtgtgctg

SEQ ID NO: 21387 - DNA, 565 bp, Homo sapiens
ttgaccaggggaaagatatggtcaaaagttacaggtatgttgggcaaagccttaggaatagcttttctgacaaacaagcaatggggaaaagactccgttcaataaatggtgctgggataactggctagccacatgctgaagattgagctgggcccctttcttacaccatacacaaaaatgaactcaggatggattaaagacttaagtgtaaaacccaaaaatataaaaaccctggaagacaacctaggcaataccatcctggacataagaacaggcaaagatttcatgacaaagacaacaaaagcaatagcaatgaaagcaaaaattgacaagtgggatctagttaaactaaagagcttctacacagcaaaagaaactatcaacaaagtaaacaggcaacttgcagattgggagaaagtatttacaaactatgcatctgacaaaggtctaatatccagcatctataaggaacttaaacaaatttacaagagaaaaacaaccccattaawaagtgggccaaggacataaagagacacttctccaaaggagacaaacatgtgtgctg

SEQ ID NO: 21388 - DNA, 528 bp, Homo sapiens
caaagaagataacaatacactcaataatgataaaaaatagaaagtgagaaattatttttaatattgtaagattcatattcctgtcttcccaaggattatttmtttattaataaactttactagaagttttgtacatgctcactgcagcaatcacagataagaaaaaggaaaagaactttacttaaaatacaaatgctcagaaattacaaattttatattttgtacatattttttgataaaacaagaccatagtatgtttgtatgtataacttaattgatttttttctcactagctataacaaaatacatcttcgcacatcaatatacttctgtatctattgccaccttcaatggtcacatattattccatcctgtggatgcaactgaagtttatttataggatccactctttgggttctttttaaaataagtgaggtgaaaaataaagtgcatgtatctttatttcctaagggtgttttagtataatggaattgatgggtaaagggcatacatattttttaattgtag

SEQ ID NO: 21389 - DNA, 533 bp, Homo sapiens
gcagctacagataaccacttcaattttaggagtacatgtcttagactgcatttcactctttcttgcccaatgtcccttttttgcggattctttgttatgaaccaagtgaagaaagatggcatactggtagtttgaagagttctttgccagcttataaagatttcaacaccttaaccctcatgaagtttgtgtgacttttcaggatttagcatacaataaaatcaaaacattcatagtgatatccaatggtaataaaatcttattctctctttctttccttccttctctcactctttctctctccataccctcctcctttgcctccttttctctttcacatatactcacacacaatatagctattaataagcaattgtagratcattcatatcttgaacaatgagatatgactgcattatttttagttagagttcattttaaatataaaatactagcaaatataatcaggtaatcacatagcataaacatggctttatataccttggaaatattggttctttctaatgtaaatg

SEQ ID NO: 21390 - DNA, 576 bp, Homo sapiens
cggccagggctggacacaagctgggcctgggtttgagctctcctggccatttggaatcgggtctgggagactctggtcacatggggtgggcyctgtctaactggaagagaaactggacttggggtgagggatccatgaggggcagccatgatagcagagggggctggtctgcagaggatggaatgaggcacatgcacaaaagcccggggccccaggagagaggctcccctgctcccagctctgccccttgcaccctcttcccagcccaggttccaggaagctgccctgtgtcctcagacactgccctcatggctactcccaacccacacagccctgcagaggcaggtggaggggagagcacttcttcatctccgggcccttgggattccagcagtcatggtttttgtgtttttttgtttttgtttttgtttttgagacagggtcttgctctgttgcctagtcttgtcttgaactcctgggctcaagggatccttcctcgttggcctcccaaagcactgggagccagtgtcatggtttaaaaaccgtttacagggctaggtgtggtggctcacgcct

SEQ ID NO: 21391 - DNA, 567 bp, Homo sapiens
ctgatctttcattctaaaatagtcctctaattatttattctgtttattttcctcatagcacctcttactttgatctgaaagtacattatttgtttattatctacatgattatggtctttttctcccctagagacatagggacaggggttcaatcttttcgttttcaacactgaaacactcagtgcccataacaatgcacagaggttctcaatcaatatttactcaatcagtcattatttaacaaatacttccaatagctactttttcctttacagctactcactccacccatcccatggtggatgggatcaggcctttgttctccagggaacgcccttgtcttttcctagattgagacttccacctggttttaaatgccttttagcagaactgatccaggtttattcagcacttcaagattgagtaaaaagtaaacawagaccaccaggctgtcaatgtctggcatgatgccatcaccacattaaagaaaagaaaaaggatttgaggtgaaaccttaactttatccatattcttatccaatagaaaagactatggaaaaaaaaaatg

SEQ ID NO: 21392 - DNA, 578 bp, Homo sapiens
  misc_feature (1)...(578): n = A,T,C or G
atatgaggagaaaatagtaaaaattcaaatctatatcttataaagtaaaaagtcataktttttaccctgctgtaagttctaaaaaaaannnnnnnnnnnnnnnnnnnnnnnnnnnnnnnnnnnnnnnnnnnnnnnnnnnnnnnnnnnnnnnnnnnnnnnnnnnnnnnnnnnnnnnnnnnnnnnnnnnnacttcaaaaacttaaagataacactcacagaattttaaatacccactggaacataaaaacaaaggaaatgtcgatgatgtagcaaatgacagaccacaaggaaaacagtataaatgtttacgatacaaaacaaaagcactctattaagaagtcagaaaaacaaactttagcaataacctgaatatgactaatttaacttcctttgttaaagggaaaggcaatttgttcaataagcaaatttaactatatactgctcacaaaaggtatctggaaaccaaaatggtacaaaaggttgatagtgtgtatactttacataaatggcttaatagataaatataaatagatattagaaatgattatattaaaatcaaacaaataaaattaatggta

SEQ ID NO: 21393 - DNA, 582 bp, Homo sapiens
gtaacttgggatctcttgatagaagacatatcaagatgggctattactcatgttactaagtatacctcatgtgcttcctctyggactagccctcattgagaaagctttagctaaaaaaagaaaaaaaaagtgatgtttccttgttgcaggctgctcagggttcaactggactttcaatttatattggggtttgagttttgtaagaaaagtggaaaaattcagggcattgtagaggtgaaagaactaccctagacatcatttagaacactacccaaagtgtgtttcacctgtagaatattactagaagttacaaataagggttccagagtcaaactagtttgagaaacactggattgaacaaagttggaaagtttgtttttttactgcaggacatctcaggacttttattcaggtgccttgtaaattcctcgagttattctctcatagaaaacacacacactttttttggactcctggggaaatatgatctacggagcctcagggctgtgaaatatctcagtatctcacccccagtcattcttagagcagcacccaagccccctgatcctccatccgtttctc

SEQ ID NO: 21394 - DNA, 582 bp, Homo sapiens
gtaacttgggatctcttgatagaagacatatcaagatgggctattactcatgttactaagtatacctcatgtgcttcctctcggactagccctcattgagaaagctttagctaaaaaaagaaaaaaaaagtgatgtttccttgttgcaggctgctcagkgttcaactggactttcaatttatattggggtttgagttttgtaagaaaagtggaaaaattcagggcattgtagaggtgaaagaactaccctagacatcatttagaacactacccaaagtgtgtttcacctgtagaatattactagaagttacaaataagggttccagagtcaaactagtttgagaaacactggattgaacaaagttggaaagtttgtttttttactgcaggacatctcaggacttttattcaggtgccttgtaaattcctcgagttattctctcatagaaaacacacacactttttttggactcctggggaaatatgatctacggagcctcagggctgtgaaatatctcagtatctcacccccagtcattcttagagcagcacccaagccccctgatcctccatccgtttctc

SEQ ID NO: 21395 - DNA, 582 bp, Homo sapiens
gtaacttgggatctcttgatagaagacatatcaagatgggctattactcatgttactaagtatacctcatgtgcttcctctcggactagccctcattgagaaagctttagctaaaaaaagaaaaaaaaagtgatgtttccttgttgcaggctgctcagggttcaactggactttcaatttatattggggtttgagttttgtaagaaaagtggaaaaattcagggcattgtagaggtgaaagaactaccctagacatcatttagaacactacccaaagtgtgtttcacctgtagaatattactagaagttacaaataagggttccagagtcaaactagtttgagaaacactggattgaacaaagttggaaagtttgtttttttactgcaggacatctcaggacttttattcaggtgccttgtaaattcctcgagttattctctcatagaaaacacayacactttttttggactcctggggaaatatgatctacggagcctcagggctgtgaaatatctcagtatctcacccccagtcattcttagagcagcacccaagccccctgatcctccatccgtttctc

SEQ ID NO: 21396 - DNA, 582 bp, Homo sapiens
gtaacttgggatctcttgatagaagacatatcaagatgggctattactcatgttactaagtatacctcatgtgcttcctctcggactagccctcattgagaaagctttagctaaaaaaagaaaaaaaaagtgatgtttccttgttgcaggctgctcagggttcaactggactttcaatttatattggggtttgagttttgtaagaaaagtggaaaaattcagggcattgtagaggtgaaagaactaccctagacatcatttagaacactacccaaagtgtgtttcacctgtagaatattactagaagttacaaataagggttccagagtcaaactagtttgagaaacactggattgaacaaagttggaaagtttgtttttttactgcaggacatctcaggacttttattcaggtgccttgtaaattcctcgagttattctctcatagaaaacacacacactttttttggactcctggggaaatatgatctrcggagcctcagggctgtgaaatatctcagtatctcacccccagtcattcttagagcagcacccaagccccctgatcctccatccgtttctc

SEQ ID NO: 21397 - DNA, 664 bp, Homo sapiens
taaggcgggcaaatcacgaggtcaggagatggagaccatcctggctaacacggtgaaactccgtctctactaaaaatacaaaaaattagccaggcgtggtggcgggcacctgtagtcctagctactcgggaggctgaggcaggagaatggtgtgaacccgggaggtggagcttgctgtaagccgagatcgtgccactgcactccagcctggcgacagagcsagactccgtctcaaaaaaataaaacataaaaataaataagttaattaaaaaagattgttatgaaaacactcacagggtcttcgtacatcaaaggactttttttctttcttttttttttttacaggttcacagtgttctgcattctccttttcctttgaattatctcttatttgaaactgcattgaaataaatcaaatgtatgttacttcatcaatgagacaaatgcttttattgttaagaaccagtaacaatttctactttcagaaacagtgactttagaattgtattaacattttgaaagctaacatcattatttttaacagttcccagaatttattctactaatatcgactaacctcaagctgcagatgcattaatttaataacccaggaacacattctcctgctcaattaccccaggaggttcgctatgtttttcttcaa

SEQ ID NO: 21398 - DNA, 568 bp, Homo sapiens
taatgagcgcctgggtgcagaygggctgaggcccaaaatgccatcagcctcaagtgaggatggggctagggttttgtagtctcctgtaaacagtaagtgtcccagtctgacgtaactgctacgtggtacaccgaaggactctctccatttccagggggtatgtgtcttctggccagctctcttcctgcttctaccatcttgctgaagcatgctgctggcacaagtggtcttgtgccttgggactgggcccgaggaggaaggagttattcatctccccaagctttcaggcccccaggctttcacctacctcatgatagccaccattgcaccagacatcacattcatgttcaagacaggaagaaagaagaagaggccatgccaacatctttcttctcacatcattcactttgtcagtagagcaagagctttcctaggagctcccaaacctatttccccttagtctttctgactacatctgtgtcatctggccactccgtgttgcaaggaaacctaggacatggaccatcaggcttctatttttaaaagatagacaagggaaatggggttg

SEQ ID NO: 21399 - DNA, 568 bp, Homo sapiens
taatgagcgcctgggtgcagacgggctgaggcccaaaatgccrtcagcctcaagtgaggatggggctagggttttgtagtctcctgtaaacagtaagtgtcccagtctgacgtaactgctacgtggtacaccgaaggactctctccatttccagggggtatgtgtcttctggccagctctcttcctgcttctaccatcttgctgaagcatgctgctggcacaagtggtcttgtgccttgggactgggcccgaggaggaaggagttattcatctccccaagctttcaggcccccaggctttcacctacctcatgatagccaccattgcaccagacatcacattcatgttcaagacaggaagaaagaagaagaggccatgccaacatctttcttctcacatcattcactttgtcagtagagcaagagctttcctaggagctcccaaacctatttccccttagtctttctgactacatctgtgtcatctggccactccgtgttgcaaggaaacctaggacatggaccatcaggcttctatttttaaaagatagacaagggaaatggggttg

SEQ ID NO: 21400 - DNA, 570 bp, Homo sapiens
tgcagatatttgggctacttttctgaggtttccacatctctagaattttgctcttctagtcctagccacttctgttgtccaaaattctgacttctttctccttagtccattgtaacttaaaggaaaattttcacgatgtctggagcccttgatatcctgcaaatgaaggagggggatgtcctcaagtttcttgcagcagagacccaattaggtggcaccaaccttaacttccaataacagaataccatctttttcctatacttcattcacctgtgctgtgatttagaaaatgccctcacggaagcagccagagaaaacatagactcaacttttgtgcttctcttctctcaaagatcataattatgccctaattatgttggttgttctccaatgccttcaatttattgttttacatgttctgtactgcttttataattgtttgctgtagagragtttgtccaagtgaccccatcatggaaactgaagtcttcaatataaacttcattacatagaatgcttagaggctgagttgagctttcacgcagaagcaagcataaatatatgtatcat

SEQ ID NO: 21401 - DNA, 1131 bp, Homo sapiens
aatgaacaaatatatattattcatggttatgggactatgaatatatttgtaagaaagagatttttacttttataggtattttattcagaaaaatgactatttgcatacacaccaaatagtctgaaatgctaataacaataggtttaatccaaaattatgttaaaatagtaatgcacacactattcttttagaaatttatggacattttacgttcttattcttagttgcagtaataaagctttttctctacaaaggggcataaaacaaagttaaaaaccaaaattctatttaatgcatatattaaaaaagatagataacactgtagatatgacatggcaatgttaactatgaaaataattacaggctgaggttagcaattaagtcattatgaagtgacatcatattgatataattttatttcattattattcttttaatgcagtaatcactaaaaatatacacatactccaggctgggcatcttcaaattcagctctttttcaggaatttggagctcttcagatcaacagtttccacaaacagtatattgcctttttctcttcactttcttggtgacgtttggctacctgataataatatattcaatacaaagtttaggaggaagatgcttccctcacttgattacattggatagaatagtttagacacacatggtttgtctataaccaacctaatttcatggtaaatattaaaagctaatattcatttatttattccttgatccccaacttcgtrccaggctttgttctagtagttatggctccatcactaactgaaacagaaaaaatttctttgccttctagcaactgacagtccagtgttcggaaggcagataataaacataataaacataaaaattgaccagtgctgcttaaaaagtggcagtacatatgatggactattttttccttatacagaggtgcagtcttatgaataatgcatcttgcctccgcaaagcattcagatactgatataattagactcatttctgaggtcctcctatagttcatgcatcaaacacaggcccttcaggcagctgtgtttgggtctataagcatgggatgttaaagaaatgagcacagtcatgctaacactgccctcactgccttac

SEQ ID NO: 21402 - DNA, 1131 bp, Homo sapiens
aatgaacaaatatatattattcatggttatgggactatgaatatatttgtaagaaagagatttttacttttataggtattttattcagaaaaatgactatttgcatacacaccaaatagtctgaaatgctaataacaataggtttaatccaaaattatgttaaaatagtaatgcacacactattcttttagaaatttatggacattttacgttcttattcttagttgcagtaataaagctttttctctacaaaggggcataaaacaaagttaaaaaccaaaattctatttaatgcatatattaaaaaagatagataacactgtagatatgacatggcaatgttaactatgaaaataattacaggctgaggttagcaattaagtcattatgaagtgacatcatattgatataattttatttcattattattcttttaatgcagtaatcactaaaaatatacacatactccaggctgggcatcttcaaattcagctctttttcaggaatttggagctcttcagatcaacagtttccacaaacagtatattgcctttttctcttcactttcttggtgacgtttggctacctgataataatatattcaatacaaagtttaggaggaagatgcttccctcacttgattacattggatagaatagtttagacacacatggtttgtctataaccaacctaatttcatggtaaatattaaaagctaatattcatttatttattccttgatccccaacttcgtaccaggctttgttctagtagttatggctccatcactaactgaaacagaaaaaatttctttgccttctagcaactgacagtccagtgttcggaaggcagataataaacataataaacataaaaattgaccagtgctgyttaaaaagtggcagtacatatgatggactattttttccttatacagaggtgcagtcttatgaataatgcatcttgcctccgcaaagcattcagatactgatataattagactcatttctgaggtcctcctatagttcatgcatcaaacacaggcccttcaggcagctgtgtttgggtctataagcatgggatgttaaagaaatgagcacagtcatgctaacactgccctcactgccttac

SEQ ID NO: 21403 - DNA, 563 bp, Homo sapiens
tacttaatttgctgtaaactgaatcttccctgtggacaaaatgatagaaaaaattatattgttaattatctccaaagttcaaattccctacagtaacctctggtagaataatttgaatgtggcctcaggtgttgatttttgaaatgcaaatacagttcaattaggcgcagcagctgtggctaaggcattgctgcctacactctagtttaatgagaattgatttgtcagtatgtatgttttcataggattgctcagtaatctggcctccgtattctatttcttcctaactttctgaatcaagtgattctcacacagagccygctgttggctcgtgggtttttttttttttttttgcattttaaaaataatttcctttataggagagaatatgtcttctataatttaatctctctaggcatctgatatatagtctgacacctaatagatacttttctaatatttgttaaaaaatacataagtcgctgaaatgcaaacctctggaaggttaaagaatttggccacagtgtacctataatagcttttgtaaaattactctgtattta

SEQ ID NO: 21404 - DNA, 563 bp, Homo sapiens
tacttaatttgctgtaaactgaatcttccctgtggacaaaatgatagaaaaaattatattgttaattatctccaaagttcaaattccctacagtaacctctggtagaataatttgaatgtggcctcaggtgttgatttttgaaatgcaaatacagttcaattaggcgcagcagctgtggctaaggcattgctgcctacactctagtttaatgagaattgatttgtcagtatgtatgttttcataggattgctcagtaatctggcctccgtattctatttcttcctaactttctgaatcaagtgattctcacacagagcccgctgttggctcgtgggtttttttttttttttttgcattttaaaaataatttcctttataggagagaatatgtcttctataatttaatctctctaggcatctgatatatagtctgacacctaatagatacttttctaatatttgttaaaaaatwcataagtcgctgaaatgcaaacctctggaaggttaaagaatttggccacagtgtacctataatagcttttgtaaaattactctgtattta

SEQ ID NO: 21405 - DNA, 584 bp, Homo sapiens
ttacaggtgaaaatattaaagttaggttgttttaatgacttgctccagattgccaaaccagtgattagaaaacttcagaaattatctccttcttttagctttaggactcttaaggtaaattataggctcaattacttcatcagtaaacatccaacaactagaaataaatggaagaggagaacctgaagccatttagaaactgtcaggaaaactcattgtaaaatacaatcaaactgatctgatgagtaaaccaatcctattattttctgatatcccctttgcagaaaatgtttaaacattccatatgggcacagaggaattctaaagagatgttcggtgattggcagatggatagatctttgtccattcacttgtgcagcttaagcccagtctctttcaaacttttggacacgtagagtcacctctccttaggaggtcataaaatctctatctttcaagtatctaaagcagaccttctcctaactggctggtggggttcctatyagaaacagttctaagccagtttggccatgcacgcagaccagacagattggacaccatcaaagttttgcagcagatgtggt

SEQ ID NO: 21406 - DNA, 531 bp, Homo sapiens
tggtataaggtgagttacacttgttttaaaatctaaacttccagatttacagagcttttgaaaatattttttctttggaaatttccattgtattcatttttttcatggtgctttttagaaagaatatgtggttctataagtctgattctttaatcttgcacatatcatactggttcacccaagcgtaactaaaagtaccaggatagatgtggtatatagtcctggaaaattaattttacctgacaatttggggaaatgaagatttgaattcttatgacattaagatattttgaaacatacatgtgcaagtaaattgagaagatggtaacttatacatgttagacaattcatgaggaatgagtggaaatgttgkttgttttgaattcttaggaaatctggtgctcttaaccctcctggtaaccaaaggggtatgaggatgaatgatgcttggctggtgtgtgctgctgtgtggcatgccagaacagggactgcagtatcagcattcacagacactggaggctggcacaggta

SEQ ID NO: 21407 - DNA, 629 bp, Homo sapiens
acttaacttttcaattttttctgatccaacaactaggcatactggcccttctacggacagtccttgtattacccacctcctctatcctactgtttattgtaattttgactggcatcctcataggcacattaaaattgctaggtctgcagctagcaactgtgatggccccatgaggatgtcacacaaaaatacaatgaacttttttttactatttttattttaatttatttataattgaccatataaacatacaaatatatataatttgaatagtaatgtgaggtccaataatttgatagttaattcagtaagcattttttgagtatttacattgagtttgaaatgtattggctgatgctttgcaaaggtaacttcagatttcatggaacttatcaygtatttggaagtataactaataaattgaataatgccattctatttattctatttaatgccattctacttaaagccattctaaactttggataaatattggttgaatgaatcaataaatgacatcaataaatgacaattattaatttatctatattatacaataaactcacattgttgtgtgctccctatctattgattcttgtttttgttgttttagcttgggtgtggggtgt

SEQ ID NO: 21408 - DNA, 511 bp, Homo sapiens
tataggaaaacaagaacatgagacacctctgttgtatgaacaggatggcagtctgaactgcaggacctctcagggcatttattgtgccagtgtgcaaagtgagtcttccagaagggagatcgtttgcagcgtttccctaacaggtgacccatggatatgtgatggaactcaggtggcgcgctggctcacatcacttctgagtggcagcgccaccatcagatgggcctggggcagcctgaggccacgtccactcccagaagatggtatctggggggccacacccaagggactgggggggatagcatggcacaaagttaagagtgtaggtttggaggtcagaccaacatgggactgaatcccagccccactgcttactgccctcagcccattacttaggacattttcatgcctctggagcctcagttaccccttctgtaaaatgggagtgataactgctaggatcttataagcatcacatggaataatgcttgctaagtgcaaggccccrtgc

SEQ ID NO: 21409 - DNA, 570 bp, Homo sapiens
cccaacaggggctccaagaggaggagttttatggtgcattcaagcagggccggtgcgctcaccactgcacccccaggctccctgggtggccgggtccaatgcctctgacccctctaggtgtgtccactgaacccatctggagagggtctcatcataaaattgcagaatctgatgagtgctgaggggaaggaggttgggggtcccacccatacccctggctcaacactccccaaaacccagaggacggttaatgccwacgcatggttgacaacaactgggtagactttcaggacacaaagtcatcaccgtatccctgagccctagtccgagttccctcccttccccaggagctggctaccgaggtccaggttcaaatttgggttctgcctcttggcaatggtggacaactaggtacactttgagcctcagttctggctgtctgtacccgggatggtgacactgatttccccaggctcccagggttaaaggctgcatagtgctcagcgcagagcatgacaaacaggggtctcagccattattccctgctgtgccccttggggcagtgcctca

SEQ ID NO: 21410 - DNA, 570 bp, Homo sapiens
cccaacaggggctccaagaggaggagttttatggtgcattcaagcagggccggtgcgctcaccactgcacccccaggctccctgggtggccgggtccaatgcctctgacccctctaggtgtgtccactgaacccatctggagagggtctcatcataaaattgcagaatctgatgagtgctgaggggaaggaggttgggggtcccacccatacccctggctcaacactccccaaaacccagaggacggttaatgccaacgcatggttgacaacaactgggtagactttcaggacacaaagtcatcaccgtatccctgagccctagtccgagttccctcccttccccaggagctggctaccgaggtccaggttcaaatttgggttctgcctcttggcaatggtggacaactaggtacactttgagcctcagttctggctstctgtacccgggatggtgacactgatttccccaggctcccagggttaaaggctgcatagtgctcagcgcagagcatgacaaacaggggtctcagccattattccctgctgtgccccttggggcagtgcctca

SEQ ID NO: 21411 - DNA, 647 bp, Homo sapiens
ccatgccagggtaatttttgtatttttagtagagatggggtttcatcatgttggccaggctggtctcgaactcctgactttgtgacctgcccgcctcggcctcccaaagtgctgggattacaggtgtaagccaccgcccccggccccccacttttttttttctttttaggagacaaagttttctacgttgcccaggctggcctcaaattcctgggccaaagcaatcctccagcctctgccttccaagtagctggaactatagacatgccacatatccagcatgcatttttatattttcaaggtatttccatatctatttgttcatttcagtttatgtactactgtccctatttgacagctaaggaagtagggcacataatcatacttcaagcccatagttcaggtggaaatggactctaggtcttctcatgccaaccaggagtcatggcttatttttcttatgcacagaggctatcacagttcaggacattttagtgaagccagaagaaacaggaattacatggccgggcacagyggctcacgcctgtaatcccagcactttgggaggccaaggccggcagatcatctgaggtcaggagttcgagaccagcctgaccaacatggagaaactccgtctctaccaaaaa

SEQ ID NO: 21412 - DNA, 546 bp, Homo sapiens
taagccaacagcccagagactgtcctctacctaaaatacacacactctgaaatgccttcggcattttgatgctaaactcacagatttctatttcctttctgactttcagctatatccatataaatggagcattgacaagtcattgtgtaaactaacccactmgcaaaatatccagctacagtcaggtccaactccacgggggggcccttgctttctctcactagcctcctggtgatgagttccccagtcttagagagtatctccagcctcacacatcctcctggaattcagcacctgttgggtagggttgtctcccaacaggcatctcctcctgtgtctctatcctcttccccactgggtaccagtaacccacatccaaaagcaatcagcccaaaaccctagtggaaatcctcttttctatcattaatttaggtataagcaaaataggaaccaaatacctaaaaatatttacagctcagcctgccatcatcctgtgccccttctctgtgcaaactcaccatcctcctgccacgagaattggatgtt

SEQ ID NO: 21413 - DNA, 530 bp, Homo sapiens
atagagacaaatctctaaatttaacttttattttgggaggcaagaattgaaattcagggcatacgcagaatgggtgttctttgatatgtctgaagaacaaagaaaaggttgggaatcttattagaaagagaaatgttacatattgttttgaaagaaagctcattagcactagagaagctcttgggagctggcaagctgtgattggtgagtggtgatggtaggcaaaactagtaagcgtcatggcaggttttttcggcagctactaggtaaaactggtcttaggattacagtagaccatttcaggagctgggcttgtggaaaatttaattccgggagcagatggtatgcaccctgagtgctagtttttttccctggcccttctactctgatttaattgggtctgaaaaaaatgwtccaatttttataatcaactttcacacaacttatgtaaaaaatttggaaatattcacataaatctatcagtcactctgcattaatgacagctagacaagtttgattattacataaga

SEQ ID NO: 21414 - DNA, 525 bp, Homo sapiens
aaaggaaaatgaattaagagattaaagtgatgaaatagttagtaagagaaatagaaaaaagaaaatagaactcccaytgaagaattaattgcaatccttaggaagtactttataaaagaacaaaatgtccctatgtagtaaaataaaaggcctcattaaaaggacttattattttcaaagtaaaattaatttaaaaatccatagaaagatactctgaatttttaacattatatgtgaaaaagaaataagcttgtatgataaaggaaatgtgttaagcatccaaacagagagaaagaaaggaataagaaggaaaccaaattatttacctaaaaagagtacacatttatgctggggtaagtttttttttctccctctgaggtgaaattgctaggagaccttgggtcaacatttacagaattttgaaggggaaggatatactcagatacaccatagtacagagaatattctcccaaaacaggcttcttgggaacgaaatacttcaagacatgcacaagttaatagaga

SEQ ID NO: 21415 - DNA, 454 bp, Homo sapiens
tttcctttgtacagatgttctttacagtcctttctacaaagaaacctccttttctagaaataatttgccttatttgtaatttttatcatgaaattttttaaaacttgcacaaacataagcagaattgtataataatccctcaggtgattatccagcttttaatattacctactcatagccaatctgtgtcttttgttcttccactcatttacccctacttctgcgttattttgaagaaaatcctagacatctcatttgatctgtgaaaaatttctatatgtagctccaaaagataagagctttaaagaaaaaacataatgacagcatcgtaacacctaaaaattagcaatgattctttcaaatgatcaaatattccrtgagtgttccaattatttatgtattactgattttatagtctgtttcaatgaagatccaaacaaggttcacatatggt

SEQ ID NO: 21416 - DNA, 544 bp, Homo sapiens
  misc_feature (1)...(544): n = A,T,C or G
cataaagataatctaaagtgcttttgaaaactgttcttggacttaatccccaaaatgttttcaattaatacatctaaatgaatctcagaacatgtgacaagcacccctgacaattctgagacaggttcaatggactactttttgaaaaccattgcttggcctatataactcctagcaggtggttatatgcctgctagaaaatgcacacacactgtatactttggatcacttagaattgtcaacatatactcaagaaataggaaaaacatctcattaatatttcacaaaagaggaargcactgttgaatcaggtgttttatttaagatcattaggcatattagagaaaaatcggtcatagaggctagggtataactcagatctcctacactaactggaagccactgggtcacctttgctttcattagtgtctnaatttccattattgctctgtgcttagcattcttctaggaatagaaatcattcctcagaactcactgctttaaaggttcaaccagctgaaaacatttttcaaattgtacagca

SEQ ID NO: 21417 - DNA, 525 bp, Homo sapiens
aaacacatcaagttttcctgatatctcattctagccttctttaatttgatttaatttatctttaacatttaaaacagtatgaaggaagtggtctataaggtttatcctataatattctagcttcccaacctcactaccatgaaatcatttttagtatggtgctaggatatttattgaatatgagcttttttttccctttacttaactgaatgaaaaagagctgtgaagctttttttgtttccaggaaacacaattgttttgaattagtagagtgtttgtcgaaggagttcagcaaagccccactattaccctggagtatgtaactctcagtatagttttctttctattttcataaggttaactgtttctccatataaaacaagcttaataactagcagggtgatcctttgcctttgcatcctctgttacatataaaacttttgatattaaaaatgatttttctcctccatcatttccttctcctccttcscttcctccccctcctccttctttcacttataaaag

SEQ ID NO: 21418 - DNA, 917 bp, Homo sapiens
tcttgacaagagggatggggccataatggcttaggtcaggtcacctgccatcccagggggtacagggacygggctctgtgatgacagtcccagaagaatcatccttgttctccaaaggaaagggacgtggtcctacatcatgcaaaggaaggggcagacccttcctttcctttctcttccttccactgccccacccttgacaccccacttcccagagaccattaagaccatcaggtgaccaactgccaggtgggaaaggacctgaatgacttaccagccatttgtaccttcaagtgaattcatttcagggggttgctctcatccctctcagttaaatggtgttcagatagtggaatgagggaatggaggagatactggaatgtggctgaatatttcatcgagaagggaggccagctttgtgttttgttttctacaccgtcccagtgagcctgctccagaccaggaatgctcacaagcacctccaccgttcatcctgaatggctctggaggtcaaggctgggaaaaccgtgggaaggtggtttgggggtctcccttggtctaccccaaggttttcccgggggcagcccaacccaagcctcctgtgaagcggaagccacttccagcacaacacttggagcgcttggagcaccttgtggccgacatcgaatgtcattcctgccctacatcttcgctgcattcatcaacctacattttcactgcattcatcaatgccttaggtggtcacagcacccgttcctctggccacagtggtaggctcaggagtgggcaattggcctcagccaggccatttggggccctctctgaaaatggctgtgtttgctgttgttggtaaagtggcttttccttttgggtgtggagctgtgaggacacccgtggaggacagctggggtgccccc

SEQ ID NO: 21419 - DNA, 689 bp, Homo sapiens
tattttaatctgttttaatgctcctgataaaggcataaccaagactgagtaatttataaacaaaaagaggtttaatggactcacagttccacatggttggggaggcctcacaatcacggcagaaggtgaaaacgatgtcttacatgtcagcagacaagtgataatgagaatgaagtgaatataaaaccatcagatctcgagagacttattcactaccacaagaagagtatgggggaaccaccctcatgattcagttacctcctaccaggcacctcycacaacacatgggaattatgggagctacaattcacgatgagatttggggcatagccaaaccatatcagtgacattctatagaaaatgaagacacagctaaagaatacaaccaagaaagaaagaaaaaacatataatctatcatctcaaagaatgccatagtaaattatgaaaataattaaatatatgcaggaaaagcaatatacatcaaaattagaaaacatcagtactgagatatctgaacaataggagaacattaagagagagttgagtatgcccagaaaatattttgaaataaaagaaaatgttatttcagaaattaagcctaaactaaaaggaacataagagcatagaaattattgtatgagaaatcaaaatagaaataaaaatttgaagaaaatgaatcataaagcaa

SEQ ID NO: 21420 - DNA, 1261 bp, Homo sapiens
tgcccgccttggcctcccaacatgctgggattacaggcatgagccaccatgcctagctgggaaaagatttttaaaaagcatattttattttttccctttatttgtaagatcactttgatttcacaaaagaggacaagattcataggaaagcaataaaatcaataataacttccctaaagacatttaataacaacagataatgaactttttttttttttttgagacaagtttttgctatgttgccctgggctcgaattcctggtctcaagcaagccctctactcatgcctcctgaatagcccagattacaggcttgcagcaccacacctgactttggtttagaagattttgacatgacccgcttaaaggaaatgggtcaacaatctttttttttcttttgatagtgtctcttgctttatcaccctggctggaaagcagtggtacaatcatagctcactccacctcaaactcctggactccagtgattgtcctgtctcagcctcctaagcagttgggattatatgtatgagtcactcatcaacaaggatcaacaatttttagatggtattgtaagtaaagttcactgccctagaacatttgtggagggagctaagggaatcaatattatctgtattcaggatcgtgtctgtataaccagaagcagggtagttctcactgtggtaactgagataaaatcatgttcttgatatgcatgactcaggggtaaccaacaccaaatttagttaccaaagacttttataaagtgaggactgcctgcatgcatgtttcttctcttctaggaaatgggaagattgcaatatcactgaatgttaagcaaacagcatacattcactccacttgttccatgtgttcttgtaccgggatctgctgctttctaattttaacttttagattcagggaatacatgtgcaggtttgttagatgggtatgttgttttttgtttttttttttttctttctttttttgagacagagtcttgctctatcacccaggctggagtacagtggcgcratctcagctcactgcagcctccgcctccctggttcaagcgattctcctgcctcagcctcccaagtagcttgcgccaccacacccagctaatttttgtatttttagtagagattgggtttcaccctgttggccaggttggtctcgaactcctgacttcaagatatccacctgcctcggcctcccaaagtgctgggattacagatgtgagccaccacgtccggccccaaggg

SEQ ID NO: 21421 - DNA, 584 bp, Homo sapiens
atatttagtttaagtaaacaaacatgacttaatcttagattttgcacttgggctatttataaactagtttgatgaaaagtagatctaagtagatattaacataaagtgtaaagtggtaattataaatttaacactttcagcaacgataaccaacttttgattagattatgctgtatttaactaattcttctcaaagcatcaaattactcttcaaatttttattgttattactatagtctaatttaagaaattagtctcagtagcatcaaaatcatactagtttagcaaatgatttctataatgccctattatwatggttgcaattcagtgagttcaatgtaagtagtgctttgccagaactggaaccactgtgctttttaataatttcggaaactcaggtaagctatcattataatttttgttttgttttgttgctttgatctttcaacaaaaaacaatcattcaaagtttagaaattaagattgagatacatcataaacattgataataaaagttcaaatgagtaatagtgtcaaaaaccaagctatatttaaacatttattttatttattatttaattattt

SEQ ID NO: 21422 - DNA, 546 bp, Homo sapiens
tgtgtttctagaactaacatgtttcttagatttctatccaacatttttatataagtttgttttgtacaaacacacagatattacagttcagagaatgtttaagcctaaaactttctaatatgaacttgtggagaaaaaaatattaagctctctaccaaagagttaagtcatctgtaatggattatcctatatttaaactcaaatgtggtattatcatttgtagaattcacgtgtttctacagtgtgttcaaaaacaggttttataaaatggctaatttgtggagccaacacagctataatagaatcattttgtgatttttgcgtcatttttataattgtcctggaaggagaaaaaagtaacggattgttctttttctacgtatcatctatcaatgaattagggatggtaaattccagttttcagctgctgatttcaaattcaygtaataacacgagttacaggtaaatgacttaaaattgcaatcaagaactcttcccttccaagtcgtgttacttggtcatagtgacctgatttagagtgaagag

SEQ ID NO: 21423 - DNA, 1151 bp, Homo sapiens
ttgttctttttaaatttaaaaacatgtaacatttttctgattttcagaattttattgaatatgcccataaaaataaaaaaaaaagagagaaaactaaagaatggtgattgtggtgaggtggttaaagcttttctgcagatgtgttaagtagaattcaggagtccaagtgaggaaatacatgccctattttatcagttacacaatagtccagtttctctgtatactattagagcttaaattatgacaacagaacagtggctattaatgggttttttaggacctgaaaatacacaccatttcccataattcaatttgctatatgaattatttgatcagttatcacargcctctaagagaaaatgaaaaagaaatttaaatgggatccttgacagttccattcaccattggttgatagcaaggttatcttttttattgaccatgtttattttaggagatgacattctgttaatacaggacactgtatcaaacaacagaaaaaaatctaaacatactaatcacatgaaatgtgaaagtgaaataagatactcttatgaagcatattttatcttcttacggactgattttgtgattggtacttttcatgcaagtaatttattatgtcaaaactcaaaagaaaattgctaaaattctgtaacacaataaaaaaattctacagtatgatgggccatggttttaatggccatatagataatctatgttataaagataaattgctatattctgtgtgctcttttggaagtgagtctgccccagaagaggaaaaatatattcctatagactatagatgaattatatcattccattacaaaggtgtcattgataaatgttttaaatataggtatatatgggaaaacatttaccaaagataacagtttgctcatcaacaagacgacatttatgatgttaggtttatctacagaaaatgtagttgtatgactctctatgaaagctgacttatgttcatgtatgtgaggataaatatctgcaatttacttatatcttaaaaaatgttaagtatgctataggtatcaaatattatattgtttccttttttggcaggcacttataacctttatttatttaatgcataagaaaagtatatttctcttatcctctcaatgaattctttt

SEQ ID NO: 21424 - DNA, 598 bp, Homo sapiens
aaatccctaatttaaatagatggaggaaggatagtaaggtatttccaactgaaggagtaatatggaaataaaaaaaaagtaaccatgacttgcatgttacttatgagaactctattggctttgattaatttataacaggkattggcaatatttcagaagcatgggtacaagaaattaccactcttcttttgaagagatagagactggtagggtaagatctcataacctaaagtgagcaaagggcttcattatggctcaaggttcagaaacatttcccataaatatttcgccattaatgttaacatattcttctttaaaatgcagatgtcaatcagaaaaattcaaatcatatcaccttgtataacctagctgagactaaccccaaagagggaatagaaaattacatgggggagggaagaggggaaatttagagcttaggtcttgggtagaagtcagaatcgtaggtggatgtgagtgctctggcaagctgaaggcaggtgaggaagcctgcaggtagtgggggtggatactgcaggagagggaggaggcagtctttgcctactgtgcagttttgcctagggcagctaattgcttgtgc

SEQ ID NO: 21425 - DNA, 490 bp, Homo sapiens
cacctcttatccttttagaagtcaatttagaccagatgagaattatctatgtattattgtattctgcatgaatttgggattacagggacaaataatgacccataaaccatttttttccaagaaagaacatactttcaaaagcaaatatttgccagacgcagtggctcatgcctgtgatcccagcactttgggaggccaargtgggtggatcatgagatcaggagatcgagaccatcctggccaacatgttgaaaccctatctctattaaaaacacaaaatttagctgggcatggtggcatgcgcctgtagtcccagctactcaggaggctgaagcaggagaattgactgaacctgggaggcacaggttgcagggttgcagtgagctgaaattgtgccactcactgcactccagcctgggcaacagagtgagactccgtataaaaaaaaaaaaaaaaagtctataagtggctgggcacagtggctcatgca

SEQ ID NO: 21426 - DNA, 490 bp, Homo sapiens
cacctcttatccttttagaagtcaatttagaccagatgagaattatctatgtattattgtattctgcatgaatttgggattacagggacaaataatgacccataaaccatttttttccaagaaagaacatactttcaaaagcaaatatttgccagacgcagtggctcatgcctgtgatcccagcactttgggaggccaaggtgggtggatcatgagatcaggagatcgagaccatcctggccaacatgttgaaaccctatctctattaaaaacacaaaatttagctgggcrtggtggcatgcgcctgtagtcccagctactcaggaggctgaagcaggagaattgactgaacctgggaggcacaggttgcagggttgcagtgagctgaaattgtgccactcactgcactccagcctgggcaacagagtgagactccgtataaaaaaaaaaaaaaaaagtctataagtggctgggcacagtggctcatgca

SEQ ID NO: 21427 - DNA, 598 bp, Homo sapiens
gggttgagtcaggatgtcagattcgttaattgaatgaggtagaaaagacagccattatttctcacacttcacagttgcaaaagttstaagacttagttataatatgaacgatatcgtaggcttcaactctaaatgttttcttagaaaaagaaaacaggagagtttcaagatgtaattgatttccaaattagtcttttgcatggatttcttttttataatatgccattctctttcttgatttaggcatatatttggatttttatatgcaatcaatttgttcttaacactaatagtgccaaactcaggataatcagcatgtttattatcatttcttctacctccttaaaggtagcttcttactgatgtcaggataccttctctttacttctgcttaataagagctatttggctcattctttatgtgtgtaaaaaaaatctacgagctaaatcacttatttttttaatagataagaattattatttgcttctctgaaaatgtcttcaagctagtatttatgataatttttaacataatgactttggacatcaatcattgaagactggcagacatcatttctaaatgttttaaaagatttta

SEQ ID NO: 21428 - DNA, 598 bp, Homo sapiens
gggttgagtcaggatgtcagattcgttaattgaatgaggtagaaaagacagccattatttctcacacttcacagttgcaaaagttctaagacttagttataatatgaacgatatcgtaggcttcaactctaaatgttttcttagaaaaagaaaacaggagagtttcaagatgtaattgatttccaaattagtcttttgcatggatttcttttttataatatgccattctctttcttgatttaggcatatatttggatttttatatgcaatcaatttgttcttaacactaatagtgccaaactcaggataatcagcatgtttattatcatttcttctacctccttaaaggtagcttcttactgatgtcaggataccttctctttacttctgcttaataagagctatttggctcattctttatgtgtgtaaaaaaaatctacgagctaaatcacttatttttttaatagataagaattattatttgcttctctgaaaatgtcttcaagctwgtatttatgataatttttaacataatgactttggacatcaatcattgaagactggcagacatcatttctaaatgttttaaaagatttta

SEQ ID NO: 21429 - DNA, 565 bp, Homo sapiens
tgctagattgccttccatgaaagccatttgtgcctaggttctctcttccatgattgctcttttcttttcttttctttttttttgaagaatgggaatgaagattcccattcttcagattttagctcaggcatcaattactcgagggccttttctgacctcccttaccacattagctccccccaacccctctgtatgttctcataacattatccttctcctccccagcattcataatagtttcyagtttgacttctttgtgattatttgattaatgtctgtttccttgaccacgttttcctggtccgtgagggcagggaccttgcctgattttgcttatcatcataattcttgagccctgcataggcttggtccagaagcagattccagtgagtgcttgtgtgttgtatgaacgctgtactcggaagtactacatcatgctgtcctattttatgctgataaatgaacttcaaataattttactagaaaaaacatttatttattatatgtatgcaaaataagtcttaattaggaacattaatacagatatcctaaataaaatattagc

SEQ ID NO: 21430 - DNA, 1033 bp, Homo sapiens
tcaggaggctgaggcaggagaatcgcttgaacctgggaggcggagggtgcggtgagccgagatcgcgccattgccctctagcctgggcaacaagagtgaaactctgtctcaaaaaaaaaagaagaagaagaagaagaagaagaagaagaagaagaagaagaagaagaagaagaagaagaaaaagagaaagtaataaagaaagaaagaaagaaaaggcaaggccaggcaagtccaggcaaggcaaatctacctgctttcactacatctggggagaatcaggaaagtccccaacaacaacaaggcctaaagtggagctgccatctgtcaaacccgagcggaagagtccacgcgggttaaagacacgaagaaagacaaggaaacccctgaccaaggagaagaacaatcgggcccagccagggtctgtctcccggggttgtctgggcaaccagggagggcgggcctccgagactccgtctcgaaacatcaatcatgataataacataaaatgaagttaaaaaaagaaatcacgcataattcctaacgtgtttgaggcctcgaaaggcgagaggcgtacgtgtatgtcacggtggggttgttctgttttgttgtttttttcttttttcttttcttctttttccccagaaactcactttttaattattttgttgcgtttcattttcattttcattttttggagacggagtctcgctctgtcgcccaggctgggttgcagtggcgcgatctcggctcactgcaacctccgcctcccaggttcaagcgattctcctrcctcagctcggcctcccgagtagctgggattacagacagtacagcacagcacagcgcccggctaatgttgtgtattgtgagtagagacggggtttcaccatactggccctgttggtctgaccgcctcttgatccaccggccttggcctcccaaagtgaggggatgacaggcttgagccaccgcgcagggcccatttatttattttattttatttatttattttaatttatgtatgtatgtatgt

SEQ ID NO: 21431 - DNA, 2353 bp, Homo sapiens
  misc_feature (1)...(2353): n = A,T,C or G
agaaaagaaaagcaaacggggaaggggcatatctccttgaccggtgactgcccaggatacagtgggtcacggccgaccgaagcctcgacctgtggggcctcaagtgatcttctcctcgtctcagcctcccgagtagccgcgactacaggcggccatcaccgcgcacaactcatcttataataacatcatgattctctcgagacggggtctcgctccgtcatccaggccgcatcgccacggcacgatctcagctcatcgcaacctcggcctccccggttggaacaagtcgcccgccccagtctcccgagcggtcgtgattccaagcccacgccaccaggcccggctaatcgttctatttttcagagagacggggtttcgccacgtcggccagcctggtctcgaactcccggccccaagcgatccacccgcctcggcctcccaaagtgccggagtgacaggcgtgagctagcgtgcccggcccagatcatctttttcatcaattgtagagaaggggtttcgtcagccaacgggtggagggtggggcgggttttactcagcctgcgtactgtgaaaaggggaagtgagtgtgctctgtgaactagatatggaaattgtgtgtgtgtgtgcgcgcgtgcgcgtgcgagagagagagagagagagagagagagagagagagagagagagagagagaccaatcccaccacgaggacccggaaatagtgtttgatctgtgtccctgcctagtcacctgtcttgtgtgtcgatgactgaggattccacaaatgaaggtcagcggtatctattgagctgtttctccctctcgtgcgtctcatctgtgtgctggagaaagggaagagaagaggttccgatgggaagttgtcttcacgcctgaggcagctgaaggcagaccgaagggaaggagggcatcctaggtgacatttccatacccacgcaccctttacaatgctggggctgccagtccaccctgtacgtcaacccacccccaagaacagcacggtccggggtggtccagtctgatcccaaccggcccacccggggcatccggtggaagtcttcgccggaggatccgaaggcagcatcaacgcggttcccctggggtcgcccggcaaaggccagccgggggagggtagcgggacgtgacgggggggtgggggtcgcatccgcctcagagctccctggaaggtggcaggtagccggtggggcacgccgagccagagacgtccggcaggatatagatctggaaggcgtgtcagtcctctcccatacctctcctatggaaaaygccagggcggcggtgggagcctcggctgggggagaagcggggacaagggggagagggaaggaggccctcgggaggtttcggcaccgaaaacccactcagccaagctccctccgtgtttccgggtccaaggtacaccccgggagacggcaagagaaacgttcacaccgtgctttccgtcttcgtgtttatttctttcatcttttccattttacgagagatgctcatttcaacaaccagacggcggatgtgacgggagaagcgtcaaggccaggagtttgagaccagcgtgagcaacagagcaacacacgtaggagagcccagctgaaagaaatgaaagaggaggaggaggannnnnnnnnnnnnnnnnnnnnnnnnnnnnnnnnnnnnnnnnnnnnnnnnnnnnnnnnnnnnnnnnnnnnnnnnnnnnnnnnnnnnnnnnnnnnnnnnnnngagaaggaaagaaaagaaaagaaaaaaaagaaaaaggaaaacaaccaccaccaagaaagttaagattctccaacggtcggaagttgaagaccagcctgaccaagatggagaaaccccatctgtagtaaaaatagaaaaattagccgggcacgatggctcatctctgtcattccagctactcgggaaggctgaggcaggagaatcacttgaacctgggaggcggagggtgcggtgagccgagagccgccatcgtactccaccctgggcgacaagagtgaaactccgtctaaagagaataaaaagaaagaacgaaaaggcggatcggtgagatgcgtctggaaattttcttcgttcgcagtccccgtattaaaaacggaaagaaccgacccacgacaaacacgaccagagcgtaccgtgcccacgcgtgtcatcacagcactccgggaggccgatgcgggaggatctctggagcctaaaagttcgagatcacctcgacacgtgagatgacgcctacaataataataatcatagaagtttgaaaagagaccacgtgtgcccagagcatggacaataaagcgagagcacatccgtactaaaaag

SEQ ID NO: 21432 - DNA, 546 bp, Homo sapiens
ggaaatcagggaaattcttctatatatcctatattagataatattaaagatgaagaattaactttgttgggtatgataatgacatcacatttttcaaaaaatgttttatttgtcacaacraaccctacctccattactggtccttggctctcactgccatttctctagtttgtacttgatgcgaatccctccactcttccaaagtatgctcagtggaatcgagttgaaacattgaatatatacatacacacttagcacaatggcttctaaagcatttttgctcttggtttgctagattttaatctcataataatctttaactctttttagtagtaacagtagtgatactaatagtagtaacacaatattagtaatgtagtggttatgaaggctatatattttctccacaatattcatattcattgcatgactttttgatattgatatttttctttttaaaaaaatcacataatataggagaagcaaacctatacctagagtataaaaaaattgggttatcatcaacctgtggtaggtgagctgtta

SEQ ID NO: 21433 - DNA, 970 bp, Homo sapiens
catatgttctctgggatatgcagatatatccttgggtgttagaaaactttctcccagaacttttaaagtataggttttcattgtgaaaattatttttaaaaaattagttattaagtttgagcctaacaccatgtttggaggctaaagagaaaaagaatagagacataattaatatgtaaatgatgcattcattcaaaagacaccagggtatgtgtactaatgagtgttttacagtgggtcaaaaacagatgagtggtaggagatttacgtcattgtaagatgcacagtgccaaactcaaaaccacctgcagtcagtccctaaacagagcactgtgctatattcatattaacatttcaagtggcaattcagtttcagcaaaacacaattattcattaacttaagttaattgtggttaatttaagtattctttttttaaaatttatttttagaggcagagtctcattctgtcacccagrcaagtgcagtagcaagatcatagctcactgaaatctcaagtgagctgggctcaagtgatcctcccgcctcagcctcctgagtagcgaggactataggtatatgccacaatcctcagctaattttcttatttttattttgtagagacaaggtgccactatgttgctcaggctggtctcaaactcctgggcttaagtgatactgccttggccccccaaagtgctggattccaggctaatttgagttttgttggttttgtattcctgtttatatataatttgtaaatatttttgctttgttcagttatatcaatgtattaaatcacattgttttatatttatcatacataattaactaatataagtaatatgttattaataagacttttagatatattttttaaggaagctgtgtgtttcaaagagatgtggagaaatcctcctccataacatacttgccaggaaatcattcaatgtccttgacagcaattgatca

SEQ ID NO: 21434 - DNA, 1254 bp, Homo sapiens
  misc_feature (1)...(1254): n = A,T,C or G
tggctttatcccatctctatatccaatgcagggtaatgggcatttagcctcttctgcttccatttctcaacatrctacctctccttatgtctcctttaggcccaggataaatgccactgtgcttctgagctgactcggtttggtttcccagttggatattgggtcctttctccactggctctgagcactcagctggtttcccctcctggacttttataccctgcgagcgggaggggttctgtgcaggctcctcttccccagaagcagacaccttaaggtggagctcagtctaccaccagacctttctgggccctttactggttaagggcggggacagtgtttgaggagaagaggaaaggagaaaggagggatggaggcaaaaagaagaaaggagggaaggaaggaaggaaggaaggagagtacttattaatcaaatactttggccatattgcaggcttaagttgtcatggcaagcatctgtgaatggggtgnnnnnnnnnnnnnnnnnnnnnnnnnnnnnnnnnnnnnnnnnnnnnnnnnnnnnnnnnnnnnnnnnnnnnnnnnnnnnnnnnnnnnnnnnnnnnnnnnnnnctcccttggtgggcttctgtgagtattaaagtgagataattatgggggttcaaaaggggagcatttcagcgttttctcctcctcccatcccacttgcaaattatccccacagtgagccacgtgatggtggaggtgtcagagccctcggggattctgggaggaggaacaagttgggactcacaaaggtattgctggcatgcagagtcattcttggtagcaccttgggcaggtatcagttccttgccccactgaagagcgtggcacatagcacagaagggagagaggtttgttctcttcttgcctaaatactgtgttcctcccgggggagttctcaggccagaccagtagatggtctcctgcccgcctcctgttttttgacgctggtgcaattctgccctccattggtgagcccaggatcactgattgtgatactggacttccagcctggacctctggctggctcccccaaggatgtgcctctgggaactgttccagcctccatgacctgtatttgggctgctggtctcatggaagttatgtcctcatggagatatgagaaggatcgtctgtttatatctctaagcctgagctgcagactgttgggttgctgtggtaggaattctccatgggtgtggaggccattttttccatagctgggaaaaa

SEQ ID NO: 21435 - DNA, 1254 bp, Homo sapiens
  misc_feature (1)...(1254): n = A,T,C or G
tggctttatcccatctctatatccaatgcagggtaatgggcatttagcctcttctgcttccatttctcaacatactacctctccttatgtctcctttaggcccaggataaatgccactgtgcttctgagctgactcggtttggtttcccagttggatattgggtcctttctccactggctctgagcactcagctggtttcccctcctggacttttataccctgcgagcgggaggggttctgtgcargctcctcttccccagaagcagacaccttaaggtggagctcagtctaccaccagacctttctgggccctttactggttaagggcggggacagtgtttgaggagaagaggaaaggagaaaggagggatggaggcaaaaagaagaaaggagggaaggaaggaaggaaggaaggagagtacttattaatcaaatactttggccatattgcaggcttaagttgtcatggcaagcatctgtgaatggggtgnnnnnnnnnnnnnnnnnnnnnnnnnnnnnnnnnnnnnnnnnnnnnnnnnnnnnnnnnnnnnnnnnnnnnnnnnnnnnnnnnnnnnnnnnnnnnnnnnnnnctcccttggtgggcttctgtgagtattaaagtgagataattatgggggttcaaaaggggagcatttcagcgttttctcctcctcccatcccacttgcaaattatccccacagtgagccacgtgatggtggaggtgtcagagccctcggggattctgggaggaggaacaagttgggactcacaaaggtattgctggcatgcagagtcattcttggtagcaccttgggcaggtatcagttccttgccccactgaagagcgtggcacatagcacagaagggagagaggtttgttctcttcttgcctaaatactgtgttcctcccgggggagttctcaggccagaccagtagatggtctcctgcccgcctcctgttttttgacgctggtgcaattctgccctccattggtgagcccaggatcactgattgtgatactggacttccagcctggacctctggctggctcccccaaggatgtgcctctgggaactgttccagcctccatgacctgtatttgggctgctggtctcatggaagttatgtcctcatggagatatgagaaggatcgtctgtttatatctctaagcctgagctgcagactgttgggttgctgtggtaggaattctccatgggtgtggaggccattttttccatagctgggaaaaa

SEQ ID NO: 21436 - DNA, 919 bp, Homo sapiens
agcccagccaagaaaggtggaacccagtgaacaaaatcaaccagcaaacatgggaggtggccaaaggcagtgagagatggatacagttcagaggcagctattggatatttccctggagaatgaggcataaacgcacttggctttcagagtcccagtttttagggccttcccaccctctctgattctgcaaagactcgtgtgtatgggatgggagtggtggggggagatctgggccctggccaagacttcagtcaagagcatctgtgccgttcacccccacagcaaatcccaaccatgtgtctccaaacagttgttgaaatttcatgttctcgagttaagtagttcttgccccagtttcaaaaccagtcattatcaagtttaagtaaagggatgttttcccttcctaaagaacaaccttccagcctgtcttgtatcttcatgtctgtgagttgcagtgagagttactacagaaggatttgtgttagaaaacgatcataaaactagggttagagttagggtaccctaactgtggtaacaagggcaacgaggagatccctttagttaygacaaagccagcctgtgagtcagatccaagggcacactggatgcctactctgtgcaccccactgacttctctacactttttgtgggaaacacttagcctgctctcaagtccgaggtgtttattcaaccagttaaagaaggagtttaggctggacgtggtggctcacgcctgtaatcccagcactttgggaggctgaggtgggcagatcatttgaggtcaggagttctagaccagcctggccaacatggtgaaaccctgtctctactaaaactacaaaaaaaatagctgggcatggtagcacacacctgtaatctcagctacttgggaggctgaggcatgagaatcacttgaacc

SEQ ID NO: 21437 - DNA, 919 bp, Homo sapiens
agcccagccaagaaaggtggaacccagtgaacaaaatcaaccagcaaacatgggaggtggccaaaggcagtgagagatggatacagttcagaggcagctattggatatttccctggagaatgaggcataaacgcacttggctttcagagtcccagtttttagggccttcccaccctctctgattctgcaaagactcgtgtgtatgggatgggagtggtggggggagatctgggccctggccaagacttcagtcaagagcatctgtgccgttcacccccacagcaaatcccaaccatgtgtctccaaacagttgttgaaatttcatgttctcgagttaagtagttcttgccccagtttcaaaaccagtcattatcaagtttaagtaaagggatgttttcccttcctaaagaacaaccttccagcctgtcttgtatcttcatgtctgtgagttgcagtgagagttactacagaaggatttgtgttagaaaacgatcataaaactagggttagagttagggtaccctaactgtggtaacaagggcaacgaggagatccctttagttatgacaaagccagcctgtgagtcagatccaagggcacactggatgcctactctgtgcaccccactgacttctctacactttttgtgggaaacrcttagcctgctctcaagtccgaggtgtttattcaaccagttaaagaaggagtttaggctggacgtggtggctcacgcctgtaatcccagcactttgggaggctgaggtgggcagatcatttgaggtcaggagttctagaccagcctggccaacatggtgaaaccctgtctctactaaaactacaaaaaaaatagctgggcatggtagcacacacctgtaatctcagctacttgggaggctgaggcatgagaatcacttgaacc

SEQ ID NO: 21438 - DNA, 1256 bp, Homo sapiens
tgtgttgcaagaatttacttttacatgttaattcatttatgcatttgatgtcttttttcccccatcatgtattacagtaggtttatctgaacatcttgcccaacctttcttcagcactctgccaagtattctggattttcacatttctgaccactgcatcctaaaaatttctacagctcaactgtatatttgcagaacacagcacaattaaaagtcaagaaggaggagacagtaaaggacgatgagcaagtatgaagagattcttccttcccacactgagtgctgtggtcagtgcccctgtgtctgtgagccaggtgccgactcccacccagtactctggtgatatctgctggcctccgtgattgctgcttcgtgaggtttcattgctgggaggtctgtgagcttccggaggaagtggagggccacttaccaatctgtgtatccttagtactcaatcaagaccaacccagcaaatgctcaacaatwtttttttctaatcaacttcatttaattaaagtaaatgaattagtgaatatgtaatattcttctataagcagaggaagtagtcagaaaagcaaactaaattttcttgtcaaaataattctatcttcaggagaatttacaaacttccctatgtggagtttcaattcacgtgattttattgacggtagcttacttggtctcctagcataccgaaaacttccccaaggctgttttaaatgttgatttgaatctaaacacctaattactggtccctgactggagatacggctccagaggccccgcagtgctggccgctgccaagagctgcctggcagtgatggattgtgcagcttgctagccccgccagctgggggctcaagacttcctacagaagtgcccagtggggaggcatgctcgaggggcctgactcctcgttcctgcctgtgttttgtatttgggtccacttttgtttatttttgagtcaataccagagacagaaaggccataagttcttctgttgacacaagtacagtcttcagctttgtaatgttcatcctttcccaccaagaacaagagctctggggtgacagtggccagttcctgaacttccaccagtatctccgactgagttctgacctaccacgttgggagacaattccccaagtgcctttcctgtttctcctgactgaggtattagctgcttttgtcccagactgccctttcaaggatgtttatagagagagcagtctggaagatagtataccccctacaga

SEQ ID NO: 21439 - DNA, 526 bp, Homo sapiens
gagaaccaatgatgtagattccagtctgtgtctaaaggcttgagaaccaggaacatggatggcaggggaagattgatgtcctagcttgagcagtcaggctgagaataacttcaacctttgtctgttgtttttttgtcctattcaggccctcagtggattggttaatgcctatccacattgaggaaagccacatgttttactcayttcaccaattcaaatactaatcccttctgggaatgccttctcgaacacccagaaataatgtttaaccagacatctgggcatcttgtgggccagtcaagttgacacataaaattaacatcatactgcatgaatagaaatgcaagtgcctactttttctgctcaagttagggatatgttatgcagtcaattttagcacagttgaggagtcacaatgctatggcaacagcttgaccggggtccaactcttggctttaactgcatgacttagggcaatttctgaaactaccagcttactttctatgacatattgttatcaacttca

SEQ ID NO: 21440 - DNA, 526 bp, Homo sapiens
gagaaccaatgatgtagattccagtctgtgtctaaaggcttgagaaccaggaacatggatggcaggggaagattgatgtcctagcttgagcagtcaggctgagaataacttcaacctttgtctgttgtttttttgtcctattcaggccctcagtggattggttaatgcctatccacattgaggaaagccacatgttttactcatttcaccaattcaaatactaatcccttctgggaatgcmttctcgaacacccagaaataatgtttaaccagacatctgggcatcttgtgggccagtcaagttgacacataaaattaacatcatactgcatgaatagaaatgcaagtgcctactttttctgctcaagttagggatatgttatgcagtcaattttagcacagttgaggagtcacaatgctatggcaacagcttgaccggggtccaactcttggctttaactgcatgacttagggcaatttctgaaactaccagcttactttctatgacatattgttatcaacttca

SEQ ID NO: 21441 - DNA, 535 bp, Homo sapiens
catctgctcaattcacaagcatcccagctcttcgtgagcacaacttccatgaccactatgagcacacaaagccctttcttgttttattaaaaataatccaaatggatgtagaaatataaaggctggtttaatacatactattacttattcatgatccactygttttttaaaaaacattgaatctgtgagaggacttcaaatagttcatggaaaatacacattatttaaaaactaagcatgtgtttaaaaattttttacactgaaataaactcatactaatttgttataacatgtctgaaaaggatctagtttgaggcaacaagaaggataagacatcagtttgaggagtctctatcagagcaacataaattcttctaaaattgaagcatgagcaaacatcaaatttacagtgaagcttgggaggaagaaaggtgaactaatttatactttatgtaaagataatagggacaatgccccaaagaaattagcagtttacaaatggataacttgtctcaagaagggatgagatgatgtt

SEQ ID NO: 21442 - DNA, 905 bp, Homo sapiens
caccacagtttttttgagttctgtgattctttctagtgaatcatcaagcctgagagtggtcttggggtcttttgactcagtcctgtagttcaatgtagattagatgtggtgtagtgagcgtctgtccctgtgctatctattaccatacaaaagattcttacaacttttctcccttaagtatcttatgtgctatagtcttattttttattattttrtagatactctttgtaccccttgtagaactatagaaagttcccttctattcctagtttgctaagaattacatcataattgttaaattttagaaatttttttctccatctgccaaaaggaacatgctttcttttgccttaatctgagagtctagccctttggtttcagttagctgttgtagtaataatgcttcaaaaagatcctaactcaatgtcttcaaacaacaatattttatatggttcacccatttgtagggctgcttgaatggctcttccaagctcatctatactttggctgccgactgtgaaattgatttaagtggtgttccacgttgttctcatttttctgggaccaacagactacacagagcataatcttctcctggcaatgatagaagcacaaaaaggtaagtggaaatacacagtgcctcttaagatttggcatctgaactgggcatattttattcttgtccatattctattggccaaagtcacacatccaatgggccatggaaatatattccacttctattttgagaaaccacaaaatcccatatcaaaagatatggatacagggaaggatgagaagtctggaacaataattccatgaaccaaaagattcttagctgtatgtaacagttaacattttcaactcactcctattccttgcatcttattccagtaatccattaa

SEQ ID NO: 21443 - DNA, 905 bp, Homo sapiens
caccacagtttttttgagttctgtgattctttctagtgaatcatcaagcctgagagtggtcttggggtcttttgactcagtcctgtagttcaatgtagattagatgtggtgtagtgagcgtctgtccctgtgctatctattaccatacaaaagattcttacaacttttctcccttaagtatcttatgtgctatagtcttattttttattattttgtagatactctttgtaccccttgtagaactatagaaagttcccttctattcctagtttgctaagaattacatcataattgttaaattttagaaatttttttctccatctgccaaaaggaacatgctttcttttgccttaatctgagagtctagccctttggtttcagttagctgttgtagtaataatgcttcaaaaagatcctaactcaatgtcttcaaacaacaatattttatatggttcacccatttgtagggctgcttgaatggctcttccaagctcatctatactttggctgccgactgtgaaattgatttaagtggtgttccacgttgttctcatttttctgggaccaacagactacacagagcataatcttctcctggcaatgatagaagcacaaaaaggtaagtggaaatacacagtgcctcttaagatttggcatctgaactgggcatattttattcttgtccatattctattggccaaagtcacacatccaatgggccatggaaatatattccacttctattttgagaaaccacaaaatcccatatcaaaagatatggatacagggaaggatgagaartctggaacaataattccatgaaccaaaagattcttagctgtatgtaacagttaacattttcaactcactcctattccttgcatcttattccagtaatccattaa

SEQ ID NO: 21444 - DNA, 514 bp, Homo sapiens
atgtttttccagagcgtaaatatttagacaccaatattttcattagtaacaataatgaaaacactgtcatttatattttgttttatatatgacaactttgtcagaagccagttattttccataacagttatttgaggtgggttagcaaaagaaattcttacgctgagttttagccatatgaggaatcattctggttatttttattttcatttgaagtatttaattataaaattgaattgtgaagaaggtgtcatcttgatgctatttataaaagatcagtctcttccactcaaggaaattttactcaagtgaagagaaaataaatgcactcacatgtatattcagggctgytaataattactttctagtctggaagaaattgtgtgtatgaataacaaaactaaattggaaagttttttaaatataatttttcaaaacctggatgataaataagaagagatacttgttagtattaaatttttgctttattttattttctgattcatatatactc

SEQ ID NO: 21445 - DNA, 514 bp, Homo sapiens
atgtttttccagagcgtaaatatttagacaccaatattttcattagtaacaataatgaaaacactgtcatttatattttgttttatatatgacaactttgtcagaagccagttattttccataacagttatttgaggtgggttagcaaaagaaattcttacgctgagttttagccatatgaggaatcattctggttatttttattttcatttgaagtatttaattataaaattgaattgtgaagaaggtgtcatcttgatgctatttataaaagatcagtctcttccactcaaggaaattttactcaagtgaagagaaaataaatgcactcacatgtatattcagggctgttaataattactttctagtctggaagaaattgtgtgtatgaataacaaaactaaattggaaagttttttaaatrtaatttttcaaaacctggatgataaataagaagagatacttgttagtattaaatttttgctttattttattttctgattcatatatactc

SEQ ID NO: 21446 - DNA, 252 bp, Homo sapiens
taactgtccacaatttctcagactcacctgggacctgttgcctcttggtcctcctttttcacttgatcccaccgatgtcctgcaaataaattcagatggggcctcttacattaagcagttcttccttgcacacagaaacattcctctgtccaatcctaacacaggkacatcagtctggtcagtgtgagaacaggagactttgagagaaatattccagtaggcctgaggtcaagtcttgagaaaactggcttg

SEQ ID NO: 21447 - DNA, 499 bp, Homo sapiens
cagtggttccctctggcaggggattgactgggaagttacatgagagaaatttctgggtggtaaaaatggtctctgtcttgatagggatatgagttatataagtgtattcatttgtcaaaaaacatacagttaacatttcaatgaatgtaaattttaccttaaaaactatacgaataaatgcaaatttaaaatctgctagctaacacctagttgagtactcagtgtctatgggcattggccgaggctatacatacacgattttctttagtcctcatacygtcctcatggggtaggtattattatcataacccccttgcatatgaagaagccaaaatgcagtaaataccaaataacttgcctcgatttatacccctggaaaatgcgggaagagctttaaacaccatcagtcaaatgccagaagttgttaaacattagactctatagcacttctctgaaattatagtatttttggtatatgtatatatatatatatatatct

SEQ ID NO: 21448 - DNA, 499 bp, Homo sapiens
cagtggttccctctggcaggggattgactgggaagttacatgagagaaatttctgggtggtaaaaatggtctctgtcttgatagggatatgagttatataagtgtattcatttgtcaaaaaacatacagttaacatttcaatgaatgtaaattttaccttaaaaactatacgaataaatgcaaatttaaaatctgctagctaacacctagttgagtactcagtgtctatgggcattggccgaggctatacatacacgattttctttagtcctcatactgtcctcatggggtaggtattattatcataacccccttgcatrtgaagaagccaaaatgcagtaaataccaaataacttgcctcgatttatacccctggaaaatgcgggaagagctttaaacaccatcagtcaaatgccagaagttgttaaacattagactctatagcacttctctgaaattatagtatttttggtatatgtatatatatatatatatatct

SEQ ID NO: 21449 - DNA, 550 bp, Homo sapiens
tgtcatcaagaccattctttcttgttttcaaaaccttcttkgtcccaagatgagctccactgcaaaggtcttcaaactgggctgcgtgtcggggtctgccaggaccgagcagggggttccctcctgtccgcatttgaagggtttggatttcttcacatcaggatgctctgtcctggcatcttttgggatctccctcccatctgccctttctcaataactcttctcccaagttacagaagaaaagcagcctcctcccctcccgagtatgactgtagcgacccactccagatgtcaaaacccctgcttccaaaggactgattagaaatgagatctactactaattacaatggcaactcgacagaagaagttattttattttattttgagacggagtctcactctgttgcccaggctggagtgcagtggtgatcttgactcactgcaacctccaggttaaagcgattctttagcctcagcctcccaagtatctgggactacaggcgcgtgccaccgcatccggctactttttgtatttttagtagagacaggg

SEQ ID NO: 21450 - DNA, 584 bp, Homo sapiens
ggatttgcattttaatataactaatgaccatggacattggagagagaagatactagaaggaaatgactagttagaagtctatttaaatagaatgggaaaggatgcctaaattgggttacaaaggaggagtcagagtgaagaaatgttgagaaagaagggtaacagaactgttgttgagagacagagagtggttgagaatggcttccaagttttggcttgggcaacttgttgaagggtggtgtcattcattgagattgaaaggagaacatataatctaagaggcgttttaaataggctgagtttgagatatccttaggacatttagaaggagatataygttgcaggtgttacaggaccaccaggttcatatgccagctgtgcagtaactgaccaatgaactgaaacagcagagtttgcagcagagaaggagtttaatgattgcatggaggccaagtgaggagatgagagggaccctcaaatccatctttccaaggagttctgtgctggggttgtggaaggagattgtggagggcaaggggctaggacattggggtcattgattgggcaggataagggagatgaaa

SEQ ID NO: 21451 - DNA, 425 bp, Homo sapiens
actcctgatgtcaggtgatccaaccgccttggcctcccaaagtgctgggattacaggcatgagccaccgcgcccggccgagattttttcttgatgctgtgtctcatttaacgcagatacctttcatctaacttttgtaaaaattcattttctgataccacttttcattttctaacacattttagaatccagccaaatacttctacatttttgcctgttttccaaatcagttttgtcaacatccgaatctagcatgactgtgaccttggatgactgtgtatgactatctcccttggccatcactttttattgctggggtcctaaggagttctacsctttatataatcaggataattttgttaagtgacaataatagtctgttaacctcaactgttgtcaaatataatgagttttgaattgattttg

SEQ ID NO: 21452 - DNA, 553 bp, Homo sapiens
tcacgacactgcactccagcctgggtgacagagtgagactcctgtctcaaaaaaacaacaacaaaaaagaattcttcacatttgacaaatcgagcctcctccatgtgttttcatattaacgcagtgtcagggccgggctggtcagctaagatggctgggctgcaccacaccaatgaacaaggccccaaatgtgtgggaggtgaaggctaacacatcgcttactggctgagctgaaaggaaaatagagctttgggtgacttcccatctcttctgtgtaacaggagccttcttgacaaaaggcaagaagacaaatagcccttctggaacaccctgtctataccagggcaaaacctcaccagctgtttgcagacaggcatgtgggaatttagatttrtatcaggccagcttcatgttctctgagaacttgttacagagagcaaatttggtggtgtattccatccctaaaatgccaggggaaatattacccagggatttggcccatctgtctggggctgtctccactgcccacccctcccctacttcaacatagggc

SEQ ID NO: 21453 - DNA, 428 bp, Homo sapiens
aaaaaaatttttcttaaagaaagaaagtgctctttaattttgacaactgaagattcagaaagaatttgcatagttttttacatgaacccacctgtgaggttaggtcccttttgcaagtacagttagccaatttctctactgcatccttaataaagctttgtccagaaccttcctaaaaatcatttaaaagtgtgtgattttgcctgggtatgagtaaataaatatagtattgacttggttcttggagtaaaaaactcgtatttgctagttgtgaccttgagagcagtatggttcaatggaaaactgctttggatcagtcctgggttctaattccagcaccaccaattactagctactargtaatcaacttctctaaacttcatttccttacctgtaagaggataataatctcagctgggcacggtggc

SEQ ID NO: 21454 - DNA, 1065 bp, Homo sapiens
accaggacagcacctccactgtatgagtgctcacgccagtgactgaatcaaggagggaatgagcttaccaggttcttggtcatcatgtcagccccatgcaggagcagcagtttgatgattttgtagcggttgagcctcacagcgtcatgcagggcagtatccccttcctagagtcagtgtggcactcactatggcccttgtgggcagtgggaggaggcaagggtgatgggaggtgggctggagaccctgctcaggagccaagtcctgaaggccccaggaggaaggacaccacctgtaggggcccgcaggctgcccacacacccatggcgggtgagcagcggacaggctagcactcaccctgtctctggcattgatttccaggcccagggatagaaagtgctccacaatctccacctgccctgtccggactgccacgtgcagcggggtgctcagcagctgggtgggaggaatcaggaactgctagttgacggggcctgaactgtggtacccctgggaaggcgggggctgtcctaactccagcttaatccctcttccaagtcctagtgccaaggcctgagccttggaggggcagagaatggtacaatttcttaccatcctatccaatggcctaactctaaagccttaaatgccacttcctctgggaagccttctgtgattctcctctcacccagctgctcactcttctacccttcttttaataatcataatakatgtcatttattgagagatgactatgtaatggacatggcaaaagcttacaagacatttgccttatgttgaataaataattcatttacacatgttttcccacctaagctacacaagaactctgcaagacatttcacagatgagcaacagaagctcagaggctgtcacttgttcaaggttgtacatgaaataatgaatgaatagaaggatggtgcataaataaataaatgaatgaggggatgaataaatggaggaatggatggatggatagacggatagatgaatagataggtagacagaaggataatgacagataacatgaacaaatcttgcatc

SEQ ID NO: 21455 - DNA, 1377 bp, Homo sapiens
atacacatataattgtatatgccattatcattataacatattcagcatgaaacctttcttttttgttagtgtgataggagcctgaagataagtaaagagggaatgttgctgctccagaattttaggaattgctgtcataacttttgctaacatatgccagacagatagatgctaaatactgggaataatgctccctatgagtagttagctaattatttgtatggatctttcagagcactgacaaggttggccctcacattagtttgtatgtatttttcttctgaatggtgaagatccttggaggttactctgtacctgatcagtcacagaaggtcaggggcccagtgggtgtgttgagaatatttcattctgaagtatctctgaggtgtgtggccagattgcgtttcctgtttctgtggagtcccaggaggctggtgtatttgggtagatatgaggtcccttctcaggcagaaaagcctgggatttctagtcttgctttgagcctactcttgaaaagatgtgagcctggacttccacatatcttctagaataaagaatatctgagattgggccaaagctctcagggattgatatcttcaaagaccagattattcttcttaaggttgaaacaaggggtagtgggtagaaacaaatctgtgttacatgatgaatttaataaaattagttcatttcacattgaatttggagcagctatcagcagttattaatttgataaccaattaatttctctcttttttttgctacattttcaaggaaacctaacgaagcatatgaaatctaaagcacacatgaaaaaatgcctggaattgggagtctcaatgacatcggtggatgatacagaaactgaggaagcaggtgtgtatgtcataaatgagttgacagacctcttcattatgcacagtggagctctgtggctgaggtagtaaaataagtttagatatttttaaaaagtgatcacttttcattttattaaatactaaatatagaaaataaaactgacacattgaattgcttgaaatctactgagaagaaatgcatttcagttttgactccgagggcaaaaaaggccttactttgaaaatacttatatttagagccttctatgaagggaatagaattgcacttgctttgtgatagcaaattagattttatgaggctttttgggraatttgaaaagcattttaatgtattattattcaagttaagaagaaacccagtaggaaaacaaataaactagcaaacaaacatcattaaggttggccagacctcctgagatacatcacttagacatacgtttgtacctgagcttgcagagacaggttgttgcctttctttctcctctagcatcataattaa

SEQ ID NO: 21456 - DNA, 513 bp, Homo sapiens
ttttctgtaaaacttcactcaacagaatccagttaggattgggataatgggaagcaggacaaagttagtttattggtacatctgggtcagaagtgaaaaggagggcaagtgcctcagggcggggcaggagaatgtccaaagcttggggtgagggtgtctgagccacacagcagcaggaacacctctgggtgagtccagatttcagagacaagaaccatgtcagatctaaccaagaataagttgtggtggtgttgagcagcaaactccaaggtcaagaaaaatgtcacaaaacgttgcctagctgtcacagctggggagcacagcaggatactgaccgaggtacgatctgaagatggaaatgcagcctccacctacacgtaagtctgctagatgctttgttggtgctgcggttgatttttgcttctacacatgcagagcttctcacgctgggatgctttgtatcaagaaatctsatctattctgctcaggtatcacttcatttcatcttcttgc

SEQ ID NO: 21457 - DNA, 513 bp, Homo sapiens
ttttctgtaaaacttcactcaacagaatccagttaggattgggataatgggaagcaggacaaagttagtttattggtacatctgggtcagaagtgaaaaggagggcaagtgcctcagggcggggcaggagaatgtccaaagcttggggtgagggtgtctgagccacacagcagcaggaacacctctgggtgagtccagatttcagagacaagaaccatgtcagatctaaccaagaataagttgtggtggtgttgagcagcaaactccaaggtcaagaaaaatgtcacaaaacgttgcctagctgtcacagctggggagcacagcaggatactgaccgaggtacgatctgaagatggaaatgcagcctccacctacacgtaagtctgctagatgctttgttggtgctgcggttgatttttgcttctacacatgcagagcttctcacgctgggatgctttgtatcaagaaatctgatctattctgctcagrtatcacttcatttcatcttcttgc

SEQ ID NO: 21458 - DNA, 584 bp, Homo sapiens
aagtgtgttaaattaatttactacgtacccacaactgtgagttgaaactcttttcagaaatccttaggacaagattttttgttatggtatggagagcagatatttgtaaccctctagcaggatctgagggagtatctggtaatcaatcataagatattctataatagaacataggaatattctactaaaagagatatatacgtaktttaggtcttgtcaccaaataattacactgtcaatatctgggaaaattatgggtttgttctcagaactttttggaattatacatttgtatatttatcttcattgtacagatggggaaaactgaagttcaaaaagacttagtaacttttttcttttgagacagtgtcttgctatgttgcccaggctggtcccaaactcctggccttaagagagccacccatgtcagcttcctgagtaggcggctgggattacactcatgtgccaccacacctgggttctgagacttagtaacatgaccaagtttacacagctagaaatgcagaagctgagatttgaactcagcatttggatgccaaaagactatgcacttgaccacagca

SEQ ID NO: 21459 - DNA, 587 bp, Homo sapiens
gtttttattagaaggttcataggaaccctgttagaaatagataaaccatcatctataaagaattgtttgagaattggtggtaaccagataaataatatcttgttgataatagccctactagtaaaataggaaaatgactttgtcacgrttgtgttcactgtagtgagattttagctgtatacattagactcagagacaagcagaaaattcatggagattagttgcatctatttgagaagaacgtgtttaacagagtcatccatttaaaattggtttcattaaagagtctaaatgagtagttctgttaaaatgccaagtactataaggtttttattgttctgtggtcatagactgccctggccagctatcttgtaaaatgctttttataattacagtagacagagctggcaacaggatagatctgtacaaatccattttctcctggtcaccaacaaacaactcagcactgtgtacttaattagtgtgttttagtctatagtgtcatcttcctctataactgatatattattattttactactgtcatattaactgccttatcaaagactatacaactttatttttttg

SEQ ID NO: 21460 - DNA, 586 bp, Homo sapiens
gatgatgcctataaagggcctagcataataggctattttaacataagaatgttaatttttgtaattccagtactttgggaggctgaggcgggcagatcacttgaggtcaggagttcgagaccagcctggccaacatagtgaaacctccgggctctactaaaaaaaaaaaaaaaaaaaaacacaaaaattagctggtggcacatgcctttaatcccagctacacgggaggctgaggctggagaatctcttgaacgcaggaggcaggggttgcagtgagccaagatggtgccactgcattccccagcctgggtgacagagtgagactccgtctcaaaaaaaaaaagaatgttaattctcatttggagatctgttggtactctacccgtattcccggggtgttcctttgctctgcatgctggcctgatttccaaccaccagcaccagggaccagctttccctgatcactgtagcttgctttgatcacacaaggtacaggctggaagagtcaaggarttaatgcctgtgagggagcagagagcagccactaccaatgactggtaggagttgatggataaatatctagccc

SEQ ID NO: 21461 - DNA, 530 bp, Homo sapiens
ctttatccatttatctgttgatgggcccttagattgcctacgaatcttggctattgtgaatagtgctgcaatctattagtgggaccagtgctggaaccagaccatgtatgtcccaatttaaatacagccaggaatatatcaagttgcctattgttttttggagtctcacgtaatcttcagtgctgggagaagagaagctaatcatttcataattgctcatgtgttgcaggttttttttttttttgagacagagcgtcgctctgtcgcccaggctggagtgcagtggcacgatctcagctcactgcaagctctgcctcacgggtgcacgccattctcctgcctcagcctcccaagtagctgggactacaggcgcccaccaccacacccggctaattttgtttttgtatttttagtagagacggggtttcaccatgttagccaggawggtcttgatttcctgacctcgtgatccacccaccttgacctcccaaagtgctgggattacaggtgtgagccactgcgcccggcct

SEQ ID NO: 21462 - DNA, 570 bp, Homo sapiens
cacaacaaccaattatctggcaccagctgagtgtcctataatttaattcaattctgacactgtctttctggggttagcatcagatcccacaagttaaaggctcagacccacaagactgctcccacttcagattccaatctcaagtcctgtcctctcgtacttctgatcaattggctataaattggggattcccatgatcactccttgggtttgataacttgttagaagagctcacagaactcaggaaggcactttactcactgttaacagtttattataaaggatacagctcagaacagccaaatggaacacatgcaaaaggcaaggtatgcaggaagagatgcagagtttccgtaacttctccaggtgtaccaccttcctatcccctcaatgtgttcacaaacccaygagctctctaaactctgttgtttagggtttttaatgaaagctaaacatttggttggttcccctggcaacaaggcccctccccatccttagggactttacaaaagcctcctcattaatataaactcagacgtggttgaaagatgcttgttataaataacaaaa

SEQ ID NO: 21463 - DNA, 534 bp, Homo sapiens
caaatctcatcttgaattgtagttcccataatccccatgtgtcatgtaagggacccagcgggaggtaattgaatcatgggggcagttttgcctatgctgttctcaagacagagagtgagttctcacaagatctaatggttttataaggggcttcccccttcactcagtttttactcttctctctcctgccaccatggaaataaggatgtgtttgcttccccttctacaatgattgcaagttttctgaggcctccccagccttgagaaactgtgagtcaattaaacctctttccttcatcaattacacggtctcaggtatgtctttattagcagsgtgagaatggtctgatacacagcccaagcaaacaaatacaagagctctatataaaagaatatggccaatatccagtgtaccaaaggggtggaatcagaatttaaaatttggaaaataccttataccattgattgtcttgttacttaatatctactgagcatctattattatttcaagcacttctctcagcatagagaggc

SEQ ID NO: 21464 - DNA, 2388 bp, Homo sapiens
tgaggtcaggagatcgagaccatcctggctaatacggtgaaatcccatctctactaaaaatacaaaaaaaaaaaaaaaaaaaaaaaaaaaaaagccgggcgtggtggcgggcgcctgtagtcccagttacttggaagctgagacaggagaatggcgtgaacccgggaggcggagcttgcagtgagccaagatcgcgccactgcactccagcctaggcaacagagcaagactccgtctcaaaaaaaaaaaaaaaaaaacacatataatgtagcataagatactaaaacaaaacaaaagaaaacaaaagaaaacaaaacgaaacatggtattaacagcaggcactaggcaatagcgtttgagttactttgcctgattcacagcggtgcaaggggctgctgcataaacctttccaggactgagaaaagaggtcagagacaattggtaactaaaagtagaatctataaagagtttggtaatgatctaattctatactgaagatgtgaaaaaatatgtaaacagctaaaccatataaattagggggaaaaaaactatgttttcagaatcaaaagcatttgaatcttgctccttgtaagtggcactataatgagcaagatgacagtttttattttataatgagaagttaggtgtttgtaatttgaaatctatgagataaaaaggatgtttttttattagaaaaccttactgaataagtttcaattatgtgtaagaaaaaaatatgaaaatattcttctcatttcttctccacaggatattttattgagtcatgatctgkaataacaagttaatagtaagttaataacagttttacgtgagctaattgggaatctttcttatttaaaataatattggtaaaatagaaattggttatagaatctactaacacagaataacatagaaatagtcaaacataaagaaattgtgacatgataagcacatacacagagtaatatgtggacatacacattactctgagttaaaaagacagcctgagagagctgttacataagaatgcaatagttttgataaaacaaatcaatatctcaatgccatgtttgttacatgagaagatgtgtaatgttacaatctctaggaatgtataaagtgagtgtttgagtcaatttttaattgctattagctaagttatttctgaacatattagccttataggttagcaaagtgaatgtcaattcttggattcatgaagttgaaagcacaaggacttcggtcagatatttaaaacctagctccactgcagccgagttgtgtgaccatggagaaaatactgtattttcctgtgcctgcattgccttatctacaaagtttctttcaaaaattgttttaagaattaggtaaaataatgtttgaaagggttcattatttatatctctgttacctcctgtattgtgaataatgatatataattaaaaagtgtttgtgtttttgagagcatatataaggacttaaaagtattggaatgtttatcaatcaagaagcttgttttgggagttaaaacaagatttgcttaagttttagtcttaaaactcagagttgctgaggaagaagtactaaacatcattatggttaactctactgactaaatttatttcctcaacacttttctttaacggcatacatgcatttttttctgattttccaaggctactgggcaatgaaggaactgtagctgtgcctggggcagcattggaagaagaggttgagagttgggttttgagcctgttggttctcaagcagcttgaagatgttcaagtcaagatgtcagatagacagttatgtatgtggatccacatctcagaaaaaaagatttggattgatgagctgaacttggaaatcattaccatatggttacaattacaaccacaattacagataagttgcctataaagaagagtatgcagagaagagaagagaaaattgatcaatattcattcttgtcagacccacaatctaggggaaaatagagcagaggacatgcagtggagtctggactgagaaagagtaacaggaaaaaatgagggcaatcaggagagaacagggtcaaagaccccaccactacataaagacatctgaaactaaagttattgtggacctcaggcatcctcttttacaagttaataaaaacatatctcctacacaatccttgatttcattccctggtgctgcagtccacaagctaaatttcttcctcagagtgctttcaactggttggaagagacccccgccaatttattaagggtaatctttatttaaagtcaactgatgattgaggaggggcttcaagatgaccaactagaggaatctggtgctccttttatctaaaaaggagaaacaaaatagtgatgagataat

SEQ ID NO: 21465 - DNA, 523 bp, Homo sapiens
ctagacattgaattcctagaattcctagtcattgaattcctagaagcttttcataatgcaatttaggtgatgcatagaatagccattaaaattttaatcttggcatggaactatccctcagtggataagattgaataaattgggtatagtaagattataatttttccagatatttgaaagttgcatatcacatatattgcctatggagtaacactttccattgcaattttcaaggcttttcatatacatgtgattttatctgacacttaatttcattatttttaaatttctgttcaatcctacagtatgacatygatcagtatatatactgttacaatgatcaaagcataaagaagtgatttagaaaatgtatccctattgttgtttgaaatttttaaaaaagattgtaaaaagtatgcatagaatcaacggaaaaacactgaatctgacaaagttgtcctttcaataagaggaactcatgatatttttgtattttattataggtcattaaaaatgcgtatac

SEQ ID NO: 21466 - DNA, 606 bp, Homo sapiens
ttattccatatactggaataaccacagatggggtgaacaggaaatctgtccctgtgtatttaatctttaaaaaatttccagtgctcctaaccgtgagatgtggtgtgaagctcccctgcagttggttcagactttgtcacaagtcacttttttttttttttttttttttttgatacagggtctcactccctcacccaggctggaatgcagtggcacgatctcgggtcgctgcaacctccacctcccaggttcaagtgattctcgtgcctcagcctccagagtagctggaattacaggcacgcaccaccacacctggctaatttttgkatttttttttttttttttttttgtatagacggggcttcgccatattggccaggttggtctaaaactgaactcatgtgatctgcccaccttggcctcccaaagtgctgggattacggacaggagccacagcacccagctgacaagtcacctttcactatggaatgtgaagcctcatctagcacttaaatgatcatgaagaacattccatctactttcacacacacatgtatacacataaacaagccaatagaaaactgggggatgttgtaacagagtctt

SEQ ID NO: 21467 - DNA, 606 bp, Homo sapiens
ttattccatatactggaataaccacagatggggtgaacaggaaatctgtccctgtgtatttaatctttaaaaaatttccagtgctcctaaccgtgagatgtggtgtgaagctcccctgcagttggttcagactttgtcacaagtcacttttttttttttttttttttttttgatacagggtctcactccctcacccaggctggaatgcagtggcacgatctcgggtcgctgcaacctccacctcccaggttcaagtgattctcgtgcctcagcctccagagtagctggaattacaggcacgcaccaccacacctggctaatttttgtatttttttttttttttttttttgkatagacggggcttcgccatattggccaggttggtctaaaactgaactcatgtgatctgcccaccttggcctcccaaagtgctgggattacggacaggagccacagcacccagctgacaagtcacctttcactatggaatgtgaagcctcatctagcacttaaatgatcatgaagaacattccatctactttcacacacacatgtatacacataaacaagccaatagaaaactgggggatgttgtaacagagtctt

SEQ ID NO: 21468 - DNA, 522 bp, Homo sapiens
caccatttttttgttttttgagacggaatttcactcttgatgcccaagctggagtgcaatggtgcaatctcggctcaccgcaacctctgcctcccagattcaagtgattctcctgcctcagcctcccgagtagctgcgattacaggcatccgccaccacacccaactaattctgtatttttagtagagacggggtttctccacgttggtcaggctggtctsgaacacctgacctcaggtgatccacccatctcagcctcccaaagtgctgggattacaggcgtgagcccctgtgtccagccagaataatgcacctcttatgaaagacttcacagtttagaaagtaacctaagttatatggagagtgaatgatccctgacagtcctgtagttcattagaggattttcctgttacttacctatgatggtgaatagggaatattgaatgatgatagtgtcagctgagttcattttagcaaggtcagggtgatgggtttttggacttgggctgtctgggaatgatc

SEQ ID NO: 21469 - DNA, 432 bp, Homo sapiens
gccaaaaatctctggacatggctaaatcaatctatttgatgagtatctatatcagacaccaaaaaacasacagggcaagaaccaaccaacaaaacaaatctgtggaagccaagagggtccagaaccaaaagggcattctcataccaaggaactgatgagagagaacactagaaagcttacaaaatgaggggagaatcgcctgtcaaactcccgctgagccaggattcctccctgtccaggtgcactggtagagccaatctgaaaagaagaaaagaacgacattaagggaagtccacctcatgaagttccacctcatctactctgagaaagggcagtcccaaccaacccaactctatgcattagagtcttagttcccaaaggctcagaagaacttcaagaagatgagggaaagcttttggctagagagagttg

SEQ ID NO: 21470 - DNA, 642 bp, Homo sapiens
tgcccttccattgtcagcctctctgccccaggtctccagccaaagaacacagtttaacacctgctctgtccatgcctctgagttgtgaaagggaaagacattaaccccaggaggaaaccctgtgaaaaatccaaaatccacctagagaagagtcacacctgccattggggtgccyatactagacagcaattaatgaagccgtcaatgctgacacagccagctgtgcacactcgcagtggggatgccaggattcccacatcaaaggaccctggcacagcagtttggttgggagctaggtctccgagtcttggagctgcgtggcatagtgacaccaaatttctctttcactgagtggtcagacccctctctgggccctgatttcaaatcccagctttatcatggacatgctgtgtgacccagagcaaggtacttaacgtctctgagtctcagttttctcatccataaaatggaagttaaaagaaataactttttgaacacttcctatatgctaggccctgtactgagttgccttaacgaaccttcaccataccaaaaagacataaatggatctatcattcccatgttacagacacgaaaagtgaggctcagaagagaaagccacttgcccacagtcacacagct

SEQ ID NO: 21471 - DNA, 676 bp, Homo sapiens
ctgtgctgagggcaatgggggaaagagatctgacttgagtgaactgatagagaaaagtgtttgacacagagactgactaagtgctggttggatgaatagtggatgcatttgacatcagcttggaagagcaaatgccacaagcacaaatttcacagcccaatcaatacaaagcagtttgtgtatgcaaacaaacacaaaaccattctctttccgttatccgatttggtcactgttttgaaatcctgtgccaccaagtagcaaaaaactggatactcaaggcaatgccaggacattctaaggcactccagcgtaggcttagccacttcaggggtctcctcgccttgctcaagggcagcgtctaccctctgggtggcttcttcatgggcrtggcatggagggcaatggtagctcctctgtgggccctgtttatagtgacatctgccctagagatgtctgcattttggctggtccctgccttgcagttccagaagcttcgtttcctagtggaatgctcctgcccacccagacagcccctgcctgcagattctggggtcccagctatgccctttcagacacgtggcagggctgaggttctgctggtaggaactggtggtacaaatgcagtgtttggaatatttctctgctagctggtaaagatctgtagctttaagccccc

SEQ ID NO: 21472 - DNA, 556 bp, Homo sapiens
tgaccaattctccaagtttaccaaatttacccatttcccaaaatcttgctttaaggataatgtttcatgtattttataagcatttgtgaatatttccttctttgatatattcaatggatattttcttattaatatgaccaaatttctagtgttttaaggttaattttttagtttattccgacttgtttctaatcctttttttaaggacattttctgtttctaccaacattttagcatttttcggggrggagcatatagtgtttggggctattcccctcaattaaaaaatagcaaaattcactaacaggtttataagaatccttcaacaaagtgaacattccttaaaatgttgctgagaagaatgtgttcagtcactgaataggttcaaggatttcccttaataaggttcttagtaaatgggtggagcagccctttagagaccagctttcccagctggagctgcttgctgttcaggggctgcctgatgggggatggagatagtccaccctgagcaggggtgggggaacacaccctgtcccttccccattctgagcag

SEQ ID NO: 21473 - DNA, 556 bp, Homo sapiens
tgaccaattctccaagtttaccaaatttacccatttcccaaaatcttgctttaaggataatgtttcatgtattttataagcatttgtgaatatttccttctttgatatattcaatggatattttcttattaatatgaccaaatttctagtgttttaaggttaattttttagtttattccgacttgtttctaatcctttttttaaggacattttctgtttctaccaacattttagcatttttcgggggggagcatatagtgtttggggctattcccctcaattaaaaaatarcaaaattcactaacaggtttataagaatccttcaacaaagtgaacattccttaaaatgttgctgagaagaatgtgttcagtcactgaataggttcaaggatttcccttaataaggttcttagtaaatgggtggagcagccctttagagaccagctttcccagctggagctgcttgctgttcaggggctgcctgatgggggatggagatagtccaccctgagcaggggtgggggaacacaccctgtcccttccccattctgagcag

SEQ ID NO: 21474 - DNA, 556 bp, Homo sapiens
tgaccaattctccaagtttaccaaatttacccatttcccaaaatcttgctttaaggataatgtttcatgtattttataagcatttgtgaatatttccttctttgatatattcaatggatattttcttattaatatgaccaaatttctagtgttttaaggttaattttttagtttattccgacttgtttctaatcctttttttaaggacattttctgtttctaccaacattttagcatttttcgggggggagcatatagtgtttggggctattcccctcaattaaaaaatagcaaaattcactaacaggtttataagaatccttcaacaaagtgaacattccttaaaatgttgctgagaagaatgtgttcagtcactgaataggttcaaggatttcccttaataaggttcttagtaaatgggtggagcarccctttagagaccagctttcccagctggagctgcttgctgttcaggggctgcctgatgggggatggagatagtccaccctgagcaggggtgggggaacacaccctgtcccttccccattctgagcag

SEQ ID NO: 21475 - DNA, 725 bp, Homo sapiens
ttattcctctttaaggggtgaataatatttcactgtatatatatacctgtactacattttgtttattcattcatctcattgatggctatttgggatatttcagcttttagactattgtgcataatgcttctgtgaacatgtgtgtacgcatatctctttgagtccttgctttcagttcttttgagtatacacccagaagtcaaattgctggattatggtaattctatgtttaactttttgaggtcccaccaaactgttttctaccyctgtatcactaataagcacatatcatactacatgttttattcatttattttgattattgaatatcaccattcactgatctgtaagccccagtggagacggatttttctctgattcattgcagtatccatacctagaacacgtctggaacaaagtaggtacacaataaactttgttgaatgaatgaatgtatttgatgtggatcttgttcttgaggtcaagggtcctagggtccaaaagagtcgggtaaggtccaaaacatcaactacacagaagaaactgaagtcaaggagggaaatgagagatcagaggaagggatactttcctgtttgcagcctaatgcagacccaacacagtaaggctgtgaatagaaaagccagtcacagccgggcgcggtggctcacacctgtaatcccaacattttaggaggccgaggcaggtggatcacgaggtcaggagat

SEQ ID NO: 21476 - DNA, 505 bp, Homo sapiens
gatttagtgagatctctttatgtagcttgcagtcactcccatgactggttgttggggaggcctcacrtgctagtgagggtagagacagaatccagaggtttgtctgactctattgaaaattctctgtaccctacactcctttcatgtgttcagtaatccataaacagttttcttaattctttctttaactgagaggcatgatagtctatcctcaaccaccaacagcatttggcactacaactcgtgtccgacctggctttaacacacctttctaggttatgtcccctctagatctccctttacaccatgctccagccaaagggcacttcttcctttgctgggccatgttctttgctcttgcttaggcgtttattaactttcttgctgacatggcacgaaatctgacattagcaaagataacatacactcctaattcaccataaaaaacatcagcgtcacactggttagtgggcgttagcatttaaaataagtcaatagacaagaa

SEQ ID NO: 21477 - DNA, 505 bp, Homo sapiens
gatttagtgagatctctttatgtagcttgcagtcactcccatgactggttgttggggaggcctcacatgctagtgagggtagagacagaatccagaggtttgtctgactctattgaaaattctctgtaccctacactcctttcatgtgttcagtaatccataaacagttttcttaattctttctttaactgagaggcatgatagtctatcctcaaccaccaacagcatttggcactacaactcgtgtccgacctggctttaacacacctttctaggttatgtcccctctagatctccctttacaccatgctccagccaaagggcacttcttcctttgctgggccatgytctttgctcttgcttaggcgtttattaactttcttgctgacatggcacgaaatctgacattagcaaagataacatacactcctaattcaccataaaaaacatcagcgtcacactggttagtgggcgttagcatttaaaataagtcaatagacaagaa

SEQ ID NO: 21478 - DNA, 490 bp, Homo sapiens
ggctggacatctcctgaaacactgttcttatccagagttgaaggtctctttcctgaatccattaaaagatgacttcctttagcttctccagcaatttgttttcttatcctatctctcaaagccagactttttctatcgcctaagaaaacagttactatatctgatgttctgattgttactaatgtgctgatgggggtgtgttagttttagacctcagagaaacagatgccaaaatgggattagaagtgcaagagagatattggggraaatgcttacgaagggttaagggaagagaatagaagaggaggagagttcggtctgcagtgcagttccgatgcctgtggaggaaaaggactgggtaggaagaggtgcagtcagcagcacagctctaagaagacatcctctcatgacaagtcttaggtggtggttgttattttcaaaattactagaactcatgaatatgagcataaatgatatgttttcatctatt

SEQ ID NO: 21479 - DNA, 252 bp, Homo sapiens
caaaaggagctttgagctgaatcctgaagagcaggggggtttggaaaggcagagagagaggggaggggtcctgacagcctcaggaatgcctgggcaccaagggggacaggagatgggaaagtatacaggggcgagagaggagcagagaagacactagacacggaaatataacaggcacatgtacaccaagtacatacgctgtccccattacaccgattcatcttcattccaaccmggaaaagtgggtattag

SEQ ID NO: 21480 - DNA, 544 bp, Homo sapiens
aaaccgtggctttcaaacttttaatatccaagtcttacttctgattaggttgagcattcctaattggaaaaatccgaaatccaagatgctccaaactctgaaactttttgaattctaacatgatgccacaagtgaaaaactccacacctaatacttgttttctaatgattcaagrtacacaaattttatttaatgcacaaaattattaaaaatactgtatactacactgtttttgtttaacttgtggacaaagacttatggttaggtgcaaaaaataaatcctcttttgcaacccagaactcattgttcagtatgagttttgatacatataagaaggtgttgcaggaagtcagggaccccaaacggaggaaccggctgaagccatgacagaagaacgtggattatgaagattttatggacatttattagttccccaaattaatatttttgtaatttcttatgcctgtctttactgcactctctaaacataaattgtaaagatttcatggacacttatcacttccccaatcaatacccttgtgat

SEQ ID NO: 21481 - DNA, 519 bp, Homo sapiens
gaagagccaggaagtcccaatgtattcgtagtccccactttggagaggattccctattttggagtgttcaatggtatttatcactataaaggtgtagatgatgaactttgaaaactacaggatggtaagcaattataaggtaatgttacactttttgttattttaattgtcctcactttctgagatcctgaactgattaattttcctgtttcaattgtaggcatgactcttctcctgtcctaagagacttaaaaaaaaccctcagattccttctcttccaccttcttcaccccctgtattctaccacttgccaaaatacagcttccaacaccacaaggtcattcccaaataccccttttgcctttcttttatcactgtcctttctctgatagaggcctttattacttcctgcctgggtgatgttccagctccaagcctggcctggcctcgcctctcccacatccactgatactactctgcttcttaaaattcatttcctgaggwctgtttggtaaccac

SEQ ID NO: 21482 - DNA, 499 bp, Homo sapiens
gaagtaggcatgggcctaaaagggaaacctgagggatcgggtgggacggaaatgactgtatcaatgccgatatcctggctgtgacattgtgctatggtctttcaagatgttaccactgggggaaactaggtaaagcatacacaggatttccctgtattctttttttccaaccgcatatgaacctacaatcatctcagaataaaaaggttaattaaaaataactcaataattggattaattggtggattaaatgcagaygaaggaaaaattagtgaactagaagacagatccagaaaaatcatctaagtcatattatggggctagcagaatctcaatatggaaagcagacaaggacctgaaaggaaaattgcaggctgatttcacttgtgaacatagatgcaaaatcctacagaatattaccaaagtaaatacaacagtgtataaaaacattcaaaaacacatgggcctctcctcaaaattctctaaatgttcttacaac

SEQ ID NO: 21483 - DNA, 499 bp, Homo sapiens
gaagtaggcatgggcctaaaagggaaacctgagggatcgggtgggacggaaatgactgtatcaatgccgatatcctggctgtgacattgtgctatggtctttcaagatgttaccactgggggaaactaggtaaagcatacacaggatttccctgtattctttttttccaaccgcatatgaacctacaatcatctcagaataaaaaggttaattaaaaataactcaataattggattaattggtggattaaatgcagacgaaggaaaaattagtgaactagaagasagatccagaaaaatcatctaagtcatattatggggctagcagaatctcaatatggaaagcagacaaggacctgaaaggaaaattgcaggctgatttcacttgtgaacatagatgcaaaatcctacagaatattaccaaagtaaatacaacagtgtataaaaacattcaaaaacacatgggcctctcctcaaaattctctaaatgttcttacaac

SEQ ID NO: 21484 - DNA, 499 bp, Homo sapiens
gaagtaggcatgggcctaaaagggaaacctgagggatcgggtgggacggaaatgactgtatcaatgccgatatcctggctgtgacattgtgctatggtctttcaagatgttaccactgggggaaactaggtaaagcatacacaggatttccctgtattctttttttccaaccgcatatgaacctacaatcatctcagaataaaaaggttaattaaaaataactcaataattggattaattggtggattaaatgcagacgaaggaaaaattagtgaactagaagacagatccagaaaaatcatctaagtcatattatggggctagcagaatctcaatatggaaagcagacaaggacctgaaaggaaaattgcaggctgatttcacttgtgwacatagatgcaaaatcctacagaatattaccaaagtaaatacaacagtgtataaaaacattcaaaaacacatgggcctctcctcaaaattctctaaatgttcttacaac

SEQ ID NO: 21485 - DNA, 545 bp, Homo sapiens
ggcagaatagacccaatgcccacctaccaacaataagtgcagtatactcagacgagagaatgttctccagcagtgaaaatagattcgccatatgcacaagacatggatgaatctcaaaatcaccayatcaagcaaaagaagcaaacaaacttccagactgtgcagttacctgtgtgtaacttcaaaaagagaaactaagcagtctattgtttagagacacacatagaggtggggcaaccataaggaaaggcaagggattcagttgactttgagggcagtctttggcaggtagagagttggagagagagacagagggaaaggtgatcagggtggaacactgggaggtaggatgaccaattgcccaattttgccaagaaatgagaaattccctaagatttagaaatgagaaatttcctaaggtttagaaatttcagtgctacaaccaggacagtcttgggcaaagtggaactattggctaccctacaccgaaagtgtctaagtttccagaacattctgatttggccctgtggctctttattttacca

SEQ ID NO: 21486 - DNA, 602 bp, Homo sapiens
tgacaagcccaccatctgtagtgtgggcagcagcactggagacccaggagagctggggtgcacataaagtccaaaggcagcctgctggagaagtccctctctctgggagatgcaggtcttattgttctattcaggactgtagctgaatgaatgaggcccatcccctctatagggggmaatctgctggacctaaagttcactgaattaaataataatctcattcaaaagtactttctaagtcgacacataaaattaaccatctccagaacctagataattcaataactatacagagatcctcaatgatccagggtaattggattgataaagaactatttttagtgttgttacgctacatagcatcttaaatttagctagcagtttcctctgcttttgatcacatggggacacattttctttcttgatcatttcatttgccaagacctgtgtaaaagaagtgttttcttgttcatctgagtacaaggaaacccaaacataaaacaccaaaaaaatagatttactgttttatatttgtaccccttgaatagctcaagccaagagcctcttgacgtttatgagtgcctggctctggagttaagcgt

SEQ ID NO: 21487 - DNA, 602 bp, Homo sapiens
tgacaagcccaccatctgtagtgtgggcagcagcactggagacccaggagagctggggtgcacataaagtccaaaggcagcctgctggagaagtccctctctctgggagatgcaggtcttattgttctattcaggactgtagctgaatgaatgaggcccatcccctctatagggggcaatctgctggacctaaagttcactgaattaaataataatctcattcaaaagtactttctaagtcgacacataaaattaaccatctccagaacctagataattcaataactatacagagatcctcaatgatccagggtaattggaytgataaagaactatttttagtgttgttacgctacatagcatcttaaatttagctagcagtttcctctgcttttgatcacatggggacacattttctttcttgatcatttcatttgccaagacctgtgtaaaagaagtgttttcttgttcatctgagtacaaggaaacccaaacataaaacaccaaaaaaatagatttactgttttatatttgtaccccttgaatagctcaagccaagagcctcttgacgtttatgagtgcctggctctggagttaagcgt

SEQ ID NO: 21488 - DNA, 602 bp, Homo sapiens
tgacaagcccaccatctgtagtgtgggcagcagcactggagacccaggagagctggggtgcacataaagtccaaaggcagcctgctggagaagtccctctctctgggagatgcaggtcttattgttctattcaggactgtagctgaatgaatgaggcccatcccctctatagggggcaatctgctggacctaaagttcactgaattaaataataatctcattcaaaagtactttctaagtcgacacataaaattaaccatctccagaacctagataattcaataactatacagagatcctcaatgatccagggtaattggattgataaagaactatttttagtgttgttacgctacatagcatcttaaatttagctagcagtttcctctgcttttgatcacatggggacacattttctttcttgatcatttcatttgccaagacctgtgkaaaagaagtgttttcttgttcatctgagtacaaggaaacccaaacataaaacaccaaaaaaatagatttactgttttatatttgtaccccttgaatagctcaagccaagagcctcttgacgtttatgagtgcctggctctggagttaagcgt

SEQ ID NO: 21489 - DNA, 602 bp, Homo sapiens
tgacaagcccaccatctgtagtgtgggcagcagcactggagacccaggagagctggggtgcacataaagtccaaaggcagcctgctggagaagtccctctctctgggagatgcaggtcttattgttctattcaggactgtagctgaatgaatgaggcccatcccctctatagggggcaatctgctggacctaaagttcactgaattaaataataatctcattcaaaagtactttctaagtcgacacataaaattaaccatctccagaacctagataattcaataactatacagagatcctcaatgatccagggtaattggattgataaagaactatttttagtgttgttacgctacatagcatcttaaatttagctagcagtttcctctgcttttgatcacatggggacacattttctttcttgatcatttcatttgccaagacctgtgtaaaagaagtgttttcttgttcatctgagtacaaggaaacccaaacataaaacaccaaaaraatagatttactgttttatatttgtaccccttgaatagctcaagccaagagcctcttgacgtttatgagtgcctggctctggagttaagcgt

SEQ ID NO: 21490 - DNA, 819 bp, Homo sapiens
attaagcatccacaattgctgaaagtcacctggggcatggtgggttttgatcttcttccccttcttttcttccccttcttctttccttctttgatcttcttccccttcttttcttccccttccccttcttttcaatttctgcaataaattcagacatggacagacacattaagctgattcccctacacacataacaatccactgtctaatcctcacacagggacctcaggctcctcagcataagaataggacactgtgagagatatatttcaggaggcctgaaggctggtcatgatagaaattcctcggtttttctcccagaaactgtgggtaaaatgtccctattctagtagatcgttatcccaatatcatttgtcccaagtttgtgcaaacagttaygccatatttttccaatcaacttaaagcaaataccctcaaatgatttctaggagaaaaactgcaatatttagccctgtctcatcaaatactcagattgttcatggttgtgaggactttagacactgaaattagagtgaaaaaggaaatctacaaacccttgagtcaaaatcatagttctctgaatttgtcacatctgcccaggtccaatgtcatgagaataggatcagggcgccacaggtatggcctgagactaggaagagagtcttgctcactgacccatcccttgtctgggcttccaggtagaactagagtttcattcaacctacatgtgcctataggtcctccctgtggcaatgacatctctcagctcagtaatggccacttggagcaggaatatgatctttatatggaagactcagt

SEQ ID NO: 21491 - DNA, 819 bp, Homo sapiens
attaagcatccacaattgctgaaagtcacctggggcatggtgggttttgatcttcttccccttcttttcttccccttcttctttccttctttgatcttcttccccttcttttcttccccttccccttcttttcaatttctgcaataaattcagacatggacagacacattaagctgattcccctacacacataacaatccactgtctaatcctcacacagggacctcaggctcctcagcataagaataggacactgtgagagatatatttcaggaggcctgaaggctggtcatgatagaaattcctcggtttttctcccagaaactgtgggtaaaatgtccctattctagtagatcgttatcccaatatcatttgtcccaagtttgtgcaaacagttacgccatatttttccaatcaayttaaagcaaataccctcaaatgatttctaggagaaaaactgcaatatttagccctgtctcatcaaatactcagattgttcatggttgtgaggactttagacactgaaattagagtgaaaaaggaaatctacaaacccttgagtcaaaatcatagttctctgaatttgtcacatctgcccaggtccaatgtcatgagaataggatcagggcgccacaggtatggcctgagactaggaagagagtcttgctcactgacccatcccttgtctgggcttccaggtagaactagagtttcattcaacctacatgtgcctataggtcctccctgtggcaatgacatctctcagctcagtaatggccacttggagcaggaatatgatctttatatggaagactcagt

SEQ ID NO: 21492 - DNA, 819 bp, Homo sapiens
attaagcatccacaattgctgaaagtcacctggggcatggtgggttttgatcttcttccccttcttttcttccccttcttctttccttctttgatcttcttccccttcttttcttccccttccccttcttttcaatttctgcaataaattcagacatggacagacacattaagctgattcccctacacacataacaatccactgtctaatcctcacacagggacctcaggctcctcagcataagaataggacactgtgagagatatatttcaggaggcctgaaggctggtcatgatagaaattcctcggtttttctcccagaaactgtgggtaaaatgtccctattctagtagatcgttatcccaatatcatttgtcccaagtttgtgcaaacagttacgccatatttttccaatcaacttaaagcaaataccctcaaatgatttctaggagaaaaactgcaatatttagccctgtctcatcaaatactcagattgttcatggttgtgaggactttagacactgaaattagagtgaaaaaggaaatctacaaacccttgagtcaaaatcatagttctctgaatttgtcacatctgcccaggtccaatgtcatgagrataggatcagggcgccacaggtatggcctgagactaggaagagagtcttgctcactgacccatcccttgtctgggcttccaggtagaactagagtttcattcaacctacatgtgcctataggtcctccctgtggcaatgacatctctcagctcagtaatggccacttggagcaggaatatgatctttatatggaagactcagt

SEQ ID NO: 21493 - DNA, 819 bp, Homo sapiens
attaagcatccacaattgctgaaagtcacctggggcatggtgggttttgatcttcttccccttcttttcttccccttcttctttccttctttgatcttcttccccttcttttcttccccttccccttcttttcaatttctgcaataaattcagacatggacagacacattaagctgattcccctacacacataacaatccactgtctaatcctcacacagggacctcaggctcctcagcataagaataggacactgtgagagatatatttcaggaggcctgaaggctggtcatgatagaaattcctcggtttttctcccagaaactgtgggtaaaatgtccctattctagtagatcgttatcccaatatcatttgtcccaagtttgtgcaaacagttacgccatatttttccaatcaacttaaagcaaataccctcaaatgatttctaggagaaaaactgcaatatttagccctgtctcatcaaatactcagattgttcatggttgtgaggactttagacactgaaattagagtgaaaaaggaaatctacaaacccttgagtcaaaatcatagttctctgaatttgtcacatctgcccaggtccaatgtcatgagaataggatcagggcrccacaggtatggcctgagactaggaagagagtcttgctcactgacccatcccttgtctgggcttccaggtagaactagagtttcattcaacctacatgtgcctataggtcctccctgtggcaatgacatctctcagctcagtaatggccacttggagcaggaatatgatctttatatggaagactcagt

SEQ ID NO: 21494 - DNA, 819 bp, Homo sapiens
attaagcatccacaattgctgaaagtcacctggggcatggtgggttttgatcttcttccccttcttttcttccccttcttctttccttctttgatcttcttccccttcttttcttccccttccccttcttttcaatttctgcaataaattcagacatggacagacacattaagctgattcccctacacacataacaatccactgtctaatcctcacacagggacctcaggctcctcagcataagaataggacactgtgagagatatatttcaggaggcctgaaggctggtcatgatagaaattcctcggtttttctcccagaaactgtgggtaaaatgtccctattctagtagatcgttatcccaatatcatttgtcccaagtttgtgcaaacagttacgccatatttttccaatcaacttaaagcaaataccctcaaatgatttctaggagaaaaactgcaatatttagccctgtctcatcaaatactcagattgttcatggttgtgaggactttagacactgaaattagagtgaaaaaggaaatctacaaacccttgagtcaaaatcatagttctctgaatttgtcacatctgcccaggtccaatgtcatgagaataggatcagggcgccacaggtatggcctgagactaggaagagagtcttgctcactgacccatcccttgyctgggcttccaggtagaactagagtttcattcaacctacatgtgcctataggtcctccctgtggcaatgacatctctcagctcagtaatggccacttggagcaggaatatgatctttatatggaagactcagt

SEQ ID NO: 21495 - DNA, 491 bp, Homo sapiens
cggcaggtcttccggctggagccaggagtggccttttggctgtagagtactttcagtctgttctgrtaacctgtggcaacggagtgagtctagacgctgggaaaatcaacacctcccttgccctcaatcttagataggaagaggagacagatatctgtgctcagccctggagatgaactgacacctccctccaggaaccaggaacttcgggtcttaccctctggcgcattttgtggttttccactgagccgaaggatcttggcttcctctacatcaaaaccgttcaggttcaaagcccaggctttctgatgttcctggcataaagggtagtgaaggagcaagatggtattatccaaagaacagtcaggtcccgtgccttaagcccctctgggacacataccttcttggtgggcgtctggctgttttcaggctggttctccttgctcaggaggaagctggccacctccatctgggcagcactgcgatggggg

SEQ ID NO: 21496 - DNA, 484 bp, Homo sapiens
tgccttctgggacatggtgttaaatgtcttcactgaaatgatattggctgtacacaacaagtgtctgctttgttttcatttttgtttttatgtcctatcctcattcagtaaaataaaaagttggcaatcacatgttcatcctccaattttagggaaaatgtttctaatctggaaagccacacacccaagaaccactgaccctgggctctcaggctgcagatgacagccctgagtaacttagtcctctcttccagctgtctggaaagccagaactttattctgcagtatagaagcaggtaacttcctaccaatcacctccctggtcctcttctcccgctcctcttctcctcccatcaccattctgcctagagggaagaaaccttgatgaaacagataacaaagcctcttcggcwgtattttagtgcaaagtctgaagactgggaaggagctggagtttgaaggcctgggattgagccttggtttt

SEQ ID NO: 21497 - DNA, 521 bp, Homo sapiens
cagctcactgttcatctttgaaaataggragaatacaactactacccctccctgggttacgctaatcacatagcacagggcctggtacaaaacaggccctcaaaaatgtcagtttcagccaggcgtagtggctcatgcctataattccagcatgttgagaagccaaggtggcttgagcccaggaattcgagaccagcctagacaacctggagaaatcccatctctactaaaagtagaaaaattagctgggcatagtggcacaggcctgtagtcccagctacttgggaggctgaagtgggtggatggtttgagtctgggtgatcaaggctgcagtaatcagagatcttgctactgcactccagactgggaaacagagcgagaccctgtctcaaaaaaacaaaacaaaaaacaaacaaacaaaaactgtcagtttcctctctttatgtttagttttaaacccatccaaaatttggaacattaatatcatttgttgatcaggttgtctttcttctcatttcatg

SEQ ID NO: 21498 - DNA, 402 bp, Homo sapiens
gtttctaagagtaggtgaaattaggtgcctaacagagagcctggcatggtgttggccctcagtaaagactagttcccagggccaggcacagtggctcacgcttgtaatcccagcactttgggaggctgaagcaggaggatcacctgagttcaggagttcgagaccagcctggccaacatggwgaaaccctgtctctactaaaaatacaaaaattagccaggtgtggtggtgcgcacctgtaattccagctacctgggaggctaagacaggagaatcacttgaacccgggaggcagaggttgcagtgagccatgactgcaccactgcactctagcctgggcagcagagtgagactccatctcaaaaaaaaaaaaaaagataagaaaaaagaaaaaaaagacta

SEQ ID NO: 21499 - DNA, 467 bp, Homo sapiens
gtctcttctacctgtccttgggtaccaggaagcacagatccaagtttgaaccatgactgtaacaagtgttcaccccaaccccgggatctgtttgtcttcttgttcttcatgatatggggttcattttgttattgttttgttgactgtattttgttgtaacccatcacacattttctgtagagaaggggtaatcggtagacagggaagagagaaacatttacttcagcacgttttatcaaagcaaacttcaaaggctgaaataatcacagcrgtgaagcaaaggggtcattagtggagagtaggttgacaggatatagtacattatttctcagtctataaaatacttccagtttaaatggatccctactgaccaaaggttgagttctaaaatcttcatttttatattttttatactatttctacctgctgatacttttatgtatttcatttcccaaattgttcttttc

SEQ ID NO: 21500 - DNA, 571 bp, Homo sapiens
catttttattttttctgtgaatttttttgtcttttttgcccatttttagaatttgatgggtttctccctttcgtttgcctaaaactgtcgtaaattacccgtttgtatgatgtgtgttatttgctttgttctttagtagtgaatggatgctttgccttaaggtggttttaattttttatgcaatcatattcttttgtgtcttctctaattttatgtcatggttacagaatctttcgctattctaagatcgtraaagcattcactcattgtcttctggtactttactgatgcaccttttacattttagtctttgatccatgttgaatttacttcagttttttttttttttttgagatggagtcttgctttgtcacccaggctggagtgcagtggtgtgatctcgactcactgcaacctccaccttccaggttcaagtgattctcttgcctcagcctcccaagtagcttggattacaggtgcatgccaccacggcccagctaatttttgtatttttagtagagacggggtttcaccatgttggccaggctggtctagaactcctgacctcaag

SEQ ID NO: 21501 - DNA, 588 bp, Homo sapiens
ttttttgagatggagtctctctctgttgctcacgctggagtgcagtggtgcaatatcagctcactgcaacctctacctcccaggttcaagtgattctcctgcctcagcttcccgagtagctgggattacaggtgcatgccaccatacccagctaatttttgtatttttagtagagatggggttttgtcatgttagccgggctggtcctgaactcctgacctcaggtgatccacctacctcggcctctcaaagtgctgggattacaggcatgagccaccgcacccagcccctttgggcatttttaaaatcggggctaaagcagataaaggagattttttttctaaggaggagaaaatgcaaagtcatgagctaacaaaagaatttggtcaaacgtgaccttctaataagaattgacgttaaaattatggttttagccatatttcctttcaggagcagttaaagacgctttttgaaggtgagaaaattaatttttgagtttatattacacactgtaacacagagggctgtgcacacggtgatgacattaaccgtcaygtacttggcagaggcagtgtggactctggccgg

SEQ ID NO: 21502 - DNA, 548 bp, Homo sapiens
agcatgggttggctctggagtcatggcagagggctgcgcaggtgccagcattcaggaggagcaggaggaaggggcctaccccagggaaagagagatgggggtaagcgcagccctcagcgcgtcctttctgattgcctccgctgcctcgtgttcacccgagtcccaaccaacacgtgagcagagcgcttcacaggggtcaagaagcttgaagcttggagactgacccacccgtgttcagcagctgggggaggagacagcgtcagcaaggccgcatgcccaggacacaatggcgggtatgggagccctggccagaagggccaggccagggcccagtggcgggtggcggcttatggccttccttctggtagaagggggaaaaaggcagggagaggaggccgacaccacctccaggaagctctccccgcctgattcccaggctctcccagataaggcgggacactrggaggtgaattttaggagactttccaacaaaaaatagcctaataggctttagcatttatttatttatttatttatttatttattta

SEQ ID NO: 21503 - DNA, 1449 bp, Homo sapiens
  misc_feature (1)...(1449): n = A,T,C or G
tggatcttawaactagcactagtaaaactgaggtgactcaatgctttgcccttttattatccaataaatataccagatgaaaaagaaaatagaatatttacaccaaatacattcactaatataaacatgtttgttgaagagttaggatttacatattcacattggatcaagatagaaacagaattgggaggacaagagatttcactttcatacttggtagttcagacatccttgttaaagagttcaatctactttgatagcaggggaaatttttgtttctgaggaatttcggtgctctgaggtagaaaaggaatatatataggatctcagacaattggaattcccatgacctcccaggtgctgagggttgaatctccaggccctcccacgggccctcagcctggagctcccgacagccacttctgggttggggtggaaaggcttcaggaccagcagggaagggaaggccacaatggagttttgtatccatgcatgtgggttatttcttccctgaaacctggagaccagaggctacctaactcagacaatgtgagtattaaaaaacttcctgtagcaataagagcatcaagaacataagacgcattgtaggataagagcaaaaaaaaaaattattcaaggactcgaacttaagggttttttgaagtttttgaaggttgtgaaaaaaactggacacgagatgttcagtaattgttttgggaattcttttcttggaaatatcacgctcattgttagccaggcaaaacagacttcttggttcttaactacacttcaanttttaaaaaggtatcttattttgttttaattattttaaatgctattatttattatcccttaatcaatatatcaatctatcaagtcatcagaacatttaggaattcaatcttacttttatctggacaagtttaatttcatcaaatcttatatcagcaagagatttccttgtctggcctcttcggtgtccaaatttacacttatttctaatcacttgctcatcatcttctatgggtcttcgaacatatttaaagcgatctttgagggctcgtttccataaaaactgtaaaataaaacagaccagttaatcttcaaggagattgagataatcctatataaacaatacgtctatacaacaacaatacatacctatcatctttgggcttgaaattattttcacatcatggtaatagaaacaatatatctatccttccttttatcctcacagcaatcttgtgacactgctacagaaattataaaccctaagttataggtaagcagacaaagtcacagaaatataaatcttttcccaatgtcatatggttattgagtaaatatattggttcttgaacctggattttctaattcccaaaagtgatactttccactatactctgtctccacaaccaattccatttttctagtgggttctagaaa

SEQ ID NO: 21504 - DNA, 1449 bp, Homo sapiens
  misc_feature (1)...(1449): n = A,T,C or G
tggatcttataactagcactagtaaaactgaggtgactcaatgctttgcccttttaytatccaataaatataccagatgaaaaagaaaatagaatatttacaccaaatacattcactaatataaacatgtttgttgaagagttaggatttacatattcacattggatcaagatagaaacagaattgggaggacaagagatttcactttcatacttggtagttcagacatccttgttaaagagttcaatctactttgatagcaggggaaatttttgtttctgaggaatttcggtgctctgaggtagaaaaggaatatatataggatctcagacaattggaattcccatgacctcccaggtgctgagggttgaatctccaggccctcccacgggccctcagcctggagctcccgacagccacttctgggttggggtggaaaggcttcaggaccagcagggaagggaaggccacaatggagttttgtatccatgcatgtgggttatttcttccctgaaacctggagaccagaggctacctaactcagacaatgtgagtattaaaaaacttcctgtagcaataagagcatcaagaacataagacgcattgtaggataagagcaaaaaaaaaaattattcaaggactcgaacttaagggttttttgaagtttttgaaggttgtgaaaaaaactggacacgagatgttcagtaattgttttgggaattcttttcttggaaatatcacgctcattgttagccaggcaaaacagacttcttggttcttaactacacttcaanttttaaaaaggtatcttattttgttttaattattttaaatgctattatttattatcccttaatcaatatatcaatctatcaagtcatcagaacatttaggaattcaatcttacttttatctggacaagtttaatttcatcaaatcttatatcagcaagagatttccttgtctggcctcttcggtgtccaaatttacacttatttctaatcacttgctcatcatcttctatgggtcttcgaacatatttaaagcgatctttgagggctcgtttccataaaaactgtaaaataaaacagaccagttaatcttcaaggagattgagataatcctatataaacaatacgtctatacaacaacaatacatacctatcatctttgggcttgaaattattttcacatcatggtaatagaaacaatatatctatccttccttttatcctcacagcaatcttgtgacactgctacagaaattataaaccctaagttataggtaagcagacaaagtcacagaaatataaatcttttcccaatgtcatatggttattgagtaaatatattggttcttgaacctggattttctaattcccaaaagtgatactttccactatactctgtctccacaaccaattccatttttctagtgggttctagaaa

SEQ ID NO: 21505 - DNA, 1449 bp, Homo sapiens
  misc_feature (1)...(1449): n = A,T,C or G
tggatcttataactagcactagtaaaactgaggtgactcaatgctttgcccttttattatccaataaatataccagatgaaaaagaaaatagaatatttacaccaartacattcactaatataaacatgtttgttgaagagttaggatttacatattcacattggatcaagatagaaacagaattgggaggacaagagatttcactttcatacttggtagttcagacatccttgttaaagagttcaatctactttgatagcaggggaaatttttgtttctgaggaatttcggtgctctgaggtagaaaaggaatatatataggatctcagacaattggaattcccatgacctcccaggtgctgagggttgaatctccaggccctcccacgggccctcagcctggagctcccgacagccacttctgggttggggtggaaaggcttcaggaccagcagggaagggaaggccacaatggagttttgtatccatgcatgtgggttatttcttccctgaaacctggagaccagaggctacctaactcagacaatgtgagtattaaaaaacttcctgtagcaataagagcatcaagaacataagacgcattgtaggataagagcaaaaaaaaaaattattcaaggactcgaacttaagggttttttgaagtttttgaaggttgtgaaaaaaactggacacgagatgttcagtaattgttttgggaattcttttcttggaaatatcacgctcattgttagccaggcaaaacagacttcttggttcttaactacacttcaanttttaaaaaggtatcttattttgttttaattattttaaatgctattatttattatcccttaatcaatatatcaatctatcaagtcatcagaacatttaggaattcaatcttacttttatctggacaagtttaatttcatcaaatcttatatcagcaagagatttccttgtctggcctcttcggtgtccaaatttacacttatttctaatcacttgctcatcatcttctatgggtcttcgaacatatttaaagcgatctttgagggctcgtttccataaaaactgtaaaataaaacagaccagttaatcttcaaggagattgagataatcctatataaacaatacgtctatacaacaacaatacatacctatcatctttgggcttgaaattattttcacatcatggtaatagaaacaatatatctatccttccttttatcctcacagcaatcttgtgacactgctacagaaattataaaccctaagttataggtaagcagacaaagtcacagaaatataaatcttttcccaatgtcatatggttattgagtaaatatattggttcttgaacctggattttctaattcccaaaagtgatactttccactatactctgtctccacaaccaattccatttttctagtgggttctagaaa

SEQ ID NO: 21506 - DNA, 1449 bp, Homo sapiens
  misc_feature (1)...(1449): n = A,T,C or G
tggatcttataactagcactagtaaaactgaggtgactcaatgctttgcccttttattatccaataaatataccagatgaaaaagaaaatagaatatttacaccaaatacattcactaatataaacatgtttgttgaagagttaggatttacatattcacattggatcaagatagaaacagaattgggaggacaagagatttcactttcatacttggtagttcagacatccttgttaaagagttcaatctactttgatagcaggggaaatttttgtttctgaggaatttcggtgctctgaggtagaaaaggaatatatataggatctcagacaattggaattcccatgacctcccaggtgctgagggttgaatctccaggccctcccacrggccctcagcctggagctcccgacagccacttctgggttggggtggaaaggcttcaggaccagcagggaagggaaggccacaatggagttttgtatccatgcatgtgggttatttcttccctgaaacctggagaccagaggctacctaactcagacaatgtgagtattaaaaaacttcctgtagcaataagagcatcaagaacataagacgcattgtaggataagagcaaaaaaaaaaattattcaaggactcgaacttaagggttttttgaagtttttgaaggttgtgaaaaaaactggacacgagatgttcagtaattgttttgggaattcttttcttggaaatatcacgctcattgttagccaggcaaaacagacttcttggttcttaactacacttcaanttttaaaaaggtatcttattttgttttaattattttaaatgctattatttattatcccttaatcaatatatcaatctatcaagtcatcagaacatttaggaattcaatcttacttttatctggacaagtttaatttcatcaaatcttatatcagcaagagatttccttgtctggcctcttcggtgtccaaatttacacttatttctaatcacttgctcatcatcttctatgggtcttcgaacatatttaaagcgatctttgagggctcgtttccataaaaactgtaaaataaaacagaccagttaatcttcaaggagattgagataatcctatataaacaatacgtctatacaacaacaatacatacctatcatctttgggcttgaaattattttcacatcatggtaatagaaacaatatatctatccttccttttatcctcacagcaatcttgtgacactgctacagaaattataaaccctaagttataggtaagcagacaaagtcacagaaatataaatcttttcccaatgtcatatggttattgagtaaatatattggttcttgaacctggattttctaattcccaaaagtgatactttccactatactctgtctccacaaccaattccatttttctagtgggttctagaaa

SEQ ID NO: 21507 - DNA, 574 bp, Homo sapiens
taggtgttattggtgtctcattgctattttaattaattcacatacatttttaattcagtgtgccaatctaaataacaaccagaacaacaagcaaaacctgctttggtttttaataaataatgtgctgaatatagtaatcaattaggaagaactgttaacaatattgaattttcccatctgtgaatatagaatgtccctccattaatttaaatcatctttaatttttctcagcaatattttgtagttttcagtgccaagtcttgcactccttttgttaagtttgtttctaaatgtttcattattttttaygtgatttggggatttcaaattgttaattgctagtatttaaatgataacttattttaatgtgttagccttgtgtcctgcaactttggtactctcatatatttgttccagtagttgtgtgtgtgtgtctgtgtgtgtgtttgtgtgtgtgtgaatatgaatacatattttatgttagtgaggacagattaacatcttccattttaaatgttatgtctttgatttcttttttatttgatgtttctttcttcctttaaacgatagaacc

SEQ ID NO: 21508 - DNA, 574 bp, Homo sapiens
taggtgttattggtgtctcattgctattttaattaattcacatacatttttaattcagtgtgccaatctaaataacaaccagaacaacaagcaaaacctgctttggtttttaataaataatgtgctgaatatagtaatcaattaggaagaactgttaacaatattgaattttcccatctgtgaatatagaatgtccctccattaatttaaatcatctttaatttttctcagcaatattttgtagttttcagtgccaagtcttgcactccttttgttaagtttgtttctaaatgtttcattattttttacgtgatttggggwtttcaaattgttaattgctagtatttaaatgataacttattttaatgtgttagccttgtgtcctgcaactttggtactctcatatatttgttccagtagttgtgtgtgtgtgtctgtgtgtgtgtttgtgtgtgtgtgaatatgaatacatattttatgttagtgaggacagattaacatcttccattttaaatgttatgtctttgatttcttttttatttgatgtttctttcttcctttaaacgatagaacc

SEQ ID NO: 21509 - DNA, 539 bp, Homo sapiens
agaagaacctaaatagagaaatgtttaaatctccacagagaataatctaaattgagcttaaccattatacatttctgatcagaaagcagtattttaagaaaattttggagtgctgagtgcacaggagactgggagaaattaaaaaaaagcaatcaatcacttaaatcagttatctcataaaatackttacattcccatacagtgtgtattaaaattcattaatggagaaataaatttatttaaatttattttcttctcatactttgattatttccttttatttagattgtgtgttacaaactagttgattagtacatgtttacatttttaaaataaatacacatatgtaaaatggatgattagtgaaatatttaataatagtgatataggataaaatagatgttagatgacattaggattaagccagcctaatatggtagaattgatattaaattaggaagcctaaaaataaaatcgggaggatggaaagaccaaatttgacaaacatcatagaggaaagtacagaagaatttagtgac

SEQ ID NO: 21510 - DNA, 539 bp, Homo sapiens
agaagaacctaaatagagaaatgtttaaatctccacagagaataatctaaattgagcttaaccattatacatttctgatcagaaagcagtattttaagaaaattttggagtgctgagtgcacaggagactgggagaaattaaaaaaaagcaatcaatcacttaaatcagttatctcataaaatactttacattcccatacagtgtgtattaaaattcattaatggagaaataaatttatttaaatttattttcttctcatactttgattatttccttttatttagattgtgtgttacaaactagttgattagtacatgtttacatttttaaaataaatacacatatgtaaaatrgatgattagtgaaatatttaataatagtgatataggataaaatagatgttagatgacattaggattaagccagcctaatatggtagaattgatattaaattaggaagcctaaaaataaaatcgggaggatggaaagaccaaatttgacaaacatcatagaggaaagtacagaagaatttagtgac

SEQ ID NO: 21511 - DNA, 539 bp, Homo sapiens
agaagaacctaaatagagaaatgtttaaatctccacagagaataatctaaattgagcttaaccattatacatttctgatcagaaagcagtattttaagaaaattttggagtgctgagtgcacaggagactgggagaaattaaaaaaaagcaatcaatcacttaaatcagttatctcataaaatactttacattcccatacagtgtgtattaaaattcattaatggagaaataaatttatttaaatttattttcttctcatactttgattatttccttttatttagattgtgtgttacaaactagttgattagtacatgtttacatttttaaaataaatacacatatgtaaaatggatgattagtgaaatatttaataatagtgatataggataaaatagatgttagatgacattaggattaagccagcctaatatggtagaattgatattaaattaggaagcctaaaaataaaatcrggaggatggaaagaccaaatttgacaaacatcatagaggaaagtacagaagaatttagtgac

SEQ ID NO: 21512 - DNA, 539 bp, Homo sapiens
agaagaacctaaatagagaaatgtttaaatctccacagagaataatctaaattgagcttaaccattatacatttctgatcagaaagcagtattttaagaaaattttggagtgctgagtgcacaggagactgggagaaattaaaaaaaagcaatcaatcacttaaatcagttatctcataaaatactttacattcccatacagtgtgtattaaaattcattaatggagaaataaatttatttaaatttattttcttctcatactttgattatttccttttatttagattgtgtgttacaaactagttgattagtacatgtttacatttttaaaataaatacacatatgtaaaatggatgattagtgaaatatttaataatagtgatataggataaaatagatgttagatgacattaggattaagccagcctaatatggtagaattgatattaaattaggaagcctaaaaataaaatcgggaggatggaaagaccaaatttgacaaacatcataraggaaagtacagaagaatttagtgac

SEQ ID NO: 21513 - DNA, 543 bp, Homo sapiens
gactacagaaactcttttctattcacttacctcctcttaacactctttgaaagttaaattgaatattctttgagaataagtgctgtatatctctataactgagaaaaagacaagataatggcaaagataatatgtatattaaaatakttcataatgctgaaataagctaccaaagtcaatgtggttttctttaataccataattatagtattttgacttttgcatatgagcaacacatgattaaatctgatgaagtgataattggctgaaaatctagttttcatccactggccacaaaactagactaaaaatatggttgaatcacattgaccctcaagaattacatttatcaaagaaatagcagaaatgaaatttctgcattctagtaaagaaataacttcttaataactatgatcagggtgtttgtggctattcattgagtgagcttagcaatagaccaggagtctttatgttacataaaaggtcactgtgatagttaattttgtgtgtcaacttgactaggctgtcttagatatttgatca

SEQ ID NO: 21514 - DNA, 415 bp, Homo sapiens
tgagctactgtgtccagcatgaaatcatttatgakgtgttgaccatttttcaactggatatgaaggcagtatagacacacaactgtgaatttatcaagacctgtgctttgtttacttagtttctttatataggaattttcaaacaaatgtaaattggaggcatgtacactgcagtaggtaatggctgtatcagtcaacacttagccttagttgtcaccacaatgttttaccccagtaccatgcctatcctcgtgggccaaaaacacagatagagtctagaagaatgcacaaagcagcttttcaccaagggttaagtttccattctacttgctaacccacagagaacgcatagaaggtggagattagagagtgacttctacactccattcagcagattccaggtttctcgatggcc

SEQ ID NO: 21515 - DNA, 546 bp, Homo sapiens
ttgccaaaatccaggagaaaataaaccctaaaaggctgttttaatgggtaaagataatcattttaacaactatatgtaaaaaatatgtaaaaaataaaataaataggctgggcacagtggctcatgcctgtaatcctagcattttgggaggccaaggaattcagattgcctgagctcaggagtttgagaccagcctgggcaacatggtgaaaccctgtctttactaaaatacaaaaaattggctgagcatggtggtgtgcacctgtagtctcagctactctagaggctgaggcaggagaatcgtttgagcccaggaggcagctataaaaaactataaaaaaaaactcacacctgtaatcctagttaggaggccaaggtgggaggacacttgagatcgggagttcgagaccagcctgaccaacatggagaaacctcatttctactaaaaaatacaaaattacccgggtatagtggcacgtttgtaatcacagctactcyggatgctgaagcaggagaatcgcttgaacttgggaggcagaggttgca

SEQ ID NO: 21516 - DNA, 509 bp, Homo sapiens
agccttccyagctcaagcgatacccctacctcatcctgccaagtagttggaactacagtcatactccactgtgccagtataatttttgtagtttctgtagagatggggttttgctatgtttcccaggttcctttcaaactcctgggctcaagcaatccgccttcctcggcctcgggattacaagcatgagttaccgcacccagccaaaactcttaaattgtgcactctatgtatgtagagcttattgtatgtcaattatacctcattgaaacaataaaaagaatttgctctttaaaattattctattatttccatataaattttgtaaaagtaaaggatagacaaatggtcaattccactactcatttagcaaaacaatgtaactctattccacaaccatgtatcattataaaaatatgagctcatttcagttgcgaatataattgcaaatattccaaaacaaaatactagcatttagttattaaaaaataataaatgcctttttatca

SEQ ID NO: 21517 - DNA, 528 bp, Homo sapiens
tactggtgtgacatatcatgacatattgtaatactgatatgacacccgtaagaccgatatgatgcccacaatactgacatgacagccatagactcatataacacctgcaatacacatgtgacaccccaatacaaatgtgataccgcaatacagatgtgacaccaacaagactactgtgacaccmataagactgctgtgacacccataagactgatgtgacacccacaatactgatgtgacgatgtgatgcccacaatacagatgacacctgcaagagggctatgatgcccataagactcatgtgacgcccgcaatacagatatgacacccataagactcatgtgacacccacaagattcatatgacactcctaagactcatatgacacccataatactgatatgatgcccgtaagactgatgtgatgcctgcaatactgatgacacctgtaagactgatatgacacccccaatactgatatgacacccgcaatactgatatgacacccgcaatacagatatgacaccc

SEQ ID NO: 21518 - DNA, 576 bp, Homo sapiens
taagtaattcaagatctcaacatkttattagcatttattaactctcaaggaatttgttgagacgaagagcatttgctagaattttatatacacatcaacttattttgctttagtaatttttttgttggtttgtttgtttttgagacggagtctcgctctgtcactttgacaatgtcaaggctggagtgcattggcgcaattttggctcattgcaacctctgcctcccgggttcaagcaattctcctgcctcagccacccgagtagctgggattacaggtgtgcgacaccacactcagctaatttttgtatttttagtagagatagggcttcaccatgttggccaggctggtctcaaactcctggcctcaagtgatccacccaccttggcctcccaatgtgctggtattacaggtgtgagccactgtgcccagccttgctttaataattttttttgtacttgggaaaacctacttagcgtactccacatttttagaatgtttatctgttttattccatttcattaattcagctttcatttctgattattctagattcacacattttttcaggaggct

SEQ ID NO: 21519 - DNA, 579 bp, Homo sapiens
ttgccaccttttaggttcagttaagtcagtacatgggttttatttaggattgtttagtattcctaccacttactagtaatatcccaaatttcttttgggaaaccactactttcctattcttctccatgtgattaggagttcccctccacttttaaggatgggccaaaatgacagtctaatctcacctctctggccatgacgaatgtttcaagaacggcacctgaccccctaaacactgataagatcatcatcaatagattttctgagactcctgcgaaagtgaagcaagctctctctctcataagaattaccagggataaccatcattctttctcagaaacctcatcctatgtatcttaattgtctagttgaccaccgtaatgagctggactgtgcccctgcaaaattcatatactgaagtccaaacacctagtacttcagagtttgactgtatttggagagagaacctttaaagacataattaagatcactagaatgggtcctcatccaatawgactggtgctttaataaaaagaggttagtctctctcaacaagttgagtatagaataactatacct

SEQ ID NO: 21520 - DNA, 682 bp, Homo sapiens
attacataaagttaacttttactcattgatgatagcataactagagaaagattagatggcattgtttctttttaacattcataaactattttgctgagaaaataaaagagatatggccgggcgcggtggctcacgcctgtaatcccagcactttgggaggcagaggcgggtggatcatgaggtcaggagatcgagaccatcctggctaacaaggtgaaaccccgtctctactaaaaatacaaaaaattagccgggcgcggtggcgggcgcctgtagtcccagctactcgggaggctgaggcaggagaatggcgtgaacccgggaagcggagcttgcagtgagccgagattgcgccactgcagtccgcagtccggcctgggsgacagagcgagactccgtctcaaaaaaaaaaaaaaaaaaaaaaaaaaaaagagatattaaacagactgtactctataagggcctaaaataaagttgaaatgagtaataaattatgaaataattagaaagaacacagttactatatgaaatatgggaaattatgaagttactctggggaagttcagattccagccacaaatatctcatcaatttaaaagtcacatagcaaaagccctactgtgaagacagaatgacatgtggccaatgaaatgtgagagaacccagattatttgatgccatc

SEQ ID NO: 21521 - DNA, 628 bp, Homo sapiens
cctagctggttttgacaggcggcattaagagagtggtcccagaaagcaaaatggaggttccctttaagggggaacaggcaatcctcttctctctgcaacagagcatggctgccatgggagccagagaggaagagagcagctggtgttcagtgcactggacagataggagctgaggaggatgaagactcagctatccctgtatggtacagacatgacacttggcacacatagagaaacacgacagctgccgcaccctgtgtctaagctgggttgaatttcacatactgtggccaagcgaatgcgggcttttggcccatmatagatgccagagagggtgtgcctcctacacattttcatatgttaccacccattacttgctcccgagtattcagtgttacctgggggcagatgattccagtactttctcagcctcctcaacttgaacatcttcatcctcatcttcgtcattttctgtaaatacaaaatgttcgttcagatatttcccacttcacattctgcaagcacagtcagcccaatgtgcacagagacatgaacatctatgtatggttcagcactgtactgaaaactgtcatattttatctttcacaaaatgccctggcatggtttc

SEQ ID NO: 21522 - DNA, 628 bp, Homo sapiens
cctagctggttttgacaggcggcattaagagagtggtcccagaaagcaaaatggaggttccctttaagggggaacaggcaatcctcttctctctgcaacagagcatggctgccatgggagccagagaggaagagagcagctggtgttcagtgcactggacagataggagctgaggaggatgaagactcagctatccctgtatggtacagacatgacacttggcacacatagagaaacacgacagctgccgcaccctgtgtctaagctgggttgaatttcacatactgtggccaagcgaatgcgggcttttggcccataatagatgccagagagggtgtrcctcctacacattttcatatgttaccacccattacttgctcccgagtattcagtgttacctgggggcagatgattccagtactttctcagcctcctcaacttgaacatcttcatcctcatcttcgtcattttctgtaaatacaaaatgttcgttcagatatttcccacttcacattctgcaagcacagtcagcccaatgtgcacagagacatgaacatctatgtatggttcagcactgtactgaaaactgtcatattttatctttcacaaaatgccctggcatggtttc

SEQ ID NO: 21523 - DNA, 628 bp, Homo sapiens
cctagctggttttgacaggcggcattaagagagtggtcccagaaagcaaaatggaggttccctttaagggggaacaggcaatcctcttctctctgcaacagagcatggctgccatgggagccagagaggaagagagcagctggtgttcagtgcactggacagataggagctgaggaggatgaagactcagctatccctgtatggtacagacatgacacttggcacacatagagaaacacgacagctgccgcaccctgtgtctaagctgggttgaatttcacatactgtggccaagcgaatgcgggcttttggcccataatagatgccagagagggtgtgcctcctacacattttcatatgttaccacccattacttgctcccgagtattcagtgttacctgggggcagatgattccagtactttctcagcctcctcaacttgaacatcttcatcctcatcttcgtcattttctgtaaatacaaartgttcgttcagatatttcccacttcacattctgcaagcacagtcagcccaatgtgcacagagacatgaacatctatgtatggttcagcactgtactgaaaactgtcatattttatctttcacaaaatgccctggcatggtttc

SEQ ID NO: 21524 - DNA, 628 bp, Homo sapiens
cctagctggttttgacaggcggcattaagagagtggtcccagaaagcaaaatggaggttccctttaagggggaacaggcaatcctcttctctctgcaacagagcatggctgccatgggagccagagaggaagagagcagctggtgttcagtgcactggacagataggagctgaggaggatgaagactcagctatccctgtatggtacagacatgacacttggcacacatagagaaacacgacagctgccgcaccctgtgtctaagctgggttgaatttcacatactgtggccaagcgaatgcgggcttttggcccataatagatgccagagagggtgtgcctcctacacattttcatatgttaccacccattacttgctcccgagtattcagtgttacctgggggcagatgattccagtactttctcagcctcctcaacttgaacatcttcatcctcatcttcgtcattttctgtaaatacaaaatgttcgttcagatatttcccacttcacattctgcaagcacagtcagcccaatgtgcacagagacatgaacatctatgtatggttcagcaytgtactgaaaactgtcatattttatctttcacaaaatgccctggcatggtttc

SEQ ID NO: 21525 - DNA, 565 bp, Homo sapiens
ccatgttggccaggctggtcccgaactccagacctcagatgatctgcccgccttggcctcccgaagtaytgggattataggtgtgagccactgcacctggcctatctgtggcatttatgagacatatggaaaatttagacgctggctatttgatgatattaagaaaagattattaaaccaggtgtagtttctcatgcctgtaatcccagcaccttgggaggccaaggcaggaggatcactggggcacaggaattctagacccgtctgggcaacaaagtgagaactcgactctacgagaaataaaaaaatcagcaagcctggtggcatggacccgtggtcccaactgcacaggacctgaggtaggaggattgcttcagaccaggaggccaaggctgcagtgagccataaagaaaagaaaagattactaactaaaagtaagtccttgaaatcagccagatgacactaaatcccatccattcccctgagctcacaggggggctgcctagactccagaaaaaaggctgtgcctagtcctagactctggcatgcaggaggtcagaaggct

SEQ ID NO: 21526 - DNA, 565 bp, Homo sapiens
ccatgttggccaggctggtcccgaactccagacctcagatgatctgcccgccttggcctcccgaagtactgggattataggtgtgagccactgcacctggcctatctgtggcatttatgagacatatggaaaatttagacgctggctatttgatgatattaagaaaagattattaaaccaggtgyagtttctcatgcctgtaatcccagcaccttgggaggccaaggcaggaggatcactggggcacaggaattctagacccgtctgggcaacaaagtgagaactcgactctacgagaaataaaaaaatcagcaagcctggtggcatggacccgtggtcccaactgcacaggacctgaggtaggaggattgcttcagaccaggaggccaaggctgcagtgagccataaagaaaagaaaagattactaactaaaagtaagtccttgaaatcagccagatgacactaaatcccatccattcccctgagctcacaggggggctgcctagactccagaaaaaaggctgtgcctagtcctagactctggcatgcaggaggtcagaaggct

SEQ ID NO: 21527 - DNA, 1364 bp, Homo sapiens
aagaaactgagattcaaagaaattgaacatcttgtacactgtcacatggccaataagtaactgagcctgaagaaatccttgtctcctgacccctagtcatgcagcattgaagaaaaaaaaaggacagccaacctatgtgattacactcataaagatgactaaggaatactaagcartgactaataaccaattttcaagttgcagttcttttaataaatgttttcttcatctacttgtggcaagaacagaattagctaacgtgtaggcactgactagtttattgcctagaaattcaaactcatttttaaatcctgattgttttctaaaaaactctcattgaccgtgtcttataatacctacatttcagcttcactttgttctccacaaagtgatacaaaagtcacttgaaaagtcacctttatgtccatagtatggttaggtttaggagtatttcttgaaagagtcaatcacttttcaatcttaacaataaaagggaagataagatagtaaaatccatctgtaatcgtctattgctccactgaccacaaaaactttacaaagttctcaactactcacaagtctgcactacttcagaaaaatggaatctgagccagaaacgtggattagtgcatgttcatacagaaacagagacttaatagataatgttgaaacaactaactagccattttggaaaactaaaaaattagatccccaatgatgaatgcatcactcaaaaataaatttcatatggatcaaatatttcaatataaaacaccacaaaagtaaaaaaaaaaaaaaagtcatgttttctttttgtcataatcttggatgatttctaagcatgacaaaaaaaatatctataagcagccaggcgtggtggctcatgcctgtaatcccagcactttgggaggctgaggtgggtggatcacttgaggtcagcagttcgagaccagcctggctgatatggtgaaaccctgtctctactaaaaatacaaaaattagcaggacatggtggtacatgcctgtaatcccagctactcaggaggctgaggcaggagaattgcttgaacccgggaggcagaggctgcagtgagccaagatcacgccattgcactccactccagcctgggcaacagagcgagactccatctcaaaaaacaaaaacaaaaataaaaacaaaaacaaacaaaaaaaaattataacaattaaaagaatatttgatatataaaaacaaaacatggcaaagcacacatacataagcaaagtcaaaagacaaatcactagtttgattaagaaaatattcaaagtacataatcagaggattaatttatttaatatagaaaaagctctaaaaaataataacc

SEQ ID NO: 21528 - DNA, 1364 bp, Homo sapiens
aagaaactgagattcaaagaaattgaacatcttgtacactgtcacatggccaataagtaactgagcctgaagaaatccttgtctcctgacccctagtcatgcagcattgaagaaaaaaaaaggacagccaacctatgtgattacactcataaagatgactaaggaatactaagcagtgactaataaccaattttcaagttgcagttcttttaataartgttttcttcatctacttgtggcaagaacagaattagctaacgtgtaggcactgactagtttattgcctagaaattcaaactcatttttaaatcctgattgttttctaaaaaactctcattgaccgtgtcttataatacctacatttcagcttcactttgttctccacaaagtgatacaaaagtcacttgaaaagtcacctttatgtccatagtatggttaggtttaggagtatttcttgaaagagtcaatcacttttcaatcttaacaataaaagggaagataagatagtaaaatccatctgtaatcgtctattgctccactgaccacaaaaactttacaaagttctcaactactcacaagtctgcactacttcagaaaaatggaatctgagccagaaacgtggattagtgcatgttcatacagaaacagagacttaatagataatgttgaaacaactaactagccattttggaaaactaaaaaattagatccccaatgatgaatgcatcactcaaaaataaatttcatatggatcaaatatttcaatataaaacaccacaaaagtaaaaaaaaaaaaaaagtcatgttttctttttgtcataatcttggatgatttctaagcatgacaaaaaaaatatctataagcagccaggcgtggtggctcatgcctgtaatcccagcactttgggaggctgaggtgggtggatcacttgaggtcagcagttcgagaccagcctggctgatatggtgaaaccctgtctctactaaaaatacaaaaattagcaggacatggtggtacatgcctgtaatcccagctactcaggaggctgaggcaggagaattgcttgaacccgggaggcagaggctgcagtgagccaagatcacgccattgcactccactccagcctgggcaacagagcgagactccatctcaaaaaacaaaaacaaaaataaaaacaaaaacaaacaaaaaaaaattataacaattaaaagaatatttgatatataaaaacaaaacatggcaaagcacacatacataagcaaagtcaaaagacaaatcactagtttgattaagaaaatattcaaagtacataatcagaggattaatttatttaatatagaaaaagctctaaaaaataataacc

SEQ ID NO: 21529 - DNA, 530 bp, Homo sapiens
ttttgagatggagtctcgctctgttgcccaggctggagcrcagtggtgcaatctcggctcgctgcaacctccgcttcacgggttccagcgattctcctgcctcagcctcctaagcagctgggactacaggcatgcgccaccacacctagctaatttttctatttttagtagagatagggtttcatcatattggccaggatggtctcaaactcctgatcttgtaatccaccagccttggtctcccaaagtgctgggatcacaggcgtgagccaccgtgcctggcccagtgtgaccatttaaacatttctagttacatgattttgtaatattcaatatatatgaaatttctagaaaataattgttatttccctcattttgcttagagaatgatggaccattttacaaattctacttggaataactagcaacacagttcaagcagataattcaagaattaggtcctctttcaccattagttttctacatatttcaggaaaactaagtcaaatggagcctaaattctgaagata

SEQ ID NO: 21530 - DNA, 512 bp, Homo sapiens
taatatgtgtatgtatgtctagggtacatgggatgttttaatacaggcatgcactgtaaaataagcacatcayggagaatggggtatccatcccctcaagtatttatcctttgagttacaaacaattccattgcattttttattttaacatatacaattaaattattattgactatagtcaccccattgtgctatcaaatggtaggtcttattcattctttctatttattttgtacccattgctcatttctttggactaaacttcttctgcttataatcattattaatgtctagaaagaataataggcctgaaagcaaaaaatgccagaatttcatggggttatttttgtcctatggtagatatgggaaattcagtccataattttatatgaatatatgttcataaaggcataagaattatgttagctaattgctgagaattgtggagaaatggagattattgggcttttgagacagaacaaggctgcagagtacttagatttcatttaagt

SEQ ID NO: 21531 - DNA, 2195 bp, Homo sapiens
gaatgggggcaggaaaagagatgtagctggagggagtgtgtaattgagggaggactttttgttctgtttttgttgtcgttgttttgagacagggtctcattctgtcacccaagctgaagttcagcggcgcaatcacgactcactgcagcccaacctcccaggctcaattgatcctctgacttcagtctcctgagtagctgggacaacaggcacaccccactatgcccagctattttttgtagagatagggtttcgcaatgttgcccaggctggtctcaaactcccaggctcaagcaatctgtctgccttggcctcccagagtgctgggattacaaatgtgagttactgtgcctggccaggaaaacatttttaataagagaggtattaaatctgcggttttccaacattaagattcctaagaatcacttggrgaatgtgttgaaaatgcatattcctaggacacacccctagagagtctgatacactgggtttaagagtggctccagggccgggcgcggtggttcatgcctctaatcctggcactttgggaggccgagacagtggatcacctgaggtcaggagttcaagaccagcctgcccaacagggcgaaaccccatctttactaaaaatacaaaaattagcagctggtggtggcgcatgcctgtaatccaagctactcgggaggctgaggcagtagaatcgcttgacccagggtggcggaggttgcagtgagctgagatcgaaactccatctcaaaataaataaataaataaataaataaataaaagactgaacccaggaatctgcatcttaagcagctgtcgcactgatgattatgacccccttggatattcacttgtagacatgtgtgaatgctgaggggcaggctccaagagagagggtgggtgaagctggaggagctagctcccagcaagtctctggagaagacagtgggagggattcagagctcctgagggagagtgagagtgagacttcatctcaaaaaaaaaaaaaatgtttaccagatagacgtacgaatgagaagactgggctcagctccatcacttaccagctaggtggcagtgaccaagtaaactgccggagtctcactctctcccaggctggagtgcagtagtgccatctcagctcactgcaacctttgcctcccgggttcaagcaattctcctgcctcagcctcccgagtagctgggattacaggcacgcaccaccatgcccagctaatttttgtctttctagctgggattacaggcacgtgccaccatgcctggctaatttttgtctttttagtaaagacaaggtttcaccatgttggtcaggctgatctcgaactcctgacctcgtgatcagcctgcctcggcctcccaacatgctgggattacaggtgtgagccaccgcacccggcctatctggtaaacatttcttaagggctgactgcataggccagggagatgcggcgatgccttcaaggacttcacagcctagaaaagcccatgtttcttccctgtgaagctcagtttaaggaaaaacttggtatctgtgattcagtggcatttaggccctggatgaagctgtgagcatgcatggcatggccttgtgtgaaaggagaggtgggcccgggagtgaaccctgagggatggcagcatttggatatcaggaggagaaggggagcttggtaaggagacagaaagagcagcttgaaaggtgggagaagacccaggatgatgcagcttctcagagctccagtgggtgtgggaagccggggccccttgagcagcacagaagacagggctgggacctcctcagccctccctctaagacacaccaatgccagcaaaggacccatatgcctggcggctgccccgttcccttctccacaccacagctcaatgatttttctcaaactcaactcttaccatgccactgcccacccctaacaccccttcagatgttttccctttgctctgtggacaaaactaaaagttctggtcttggcccacgaggccctcaagacctggcccttgctaacctctctccatgtgcgtctcttgccacgctcctcctagatggtagtgctgcagccacaccagccttcttttagtctttgggcttttcatgcattttcttgcctcaggacttttgcacggtctgttcttgcagcctggacagctctctg

SEQ ID NO: 21532 - DNA, 563 bp, Homo sapiens
atatacgtaaaaaagcagaactctaacataagaacgcaggcactttggaaaaatgagtaagtgtaatcacaatgaaagctataaaccaaatatttccaagatgattaaggagccacgttttaaagaagcaattattactatatttccccgaaaaaagcaattgagatctttagagggcctggaaatatatcacatatacatttttacatagttggataaaatatcataatatgtcaagtaaaattttttttttatcaaataacaagtactggattgctgatttctcaacaatatttatataagaatgtmgggaatatttatataagaatgttatcagatctttaaataacaaagtttatgacacacgaaattaacatccagccaaattctctttcataaatggaggccacgaaaatgtttttataaatgcaagaacctagaaaatctaacatttacatatggtatcatatggtatttgaagaaaatggagagtatgataaaggcaaacgggttataaactgtgagtactaactcaggattgagaaatggactataactgggca

SEQ ID NO: 21533 - DNA, 563 bp, Homo sapiens
atatacgtaaaaaagcagaactctaacataagaacgcaggcactttggaaaaatgagtaagtgtaatcacaatgaaagctataaaccaaatatttccaagatgattaaggagccacgttttaaagaagcaattattactatatttccccgaaaaaagcaattgagatctttagagggcctggaaatatatcacatatacatttttacatagttggataaaatatcataatatgtcaagtaaaattttttttttatcaaataacaagtactggattgctgatttctcaacaatatttatataagaatgtcgggaatatttatataagaatgttatcagatctttaaataacaaagtttatgacacacgaaattaacatccagccaaattctctttcataaatggaggccacgaaaatgtytttataaatgcaagaacctagaaaatctaacatttacatatggtatcatatggtatttgaagaaaatggagagtatgataaaggcaaacgggttataaactgtgagtactaactcaggattgagaaatggactataactgggca

SEQ ID NO: 21534 - DNA, 1070 bp, Homo sapiens
tagtatttatgctaattgcttcttcatgcaacactaaatatagtacgtgtccaagttttagtgttttgctataattcatttgttttttaagcaataaaaattatattgtctgaatatttcacattttattcatccatcttcctcttgatagacatgtaacatgtttcttctcagattctgctcccgtcaataatatcactctgaatactcatgtacaggtctcctgttctatacacacatggtttctctaacatatatccctaggagagaaaatacctgtacaaggtcatgccacattgtttttaaatttttaaagaatacatactcttcaaccctatcttctataatgcrtatttttctcagatttttttttacgtgtgtattgcagcttattaaaagaaactgtaggcaggaagaaattggaagagtctcctggtctgtgtaggtcccccaaacagaaaactggagactgttacatcaatgcatggattatatttaattcaatgagtttctactactgtctgtgtctatgcaatatcacccaaaacaagatgtagatagaacatttccatcacctcagaaagtctgcttgtgccccattgaagttgacccttctttctacccactgcaactttctgatttttaatcgcttagagtaattttgccaaaaattgccctttatataaagtatatatgaactcatgaagtttacgttatttagtatctggcttcttttaacttattctttgacttttatctatcgttacatcaattagtagttccttccttttttattgctaagtattatttcaccaaataaatatgacaaaatattttaacagatgcagaaggattattgctgtaagttaattaatgtaatgtcccagctacttgtgatgctgaggtgggaggatcatttgcacccaagaggtcaagcctgcggggggcagttgtaccactgcacttcagtctgggttacagagcaagacactgtctcataaataataaaaagacattataagagctcatattatatagatgttcaacaaatttgtgttgttacttcgaac

SEQ ID NO: 21535 - DNA, 1070 bp, Homo sapiens
tagtatttatgctaattgcttcttcatgcaacactaaatatagtacgtgtccaagttttagtgttttgctataattcatttgttttttaagcaataaaaattatattgtctgaatatttcacattttattcatccatcttcctcttgatagacatgtaacatgtttcttctcagattctgctcccgtcaataatatcactctgaatactcatgtacaggtctcctgttctatacacacatggtttctctaacatatatccctaggagagaaaatacctgtacaaggtcatgccacattgtttttaaatttttaaagaatacatactcttcaaccctatcttctataatgcatatttttctcagatttttttttacgtgtgtattgcagcttattaaaagaaactgtaggcaggaagaaattggaagagtctcctggtctgtgtaggtcccccaaacagaaaactggagactgttacatcaatgcatggattatatttaattcaatgagtttctactactgtctgtgtctatgcaatatcacccaaaacaagatgtagatagaacatttccatcacctcagaaagtctgcttgtgccccattgaagttgacccttctttctacccactgcaactttctgatttttaatcgcttagagtaattttgccaaaaattgccctttatataaagtatatatgaactcatgaagtttacgttatttagtatctggcttcttttaacttattctttgacttttatctatcgttacatcaattagtagttccttccttttttattgctaagtattatttcaccaaataaatatgacaaaatattttaacagatgcagaaggattattgctgtaagttaattaatgtaatgtcccagctacttgtgatgctgaggtgggaggatcatttgcrcccaagaggtcaagcctgcggggggcagttgtaccactgcacttcagtctgggttacagagcaagacactgtctcataaataataaaaagacattataagagctcatattatatagatgttcaacaaatttgtgttgttacttcgaac

SEQ ID NO: 21536 - DNA, 632 bp, Homo sapiens
gtttacactttgaaatgagaagcaaatgttgggaaaacatgtcagacgatccaggctctgaaaccagtgagaggcttggagggaactaaggaggggcgggaacagcctgcatgaggccagcggctcctgtcaagaggaargggcctgagcaggagagccccacgggcccccagaagggtggtgacaccgtccgtccacatatgggcacctgcctcaggaacttgtccagagcaggtggtcacgctgtcacatggaaatgggtctcaggactggagatgtgtcgaagcctggagccaggaagcctggggtgttgggctcaggacaggcatgagaactgccctcccatgtctgcaaagctcccagggggtgaaggagccagagaaggttcttgaattagaggtcatctccttctacccagcaaggcacccaggacagcatcctgttagcacctccgacctggtcatcttgtctcccactttcctctgggaacaagttcctgggagcccctgcaggtttttctggcacgtttgccctctcctgggatcaggccgaaagtcactttctccagaaaaaacaggattccacctgtgctcctgcagctcccaggtttgggagtgaacagcggggacagg

SEQ ID NO: 21537 - DNA, 539 bp, Homo sapiens
aatatgaaacagggtgaacatagaacttgaatggaaatgtggtcctgagctttgatcttgatgattaatggatgaaagtgggacatgattcactttggagactggataaatggattcttaatattaagagttaatttctatgggaacattcttggaaagtataataattgaaagaaggcaatgaggctaaaatttaatggrtatttaattgcttaaaatttgaacattttgatttttctttagtctcagtaaatatctggacttttcttcccattataaggagaagaaaacaaacattttttcccaagctgttatatgatgctaccatttgcagttataacacatacttatataattagtaccctatattttatcttggcacgatttcaaatgtatgagtatgtgtgtgtgttttatagctaaaacagaacggaacatgcttgtatatacattgtattctttttgccgaatatattcatatataaattataaaagtttacttgttagataaaaattgtaaaactgtagaaacttttaat

SEQ ID NO: 21538 - DNA, 980 bp, Homo sapiens
  misc_feature (1)...(980): n = A,T,C or G
tttaattttaaatggtgattgtacaattatgataatgcattttttagagatatgtagtaaccatgcaagtaaaatgtgatattaaacaggaaatgatattgtcctagacattaacatagattttctcatttactctttgaacctatttggaatttattcttcaagtaacctattaaaatctgaggttggaaatgttcaaataattaagacccaagttttctaagtgattccaaaccaaaaacttctcttttatactaaaatgtcagaatatattgctgatcaatattgttttgtatttctttgtatttaatttaaataatatctactcttctgattttaaacttaatttttttatagaaatctggtagataaaaaaccattcacatgttactatccagagatgatcaattataaatttgtttgtgtgtattgtgtataaaatataattttttctatgagtcttgtatgtgtgcatgtatttatgtatgtacatgtctgcatgtatgtatgtatctatcatayagctatatttgnttgntctgtttttttttttttttgctgttgttgttactaagcatctgtcttttttttggggaaacaaccctagttctttgaagaattgcatattcttctatctagagctgtggttttcagagagaaaatattgttgcgggatccttggggtgtcgcttttctggtcaaacatctctgtgactggtagctcctttgcccgagtttggcttgggcccactgggcaggttctgcccactcggcctatcagactgtgcgatgctcatgctaccagcctggatcttacgtctgccaaggaagagccaggcatggagtagcaatgggtgtgtgggcgagctggtgtggtgtccggccactgtgcacagccaggcacaccagctgctgcagcagggcaggcagctccaggtgctggcatggttgccagctctctatgagactgtggctggacc

SEQ ID NO: 21539 - DNA, 864 bp, Homo sapiens
tttttcaaaagtaaactaaatagttgttgattttactggggagccaaattattccattagtgaatacacccacaattatttaagcagccttctattttggatacttatgttatttctaatattttactattaaaaataatgttgcaagactgtaacaatcaatcttgtactcatttcatatgtattagaatagctgagtagaaaaatattttagaagcaatgtttgtagaatgcacatttttattgtgacaaatactgcaaaattgtcctttatagatgttacagaaatttatattccaattagaaatgactaaacttcctctacaaccataccactctgaacatgcctgatcttttctaattttggaagctaagcccattagttctcaggtgagagaggtgagtgagctttgtagtttctttacacccctttcattccactattttatgcaacctctagatctttgccattataagaaatatttgtgactatatttttaaaattttatctctaatcagaaattattatttcccataattaaggatcattagcattttctgaaatggattctttatatcttctgtcttatttttctatttgggatggagttttttttttctcagtggcctgtaggaattctgtcaagaatcagcattttctgcagatattaacttcacatattattattcttttgactttgcttatgaccattttttgctatgtagaaaatttttaatatacatttatatttatcaataattaattttatgcttttagaagttttatgtgaaaactggatggaaagatgtcttccatcctaacttgtawaataattagcccacggtttgttttagtagagttat

SEQ ID NO: 21540 - DNA, 520 bp, Homo sapiens
taaaatgagaaaaaatataaacttagctatattattattttcattaaaatgtttccttttagaattgtgtctatacctactcttcacttaacataatccaaaagatatgattaaaaggtgttacatctatgccaaaaaatatttatggtccaccattttatgccacttgcatcctaaaactttgcctaccacaatcttttgcatgmtgtttgtaagacacgagacttatgaatcaaggattaaaaatgttataagtcacagatcagtcagcttcatgagcattagcatctgtgttgccttccctagatcccaagtcccgaggaaacaacacaatatgggcccacatgtactgcacttgcagtaagttagcttaaaagaaaggaactccgaatgtcctgtactgggcaatgagcatgactgcccctcttttcaggaagaatatattatctttacaatactatatagtcagcatgactggacttggttctagagagagacactaatcttgtaagaatgtatg

SEQ ID NO: 21541 - DNA, 615 bp, Homo sapiens
tgggactacaggcatgagccagcgcccagcctgaacgcatatcttaatcatctttgctcccccacagtgccacagtgccaagcacagtgtctgattttagtagtaacgtgaagatactggttgaattggacaaaacttgaaacagaaaatgagcacattttttgcagttgcactggagtgctaaagtcaaaataaaatataaggacgaatctctaaattaagcatttcatttgggaatcacagaattgccatttgcggtatacacacatactggagtggtacatccaaagaagaaagagaaggtggaaggttttattagaaagagaaatgtgccaggcacagcagctcacacctgccttgggaggccaaggcaggcggaccacttgagcccaggagtttgagaccagcccgggcaacatgatgaaaccctgtctgtacaaaaatataaaaattagctgggtgtggtggggctcccatgtagtcccagctactcaggaggctgaggcaggaggattgcttgagcccgggaggcaggkgttgcagtgacccatgatcacaccactgcactccagcttggctgacagagccagaccctgtctcaaaaaaataaaagag

SEQ ID NO: 21542 - DNA, 627 bp, Homo sapiens
attatgacagtcagagaaacacagatggggacatctgagaaatattaaataataaacgttatttttttccaaacagaacaaaggcaggaccattaatataaatgaaaaataatatatttacatgtataatagtaaaaccaagtcattatatatctagtatttctagtacacataggtatcctatagatgaattgatttcatattaatgaataatttacatatgcataatcattttccaagaaatcattaaaaggagctttaaataccaagcttactgaatggtaatgcaacgtgtagtctttggtagtgatattaacttcatactctcataggttacttttcttcatcagtatgaattatttatagaatggaatactgcttttaagctgttcaaagtatgcaacatctcttgtctctgtcttgtttactaaatcaagatagtaacttgcgtttaattattttttattgttttattacctatcttgcaaacaatattaccttccatattctacctaygtaacagtagcatcattcatccattcagttaaagcagtataaaagaacaatattatttaatttttaataatttatttaaaatgtttaatatttaaaatatgaaatataagc

SEQ ID NO: 21543 - DNA, 555 bp, Homo sapiens
aactactgggaaatcaagcaatcagaaatggtatggtcaagagcatcattcccaagtctgacaagctcttgtgacacatcagtctctcaatcacgtaagaatagcaattgtcaatgtattgctacaaacatgaagatttatagcagcaaattttaatacaatctatagttaatataagctttcatttatttagttttaaattcttaatgagaaacttaccttgcagaacttaacttctgcctctaaatgatgaatatattgagactggtcattaatagtatgaacaaggtcgtgcatagtaggcatattggtttcctcatgttctaatgacctctatgacaaaaaataaataaataaatacataaatacataaattttaaaaagccaaattaagcatgtttggatttagcaaagaatcagttgttaccttctccatactcaattttgcactgatgtgatataaacatagaatcgatcacaatgtagcttatagtcttgatatagtttggatgcttgtcccccacaaacctcaagttgaaatgtggsccccagcat

SEQ ID NO: 21544 - DNA, 728 bp, Homo sapiens
acagtgcctggtagattgcagatactcagaagtcaagagagttaattagtggaagccaagtgttcttactcattgttagtcaagtatgagagaggcaggattcagataaatgagtctgggttaacccagcagctcttagttataactttaaaaataaaaataaaggccaggcrtggtgaggaggccaaggagggtggatgacttgaggtcaggagttcgagaccagcctggccaacatggcaaaaccccatttctactaaaaacacaaaaaattgtccaggcgtggtggtgcgcacctgtaatcacagctatttggaaggctgaagttcaaaaattgcttgaacccgggaggtggaggttgcagtgagctgagatcgcaccactgcattccagcctgggcaacagagcaagacactgtctcaaaattaaataaataaataaataaataaaataaaaagaaagagtaactgggtatggtcaagactgtaattaaatatctcaaacctgtttgggagttaaataccggatttagcaccggagaaccttgttattcggggctgttattttatccatttctcatctcttttctgtttggactcaatatatttcccagcagccagccttccgtattacttttctaccatgcttcacttaccccagacagactctgggattaactcgggcaatccattctgttcagttgagggaactcttcgtttggtctgatg

SEQ ID NO: 21545 - DNA, 728 bp, Homo sapiens
acagtgcctggtagattgcagatactcagaagtcaagagagttaattagtggaagccaagtgttcttactcattgttagtcaagtatgagagaggcaggattcagataaatgagtctgggttaacccagcagctcttagttataactttaaaaataaaaataaaggccaggcatggtgaggaggccaaggagggtggatgacttgaggtcaggagttcgagaccagcctggccaacatggcaaaaccccatttctactaaaaacacaaaaaattgtccaggcgtggtggtgcgcacctgtaatcacagctatttggaaggctgargttcaaaaattgcttgaacccgggaggtggaggttgcagtgagctgagatcgcaccactgcattccagcctgggcaacagagcaagacactgtctcaaaattaaataaataaataaataaataaaataaaaagaaagagtaactgggtatggtcaagactgtaattaaatatctcaaacctgtttgggagttaaataccggatttagcaccggagaaccttgttattcggggctgttattttatccatttctcatctcttttctgtttggactcaatatatttcccagcagccagccttccgtattacttttctaccatgcttcacttaccccagacagactctgggattaactcgggcaatccattctgttcagttgagggaactcttcgtttggtctgatg

SEQ ID NO: 21546 - DNA, 728 bp, Homo sapiens
acagtgcctggtagattgcagatactcagaagtcaagagagttaattagtggaagccaagtgttcttactcattgttagtcaagtatgagagaggcaggattcagataaatgagtctgggttaacccagcagctcttagttataactttaaaaataaaaataaaggccaggcatggtgaggaggccaaggagggtggatgacttgaggtcaggagttcgagaccagcctggccaacatggcaaaaccccatttctactaaaaacacaaaaaattgtccaggcgtggtggtgcgcacctgtaatcacagctatttggaaggctgaagttcaaaaattgcttgaacccgggaggtggaggttgcagtgagctgagatcgcaccactgcattccagcctgggcaayagagcaagacactgtctcaaaattaaataaataaataaataaataaaataaaaagaaagagtaactgggtatggtcaagactgtaattaaatatctcaaacctgtttgggagttaaataccggatttagcaccggagaaccttgttattcggggctgttattttatccatttctcatctcttttctgtttggactcaatatatttcccagcagccagccttccgtattacttttctaccatgcttcacttaccccagacagactctgggattaactcgggcaatccattctgttcagttgagggaactcttcgtttggtctgatg

SEQ ID NO: 21547 - DNA, 573 bp, Homo sapiens
agacacagaacatgcatttaaagcttctgctcagacacggtgtatatcaagtccactcacgttccattggccaaaggtagtaacgtagcaaagcaaaaagtcagtggagtggggacatacactcctccttcatggatcatttaagaagaattaagccatctaccacagcagttggtgtgactccaaagttgcccatctttcctttgcacctggcttctagcttagaagctccctccctgcagtgcacggtggctyatgcctgtaatcccagcactttgggaggacgagctgggcagatcacctaagatccggagttcgagaccagcctggccaacatggtgaaaccccgtctctactaaaaatacaaaaattaaccgggcctggtggcaggcacctgtaatctcagctactcaggaggctgaggcaggagaaatgcttgaacccaggaggtggaggttgcagtgagctgagatcgagatcgcaccactgtactctagcctgggcgacagagccagactctgtctcaaaaaaataaataaataaaagataaaaaagagaagctccttccctagg

SEQ ID NO: 21548 - DNA, 573 bp, Homo sapiens
agacacagaacatgcatttaaagcttctgctcagacacggtgtatatcaagtccactcacgttccattggccaaaggtagtaacgtagcaaagcaaaaagtcagtggagtggggacatacactcctccttcatggatcatttaagaagaattaagccatctaccacagcagttggtgtgactccaaagttgcccatctttcctttgcacctggcttctagcttagaagctccctccctgcagtgcacggtggctcatgcctgtaatcccagcactttgggaggacgagctgggcagatcacctaagatccggagttcgagaccagcctggccaacatggtgaaaccccgtctctactaaaaatacaaaaattaaccgggcctggtggcaggcacctgtaatctcagctactcaggaggctgaggcagragaaatgcttgaacccaggaggtggaggttgcagtgagctgagatcgagatcgcaccactgtactctagcctgggcgacagagccagactctgtctcaaaaaaataaataaataaaagataaaaaagagaagctccttccctagg

SEQ ID NO: 21549 - DNA, 553 bp, Homo sapiens
tcagacatgacaaataatatatcacaccaaaaagatcaagaaacttctccaggcattaactaagggtgggaaaaacacctattcagcytttcaaattatccctttgaagtaaggacttaaaggtgagaagaaaagatataatcaattggggaagtttagactgtcttctcactcttttttttttttttttttttttttttttttttttgagacagggtctggctctattgcccaggctggagtgcaatggtgcgatctcagctcactgcaacctctgcttcctggggtcaggcaatcctcctacctcagcctcctgaatagctgggactacaggtgcatgccaccacacacacgggaaatttttttattttttggtagagacggggtttctccatgttgcccaggctagtctcgaactcctgagctcaagcgatctgcctgccttggactcccaaagtattgggattacaggcctgagccaccacgcctggccaacttctcactcttaaaggcaaaatagtgaacagcaacttaaagatcaaaaaagctaagg

SEQ ID NO: 21550 - DNA, 953 bp, Homo sapiens
ttaagcatccacaattgctgaaagttacctggggcatggtgggttttgatcttcttccccttcttttcttccccttcttcttttcttctttgatcttcttccccttcttttcttccccttccccttcttttcaatttctgcaataaattcagacatggacagacacattaagctgattcccctacacacataacaatccactgtctaatcctcacacagggacctcaggctcctcagcataagaataggacactgtgagagatatatttcaggaggcctgaaggctggtcgtgatagaaattcctcggtttttctcccagaaactctgggtaaaatgtccctattctagtagatcattatcccaatatcatttgtcccaagtttgtgcaaacagttatgccttatttttccaatcaatttaaagcaaataccctcaaatgatttctaggagaaaaactgcaatatttagccctgtctcatcaaatactcagattgttcatggttgtgaggactccagacactgaaattagagtgaaaaaggaaatctacaaaccctygagtcaaaatcatagttctctgaatttgtcacatctgcccaggtccaatgtcatgagagtagaatcagagtgccacaggcatggcctgagactaggaagagagccatgctcactgacccatcccatgtctgggcttccaggtagaactagagtttcattcaacctacatgtgcctataggtcctcactgcggcaatgacatctctcagctcagtaatggccacttggagcaggaatatgatctttatatggaagactcagtggatccttatcaccttcatagaaaggtactcacctcccacgtcaagagaaaagccaacatgtttttcctccaatgcataaaaggaacttccgtagggctggcaggagtcaggctgttcaagacaactggaaggag

SEQ ID NO: 21551 - DNA, 953 bp, Homo sapiens
ttaagcatccacaattgctgaaagttacctggggcatggtgggttttgatcttcttccccttcttttcttccccttcttcttttcttctttgatcttcttccccttcttttcttccccttccccttcttttcaatttctgcaataaattcagacatggacagacacattaagctgattcccctacacacataacaatccactgtctaatcctcacacagggacctcaggctcctcagcataagaataggacactgtgagagatatatttcaggaggcctgaaggctggtcgtgatagaaattcctcggtttttctcccagaaactctgggtaaaatgtccctattctagtagatcattatcccaatatcatttgtcccaagtttgtgcaaacagttatgccttatttttccaatcaatttaaagcaaataccctcaaatgatttctaggagaaaaactgcaatatttagccctgtctcatcaaatactcagattgttcatggttgtgaggactccagacactgaaattagagtgaaaaaggaaatctacaaaccctcgagtcaaaatcatagttctctgaatttgtcacatctgcccaggtccaatgtcatgagagtagaatcagagtgccacaggcatggcctgagactaggaagagagccatgctcactgacccatcccatgtctgrgcttccaggtagaactagagtttcattcaacctacatgtgcctataggtcctcactgcggcaatgacatctctcagctcagtaatggccacttggagcaggaatatgatctttatatggaagactcagtggatccttatcaccttcatagaaaggtactcacctcccacgtcaagagaaaagccaacatgtttttcctccaatgcataaaaggaacttccgtagggctggcaggagtcaggctgttcaagacaactggaaggag

SEQ ID NO: 21552 - DNA, 953 bp, Homo sapiens
ttaagcatccacaattgctgaaagttacctggggcatggtgggttttgatcttcttccccttcttttcttccccttcttcttttcttctttgatcttcttccccttcttttcttccccttccccttcttttcaatttctgcaataaattcagacatggacagacacattaagctgattcccctacacacataacaatccactgtctaatcctcacacagggacctcaggctcctcagcataagaataggacactgtgagagatatatttcaggaggcctgaaggctggtcgtgatagaaattcctcggtttttctcccagaaactctgggtaaaatgtccctattctagtagatcattatcccaatatcatttgtcccaagtttgtgcaaacagttatgccttatttttccaatcaatttaaagcaaataccctcaaatgatttctaggagaaaaactgcaatatttagccctgtctcatcaaatactcagattgttcatggttgtgaggactccagacactgaaattagagtgaaaaaggaaatctacaaaccctcgagtcaaaatcatagttctctgaatttgtcacatctgcccaggtccaatgtcatgagagtagaatcagagtgccacaggcatggcctgagactaggaagagagccatgctcactgacccatcccatgtctgggcttccaggtagaactagagtttcattcaacctacatgtgcctataggtcctcactgcggcaatgacatctctcagctcagtaatggccacttggagcaggaatatgatctttatatggaagactcagtggatccttatcaccttcatagaaasgtactcacctcccacgtcaagagaaaagccaacatgtttttcctccaatgcataaaaggaacttccgtagggctggcaggagtcaggctgttcaagacaactggaaggag

SEQ ID NO: 21553 - DNA, 575 bp, Homo sapiens
ttcatcaatgcctggggcaagaaaaggccctcagactttacagtagtgacaaaagctgtccaatgaagtcatctagtccaccactcagatacttacattaaagccagtcagcaatggagcctcttcttggttgtagctcaatctgttaaagggcataatacaagtcaactaataggaaaaaacaacaatttcttctccagcagccgcaaacaaccccaaggatgtaattaatagtcatcgtcctcttctttcatcactcataatagattttcttcattcttggcttgtattttggctgatctaggttgcttactaggtgagttgacctagatcttctcccccaaaatttatggacttttgtttgccttgtccttgtctttctgtggttgttgcaactgcccattcgctgttaccctmccaaacaatatagtttatggatcctctggtaaatggccattatcttcctctatgtagcaactcttttttttatctaatagttaactggaaggagaaacacaaagtggccaagtataatgtaacttcaatttctgtggaactcttactggtccttgcca

SEQ ID NO: 21554 - DNA, 584 bp, Homo sapiens
aggtagtgacggagctgggcccggaggaggtacgctggttctacaaggaggacaagaagacctggaagcccttcatcggctacgactscgtccgcatcgagctcgccttccggaccctgctgcagaccacgggtgcccggccccagggcggggaccgggacggcgaccatgtgtgctcccccacgggcccagcctccagttccggagaagatgacgatgaggaccgcgcctgcggcttctgccagagtacgacggggcacgagccggagatggtggagcttgtgaacatcgagcctgtgtgcgtgcggggcggcctctacgaggtggatgtgacccaaggagagtgctacccggtgtactggaaccgtgagtagcgggccggggttagggcaggacgggctgcccctgcatgggccgatgcgcaccggtgtgggtttgggactggtcgccgcgaagagggaggcgcgtgaggcctggcgtttggctggggcaggatggagattgagcagggagcgtcggcagctgaagggtaaacgagcagatggcaaaacccaagctgcctggggtcaggaggactggatacc

SEQ ID NO: 21555 - DNA, 584 bp, Homo sapiens
aggtagtgacggagctgggcccggaggaggtacgctggttctacaaggaggacaagaagacctggaagcccttcatcggctacgactgsgtccgcatcgagctcgccttccggaccctgctgcagaccacgggtgcccggccccagggcggggaccgggacggcgaccatgtgtgctcccccacgggcccagcctccagttccggagaagatgacgatgaggaccgcgcctgcggcttctgccagagtacgacggggcacgagccggagatggtggagcttgtgaacatcgagcctgtgtgcgtgcggggcggcctctacgaggtggatgtgacccaaggagagtgctacccggtgtactggaaccgtgagtagcgggccggggttagggcaggacgggctgcccctgcatgggccgatgcgcaccggtgtgggtttgggactggtcgccgcgaagagggaggcgcgtgaggcctggcgtttggctggggcaggatggagattgagcagggagcgtcggcagctgaagggtaaacgagcagatggcaaaacccaagctgcctggggtcaggaggactggatacc

SEQ ID NO: 21556 - DNA, 584 bp, Homo sapiens
aggtagtgacggagctgggcccggaggaggtacgctggttctacaaggaggacaagaagacctggaagcccttcatcggctacgactgcstccgcatcgagctcgccttccggaccctgctgcagaccacgggtgcccggccccagggcggggaccgggacggcgaccatgtgtgctcccccacgggcccagcctccagttccggagaagatgacgatgaggaccgcgcctgcggcttctgccagagtacgacggggcacgagccggagatggtggagcttgtgaacatcgagcctgtgtgcgtgcggggcggcctctacgaggtggatgtgacccaaggagagtgctacccggtgtactggaaccgtgagtagcgggccggggttagggcaggacgggctgcccctgcatgggccgatgcgcaccggtgtgggtttgggactggtcgccgcgaagagggaggcgcgtgaggcctggcgtttggctggggcaggatggagattgagcagggagcgtcggcagctgaagggtaaacgagcagatggcaaaacccaagctgcctggggtcaggaggactggatacc

SEQ ID NO: 21557 - DNA, 510 bp, Homo sapiens
catgcaagtgatctagtttgatccttrtgagaatctagtgcttgatgatctgagtagtggagcagttttatcccgaaaccttccccccaaccctgtccatggaaatattgtcttccacgaaacgaatccctggtaccaaagaggttggggaccactggagtaaacaaaattaaggcagtattaaatacgaagatgtcttagatgttattttcttgcaagagacagaatcttatttaaatttccttagtaaaacagaggtttaactaaaaggatacaaaaatatcttgggctcagagtaaataagaaatcattagatagctgtttgttttatatctagttccaagtctgcatggtttctagttcccattcatctgtttatcatcttctccaatacagattaatttggaaggctgttagtatttgctccctttaacttaagtttatccatggctttggactgctgcgacaattctggcccaatgctattagacttctcagttgagatgccta

SEQ ID NO: 21558 - DNA, 510 bp, Homo sapiens
catgcaagtgatctagtttgatccttgtgagaatctagtgcttgatgatctgagtagtggagcrgttttatcccgaaaccttccccccaaccctgtccatggaaatattgtcttccacgaaacgaatccctggtaccaaagaggttggggaccactggagtaaacaaaattaaggcagtattaaatacgaagatgtcttagatgttattttcttgcaagagacagaatcttatttaaatttccttagtaaaacagaggtttaactaaaaggatacaaaaatatcttgggctcagagtaaataagaaatcattagatagctgtttgttttatatctagttccaagtctgcatggtttctagttcccattcatctgtttatcatcttctccaatacagattaatttggaaggctgttagtatttgctccctttaacttaagtttatccatggctttggactgctgcgacaattctggcccaatgctattagacttctcagttgagatgccta

SEQ ID NO: 21559 - DNA, 532 bp, Homo sapiens
aaaaataaattaagttttgcgtgcctgtagtcccagmtacccaggaggctgacatgagaggattgcttgagcccatgaggttgaggctgcagtgagctttgattgggccactgcactctagcccgagcaacagagttagacctttctgcttctttacctaatgtctaataatgctgtgcacattgtgtttttactgtgggaacagttattgatttctgttgccttattttattatcaaaattatattaattacacttggaaatatggaaaggaaaaaactggtattataccaacttcatataaccaccaatagagttcgagagtgttgccttccagttattttctctgttctccttaaaatgtgtgtgcatgtgtgtatatatcacacatagaagctcatatttattgggagcttagtttgtgagaccctgttttagattttacatgcatatttcattacaacaagtatatgaggaaggtactgatttttatccccacttttcagttgaggaagctgaagcccagagaagta

SEQ ID NO: 21560 - DNA, 532 bp, Homo sapiens
aaaaataaattaagttttgcgtgcctgtagtcccagatacccaggaggctgacatgagaggattgcttgagcccatgaggttgaggctgcagtgagctttgattgggccactgcactctagcccragcaacagagttagacctttctgcttctttacctaatgtctaataatgctgtgcacattgtgtttttactgtgggaacagttattgatttctgttgccttattttattatcaaaattatattaattacacttggaaatatggaaaggaaaaaactggtattataccaacttcatataaccaccaatagagttcgagagtgttgccttccagttattttctctgttctccttaaaatgtgtgtgcatgtgtgtatatatcacacatagaagctcatatttattgggagcttagtttgtgagaccctgttttagattttacatgcatatttcattacaacaagtatatgaggaaggtactgatttttatccccacttttcagttgaggaagctgaagcccagagaagta

SEQ ID NO: 21561 - DNA, 648 bp, Homo sapiens
tgtgtgtgtttttagtagagacggggtttcaccgtgttcgccaggatggtctcgatctcctgacctcgtgatccgcccgcctcggcctcccaaagtgctgggattacaggcatgagccaccgcgcctagcgcaaagatgtattttactaataccacagaggtataatctgctgctayttcttgatcaggagtaaacaagtttacttcacagcagttgatctaattttcttccccattcattcaatggtattttttttattgttatagaacatactgaattggataataagtccttttctttttcttttttcagaaatggtttctactctgttgctgaggctggagtgcagtggcattatctcgactcactgcagcctctgcctcctgggctcaagaaatccttcgacctcagcctcccgagtagctgggactacaggtgagcaccaccatgtccacctatataatttttgtatttttttttttttttgtagagacagggtttcactgtgttgcctaggttggtctcaatctcctgggttcacaccatcctcctccctcatcatcccaaaattctgggattacaggtgtaagccactgcacccagctgagaaggctttttattataggttgttcttattgttttattta

SEQ ID NO: 21562 - DNA, 527 bp, Homo sapiens
ttttttaaaaagaatgaatgaataaaacaaygtaagtaaagtatttggtgtagattatttatttggtcagcatttcaaaatccttatataaattattttgttctactatgtccaaatgtaaacacacatgtgtgtgtgcaaacccaagaaaggtgtatgtccctaaaataaggccaggtacaaatttgggccacagacggcccaaagcaggtgggcaatcttgtatcattgaagacttgtgattgcaaatggcagatacctactcaagctggcattaagtacacatcggaatttgtgggctcacctaagtgaaaaaccaggtggtgttctagcttcatgccttgtctcattcacccatcaccagcatccagtatctctctccctctctttctctgggtacgacctattcagctgaccctgtcctcagaccagcttttttctcatcatttgagattctctcattaaattcaagaccctcgggaagaacccttgcctctgtccagcattgtcagaaaaatcagccttgc

SEQ ID NO: 21563 - DNA, 522 bp, Homo sapiens
ggggcctggtgggaggtatttggatcatgggagcagatccctcatgaatggcttggtgcctccttttagtaatgagtgagttattgctctgagttcaggcaagatctggtagtttaaaaaagtgggcatcccttttcttgttccctttcttgccacttgacacacttgctccccttccaccttctgccatgagtagaagcttcctgaggcctcaccagaagcagatgctggcaccatgcttcctttacagcctgcagaactgtaagccaattaaacctcttttctttataaattacccagtctcaggaattcctttataagcaatataaacagtctaatgcacccaccatgttgcaaggctgtgggagtacaataccrgtacagggaagagagaacttgagaccaatcgtttaattgaccacagaaggtaaccaaagaacagccttcccacaggctcagcacttttaactgatttttttatggaagtgaaacctcagccttgagcactaaagcccagtaaaa

SEQ ID NO: 21564 - DNA, 522 bp, Homo sapiens
ggggcctggtgggaggtatttggatcatgggagcagatccctcatgaatggcttggtgcctccttttagtaatgagtgagttattgctctgagttcaggcaagatctggtagtttaaaaaagtgggcatcccttttcttgttccctttcttgccacttgacacacttgctccccttccaccttctgccatgagtagaagcttcctgaggcctcaccagaagcagatgctggcaccatgcttcctttacagcctgcagaactgtaagccaattaaacctcttttctttataaattacccagtctcaggaattcctttataagcaatataaacagtctaatgcacccaccatgttgcaaggctgtgggagtacaataccagtacagggaagagagaacttgagaccaatcrtttaattgaccacagaaggtaaccaaagaacagccttcccacaggctcagcacttttaactgatttttttatggaagtgaaacctcagccttgagcactaaagcccagtaaaa

SEQ ID NO: 21565 - DNA, 571 bp, Homo sapiens
ggttaaaaattgaaatgcaagaataccaagcaacaattaaaaggaacaaaatacaaatatatrccatcgtatagatgaaccccaaaaacatgttaagtgaaagaaggaagatacaaaggattacatattctgattcatgtattttataatttctatagtatgtctagaaaaggcaaatgtttagacacagaaaacagatcaatgattgcctagggctaggtaagtgaggattaactgcaaatgggcaggagagaacttttggattaatggaaatggtctaaaattggattgtagtgatggtttcacaactctataaacttacgaagatcactgaattgtaagaggtaattttatggtatgtaagttatacttccataaagctgctaaaaagtgaaattctgtcataatatctctaaaatactttattttatcttttcagtcaattaatgctatctatacgttgtttgccattttgaagaaagagctccagtgtgctaaattttaatatttacatactctgtttatgtgccatattgaagtgaaactagaatttaaaaaacacagcaatttg

SEQ ID NO: 21566 - DNA, 571 bp, Homo sapiens
ggttaaaaattgaaatgcaagaataccaagcaacaattaaaaggaacaaaatacaaatatataccatcgtatagatgaaccccaaaaacatgttaagtgaaagaaggaagatacaaaggattacatattctgattcatgtattttataatttctatagtatgtctagaaaaggcaaatgtttagacacagaaaacagatcaatgattgcctagggctaggtaagtgaggattaactgcaaatgggcaggagagaacttttggattaatggaaatggtctaaaattggattgtagtgatggtttcacaactctataaacttacgaagatcactgaattgtaagaggtaattttatggtatgtaagttatacttccataaagctgctaaaaagtgaaattctgtcataatatctctaaaatactttattttatcttttcagtcaattaatgctatctatacrttgtttgccattttgaagaaagagctccagtgtgctaaattttaatatttacatactctgtttatgtgccatattgaagtgaaactagaatttaaaaaacacagcaatttg

SEQ ID NO: 21567 - DNA, 506 bp, Homo sapiens
cataaataatcacaaactctgttccagtgaggtatcagggacagtactgcccacctgaccctgtgtcctgatttgcctcgtattattccttccactgagtcacattgccatgaatggtttttgctgtttgaataatcatagtaaatgtgagaaagcttctattctgttattccctatttagaatatgtaaccattgatcccgaaattatacaaaatgagatagacttgagctgtcctgggatataatgcttagaaccctgtctaagatggtttaagtaacgtaatcgccagaaggactttgttaaaataaaaatctcatctctacygtagaaacctgatgggccatccgagggccactcattcaactaacatatccccaaatctgccctcttctcaccatttcctctgctaaacaccggatcgagtcactaaagtcactcagatgataacagtctcttaaatggtctttttgtttccattcttgtcctcttaaaatctattgccaa

SEQ ID NO: 21568 - DNA, 554 bp, Homo sapiens
cccagctctatgatttattggccttggagtcttgagcatagtattgtttatctactagaacagagttttctattttggggggtggggacactgatccacaataaaaatacattttataacacaaccaagtacatatatacatgaataggtatgcatttacatgtgtatgcacatatccatgtgtgtaatatagggagatatacatatatttctctcactaaaaacaaatttcatgaaaaagtatttgtccttattacrtgtgatgtccttttgatagttttatactgttttacttcattaccaaaaattctagtcatgatgaaaattcattttaagacccactaaccggttttaacctatagttttcgaacaatgtactgggtacaggttaaaaactgtgtcctctttatttttatctccattactaccatgatccttggtatggacagaataataataaacaaacacaggtattgaagtaaataaaattagctttctgggcagctacataaaattgtgagcaattaaaaacccttgactttcatgttactatg

SEQ ID NO: 21569 - DNA, 605 bp, Homo sapiens
ctaaactgtggaatttacacaattgaaaaaactagacttatctgacactttgctgatttaagaaaagaagacwaatatattttcaaaagcttagcccttctaccaaatgactgacaagtagttcttcaagtgcggtgcagggataggaaccctcaccaggctagtattttgcctgatgatatgaagggcacaattgctgtcttacatatttatgtctctccccgcagtgtaaccactctttccaacttattggttgtccttaaaaaaatagtcaatgtgtttaaaagcacagatattttaaacatactacactctccttttaatacaaatggaggtataatgcatcatgcatatcatcttgcacaccacattcatgttttattaatgattaaatataacacacataaaagtgtataaaacattaatttagggataatgaattattgttgcatgaaccacaatgcaatcaccatccagtttaataaatagaatattgccaacacaccttcacatacacatactcttgcaaataaaatgggaaagttcttctctatactggaaacaaaaaaagctagatttcattgcattcacttcttgattttctt

SEQ ID NO: 21570 - DNA, 605 bp, Homo sapiens
ctaaactgtggaatttacacaattgaaaaaactagacttatctgacactttgctgatttaagaaaagaagactaatatattttcaaaagcttagcccttctaccaaatgactgacaagtagttcttcaagtgcggtgcagggataggaaccctcaccaggctagtattttgcctgatgatatgaagggcacaattgctgtcttacatatttatgtctctccccgcagtgtaaccactctttccaacttattggttgtccttaaaaaaatagtcaatgtgtttaaaagcacagayattttaaacatactacactctccttttaatacaaatggaggtataatgcatcatgcatatcatcttgcacaccacattcatgttttattaatgattaaatataacacacataaaagtgtataaaacattaatttagggataatgaattattgttgcatgaaccacaatgcaatcaccatccagtttaataaatagaatattgccaacacaccttcacatacacatactcttgcaaataaaatgggaaagttcttctctatactggaaacaaaaaaagctagatttcattgcattcacttcttgattttctt

SEQ ID NO: 21571 - DNA, 233 bp, Homo sapiens
ttttttttcatgtgtcttggctccactaactggctagttttctctaattttttacttagtcattccttcaacttgactaggaaggtgaatgtcagctaatgtttctgtacacagacttaaaatattcagctgttaatatagaaggyagtatagttatatataatttgatgaaattaagaataccaaaaataatcaataagaattaattacttttagaatctggatatattgca

SEQ ID NO: 21572 - DNA, 507 bp, Homo sapiens
ttttcagatgacctcaagcagtttggcctaacaaccagtattccgttccgaggttgcatcagatccctgaagctcaccaaaggcacaggcaagccactggaggttaattttgccaaggccctggaactgaggggcgttcaacctgtatcatgcccagccaactaataaaaataagtgtaaccccaggaagagtctgtcaaaacaagtatatcaagtaaaacaaacaaatatattttacctatatatgttaattaaactaatttgtgcatgtacatagaattcyttctgtattcagatggtgctaattcagactccagactgaattttaattcaagttctttctcaagtctataaataatattaaactgattatttcattctaaataattgcctgttttgtgtgattttaaggataaaaggtaactggccataaattgttgagtttgcaacatgccctccagtcatctcaaggaaagagttcagatgtaatttatggaggcaattttt

SEQ ID NO: 21573 - DNA, 599 bp, Homo sapiens
ctttttttttttttttggacagggtcttccactgtcacccaggctggagtgcagtggcaagttataatagttcactgcagcctcaacctcctgagctcaagccatcctcccacatcaccttccctagtagctgggattataggcatgcaccaccatacccagctgatttttgtatttattgtagagatggggttttaaccatgttgcctaggctagtctcatactctcaggctcaagtcatcctcctgccttggcctcccaaaatgctgggattacaggcatgagtcactgtacccaggctacgatcttgattagtagcagtgaagggaacatttttgtctggtttctaactttaaggataaagcatctagaatttcaccatgaaatatcatgtttcttatagatttttagaaactattagtataaaaacttcttctattcctaagtattttattaatacattttaaactctaatgttttcctttyctctataaggataattacatacttttctttattctgatggttggtagccaggctgtaagatgccctgcaataatcctgcctcctggcattcacacctttctgtaatgtccttc

SEQ ID NO: 21574 - DNA, 551 bp, Homo sapiens
ttatactaagtaacagaaatcatacacaacagagtacatactatgtacatatagatttacacaragcagatcagtcattgtttgggatgagaaatattgggtgttttgactatgagtggtataatagacctttttgggatgatggaaatgttctatattttgatgatagttacagttgtaaaaattcactgaagggttgacttttctgtgtgtaaattttacctcaataagattggtgcataagaaagaaaggttaacctttctagtcacagttactcatagaaaatgttgtagatagaaagtgaaggggcgatggtccatcactgactctaaatgatacaactgtcctcagaaagtagggggttaatactggtgcctacatgtgaatcagaacctgttgaatctcttaagagaacaaaccactgaaaggcaaaattctgaagtgaatgaaaatatgtccaatttacaatcaaataaaaatgctgtaggcataaagccaaagaatattcttagattggactttgtttagctttttaaatttaaccagctgg

SEQ ID NO: 21575 - DNA, 573 bp, Homo sapiens
agggaagatcatcttcccactccatctgcctttcagctttccatccatcccactgagagccacttccaccactcaagaaaatcctcatattcatccttcgagtccatgtttgacctgattcttcctggacacctggacaaggacccaggtaccaagagggcattgagctggttaacgcttagsctgtccatgtatggcaaggctaaaagagaacactgtacacatgcccacttgggcttcaggagtctcagcttcccgcccctagatactactatggggttggagcccagcggtgctcactccagttcctgctcctgcccatcgacatgctccccctcctgtatagggttggatgccaatggcagctgaatagacgagccacacccctgtctcacatcctctgcaaggggggtaagggaactctcccattttaccagtgagttcttgagtgagttacaagctgcattttaagtgcccataatgttgtcaatgatgataatctaataattaatttccatttattgagtaattactctctgtgggagactgttattacaaaatgttgccataagg

SEQ ID NO: 21576 - DNA, 547 bp, Homo sapiens
ttaagcattcttacgggttcaatatgtctcagtgttgaggatggacatgcttcaagccaatgttcttttaccaggctgcaccgtgtctttgctgtctccactggtgctctgctgggccagctaccactgtcgctctgggaagaacatgtctttctctagcacaatgctcaggctgctataactgcaaaactgtaggtgcagtccttcctcagggtgttggagcacaaatgggaagataaattatgtctcctactgtgtgtttcccattggtacctgggtccagaggagcattgtttatagccagagtcgcacaagattcctcttggaaaaagcttctgaagcttttctgtaccactccagaaggacttacagggcaaagtccagtgggaaggctagatctgggtaacagaacagacattgtyatgccctatcattgtgctactgttccctttcttttgagatggggtttcactcccattgctcaggctggagtgcagtggcatgatcttggctcactgcagcctcaacttcctgatttcaagtgatc

SEQ ID NO: 21577 - DNA, 494 bp, Homo sapiens
aggtacaatgtacattatttgggtgatggttacactaagagcccagacatcaccactatgcaatatatccatgtaacaaaactgtactaagtgcattgtgtctcttaagttaatataaataaactttcaagtacttcaaagggcaaaactgatctacttttgagcaaattgactgaaactgaaagtttcagtgttgatgttattattgtcttggatataagattataaaggttgagtttttaaaaggtatatgtatttcatgtatatctcacagcataagcaaatgaagtgtttgaaatagttttctgtctataaaacattttacagaaatatactattagcatgwttattgtaacaaaatttacaactgacataaattaaatatagagcagattttgtatgtttagctttgtatacaatgtgcctctaaccaagagtttcaattacttagacatcaatatctaattgttgactaaatgactgaaaaattcatg

SEQ ID NO: 21578 - DNA, 494 bp, Homo sapiens
aggtacaatgtacattatttgggtgatggttacactaagagcccagacatcaccactatgcaatatatccatgtaacaaaactgtactaagtgcattgtgtctcttaagttaatataaataaactttcaagtacttcaaagggcaaaactgatctacttttgagcaaattgactgaaactgaaagtttcagtgttgatgttattattgtcttggatataagattataaaggttgagtttttaaaaggtatatgtatttcatgtatatctcacagcataagcaaatgaagtgtttgaaatagttttctgtctataaaacattttacagaaatatactattagcatgtttattstaacaaaatttacaactgacataaattaaatatagagcagattttgtatgtttagctttgtatacaatgtgcctctaaccaagagtttcaattacttagacatcaatatctaattgttgactaaatgactgaaaaattcatg

SEQ ID NO: 21579 - DNA, 1281 bp, Homo sapiens
attaacatgtgtgatactatgtatacctatttatgtacacaagggactagaaaatattgagttatgtctctatctactaacttatacagatatccattaaaaatgggtaagattaaaaggtaggaaactatatatagtataattccacttaggaaataaatcaacagcaaaactcccacttaagtgtatataggttgagtatctttgtatgagcaatagagaaggcatggaaggataactagacctttatcattagttgaatggcatgttttattcatactacaataatatattgttatagtttaaaatgattagatatagataacttgaaattcaagtgtttcttttatggtattccatctccatgatcaactgaactacataaataaaagttattaattattttcaaaaattaacattgcttgactcttttgcaaataaaattttaacagtacacacatttttaaaagaatctcttctttgagccaccatatagaagaaataaattataaattctagtaagaaacaaatgtaagaaattgcatacagagttttgattacgtagggagtgaacattattggggtaagagaggtcaacagcttctatttaaacgcataaaatatgttcagcaaatggcacaattgtaaaaaaaaatagttggtttgtaggaaaaaatagttacatcaaggatcttttctttaacttattattcattgtattacattatatcttcactctattcagtgttgtaagtattgatgagaatgttttattctggaagaatgtgatcctgctgagatttttgaataaggagataaataaaatgcttataactgaaatatatcagatcctggtttctattatttagaggagatatagttgttaacaagggagtccattgtgttcttrtgtgcctttcctaccatggtatgggcaagatggcaactttttccctaaaccctttcttctcacctctttattgcagctatttgaagttcaaagccttagatatgctgaagaaagggtatattataatgaatatactatatcctaatgggaaaacttacgtgatctttaaatgtaggagttatcctaacctctatggcattgatttaatgaatcctgaagtttcacaattccaatagtaattgtattagtaataaaatgtgtaatagtaagcacattttataagaaatatttggaactttttaagaatagatgcccatatcacattctcttgtttgatttaaaatctttaacaaaacatatatattttttat

SEQ ID NO: 21580 - DNA, 553 bp, Homo sapiens
tcagccagaaaccttacaggaaagtgaagttgaaccataaagcataacccagaatcaatagatcagcatctttsccctgcaagtactgttgtggcaattgctttcaatactatactccccgaggacattaagaagtagctacacacactcatgagttaccgtaaagtgtatgagtctctctagaagaattcaagggagttccagattgactctgatttttccaggactttcactaggacttggaatgcctggcggctccctaacatttatttccccaaaggattgcaggttcagaaatgaatgtgaccccagagcaagggctactatttgtaaggttttggctttgtttttctcctttaaacccagttaaaattttgcaaacttccacttccttagattttctcaatattcctaagtagaataaagcatagtcagaggcaccaaagaagcacataccaaatagaatatgaatcagggctctattcattctgataattgtatgttatattgagtcagtcaggctttcgtagtgaactgagacctgcaaagtctt

SEQ ID NO: 21581 - DNA, 752 bp, Homo sapiens
ggaagttacttaatatcagggcttcagtttcctcacctctaaatgagagatttcatccaggtgatctaaattccttacagctctaatgttttgtgacctctgattccaatgatttgttggtcatctgcacttagaaatcctgctaacacttagtatgtagattatgaaaaactaaaagaaaaaaatctgaacctataaccctgttctcctaatgtgatttcttttaatggcatcaccatcctactaccagtgacccagggccaaaacttggtgtcattttcaactcctctagcccttgcccctacatctcacttaactgagtcatatggaactaactatgtaatgtcattcccatccttccccaactaggccctttcgtatggcctcatgtgattgaagcccttgctgactggctgtcccattctgttgacccttaatcttgatgctgctgagtcaatttcttgaagcacaaccgtaacaatgccaatgctttgttctattttatttatttatttatttttgagatggagtctcrctctgttgtccacgctggagtgcagtctggtacaatctcagcttactgcaatctctgcctcccgggttcaagcgattctcctgcctcagcctcccgagtagctgggactacaggcgcatgccaccatgcctggctaattttttatttttttattttttggtatttttagtagagacagagtttcaccgtgttagccaggatcgtctcgatatcctga

SEQ ID NO: 21582 - DNA, 752 bp, Homo sapiens
ggaagttacttaatatcagggcttcagtttcctcacctctaaatgagagatttcatccaggtgatctaaattccttacagctctaatgttttgtgacctctgattccaatgatttgttggtcatctgcacttagaaatcctgctaacacttagtatgtagattatgaaaaactaaaagaaaaaaatctgaacctataaccctgttctcctaatgtgatttcttttaatggcatcaccatcctactaccagtgacccagggccaaaacttggtgtcattttcaactcctctagcccttgcccctacatctcacttaactgagtcatatggaactaactatgtaatgtcattcccatccttccccaactaggccctttcgtatggcctcatgtgattgaagcccttgctgactggctgtcccattctgttgacccttaatcttgatgctgctgagtcaatttcttgaagcacaaccgtaacaatgccaatgctttgttctattttatttatttatttatttttgagatggagtctcactctgttgtccasgctggagtgcagtctggtacaatctcagcttactgcaatctctgcctcccgggttcaagcgattctcctgcctcagcctcccgagtagctgggactacaggcgcatgccaccatgcctggctaattttttatttttttattttttggtatttttagtagagacagagtttcaccgtgttagccaggatcgtctcgatatcctga

SEQ ID NO: 21583 - DNA, 752 bp, Homo sapiens
ggaagttacttaatatcagggcttcagtttcctcacctctaaatgagagatttcatccaggtgatctaaattccttacagctctaatgttttgtgacctctgattccaatgatttgttggtcatctgcacttagaaatcctgctaacacttagtatgtagattatgaaaaactaaaagaaaaaaatctgaacctataaccctgttctcctaatgtgatttcttttaatggcatcaccatcctactaccagtgacccagggccaaaacttggtgtcattttcaactcctctagcccttgcccctacatctcacttaactgagtcatatggaactaactatgtaatgtcattcccatccttccccaactaggccctttcgtatggcctcatgtgattgaagcccttgctgactggctgtcccattctgttgacccttaatcttgatgctgctgagtcaatttcttgaagcacaaccgtaacaatgccaatgctttgttctattttatttatttatttatttttgagatggagtctcactctgttgtccacgctggagtgcagtstggtacaatctcagcttactgcaatctctgcctcccgggttcaagcgattctcctgcctcagcctcccgagtagctgggactacaggcgcatgccaccatgcctggctaattttttatttttttattttttggtatttttagtagagacagagtttcaccgtgttagccaggatcgtctcgatatcctga

SEQ ID NO: 21584 - DNA, 523 bp, Homo sapiens
atagtaagggagaacaagtgttaaagaaaaaccagagcttgacagtagttgaaatggttaaaaacttacactattgaggaaaaactgcaataggggaaaagagacctcagtataggactggggtccrttctaactgcaacagggaagaggagatttatagccaaggattagattaatggggttggtggatgaaaaattattaagaaggtgggttgattcttgctaaattgacctaacataattcttcctgaaggaaggccagtctaatccaatatcacatggggatggtggggatgagaaatttggtcagttattcagggtgatcagacattgagagtgggagatgcttgataaactgacctcacaggatttttgctaaaactgggcaatgcaaaggtggaagcacaaagtttgaggcctgcttgggaagaggagcctgactgaagtttggtcaaggggacaatctttgtcacaagcatacattaaggaaaagcatgttactcatctgtatgatgtaattcgg

SEQ ID NO: 21585 - DNA, 1021 bp, Homo sapiens
ggggtaggaaatctgatcaagagttttgctacaaagggaaattttaaaatggggcaataactcggaaagtataaggtgtagtaagattttttttcttttagcgtgggagaaaytagaagtgatcttaaatagatgtttttctttttttatatttattatttgctcatgttcacttttccccaagtctttaagatagattaccaaaaaaaaaaaaaaaaaagtaaaatagaaagggagtcaattagtaactttacctttttataaggccttaaaacttatcccttcctaggaaatagaatgggcatcatcctgtattttggaagagaaacaggtgtagttactgtatggctgtccaggtagacagaagaactcaaaatgtgatgtggatgccggttttataaccctgtgacatacacaccacagagcccaacccccggtttgtgaattatttttttgttactaacattagaagtatataactttgatatttattttgcctggctgctcccaaaatctgattttaagttacttttcttattacaggtaaaatagcatgatatgctggtcaaattgcttttttatttatgaaatgagttctggaatgtcatctgtctttacaagtagaaacacactggcattttcctactcttattttcacaatttattctcaaggttatgcttatcaattctacttttacattttataatcttcattggccaagaataacataattcttttttaaaattaagtgtagaaaggttttgcttcagagtaaatgagccattttggctggtcagctgttattaacatttgtaatccatatttgctctttaattttcctgatagctgaaaggagttaatgaaacaatttccttatgaatcagataccttatcgaaaagtaaaactatttttaccctcaattttcttggacttttgttaaaaaaagaagattcactcaatctctctaccatatataaattaccacaagtaaagaaccatattattctactttcttagat

SEQ ID NO: 21586 - DNA, 556 bp, Homo sapiens
cacattgtcctaaaaaaatgcattaaaattaagtcacaacagacatccaggtttgcacctgtatctcacacctgtgaggatcgcttttatattgaaataagacaaggttctccagagaaacagaatatatatatatatatatatgtatgtattaccacacacgcatatatatatgtatgtatacatatatgtatatatacacgttttaaattttattaaaaattttaaatatatttattttaagaaattgtcttgtgtgattgtaggggccggcaagttcaaaatctgtaagtcaggtcagcaggctgaaaacttaggcagaagttaatgctactgtcttgaggcagaatttgttttttttgtttgtttgttttgttttttttttcaggaaacctcagtttttgctctgaaggccttcagctgactgaatgagggccatgcacatgatccagttatcaaggagaatctctttacttaaagtcagctgagtaaattgtctaaaaaatacctccacagcacctagatgagtttgatgacataactgtgtattrtatag

SEQ ID NO: 21587 - DNA, 514 bp, Homo sapiens
caagtgtacctagtcactagtggggggagtggggtggatgtgtctgtgtgygtgtgtgtgtgtgtgtgtgtggcgggcagaagatgcaaatccgttgatacaaatcaacaagcaatattatggtataagggagggaaataaagccagcaggtgctataatacatgtcaaaaaaaaatctgttttatgcttatgccactgtaagacaacagacagctgtgtagaggtgtggcttcagcgactgccgaggaagggttatttgtgggtacagccatgggatgtcagaggtgtctctattctgacctcaggcactgaggtcctgcccacgaatggcgtggtagtgtggggaatatccgaaggaaaacagagaggtgtctggatgatctgttttgttgcaggaagcaaaccagcatgatgcaggcagcctgaactgagaaaaggaggtttccggatttccaaagacacactgagttcgctgacatgtatcagggagaaaagctcattcagagatctccg

SEQ ID NO: 21588 - DNA, 514 bp, Homo sapiens
caagtgtacctagtcactagtggggggagtggggtggatgtgtctgtgtgtgtgtgtgtgtgtgtgtgtgtggcgggcagaagatgcaaatccgttgatacaaatcaacaagcaatattatggtataagggagggaaataaagccagcaggtgctataatacatgtcaaaaaaaaatctgttttatgcttatgccactgtaagacaacagacagctgtgtagaggtgtggcttcagcgactgccgaggaagggttatttgtgggtacagccatgggatgtcagaggtgtctctattctgacctcaggcactgaggtcctgcccacgaatggcgtggtagygtggggaatatccgaaggaaaacagagaggtgtctggatgatctgttttgttgcaggaagcaaaccagcatgatgcaggcagcctgaactgagaaaaggaggtttccggatttccaaagacacactgagttcgctgacatgtatcagggagaaaagctcattcagagatctccg

SEQ ID NO: 21589 - DNA, 514 bp, Homo sapiens
caagtgtacctagtcactagtggggggagtggggtggatgtgtctgtgtgtgtgtgtgtgtgtgtgtgtgtggcgggcagaagatgcaaatccgttgatacaaatcaacaagcaatattatggtataagggagggaaataaagccagcaggtgctataatacatgtcaaaaaaaaatctgttttatgcttatgccactgtaagacaacagacagctgtgtagaggtgtggcttcagcgactgccgaggaagggttatttgtgggtacagccatgggatgtcagaggtgtctctattctgacctcaggcactgaggtcctgcccacgaatggcgtggtagtgtggggaatatycgaaggaaaacagagaggtgtctggatgatctgttttgttgcaggaagcaaaccagcatgatgcaggcagcctgaactgagaaaaggaggtttccggatttccaaagacacactgagttcgctgacatgtatcagggagaaaagctcattcagagatctccg

SEQ ID NO: 21590 - DNA, 514 bp, Homo sapiens
caagtgtacctagtcactagtggggggagtggggtggatgtgtctgtgtgtgtgtgtgtgtgtgtgtgtgtggcgggcagaagatgcaaatccgttgatacaaatcaacaagcaatattatggtataagggagggaaataaagccagcaggtgctataatacatgtcaaaaaaaaatctgttttatgcttatgccactgtaagacaacagacagctgtgtagaggtgtggcttcagcgactgccgaggaagggttatttgtgggtacagccatgggatgtcagaggtgtctctattctgacctcaggcactgaggtcctgcccacgaatggcgtggtagtgtggggaatatccgaaggaaaacagagaggtgtctggatgatctgttttgttkcaggaagcaaaccagcatgatgcaggcagcctgaactgagaaaaggaggtttccggatttccaaagacacactgagttcgctgacatgtatcagggagaaaagctcattcagagatctccg

SEQ ID NO: 21591 - DNA, 578 bp, Homo sapiens
gactcacctggggttagggtagctaactgctgaggagggggcaactggaaccctgcctcagggttccctcccaccagcccacccaggtaagggctccagcagatgctcttgtttgttgagctcactcatctgttgatggaacacagaggaaasaagggtctttcaacagaccggagtcatgttataaaatgggtgttttatgggccacatgcagaaactgaccacttgcagaaggccaccttactctgcagaggggccagttgtgagggagaaacttctaggtcctttcatcgagatgaggattgttagctctgacttcagataagcagaataaacaagcctcagcccaagtgggaactggttctgccccctttctttgcttttctaagccatcaaagccaagttcctaaagccggactgtctcacggtgctttctgatggtttcattgttttgtttattgtgcttatggcaagtgctaacagaccgctttcaaagtgtgttgatatttcggttgtttttgaatggcccttctgtttttctgcatctggacagcattagagtctagccccagggaaga

SEQ ID NO: 21592 - DNA, 658 bp, Homo sapiens
tgcaagattgggtacaatttccagtccccttgggcaagccaaggccaccaagcaatgtgaggtctcagcatctggcccactttattttggaagtgggcgctgaagagttagaaaacatttttcattgtttttttttttttcccggtcaaaaggggatggaatatgcatatactrgggcataaacgtacattttattaactaaacagaagttatatttctcaaagatgccaccttcacacagcagcatagaggatttgggggtcagcttcctgggtgtggctttgtcctggcttggacagagtgggggtaacagctgtgtttacaatgagcactcctctcgttgcttctgacatggtattttttttaacatcaacttttccatttatctttgcttgtcagggaaacgcacacacacacagcccctaaatctccttgtacaaaggaaagctaggtaggttataatttccttcttggaaaaaaaagccctacaaactcctcacagtatgatttcataggcattgctaattattttttagggtgagcataataaaacccaggtgacttgccttcagcagtttcttgttatcttcacacagctctggatcgtttaccggcatggcaagcaattaccatgagccctgcagtttttaccagacat

SEQ ID NO: 21593 - DNA, 781 bp, Homo sapiens
cttcagtttatgactgtggtcccagtgttctagctgatatagacaataaactctatgggggccctagtagcagattacaccagaaattaaaagaaaaaaaaacaagcatcctgtagtttgccgattataaacttacaactcctattgaatgtgctgtttggaaatctgtagctctagggaacatctaagagaatactgaaggaataagataagtgatacaatcatcacccttcgggggatgagacagcataaaatcaatgcctgaaccagatggcatttccaacccaaagattctcattttataattttatgatttgaatatagatgtttgccttcagttaagaatgagaatcaggtaagaagtaacgggactaagctccctaagaaaaagaggcgaaaataggtttctttacaatcaacaaatcaaaggtagttaaaaaaaattaacaagcatttattaatgcctttgacttccactatgaaggaaaagaaatgataaaaggccaaaaaaaaacccttacacatccacacagagaacgcccaaaatctcaaaccaaacctttaacgaaaattcaccttaaactaatgactgacaatcccagagagcatttaaaaatatttttaaattaatgaccaaaacagaacgccwttattatttcaactccctgttagaactaccagtaacctatgatagttatcagtgggattttgatcccaagtttaatattaaatagttaaaattaactctgtgatgggtgactgatattattaattcaacagg

SEQ ID NO: 21594 - DNA, 583 bp, Homo sapiens
attttttctccatttgaaaatcatgttttatttcaacctattcgatttatattttcaagtcaataataatgtataaaacatctaaaagggcttggaatgcattttataaatagtctgggaattgaagactgaaagccctaagttttctgaattcactattttaatatctctaagttccagtatctagcttgttaargataaggtgaagtttattcacgtttataatatatttaatttttgcatccaaactatcaaaaggaagttcacaatgcttttaattctgatgcttttgtgaggagcaggtacctttctgatttctgctactgtgtaggtatctagaaatcagttatcttatgatcttatgatgtgtttatttgtttatgaagatatagccatcagcattgattgtgtggcttcactactgaccttgcctaggggaatttggacatcaaactttggatttaaaaattatttctgtggaggttaattagctttttgttagtggtgtttcctttgaatgacattcaggggaaataggagagtctgagctgacacaaaattttagatgactttgcaataggga

SEQ ID NO: 21595 - DNA, 504 bp, Homo sapiens
agcctcctctgctattccaggcattccagggtggctttgcaggacagcaaggaggaaatctgctcctggactttgatttcaacctcatctgctgtccactgcctgtaccacagaaggcaccttgatgagatattgctccatggctttcagatcctctgagagaataggggtcatggatctctccactacaactttgggtactatttggtagccaccccaaggtcacaggccgcctcaataatactaggatcatggtcgcagtcaccttttccacttaagccctgaagttgctctgttcatgctggattcgcaagtccttaggcttctgacttaacctactcccttactagggttgagaattggctctgccatactctagaaagggagtaggacacaagtgcccccactccttccrtacccttatttattctcttctttctcttttctccagttgcctttgtccctacaatgggatgaatggtgtcttctcaaaagatatatcca

SEQ ID NO: 21596 - DNA, 624 bp, Homo sapiens
tatcagtttccatgaggagggttctttaagcaaagcttgcagacaggaacccacagcataggagcactgatgggctccctgtgcagcccacgcttctccatgctggtgcgctaactacagattaaaaaacatttctcttttttcttttttttttttttgagacaraaccttactctgtcacccaggctagagtgtagtggcatggtcatggctcgctacagcctccacctcctgagctcaagggagtctcccacctcagcctcctgagtagctgtgaccacaggcatgagccaccatgtcaggcacattttctatttttcttcagagacagggttttgccatgttgcccaggctggtctcaaactcctgggctcaagtgatcctcctgcctctcaaggtgctgagattacaggcttgagccactgtgcccggccaaaaacatttccttgtatatttttttctactcatttgtcctatttctaactaacctgagcgagggaatgagggcccttattttggctgtttttgagcaaacaaggaaaccacgtgggttcagtaccttccaagactgggacccaccttccttcttccttcagacctagggtggcttgcacatttgaccag

SEQ ID NO: 21597 - DNA, 538 bp, Homo sapiens
gatcctggtttgagctcctaagttttggggtgattgcttacatggtaatagataaccagaacagcaactctgcagccacgagcaccacctaaattgtgccacaggagctctgcagccagggacccagggttgctctgaggcccttacagttcatcccatggttgccagaccccacagtcagtgctagaacttctgctgtgttgccactgttgtggccatgatgagaagaacaaagggtgaccaggcaatctcagagtgcgtgtgctggctgcaagcaggggctcagaggagggcacagctctgctattgaccagctgtgtgagcttgggcargtgtcctaaccactctgggactcaactacttctttctgaagtgggatcagtaggggtaccatatgcatggagtggttgtgagaattagacaaattaatagatacagatgatgagaacagtgctgggctaatgagtatgcattattctctacctcgggccccccatcacttcctatctagtacgtgatttccttctagcagctgtta

SEQ ID NO: 21598 - DNA, 538 bp, Homo sapiens
gatcctggtttgagctcctaagttttggggtgattgcttacatggtaatagataaccagaacagcaactctgcagccacgagcaccacctaaattgtgccacaggagctctgcagccagggacccagggttgctctgaggcccttacagttcatcccatggttgccagaccccacagtcagtgctagaacttctgctgtgttgccactgttgtggccatgatgagaagaacaaagggtgaccaggcaatctcagagtgcgtgtgctggctgcaagcaggggctcagaggagggcacagctctgctattgaccagctgtgtgagcttgggcaagtgtcctaaccactctgggactcaactacttctttctgaagtgggatcagtaggggtaccrtatgcatggagtggttgtgagaattagacaaattaatagatacagatgatgagaacagtgctgggctaatgagtatgcattattctctacctcgggccccccatcacttcctatctagtacgtgatttccttctagcagctgtta

SEQ ID NO: 21599 - DNA, 538 bp, Homo sapiens
gatcctggtttgagctcctaagttttggggtgattgcttacatggtaatagataaccagaacagcaactctgcagccacgagcaccacctaaattgtgccacaggagctctgcagccagggacccagggttgctctgaggcccttacagttcatcccatggttgccagaccccacagtcagtgctagaacttctgctgtgttgccactgttgtggccatgatgagaagaacaaagggtgaccaggcaatctcagagtgcgtgtgctggctgcaagcaggggctcagaggagggcacagctctgctattgaccagctgtgtgagcttgggcaagtgtcctaaccactctgggactcaactacttctttctgaagtgggatcagtaggggtaccatatgcatggagtggttgtgagaattagacaaattaatagatacagatgatgagaacagtgctgggctartgagtatgcattattctctacctcgggccccccatcacttcctatctagtacgtgatttccttctagcagctgtta

SEQ ID NO: 21600 - DNA, 544 bp, Homo sapiens
caacatcaaccaccaccacctacgccaccaccgttagcatcataaccaccaccaataacatcaccaacagcaacactgccatcaacataaaccatcaccaccaccaaaaccattagcatcacctagaaccaccagtcaccaccatcaccacttaccacaacaaggcttatatttacrtacttattttacttttcgaaatacattcacatgcatggtttcattagatcttatctacttggtaaggttggcagatctgacatcattagcctcattttatctgtatggaaactaagttctagagaagcgaagtgatgtgtgaaaggacaccagagtgattgataatcaaatccagactagagtttggttcttctgactccaaaattaatacatttttcttaaaagaaaaaaattttttttgagacagggtctcactctgtcacccaagcttgagtgcagtggcatgatcacagcttactgcagcctcgacttcccaagctcaagcaatcctcccacctcagcctctcaagtacctgggaccataggc

SEQ ID NO: 21601 - DNA, 555 bp, Homo sapiens
actttcacactacaatggcagagtagagtaattgcaattgagtgtgcatacggcacacaaggcctagaatatttactctgtggccctttaaggaaaactgctccacaatcaggaagaaggtcatggaaaaggaggtgacatcagtgggaagaggcagtctggctccaattcactccctagaacaatggtggatgtctcccaagtagcactggtatttctgccttctactaaaaaagaaaaaattttttttgagacggagtctcactctgttgccccaggctggagtgcactggtgcagtcttggctcactgcaacctctgcctcccaggttcaagcgattctcctgcctcagcctcctgagtagctgggattacaggcgtatgccaccatgcctggctaatttttgtatttttagtacagacaaggtttcaccatrttggtcaggctggtctcaaactgctgaactcgtgattcacccgcctcggcctcccaaagtgctgggattacaggcgtgagccaccacgcctggcctaaaaaatttaaaaatccaaaacc

SEQ ID NO: 21602 - DNA, 513 bp, Homo sapiens
ctttccctcctcctcacttatcttacatttcctcaagctaaccatggcatgttgtgggagaggccgaggagttccgacccaaggaatcttgacctgagatttctaggagaaggaggtggtgctgcctctttcctctgaggccacctccagttgcactaattgttcaatgttgttccacagactcagaacacattataattgtatgcttctcaataggagttattaatgaacatagaatgagaaattgatgaaattttttttaagtcgaaaaagctctcagcagcaatcccatgacgaaacccaggagacagggctttctgtagtgggaggctgtgggcaggagagtttgtttgcaagaggctgtctgcggcaccaccgcgatgtagccagaccccgcatcacctttgctaggctgtgccttgctgacatttctgcaggtgctgyttccagatgaaccagcctgggttctgatctagccacattgataatgaatgttccttttgataccgaagc

SEQ ID NO: 21603 - DNA, 556 bp, Homo sapiens
tcaggatacttacaatcatggtagaaggtgaaggggaagcaggcacatcttacatggctggcgcaggargaagagggcaaagggggtggtgccacacacttttaaacaaccagatcttgtgagaactcactcattatcacaagaacagcaagggggaactccactcccatgatcccatcacctcccaccaggcccctcctccaatatcagggattacaatttgacatgagatttgggtgggaacacaaatccaaactgtatcactagggttatgataatttatcagacccaaagtaaaagcatgatctcagcctagtcaaggaagcaagctctaggttttatatcaattggctcttcttaggatgtagggtgtactggctacaacatccaaggaaatttaactctgaacttctcagctgggatccttttcacagttgaattttgatttctatgcttgccgcatatcttctctctaccctcctacatctgcttggtgcccctgttctctgccctgggagcctgccctgtgtaggtgcatgtatgggatcatggagac

SEQ ID NO: 21604 - DNA, 524 bp, Homo sapiens
taagaaactgggttggttcgtcactaggaatccattaagtgttgctagtccgtgaggacagagaaagctgtggaattcattcctcaaaagcaaaagccttatttgtgctaatagggttataacaactgagcaaattttagtggacaaatagtagaggtccttaacatttactgagctattctgagcttcagacattgtggcaagggctttctgtgcattatgtcatttaatccttttggtaatactattaatttaggaacaattatcccctaaggcttaaagaagttagacaacttgcccaaggccacatagagatggagcagtgaaagtaagaatttgacccagtcagtgcacagagtagacaatctttgaattrcatgcatttaaataaaaaaaggctgttcttcatagttctcattgaataagtttcatagacaatgactttcccaaaggactccttttgcttctgaagggcagccactctccagttaaaggggatttgcaaacaggcccactctggattg

SEQ ID NO: 21605 - DNA, 532 bp, Homo sapiens
actacaatgagatggatgccctaaaacagtcctagaaagctcagagtggctagttgaaaaagttttttgcccttcaattacattttaaaaactacaaaagagtatacaagaaaataagaaaaattcacgattcactaaaaatggattagcagaaaaaaaaaatcattatttgaaagagttctaccattattatatattttcaccatcctcaatttttcttttttcttttttttttttttttttttgagatggagtctcgctctgtcacccaggctggagtgcagtggtgcgatctcagctcactgcaacctccacctcgcaggttcaaccaattctcctgtctcagcctcctgagtagctgggactacaggcgcacaccaccatgcctgggtaatttttgtatttttacaaaacaraagagacagggtttcaccatattggtcaggctggtcttgaattcctgacctcaggcgatcgacccgccatggcctcccaaagtgctgggattacaggcatgagccaccgctcccag

SEQ ID NO: 21606 - DNA, 624 bp, Homo sapiens
taaatttctgccccacttctctgataatttaattccagaaaattattttagaatcttctactataaagagattatttaaaataagaaaggctatatacaacattacataaaataatatgtataatctttagataaaatacagcrcttggaaatattttacaatcatcaccatcattctttttcccttaataatctcccttgcatcccatgcttcagccaaaatgaataattttgttgcccacatgttccacattctcttccctttctcccttttttcatactgttgtttcatctggaccaacctttaatcatctttgtgtttccaaatattacctatccttcagttccaaattaaaacaccacttcccttcccaaagattttccctgatcactctagctggaggtaaatctttctcctattttatactatagttacatgtaaactagtaacaacagaaactaagtcttatttctttttcctttttttttttttttttttttgagacaggatctcactctatcacccaccctggagtacagtggcacaatcatgactcactgtaacctcaagctcctgggctcaagtgatcctcctgcctcagcctccttcctgagtagctagga

SEQ ID NO: 21607 - DNA, 531 bp, Homo sapiens
cctgactcccgtgggttacgtgcacttcccgtgctcccgacatgtccttatttcagttctcatcaccctgcatggtaacggccttgctgcctgtggtacctctcaccaggctgtaaawgtcacgcagagaagtgtgtctgctgttgcatcctcaggccccaacaaatgggaaatgctcgctacacatttgagtttttgttggttgcatgaatgaatgcatcagccatgagagctctattcttgtgccctccaggagatgagtaaggtaggatttggagaacagattttggaatcagacggacgtgagtgggcagcctgaccccacccttacttcttcatgtaagacaacagagtaatcccagcactttggaaggccaaggtgggtggatctcttgaggcccggagatcgagaccagcttggccaacatggcgaaaccccatctctactaaaaataaaaataaaaataaattagccaggcatgtagtgcacacttgtagtctcagctattcgggtggctgaggcatgagaat

SEQ ID NO: 21608 - DNA, 531 bp, Homo sapiens
cctgactcccgtgggttacgtgcacttcccgtgctcccgacatgtccttatttcagttctcatcaccctgcatggtaacggccttgctgcctgtggtacctctcaccaggctgtaaaagtcacgcagagaagtgtgtctgctgttgcatcctcaggccccaacaaatgggaaatgctcgctacacatttgagtttttgttggttgcatgaatgaatgcatcagccatgagagctctattcttgtgccctccaggagatgagtaaggtaggatttggagaacagattttggaatcagacggacgtgagtgggcagcctgaccccacccttacttcttcatgtaagacaayagagtaatcccagcactttggaaggccaaggtgggtggatctcttgaggcccggagatcgagaccagcttggccaacatggcgaaaccccatctctactaaaaataaaaataaaaataaattagccaggcatgtagtgcacacttgtagtctcagctattcgggtggctgaggcatgagaat

SEQ ID NO: 21609 - DNA, 509 bp, Homo sapiens
ttgattaaaaatattaacagaacttaagctttggaaaaatactaaattttaaaaacttctcagattaaaaaataaaatgtattcttttgcattcatttggagatgtgtaataattcacaggattaaaagactggaagcaatctttgaagttcaatgagttcaagtattctactgccactccctaccccacgtcttacttaaaattctcctacatcatcaactgtgtcaatttcacaaataaagaaaaactcaacgtcaaagaaaacacatggtgccaggcatgttgactcatgcctgtaatcccagctactcaggaggctgaggtgggaggactgcttgaggctaggaatttgagaccagcctaggcaacatagcaagaayccatctctaaaaaataaaaaaattaaaaaaattatccgggtatggtggtgcattcctggagtcccagctactcaggaggctgaggttggaggatcacttgagcctaggagtttcagattatagtgaac

SEQ ID NO: 21610 - DNA, 631 bp, Homo sapiens
tgtatatttatccaaatgtggtagttttaaaacaagttctttgacattcttcccatcaagagatggaatctatgtcccctttccttgacctargcaggcatttgtggttgccttggaaccaactgggtatgacagaagtaatgttatggaacttttgagggtgaggcataaaaggcaatacagtttctgcctctctctttgggatgttcatccttgaaacccagccaccatgctctgagaaagccagggccacatggaggtgcacattgcttgtggagaggaactgaggaccccagccgaactcccaagctgacagccaacaccaactcaccagccacatgagggcgccatcttggaaacacattcctcatccttcagttcagctgcctctgtgagtgctgtgtggagacaggagcgttcctcactgagccctactcaaattgcagatctgtggcaaaatacaatttgtactgtataaaccgctgttaaaggtggtaatgcttatccagagacctaacatacaaggtgttgaaattaggaccatcttttttttgtttttgagagggagtcttgctctgtcgcctaggctggagtacagtggcgcgatctcggctcactgcaagctccgcct

SEQ ID NO: 21611 - DNA, 508 bp, Homo sapiens
tgctactcacaggctgacatcaaaagataattggattcagttcggtgttaaaaaaatgtaactttcatggaaaaacataatctatttttagggattaagtagaaagttatgaatattagctatattaaaataaaaagattttggaaaaagttaactgttacatatagatacagccaccagtttttaatttttaatatgggaattagcttctcctggaagcctgctaaataaaaattacgctttatttgcratactgaggaaaatttgaaggaagtattgtccttggtaatacatatgtctctagattgttaaaacatttgaacaaaagagtgacaaatctaaatccattttctagctgtgacaatcatgatgactccagattgactcattgagagaaggccccatattcctggagctctaaagagctccaaggaaacatgctgtgattctaacatagcccaggtgatatggtttgagtctgtgtcctctcccagatctcatgtcaaat

SEQ ID NO: 21612 - DNA, 508 bp, Homo sapiens
tgctactcacaggctgacatcaaaagataattggattcagttcggtgttaaaaaaatgtaactttcatggaaaaacataatctatttttagggattaagtagaaagttatgaatattagctatattaaaataaaaagattttggaaaaagttaactgttacatatagatacagccaccagtttttaatttttaatatgggaattagcttctcctggaagcctgctaaataaaaattacgctttatttgcaatactgaggaaaatttgaaggaagtattgtccttggtaatacatatgtctctagattgtyaaaacatttgaacaaaagagtgacaaatctaaatccattttctagctgtgacaatcatgatgactccagattgactcattgagagaaggccccatattcctggagctctaaagagctccaaggaaacatgctgtgattctaacatagcccaggtgatatggtttgagtctgtgtcctctcccagatctcatgtcaaat

SEQ ID NO: 21613 - DNA, 533 bp, Homo sapiens
tgaaattctgtwttttttgtatttccatccccagtatcaacaatgtaacaagaaatttacactcaagcttctaaagtaaaacatacagacaatagaactacctataaaataaaacttaaatggaatattaacagtctgaaagaactcttaggaggaaaccgtaagttaaaagaaaaagcattccggttgttgaaagaatgttactgacagtggttaacaggctatgttcccccagcaacaaaggggtggaggacatgcacgcgcattatataatatgaatacacgattgttagtctgcatctttaagcttaatgtctttcttatattaaagtttttaaaagttttaatatattccttccaaatgaacctccttgcaccccaccttggaggccctaatacttacaaaattcatgatttctaatctcctctagtcccagacttaaaggaacaaaataaatcgtttttcctaatacagaatattttaaatgaactaccattaataggaatcatcatttttttcaccaaagggccaa

SEQ ID NO: 21614 - DNA, 511 bp, Homo sapiens
cacayacacacatacacacacacacacacacacacacacagtatttctggattctgtgatgtttgatatttttcggcttttaacttttgtagtttgttgtgatttcatttctcattttaagtgaatatttttgtttatgcctaattttctattcatactttgacaatctttttcttaaatgtagaagctggacttgcccagtttatgactatcactcatcccaaagtgctgtcttgtagacacattcctgggctcctgggaccctggctctgacaccaccagagtccctcttcccaggaggcagcagctgctccattccttgcaggtgctggagtccaagagcaccaaggggtacctggaggccggggcctgtccagtggccttccttcctggccacatggctgcctttggccaccagctgcctgtgtgcagtctctctcccgagaatctgtgtggccattcatcacaggcctcctcttggaaaggcaaagaaggttgcattatactaggt

SEQ ID NO: 21615 - DNA, 511 bp, Homo sapiens
cacacacacacayacacacacacacacacacacacacacagtatttctggattctgtgatgtttgatatttttcggcttttaacttttgtagtttgttgtgatttcatttctcattttaagtgaatatttttgtttatgcctaattttctattcatactttgacaatctttttcttaaatgtagaagctggacttgcccagtttatgactatcactcatcccaaagtgctgtcttgtagacacattcctgggctcctgggaccctggctctgacaccaccagagtccctcttcccaggaggcagcagctgctccattccttgcaggtgctggagtccaagagcaccaaggggtacctggaggccggggcctgtccagtggccttccttcctggccacatggctgcctttggccaccagctgcctgtgtgcagtctctctcccgagaatctgtgtggccattcatcacaggcctcctcttggaaaggcaaagaaggttgcattatactaggt

SEQ ID NO: 21616 - DNA, 587 bp, Homo sapiens
ttgggcattaaggtggcagtcatggtgcttgtcctgcctaccatgcacggtcattctgagagcaagggaatcaggtgtcccaggggcacgccgtccatcagggggctgatgtgtacaggggctgctggcttccctccatcccaaggttctctatccccgttcctctgattcccggattagcttgtttggactaactggctcatgtcttcatcctccagataaaatcttatgttgaaccgtagccttctggggacctgatttctttttcttcttttctgcattttactagaaaaaatctcaaacatacagaaaatttgaaagaattgtagagtgaacacccacatcataaactggacaaaaaacattgtgctgtatttgsgtggctgcatagacataatttcttcatgccaaggaataactgtgatgaggggagatcgagggctcctagcagccgagagagggaggcatttgaggataagaagttaaggcagcaatccctggagtgccaccagtgagcggccatatgtctgctactcctgatcctacagtccttgtatttggggggtggggcagggggtagggcagtt

SEQ ID NO: 21617 - DNA, 527 bp, Homo sapiens
ttgtgtttgttttgtttttcctagaaagtctgaacataactgcragagctgtttaaatttaggatctaagttataaagcagataggactaaaaattctttttcctactaaccagcagtaaagacccagaaagaagacagataagttttagacaaaatcaagggacttggctttatttcctgcacatccaggttgcactgtgagttagaatttgcaaccctcccctaccccacactttcatgccttttttttttttttttactttttccagaccccattggctagtaaatgacctaaaatgcatcggaaaaacagcaaaaagagacttgaatagacatttctccaaggaagataaacaaatggccaacaagcacatgaaaaagatgcaccatgtcattagtcattagggaaacacacatccaaaccacaacagtatgataacacttcacacccacgatgacggccacaactttttttttagaaaagagaaaatggccgggtgcggtggctcacgcctgtaatcccagc

SEQ ID NO: 21618 - DNA, 527 bp, Homo sapiens
ttgtgtttgttttgtttttcctagaaagtctgaacataactgcaagagctgtttaaatttaggatctaagttataaagcagataggactaaaaattctttttcctactaaccagcagtaaagacccagaaagaagacagataagttttagacaaaatcaagggacttggctttatttcctgcacatccaggttgcactgtgagttagaatttgcaaccctcccctaccccacactttcatgccttttttttttttttttactttttccagaccccattggctagtaaatgacctaaaatgcatcggaaaaacagcaaaaagagacttgaatagacatttctccaaggaagataaacaaatggccaacaagcacatgaaaaagatgcaccatgtcattagtcattagggaaacacacatccaaaccacaacagtatgataacacttcacacccacgatgacggccacaastttttttttagaaaagagaaaatggccgggtgcggtggctcacgcctgtaatcccagc

SEQ ID NO: 21619 - DNA, 488 bp, Homo sapiens
ttctgttgttttaaaccacacagtttgtggcaatttgttatggcagccacaggaaactaacacagtcccctaacctcaaccactgagcttcactgactagctgggaagtttctcccaggaggccatgttgtccctgaagccagtcccaatgggaccgacatgattgacaggccagggaagcctcaccccacaaggctgcatgcccaggtaagtgtgtttcttgcaccgcccttgccatgacaatggcttgttctgacttacggctttgttactttgaacttcaatcaatggctgaaagaggaacgttgttttgactaggctcggggtttctaaactccccmctgtgtggtttccaggtcagacagtcaggctttgttctgtgaatcattgctgaaagattcaattaaatctcgcttcgtccgccttgtggccagggtttcagtgacttagcaagaacaggagcatgtagccagttgctgaggaaagcc

SEQ ID NO: 21620 - DNA, 497 bp, Homo sapiens
atagagatgaatcgcctgaaggctcagctggagaatgaaaagcagaaagtggcagagctgtattctatccataactctggagacaaatctgatattcaggacctcctggagagtgtcaggctggacaaagaaaaagcagagactttggctagtagcttgcaggaagatctggctcatacccgaaatgatgccaatcgattacaggatgccattgctaaggtattgtttaaatagattaaaatgttccggacagcattaggcagctgccatgcacagtgtttactgagaacctgggttactggtttggtttggtgtgttattagcttttttttaaaactgatatttttaaaacttgggaatggtttccttttattggaatagtgtgaaaagtattcttaagataatgtcactttctctsacttgtattttgtttctgttttcctgcctgtgagaggatatggctggtattacagctaaaaccagaatttgtccctagt

SEQ ID NO: 21621 - DNA, 875 bp, Homo sapiens
gatgatgacttttttccagtcatattctgcttcaatatgataayattgttttgctctactttttgtttgaaaatagcgttgcaatcatagggaaaaattatactttcaattattcaacagatgcttttctcaagtaatacttattttaatagtgtaaaatctgctttccaatcaaataaaaacttccaaaaaattatgaaaatagccaataccgccgggtgcggcggctcacgcctgtaatcccagcactttgggaggctgaggcgggcagatcacaaggtcaggagatcgagaccatactggctaacatggtgaaaccccgtctctactaaaacaaaatacaaaaattagccaggcatggtggtgggcgcctgtagtcccagctacttaggaggctgaggtaggagaatggcgtgaacccgggaggtggagcttgcagtgagccaagatcacgccactgcactccagcctgggtgacagagcgagactccgtttcaaaaaaaaaaaaagaaagaaagaaaatagccaataccttgaacaaagagaaacacacatagctaagtaaatattacaattacatactccaaacccaagaaagcagagaccatcatgagccaaatcattcttggagctgtcaacagatttttctgagtggctaccatgttcagatgctgacactagcagtgaaaatgtggagccgagacgcctggtcatgctctatggattaaatcctagtgagaagaggcagccagacagatacatcacaatgtcaggtggtcagatggggttactgtgaagtaaataagaatgcggtaaggggatagaaacttgagacagcataccattttactagatatgttgaagttgtgtcaaca

SEQ ID NO: 21622 - DNA, 875 bp, Homo sapiens
gatgatgacttttttccagtcatattctgcttcaatatgataatattgttttgctctactttttgtttgaaaatagcgttgcaatcatagggaaaaattatactttcaattattcaacagatgcttttctcaagtaatacttattttaatagtgtaaaatctgctttccaatcaaataaaaacttccaaaaaattatgaaaatagccaataccgccgggtgcggcggctcacgcctgtaatcccagcactttgggaggctgaggcgggcagatcacaaggtcaggagatcgagaccatactggctaacatggtgaaaccccgtctctactaaaacaaaatacaaaaattagccaggcatggtggtgggcgcctgtagtcccagctacttrggaggctgaggtaggagaatggcgtgaacccgggaggtggagcttgcagtgagccaagatcacgccactgcactccagcctgggtgacagagcgagactccgtttcaaaaaaaaaaaaagaaagaaagaaaatagccaataccttgaacaaagagaaacacacatagctaagtaaatattacaattacatactccaaacccaagaaagcagagaccatcatgagccaaatcattcttggagctgtcaacagatttttctgagtggctaccatgttcagatgctgacactagcagtgaaaatgtggagccgagacgcctggtcatgctctatggattaaatcctagtgagaagaggcagccagacagatacatcacaatgtcaggtggtcagatggggttactgtgaagtaaataagaatgcggtaaggggatagaaacttgagacagcataccattttactagatatgttgaagttgtgtcaaca

SEQ ID NO: 21623 - DNA, 548 bp, Homo sapiens
tcacccattctcatatacaatgttagagtagcttgacgactccagcgtcatgtttggtgggagtcctgtatttggccaagtatgctcacaagaaaagatccgtggcatatcaaaggtaagagaattttgagagtattcatagtacactattaaacttggggaacctatatcaccagcacgcctgtggcccttcatttgtagtcccacacatgcacttttgaacctctgtgtgtgatgtttctaaggtttcactgatggtcatgctggtctcttgtttgttgagcagcaacataaagaaattgtcacagtgaagaaacagycacttttggtcagccagggcagatggaaaaagggcctaacgggtacacaacgtgaacctatcctgctgattcctcagctgtgccacatgacaggtactgatggattacagcccctctttaaagtcaggtataattacgacttaacgcaggcttttcagggaattcgaagggtgtctccttggtagtaggttcctccagctgttataatttagtcctcactcaaattca

SEQ ID NO: 21624 - DNA, 527 bp, Homo sapiens
gtccctggagaagccctaatggcagagaatttttatttaacagtcatttatgcaacaaatatttttgaagcgcctaccaagttcctgaagctgtgctaggcactagcatagatgcactggttatggttcctgcaatcacagaagtcagagggaagattgagagagaatatacgatggtgctctaaagataacaacagcttcatcaaacactaaactttaggttaaaaaaaaagtatamttttcagggaacacctgaaaaacatcttggccagagtgtataaaatgcagttgtatgtcagcaaagcaaatgatcactctggtgagctatgcagttgttcatcgttttggccatgtgcttcatagagatcttcctgctggtggccataatcacaggagtcttaacgcagactggttattttccactccctcataaagcctgcctagaactacaggagccagaggagaaaagtgttctgatgaatatttcctaagctattgagattcatggttggctcagtgatttaacc

SEQ ID NO: 21625 - DNA, 495 bp, Homo sapiens
gcccaagcactcaggcaatgcacagtaatagcaggactaagcccagagcctgcactctgatggatacgagataaccagcccacttcctgcctcgttcaggaactctacaaggccaaacctattcattttatttatttatttatttagagatggagtctcactcactttgtcatccaggctgcagtgcagtggcgcaatctcggcttactgcaacctccgcctcccggattcaagcgattcttctgcygaaggtgtggtttgcccctccacacctgtgggtgtttctcgttaggtggaacgagagacttggaaaagaaagagacacggagacaaagtatagagaaagaaatacgggggcccaggggaccagcgttcagcatacggaggatcccgccggcctctgagttcccttagtatttagtgatcgttcttgggtgtttctcggagagggggatgtggcagggtcataggataatagtggacagaaggtcagca

SEQ ID NO: 21626 - DNA, 495 bp, Homo sapiens
gcccaagcactcaggcaatgcacagtaatagcaggactaagcccagagcctgcactctgatggatacgagataaccagcccacttcctgcctcgttcaggaactctacaaggccaaacctattcattttatttatttatttatttagagatggagtctcactcactttgtcatccaggctgcagtgcagtggcgcaatctcggcttactgcaacctccgcctcccggattcaagcgattcttctgccgaaggkgtggtttgcccctccacacctgtgggtgtttctcgttaggtggaacgagagacttggaaaagaaagagacacggagacaaagtatagagaaagaaatacgggggcccaggggaccagcgttcagcatacggaggatcccgccggcctctgagttcccttagtatttagtgatcgttcttgggtgtttctcggagagggggatgtggcagggtcataggataatagtggacagaaggtcagca

SEQ ID NO: 21627 - DNA, 495 bp, Homo sapiens
gcccaagcactcaggcaatgcacagtaatagcaggactaagcccagagcctgcactctgatggatacgagataaccagcccacttcctgcctcgttcaggaactctacaaggccaaacctattcattttatttatttatttatttagagatggagtctcactcactttgtcatccaggctgcagtgcagtggcgcaatctcggcttactgcaacctccgcctcccggattcaagcgattcttctgccgaaggtgtggtttgcccctccacacctgtgggtgtttctcgttaggtggaacgagagacttggaaaagaaagagacacggagacaaagtatagagaaagaaatacgggggcccaggggaccagcgttcagcatacggaggatccygccggcctctgagttcccttagtatttagtgatcgttcttgggtgtttctcggagagggggatgtggcagggtcataggataatagtggacagaaggtcagca

SEQ ID NO: 21628 - DNA, 1636 bp, Homo sapiens
cttctctgaccttcctgactaggccaaatccccccaatcccagtgcgaagtctcagggactctgtctctccttagcacttagcatagttgagttctatgttttctgtgcacatttttaaaatcatatatttgtctcccccaagaccattggctccatgatggagtgtctgtttctgattgccatcgcatccccagaatccacatagcatggggttttcagatgagacacttaataartatttgttgaggcacttggatctctcaggtcgcccacttggccctcttccaattgtacgttaattcctgccacttgtggtaaaagcttttttttttttttttgagacggggtctcgctctgtcgcccgggctggagtgcagtggcgccatctcggctcactgcaagctccgcctcttcggttcacgccattctcctgcctcagcctcccgagtagctgggactacaggctcccgtcaccattcactcctgctctaaaatttgccttggtcacttcctctgttttatgcccctctgccgaattctttcctcttaggaggcaagaatcaagtttgttgcagactctttggattcgctgctgccacatgacttggatacgttccgtagtggtaagacacctctatcccttgccttctttggctggaggcatttcacccctgtgtgtggtttccttaaaaatgaatggatggatgaataaataaataaataaataaatatttgttgaatgaatgaatcagtggtaccgagttcttaacagccttttcttttactaacagggtaaaaggatgatttaattaagttgccctgtggatgtttagactctctataagaaaatggctttggtttccccagactgttcagcagagattctgctgcttctattctgggttgcttctgatgttgttaacaacctttgcacacactctgggtttgtttctgccttgtggctgctgagctcagatggtgacctggggttaataaaatcatgtctctgcaagcaagagagagcctctctggttatttcaaatagcgggggcttgattgtaaggttgtatgtggaaattaggtagatgggatcttagctgggtaggcagtccactcagacaacagagcactacaaggttgcctggagttaaatgcagctcttgaggcagctcttgtcactgtgtcaatatcgcaagttgattgctctctggtgtctggctccaccactaagacagctcagctgttcttcctgtccctggattacttggagtatccttcaatttctgtttttgccactgcttgttctctcccaatatgaagtgctcgttcacagtttccatcactttctggtttctgtggcatcactgcatctgctggctgccttcttagcttttactccctggtgtctgctgctcgtattctccatataccttgcattcaaattttattgctttgtttaatcacagtgtagtctttttctgattcttacgccacaagcctaggccactaacaggcccatatcatcatatttgctgcctatgagcttgatgctctcctggtccaagcaggtctgagaaggacagtatgcttacatgcagcagcgtgctggagatccccaagagatgattgttaaat

SEQ ID NO: 21629 - DNA, 532 bp, Homo sapiens
atagtgggtgctttcactgacattacacatgacttatgatcaggaccagtgtaagtatacccagtgagcttccaaaatggcaaaaattccaaaatgacagaaattgtatataactgacaaaaagagaacaaaataatatatatgtatatgttccaaataagtcttcaaatatgaaccttttcaattatttattaaaaatcaatatattatgggaagcaagatgatttttaataaataattgaaaaggttcatatttgaagactcatttggaacaacccaaaaaagatttaagtgttcacatgaggtaatcagaggaagacttactctaaactcaacattccaaatacattacaagttagaacgtagaaacaattagctcaggacttttgaggccatttctcatggaaaatcaggaaaagagaatgaaacattaattttcatgttgagttrttacagacatcagcagtatggaccaagcacccatgagataacgagtcctgaactgggcaccaagagaggtgggaaatgtatt

SEQ ID NO: 21630 - DNA, 588 bp, Homo sapiens
taaggtttttttgttcttttgtttgtttgttttgagacggagtatcgttctgtgcccaggctggagtgcagtggcgtgatctcagcccactgcaagctctgcctcccgggttcacaccattctcctgcgtcagcctcccgagtagctggggctacaggcgcctgccaccacgcctgactaattttttgtatttttggtagagacggtttttcaccatgttagccaggatggtctccatctcctgacctcgtgatccgcccgcctcagcctcccaatatgttttctaataaaatacggaggctcgggtattttcttatagtcgtacaaatggactaagacaattgtgatgagttagaatttaaagagaagaaataaaaagagcaaaaacctctgaaaaggcaagatgtcctgaaatacagagattatttcaaaaagacatgatacaccttatcttcataagaagagagaattgggggrgaaaagagaaatcagtacaagtaggcctgtgtattcgacagcaggaagttgaaatatttccttccttttattttgttgacaaaataacaacatgtcaatctgtaagacaga

SEQ ID NO: 21631 - DNA, 588 bp, Homo sapiens
taaggtttttttgttcttttgtttgtttgttttgagacggagtatcgttctgtgcccaggctggagtgcagtggcgtgatctcagcccactgcaagctctgcctcccgggttcacaccattctcctgcgtcagcctcccgagtagctggggctacaggcgcctgccaccacgcctgactaattttttgtatttttggtagagacggtttttcaccatgttagccaggatggtctccatctcctgacctcgtgatccgcccgcctcagcctcccaatatgttttctaataaaatacggaggctcgggtattttcttatagtcgtacaaatggactaagacaattgtgatgagttagaatttaaagagaagaaataaaaagagcaaaaacctctgaaaaggcaagatgtcctgaaatacagagattatttcaaaaagacatgatacaccttatcttcataagaagagagaattgggggagraaagagaaatcagtacaagtaggcctgtgtattcgacagcaggaagttgaaatatttccttccttttattttgttgacaaaataacaacatgtcaatctgtaagacaga

SEQ ID NO: 21632 - DNA, 437 bp, Homo sapiens
tatcattttctcttgctctaggctgttttattttttcttcatagctctagtgattactggaaggtaaacttacaacattggtggtttagatggttgactctgtttttaaagtcagggatcaaaactgttgcacattggcacctccattgtctcattcaattcctggatcacagtagattttgattattaaaaaaagcaaaagttcaaattaattgactagtcttaggcttaaaaccatggacttaatataatgttacattkcatgatactattgttagtgtcctgaggaaatggcagcccacaaaagaacaccatgaatgacaggtaaaggtcctcggtgctacagttaagatggaagttggtggaatttgacagaaagggagtgaagccctcttttccccatgtgagtttaagtcaagtgagagaaagtaaagaga

SEQ ID NO: 21633 - DNA, 650 bp, Homo sapiens
attgcccagattggtcttgaactcgtggcctcaattgatcttcctttctcaacttccaaaagtgctaggattacaggtgtgacccactgtgcccagccctatgtgtgtttttaaattagtattagataaccagatcttgcaacacagtgctaataaccaccataattttgaagtagtgatgaaggcaaacagtattttgagatatctgcagcagaagagctgatacaaaaatatctatgattttaactgggagccaagtcacaggtactactatgccactgggatttgttggctgccatcataagagaaagaaattataaatttcagttagatccagttaaaatagagatgtaatttgttcccatccaagttcatgaactccctgaattctatccacaaatccccgaaggctaagaatctcagcccttgtctgccaaagccagcaggagggaaaagtgagcatggaagagcatttagttctagtacttggtgctgatattaactacaagtataatggaatcaaataatatccacaaygtcaatatcgtatatccttcccctgttatgaactttgtccccaaaatggcacatataacttcctattgaccataattcagacatatagggaagtaggaagggagggaacagat

SEQ ID NO: 21634 - DNA, 610 bp, Homo sapiens
ttttttcttttctatgcccattttggtttatacgtcattgtcacaaaatgtactgacaaatgggatttaaattactattataataacatagcatgtggaacaaatattaatttctaagctcatgaacatcatatttctasatctaagctgactttttacctagtaaccatacattaatgactcatggacagtatgtattctatataagtgccacagaaatcaagtgagtgtctgataaagcccaactcacacctcatggcacaccgcggaggaagggagtgactctccttggaaatcagaaagatttctaagtgaagggaaagcttttctgggaagttaggaattcgtagtacttcaactggtggacctaaggaaattttgtcccagaaaacattgtgaacaaaggagaggaaaagcatgttctgaaaatgattactatcttgggttgactgtagcatagggtcataagggaaaataaaacgatagtccactctaaaaagtataaaagcatcagagtatgaataatcttgatgttctgccaaaattggcagagagactggttagatagctattgtaaaattcagagaagagtaagttctcatacaattca

SEQ ID NO: 21635 - DNA, 527 bp, Homo sapiens
gagagaaaacgtctgtctatgtggaaggaggtcctctccagcgcatcatctgccagctccttgacttaggaccctccagcctctagaactgagaaataaatatctgttgtgtattaccagtctacagcatttttgttatagtagcccaaatagactgagacaccagaggttagtgcacatataacttcagtccatcctttccatgaatatatggtgtttatggtaaaaatcaatatgaagccrtggttggtcactcaataaagaaaataaaagtaactgtcttttgtaaaatatgcttgctagttacaggtttggacttaaatgttctaccatcttttcaacttgatttaaaagaaaacattaacagaaagttaaccagaaaatttaattaatatcccgatttctaagtatctccatttcacaccattctcaccactctagaaagtagccacctagaaagtagtttacgtaccttttgcagccacaaccgctgcctcttttcagaagtcaagactttacatatcaca

SEQ ID NO: 21636 - DNA, 1124 bp, Homo sapiens
ccatccgagtagcgggattacaggtgcctgccaccacacctggctaagaaagacctattttcattcttaaagaagaacagtgagaagtatttaagatacttactcatgttgtttcacattctaatgcctccctaatcatccaccaacacattacaaaaaaaacagcaatgtacagcaatgaattgagacaaagtttccattatatgtctcagacatgtcatttccaacagagcctattggagtctttattaaattaaatgctttttacttacaacaagattcacatggcttcttcagaaatcctagggctactaaagtaaataaaattttactaaagttttcaaaataaattttgtaattaaaattttaatcacactgatttactgaagggatagaatacattcaagtgtaacaaatatccaaaacatttttaaaacccaagaagttataataatagctctatctcaatgtgattatacttgcaatattttccataaaattactttaaaagattttttcagtatttaattactcatagacattgtgcaatattatcaaattatatttaaatagttgtttaaatagtcaaatgtatgcatatataaaatattagaaaatcataaatatatgctcttagaggaatgctcacattttagattagttaaaaaaacacagcttcaattactgataaacatgcagttgaatatagttttctaaactatattcaaaagtatagtcaagctttagtatcttatgagtaaacacctcgaattttgtcaaaccacatctttatgtatagtgtagtgttataggcttcactatcattatgaaggtttacatgttaagctgtcaaagktgtagtgtggtaatgaacagataatttcagatcaattgcaatcagtcaacttaccccataacttctccgacttatcctcagcagattattatgttagacattatggtgttgttaattaatgtattcagatttgatgggttatttttctaacatgattttagatcatgataggaatttaaagtgaagttaattacttcttatttccaagaaagtaatgcattggtgctccacatgaaaataaaatgaacttacattaaaattatttaac

SEQ ID NO: 21637 - DNA, 539 bp, Homo sapiens
ggtggcattcaccacatgctaaatgaggagtctttggtccttgattgaacattggagataccctggcaatacacacaacagacctagcatgcaccatctttgacctcaggaatagcagaccaaactgtctaagttatatatatattgacattttgcatatgtattagttattgagatattaatcctttttcattatcttaaaatcatatatctatttaaargaacataagatatggaatgtagtattcaacccatatattatctgatattatctgttaattatcttaaatatcctcttttctatttcaaatctttctcaatactttcataatattgatatttcacagagtaagtccaacattgttaaagtgtgttaatttactctcgaaatttttagatttaggtgtaaatgtctttaacattttatataatacttttaaaactttgttattttcacatagtttaaatgtatgtgtaatgttttcaatgatatacaacattttaatacaagcaatcacacatgaaaataaatatgaaaa

SEQ ID NO: 21638 - DNA, 799 bp, Homo sapiens
gggattttaacttcatcttctgcttcagggaccacattgttcccagtgtgtttaaacmcctggctggtttttcacttggggttctcattcagattcgtgattctgtttactgagagatgatgtcccagttactctagctctgtaacaaatgactccaaaacttggggctgtgaaataatcattttattttgctcatggattctgtgggttattcagactcagtgttccatgatatttggggcctcagcaggggtgattcaaccacaggagctagagtcccctggggtgtctttgcccacgtgtcccacaggtgcatggttaggacagggacctcagatgggctgtcatccagaacacctacgtgtggcctctcaatgtggtctttctgcctgggctgacttgggtttcctcagagcatggcaacctgattcctagtgagatttccgagagagtgcggttgtctggcacttctgtgatctggcaatagcttcaaggaaggaaatatattttacattgaaagaagagaatatgagccatgtgtgccaggtacggggagccacctgtgaagatcctgagtagaggcttaggtcactgtggacacagtggcagcagtggacaaggacaagggatgccgggtcatgcattcaccccacaaatattccatctatctctgaactaggcagaatgagcagggcaccaatctaatggctcttctggataatcacttcacatgggaatcctaggactccatattatattcttatcctgttgaaaatttgaccttttaaagatttattta

SEQ ID NO: 21639 - DNA, 1169 bp, Homo sapiens
ggggctagcaggagaggaggaggtagatctcattgtacacatccgtcttctggagagaacaacctctcctaccatcccttccttctacaccttctctgcctgtcataggtggctgcaggaggggtccacgttgggagggacaggtgagctggcctttggtgctgacacactcctgactttgccctttctcctgcagggggtgccattcccgcagaatgaggctaatgccatggatgtggtggtccagtttgccatccaccgcctrggcttccagccccaggacatcatcatctacgcctggtccatcggcggcttcactggtaccagcctccctcccatcccccactgtagacacattcatgaccacccagccccacccgggagaggtggggaaatggggtggggtggaggctcaaggaagaagagagaggaagtagaatctctgagtgggcctggaagaagctatcctatttgcatacacttcacctttccttcccctcttgtgcccagtcattaaaaggaaaagcagacccaggtcctgggtggggagatcagggaaagtgaatgtttcctgcccattatcttcagtgcactatctccagtgttctatccccatcctctccagatagttccctaaccaagtgaagtaggttaagaaaaaaacaagggataacatagggggaatggggttggcctatagggtcagtgggatgagagcatgggtggtggggagaaaggagcctttctcagttcttactcttcttccctgccctggtaccagccacgtgggcagccatgtcctacccagatgttagtgccatgatcctggatgcctcctttgatgacctggtgcccttggccttgaaggtcatgccagacagctggagtgagtgcagctcccaggcctgcccttcctgggaaggggtgggctggaactgggaactgttctgagatggctcccttttcttgggtggggagtaagtcgccccattgttggaagcaggaggactcctttgtctgggggcctcagttttctttctccgtgaatagtgaggacctttatgttgggcaagggctttgtctctgccatcccttcacctttatcccactctagggggcctggtgaccaggaccgtgaggcagcatctcaatctaaacaacgcggagca

SEQ ID NO: 21640 - DNA, 554 bp, Homo sapiens
ctgtgaaacccacagtaatggggctgacatcctctgccctatgcaagagaggtttcccaagcacttgcagcaagtgagactgcacaggatggcgaatccacaaagaacacgttgttctcatgctctttggaagcaccaatttacattctgacagttttgtggggagatgagaccagtgaaaaccagggaaccctgctcattaggggaacccttggtggtctctgcttggaagccgggctgcagaggactgtaagatcaaccgccggggctgtaggtgatggctcaggcactggattctccatggaggaccccatgaatgcactttgaaaggtcagctccatgggtctcagctggctgggcccatttgggagttctatctttggggaaggatgctttcctaggctctgttgcacgctggccctaggctcaggccaggatcaaaatcaaagtcagcttcatgcccaaggagggcatggcactacctcctccagggccacagggtggggcctaaattccatcctgcgggatcccaggtcaggaacaaggcccrggga

SEQ ID NO: 21641 - DNA, 1486 bp, Homo sapiens
tgagcattatttatcttaaattactgttttaattagaaatgtatctaacttacttatattagccaaatttcctttcaatgtaaccaaatttcttttaagtgaaaattaagtatttaccttctgttatcaagcattctatgaatacaaaatgtttatttttttcaactttagaagaaattgaaaaggtctacatgctactaatctaaaaatacaggctctgggtttatatggtgttaacctttcttccaaattttaaggaatagatatttaaatgccatccactttgttttaaaatacataaaatgttttcagcttttgacctcaaaatttacagtagcacagctactctgtattgaataaaccacagaatcaaaacaaagaaagattctacagaccagactaaccaacaatacagttggttcaaaactagtggttcaaatatcaaaaaccaatttcaatgacaaatacatggtatgaaaaccccgcaaagctcaagtagaatatattatgcttgaatgaaattatgagttgagagtaggaaatctatggttaaccaaacaaattaaataatgtttatgaggaaattatactgctaatgttttattatttggcaagctattcagtggaacacaaagatattcttgatgaagttgaaaaaatattttaaaatgttactaaagtggattataaaaaatgaggacatgaataactttaaaacgtattcagggataaagagagaaaaataaatttagatttcatacatacataaaatatatttaaaaagttgtgtttttggttgctcaaataaaaggagcagatatttaaattccatgcctttcattttaaagtttaggaaatgcttatagctttccaaactgacatttatactaacacagttaatctaatcgagtgataacaaaatcaaaacaagcagaattctcttgaccaatctattttcttgatttttaaaagtaaatgtactctcaaagaaacaaaactattattcctggattctgttatttaaaaatatttactgatcgcttaccttamaccaagtgatctccagctcgtggaaaaatatgtgaagttgcccagcttcattaagcttaaactcttctgaaggagaaaagaagcaatggagtagggacattaaagcaggagtgtggtgatatggctgagacttctacttgcacactgtggtagctgtgtggagactggattgaaaaaggggcaatgacagaagcttaaattagtatcaaatatggtaatcttataattttaagggtccttgaaacaagaatgtataatagttctcattatttccccaagaaaactctgcacttggccttgtgagggaagcactatagttaccaagtggtgggggtgggaaggtgaatttggaaacaacatttggaattactacactttaaaggtaaagctggcaggaattccatacacatcagatctgaaaatatgtgtgtgtgtg

SEQ ID NO: 21642 - DNA, 3313 bp, Homo sapiens
tgattttcatcactatttccttggtccaaatacgtttataagggaattaaataacatagttggaaattttttaagccytcaattataatttttatacacatgtaagacaaaaaagtgagtacctttgctaatcacttttaaatttcaaatcttaggtcaacctaagatttttttttacactaaaaatatgaagttaaaatcaaatgttattttaaaatcagaaatactattgatggatttaaagacaagtaattttaatgttacagaatattagtaatacaatcttaaagcaaagtatgtttttatgtctaacaactaacttattcagttaattgatttaatttgaaaggctgtataatatataagataataggtatgacagatttcctactaaggagacaaggccagggtagagcatattgctacagaaaagatagacattctttaaagtttcacttaaaagatctgcaaaagccaaaaagaaacaaaaagtcacagatttatagatgagcaatgtttgatatataaaataaaaatattgttaaattctgacaagaacatgaaaacaaagccatgattcacccaccggaagcattagagcatgttgggaatgcacaaaaattgatgcatcctcttttggtgatgattccaggcagagttgagtatcagtggccctagcaattatatgtaaaggcaatgctacttgcaagtttcccatcatataaaacctgtttatgatgttctgccaaatgaatatcactcttagatttaaacttgaaggtactctgaaaaaataaaactaaggtaaaccctgtttttaaaagcaacaattaaaaagccaaagttttaaagcagagaaacatttgcaataagaaagtacttgtgtacctttcatgtgtcagggactattcagtggtgttacttacttcgttatagtcacttcaattcaatgagagttaagttttattatgccaataaagatgctcagatcttcattttctaatttaaagtttttgattactggcaaaatcatttcattagaaaaaaatatcaaacctgattttatatataataggattgtacttgactacatcatagcataagtttaacttttcttgttaatattttaaaaagtatttatgtaaataaacagtgcctgacacgtgaattacttacaaaaaagactatcatttgaggctataaaaagttaatatgcaaaaatattcatatctttactaaaaagcaaatcaacctatgaaataccaatgctactcaacaataatatcacaatatacatactaaactcagaagataagtttgttaaaacatgttattactttttatgaaagacaactaaacatatgccatctataacaagaaaggtattgttagacgtggttaaaattgctctgcagatatgagtctaataatgataaatgatatttaacctttgcagtcatcacatatcaatattactattactttcaacttacaactatgaaagcttaatgttaagaaattaagatttagaagggaaggggccagcatgtaattctaagtcttttgatttatagtccatattcaatgtatcactagtgaaatcatcttaaaatcctgactctgccactaatctttctcagcttaggaagtcatttagctgatgtggctccagttttctcactcaatgttataatagggttaaatcaaatgtcccaaactcaagttcttacaggaggcacacagatatgcatgtaagcgaatttggccagatggggacttcctcaaactagagaatgtttgtccttcctaaaagtggcccctactcctcagttcaagtcaattgttcaatgttgctagttcttccatatttttcaagagaaacatgaaatccgaatttttatctaaaagcactatattttacaatttaattaaaacattttaacactgtgaagaccaatcatgtcagtttttacttctggactagtgtgtagagactaatacaaaactggatgcaaactattaattattaggcatgtgccaagacaagagcaacatgaataattaaaaatttgtgtatgctgtagtctgaagtatttcattgataatactttttttttgaacgaggagggtagtgttatcactagaatgcttaagaactcagcatatctgcattcaaaaaaacaatgactgaattaaaacacacaagatatgttgttaaacactaaatcagctttccgtgtctgcattttacaaatgctgaaacatttgtacatcccattgtctagaacaaaactcctgctttcattttgttcatcttgcttacactggaattaacaagttttagtatattatcttaaaagatttaaaatacttttgtggaaatgtaagatgtttaataaaacctattcttatttggaaatacattggtcttagtttttctgagtccatgatacataacataccctattttggtttgtaggaggaaaacaagtttatgtaatgaaatctaacactttcaggttaaaaaagtgtataatgtaatttaaatataaacatggaatccattaaataaaactaattttcttatctccccttatttgtagtattagattatttctatgtctttaagtttatatataaaggcagacatgcacaatggcacacacctgtaatcttagcactttgagaggccaaggtgggggaccacttgaggccaggagtttgagatcaacctgggcaacacagagagagaccccatctctaccaaaaaattaaaaattagccgagtgtggtgtcacatgcctgtagtcccagctcttcaggaggtgaagtggaaggatcactgagcccaggattttgaggccacaatgagtcatgatcataccactgcactccaccctgggtgacacagtgagaccctgactttaaaaaacatttaaaaagaaaaaattttacataaaaatataagcctttatataaatatcaatatttattgtattatttctttcaaaaggattttcagaggaagaattgttatctaaaactgtatgaataggacacggatgagaatgaggagtgattgcaaataggtaggtaggatccttctggggtgatagaaatgttctaaaattaaattgtagtgatgtctgcacaactttgtaagtttataaaaaataattgacttgtacacttaatgagttgtatggcatgtaaattacacttcattaaaactgttataattattttaaaagaagaaaagaaggtatgaatatattttgtaccaattatactcaaatgagtagagtattatgca

SEQ ID NO: 21643 - DNA, 3313 bp, Homo sapiens
tgattttcatcactatttccttggtccaaatacgtttataagggaattaaataacatagttggaaattttttaagccctcaattataatttttatacacatgtaagacaaaaaagtgagtacctttgctaatcacttttaaatttcaaatcttaggtcaacctaagatttttttttacactaaaaatatgaagttaaaatcaaatgttattttaaaatcagaaatactattgatggatttaaagacaagtaattttaatgttacagaatattagtaatacaatcttaaagcaaagtatgtttttatrtctaacaactaacttattcagttaattgatttaatttgaaaggctgtataatatataagataataggtatgacagatttcctactaaggagacaaggccagggtagagcatattgctacagaaaagatagacattctttaaagtttcacttaaaagatctgcaaaagccaaaaagaaacaaaaagtcacagatttatagatgagcaatgtttgatatataaaataaaaatattgttaaattctgacaagaacatgaaaacaaagccatgattcacccaccggaagcattagagcatgttgggaatgcacaaaaattgatgcatcctcttttggtgatgattccaggcagagttgagtatcagtggccctagcaattatatgtaaaggcaatgctacttgcaagtttcccatcatataaaacctgtttatgatgttctgccaaatgaatatcactcttagatttaaacttgaaggtactctgaaaaaataaaactaaggtaaaccctgtttttaaaagcaacaattaaaaagccaaagttttaaagcagagaaacatttgcaataagaaagtacttgtgtacctttcatgtgtcagggactattcagtggtgttacttacttcgttatagtcacttcaattcaatgagagttaagttttattatgccaataaagatgctcagatcttcattttctaatttaaagtttttgattactggcaaaatcatttcattagaaaaaaatatcaaacctgattttatatataataggattgtacttgactacatcatagcataagtttaacttttcttgttaatattttaaaaagtatttatgtaaataaacagtgcctgacacgtgaattacttacaaaaaagactatcatttgaggctataaaaagttaatatgcaaaaatattcatatctttactaaaaagcaaatcaacctatgaaataccaatgctactcaacaataatatcacaatatacatactaaactcagaagataagtttgttaaaacatgttattactttttatgaaagacaactaaacatatgccatctataacaagaaaggtattgttagacgtggttaaaattgctctgcagatatgagtctaataatgataaatgatatttaacctttgcagtcatcacatatcaatattactattactttcaacttacaactatgaaagcttaatgttaagaaattaagatttagaagggaaggggccagcatgtaattctaagtcttttgatttatagtccatattcaatgtatcactagtgaaatcatcttaaaatcctgactctgccactaatctttctcagcttaggaagtcatttagctgatgtggctccagttttctcactcaatgttataatagggttaaatcaaatgtcccaaactcaagttcttacaggaggcacacagatatgcatgtaagcgaatttggccagatggggacttcctcaaactagagaatgtttgtccttcctaaaagtggcccctactcctcagttcaagtcaattgttcaatgttgctagttcttccatatttttcaagagaaacatgaaatccgaatttttatctaaaagcactatattttacaatttaattaaaacattttaacactgtgaagaccaatcatgtcagtttttacttctggactagtgtgtagagactaatacaaaactggatgcaaactattaattattaggcatgtgccaagacaagagcaacatgaataattaaaaatttgtgtatgctgtagtctgaagtatttcattgataatactttttttttgaacgaggagggtagtgttatcactagaatgcttaagaactcagcatatctgcattcaaaaaaacaatgactgaattaaaacacacaagatatgttgttaaacactaaatcagctttccgtgtctgcattttacaaatgctgaaacatttgtacatcccattgtctagaacaaaactcctgctttcattttgttcatcttgcttacactggaattaacaagttttagtatattatcttaaaagatttaaaatacttttgtggaaatgtaagatgtttaataaaacctattcttatttggaaatacattggtcttagtttttctgagtccatgatacataacataccctattttggtttgtaggaggaaaacaagtttatgtaatgaaatctaacactttcaggttaaaaaagtgtataatgtaatttaaatataaacatggaatccattaaataaaactaattttcttatctccccttatttgtagtattagattatttctatgtctttaagtttatatataaaggcagacatgcacaatggcacacacctgtaatcttagcactttgagaggccaaggtgggggaccacttgaggccaggagtttgagatcaacctgggcaacacagagagagaccccatctctaccaaaaaattaaaaattagccgagtgtggtgtcacatgcctgtagtcccagctcttcaggaggtgaagtggaaggatcactgagcccaggattttgaggccacaatgagtcatgatcataccactgcactccaccctgggtgacacagtgagaccctgactttaaaaaacatttaaaaagaaaaaattttacataaaaatataagcctttatataaatatcaatatttattgtattatttctttcaaaaggattttcagaggaagaattgttatctaaaactgtatgaataggacacggatgagaatgaggagtgattgcaaataggtaggtaggatccttctggggtgatagaaatgttctaaaattaaattgtagtgatgtctgcacaactttgtaagtttataaaaaataattgacttgtacacttaatgagttgtatggcatgtaaattacacttcattaaaactgttataattattttaaaagaagaaaagaaggtatgaatatattttgtaccaattatactcaaatgagtagagtattatgca

SEQ ID NO: 21644 - DNA, 3313 bp, Homo sapiens
tgattttcatcactatttccttggtccaaatacgtttataagggaattaaataacatagttggaaattttttaagccctcaattataatttttatacacatgtaagacaaaaaagtgagtacctttgctaatcacttttaaatttcaaatcttaggtcaacctaagatttttttttacactaaaaatatgaagttaaaatcaaatgttattttaaaatcagaaatactattgatggatttaaagacaagtaattttaatgttacagaatattagtaatacaatcttaaagcaaagtatgtttttatgtctaacaactaactkattcagttaattgatttaatttgaaaggctgtataatatataagataataggtatgacagatttcctactaaggagacaaggccagggtagagcatattgctacagaaaagatagacattctttaaagtttcacttaaaagatctgcaaaagccaaaaagaaacaaaaagtcacagatttatagatgagcaatgtttgatatataaaataaaaatattgttaaattctgacaagaacatgaaaacaaagccatgattcacccaccggaagcattagagcatgttgggaatgcacaaaaattgatgcatcctcttttggtgatgattccaggcagagttgagtatcagtggccctagcaattatatgtaaaggcaatgctacttgcaagtttcccatcatataaaacctgtttatgatgttctgccaaatgaatatcactcttagatttaaacttgaaggtactctgaaaaaataaaactaaggtaaaccctgtttttaaaagcaacaattaaaaagccaaagttttaaagcagagaaacatttgcaataagaaagtacttgtgtacctttcatgtgtcagggactattcagtggtgttacttacttcgttatagtcacttcaattcaatgagagttaagttttattatgccaataaagatgctcagatcttcattttctaatttaaagtttttgattactggcaaaatcatttcattagaaaaaaatatcaaacctgattttatatataataggattgtacttgactacatcatagcataagtttaacttttcttgttaatattttaaaaagtatttatgtaaataaacagtgcctgacacgtgaattacttacaaaaaagactatcatttgaggctataaaaagttaatatgcaaaaatattcatatctttactaaaaagcaaatcaacctatgaaataccaatgctactcaacaataatatcacaatatacatactaaactcagaagataagtttgttaaaacatgttattactttttatgaaagacaactaaacatatgccatctataacaagaaaggtattgttagacgtggttaaaattgctctgcagatatgagtctaataatgataaatgatatttaacctttgcagtcatcacatatcaatattactattactttcaacttacaactatgaaagcttaatgttaagaaattaagatttagaagggaaggggccagcatgtaattctaagtcttttgatttatagtccatattcaatgtatcactagtgaaatcatcttaaaatcctgactctgccactaatctttctcagcttaggaagtcatttagctgatgtggctccagttttctcactcaatgttataatagggttaaatcaaatgtcccaaactcaagttcttacaggaggcacacagatatgcatgtaagcgaatttggccagatggggacttcctcaaactagagaatgtttgtccttcctaaaagtggcccctactcctcagttcaagtcaattgttcaatgttgctagttcttccatatttttcaagagaaacatgaaatccgaatttttatctaaaagcactatattttacaatttaattaaaacattttaacactgtgaagaccaatcatgtcagtttttacttctggactagtgtgtagagactaatacaaaactggatgcaaactattaattattaggcatgtgccaagacaagagcaacatgaataattaaaaatttgtgtatgctgtagtctgaagtatttcattgataatactttttttttgaacgaggagggtagtgttatcactagaatgcttaagaactcagcatatctgcattcaaaaaaacaatgactgaattaaaacacacaagatatgttgttaaacactaaatcagctttccgtgtctgcattttacaaatgctgaaacatttgtacatcccattgtctagaacaaaactcctgctttcattttgttcatcttgcttacactggaattaacaagttttagtatattatcttaaaagatttaaaatacttttgtggaaatgtaagatgtttaataaaacctattcttatttggaaatacattggtcttagtttttctgagtccatgatacataacataccctattttggtttgtaggaggaaaacaagtttatgtaatgaaatctaacactttcaggttaaaaaagtgtataatgtaatttaaatataaacatggaatccattaaataaaactaattttcttatctccccttatttgtagtattagattatttctatgtctttaagtttatatataaaggcagacatgcacaatggcacacacctgtaatcttagcactttgagaggccaaggtgggggaccacttgaggccaggagtttgagatcaacctgggcaacacagagagagaccccatctctaccaaaaaattaaaaattagccgagtgtggtgtcacatgcctgtagtcccagctcttcaggaggtgaagtggaaggatcactgagcccaggattttgaggccacaatgagtcatgatcataccactgcactccaccctgggtgacacagtgagaccctgactttaaaaaacatttaaaaagaaaaaattttacataaaaatataagcctttatataaatatcaatatttattgtattatttctttcaaaaggattttcagaggaagaattgttatctaaaactgtatgaataggacacggatgagaatgaggagtgattgcaaataggtaggtaggatccttctggggtgatagaaatgttctaaaattaaattgtagtgatgtctgcacaactttgtaagtttataaaaaataattgacttgtacacttaatgagttgtatggcatgtaaattacacttcattaaaactgttataattattttaaaagaagaaaagaaggtatgaatatattttgtaccaattatactcaaatgagtagagtattatgca

SEQ ID NO: 21645 - DNA, 512 bp, Homo sapiens
aacaaactaggaatagaatggaacttctaactaccaaaaaaaagcatctataaaaaacctacagccaacaacatagtgcaatttgttgcaggatgtcagagcataagaagggtaggaagggtaggtaggagagctgcccagttcgtgaagtcagaattccaaaaaagtgataaggcgtctacctgaaacaacaaggaagaggcaagtgggttgtgctttgacataaagtttctgagtatgtgcaaggtaaggaaggttaggtacactaaaggcttctctgtgtagagattcagagcctgaaaagggtgagaaggcttcygcctggaggagagggcaaacgatcggaggcagctggacctagagtgggggttgaaaatcattcatttggtgtgtggcttgacatgttggagcctgggcagccagagaagggcatcctcacagagggttgcctggctcagtttgttgtaacctgaggaagatgagaaatatgcacaaagggaagcaaccaggca

SEQ ID NO: 21646 - DNA, 512 bp, Homo sapiens
aacaaactaggaatagaatggaacttctaactaccaaaaaaaagcatctataaaaaacctacagccaacaacatagtgcaatttgttgcaggatgtcagagcataagaagggtaggaagggtaggtaggagagctgcccagttcgtgaagtcagaattccaaaaaagtgataaggcgtctacctgaaacaacaaggaagaggcaagtgggttgtgctttgacataaagtttctgagtatgtgcaaggtaaggaaggttaggtacactaaaggcttctctgtgtagagattcagagcctgaaaagggtgagaaggcttctgcctggaggagagggcaaacgatcggaggcagctggacctagagtgggggttgaaamtcattcatttggtgtgtggcttgacatgttggagcctgggcagccagagaagggcatcctcacagagggttgcctggctcagtttgttgtaacctgaggaagatgagaaatatgcacaaagggaagcaaccaggca

SEQ ID NO: 21647 - DNA, 3120 bp, Homo sapiens
acctcatgtgatatttccaacatgtgggttatcttagagttggtatatgatgattttctcttcccttgagaataagtcacattttcctgaccatttttagaataagtacttttggattatatgctaaacagtgtgactataactctgtacaatattatggagaaactttctggccagaaaatttcctataaaagcaaaaaatggggatatcagtccatgtagactgactgttccatattttgattacsctccaaagcttgcctgcttttattcaatctccacaaccctcagatagatgttatctatattatgtgcagagtttacaaatggttatttgtgagaagatcagtttgttaggagctcacccctccacacaagtattggaaatcctctgaagtgatttttaattttggaggttgtgttatactttttctcttatcagttagaactttattatgatatagcaaattataaaaaccattatgctatcatattcataaatgaaagagagaactcaaagctaaattttcaaatatctggccatgaagactaactgcttgctacacgggattaagagaacaatgagaaaatgtctagtaataattataaaatataaaaactttgttaaaatctgatttgcaagcttttgtcaaagggccacctcatacagaatcttgaagacattaaataaccccaaatagagatccacagtaaacttatctggtagtaaattttactatactagacaaatctacagtgagattttctgtatttaaatattttctgtatttctgtattttccaaactgaatggtttatttagttaataagtcataccctaacttatttaccatttccagaaaataaccaagtacagaatatttactgataagatgcaatgctcaaaaccaaatattcgacagaaaaaaatttacctagcactacagtgaccaacaagtcaaaatcatttgtgacagactctattgaatatttagtttgatgacattatttgaaggtagaattaacttattttattaacttcgaagcccatatgttgacatgctatccacactaagctcagaatcataaattttgtctgaccattacaatgaaagaaagttccatataacttaaggcaataaatataaatactatgttattatacaacactacgtaatttaaactccatttgtgatttatccaaatgtccattagttattatattatctacaccttaaaaattccactgtagccctccaccccttctctcacagagagtgactttaccaagataattgtgactataatgtgtgaactactcagcttttccgtcaaaacacagtctgatcatttgcgttcctccttctctatgttctctgaatttctaaaaagaaaaaaaaagctttttaatataaaaaaaatttgctgatgcctgtcatggtgcaattgtacttacaatatttacaaattgagaaaatgcatgtacctgtggatttatcatccatccccacttacaacaagggtgcagtaagctgagaactttcaaaacttaataaaatactatctgatgtaatgcccaaatttacaggtatctctcttaaaagttctgactttaggtactctactgtgtgttaggatactaaggatactatactatgtcacatgagctgtgcacacatgatgaccgggttaaaaagaatgacaagatgactgttgttaaaaagaacgacaagaaagacgtgtgaaaagaatactaccaactacagagtttgcaaaactgttcaggacacagtttgcttctttgtgaatagaattacaaaattgcttatattcagccttttttcttgatgttgccaggaagctcccatcaattctgaaatttcacattagcaatcatattggatttgtattttcttgatattctacctttttatatttcatttgtttgcttgtcactgtatttaatatcattctactagagcttaaaaagacactacaagtattttatgaaacaactcaaagaagtaggaaagaaaagcaggcagcatattaataaaaaatgtgaattacaaaaatattcctatgcaagatcaacaatggaagaaccaggatgcaaacccaacaaaaagacccatgaaagaagaagtagctggacaggcacaaattcatttctagagctagtaagacaaaaacaaaaatgatatggaaaatatatgatagcaagtattgttaccttgacataaaaataatagcattattattcttcaatattattatggttattaaagtcactgagaaaaaaagatcttttaatataggtaaattcaaactttcctctctctctctctctatatatatatatatacatatgtgtgtgtgtgtgtgcgtatatatatatatatatgacataaaaataaaaagagaaataccaatgcaaaaatacaaaggccaaagagggacttttttaaatgtttttcctttccataacacaatcttcacattaattatttaaattgagttcaataaataaaccaagcttccatacaagacaagtactccttcagaattataaacactttgagtataatgtgtaattctctttcggctccaagtagtttgagacttcacaattcccaatgtgatttaaacagaacctttatatatttccctagccaggtgtactgcacatttaaaactaactcatatatgtgcatgctatatcttacctagagtctttgttcttaagaatcaatgaatgagttcatattaagtgcccattttatagttactgctgtcaaatagcattttaagtatctgttttaatatggatggtttgatttctgaaacaacctttattctcttgagagttaataccctaaaatagagaatatagaactatttttttctaaagtatagaaaaatacaaatgatctataaacatttgaacaagtatgctttctgaagttaagaggggaaaattaactggtttctccctcccaccaaaatataaaatacaaactttgttctacagattacttgaatgcactattcaattatttcatatatattttgagaaataaaaagttataataatccttaatcactaaaatattagtcattt

SEQ ID NO: 21648 - DNA, 3120 bp, Homo sapiens
acctcatgtgatatttccaacatgtgggttatcttagagttggtatatgatgattttctcttcccttgagaataagtcacattttcctgaccatttttagaataagtacttttggattatatgctaaacagtgtgactataactctgtacaatattatggagaaactttctggccagaaaatttcctataaaagcaaaaaatggggatatcagtccatgtagactgactgttccatattttgattacgctccaaagcttgcctgcttttattcaatctccacaaccctcagatagatgttatctatattatgtgcagagtttacaaatggttatttgtgagaagatcagtttgttaggagctcacccctccacacaagtattggaaatcctctgaagtgatttttaattttggaggttgtgttatactttttctcttatcagttagaactttattatgatatagcaaattataaaaaccattatgctatcatattcataaatgaaagagagaactcaaagctaaattttcaaatatctggccatgaagactaactgcttgctacacgggattaagagaacaatgagaaaatgtctagtaataattataaaatataaaaactttgttaaaatctgatttgcaagcttttgtcaaagggccamctcatacagaatcttgaagacattaaataaccccaaatagagatccacagtaaacttatctggtagtaaattttactatactagacaaatctacagtgagattttctgtatttaaatattttctgtatttctgtattttccaaactgaatggtttatttagttaataagtcataccctaacttatttaccatttccagaaaataaccaagtacagaatatttactgataagatgcaatgctcaaaaccaaatattcgacagaaaaaaatttacctagcactacagtgaccaacaagtcaaaatcatttgtgacagactctattgaatatttagtttgatgacattatttgaaggtagaattaacttattttattaacttcgaagcccatatgttgacatgctatccacactaagctcagaatcataaattttgtctgaccattacaatgaaagaaagttccatataacttaaggcaataaatataaatactatgttattatacaacactacgtaatttaaactccatttgtgatttatccaaatgtccattagttattatattatctacaccttaaaaattccactgtagccctccaccccttctctcacagagagtgactttaccaagataattgtgactataatgtgtgaactactcagcttttccgtcaaaacacagtctgatcatttgcgttcctccttctctatgttctctgaatttctaaaaagaaaaaaaaagctttttaatataaaaaaaatttgctgatgcctgtcatggtgcaattgtacttacaatatttacaaattgagaaaatgcatgtacctgtggatttatcatccatccccacttacaacaagggtgcagtaagctgagaactttcaaaacttaataaaatactatctgatgtaatgcccaaatttacaggtatctctcttaaaagttctgactttaggtactctactgtgtgttaggatactaaggatactatactatgtcacatgagctgtgcacacatgatgaccgggttaaaaagaatgacaagatgactgttgttaaaaagaacgacaagaaagacgtgtgaaaagaatactaccaactacagagtttgcaaaactgttcaggacacagtttgcttctttgtgaatagaattacaaaattgcttatattcagccttttttcttgatgttgccaggaagctcccatcaattctgaaatttcacattagcaatcatattggatttgtattttcttgatattctacctttttatatttcatttgtttgcttgtcactgtatttaatatcattctactagagcttaaaaagacactacaagtattttatgaaacaactcaaagaagtaggaaagaaaagcaggcagcatattaataaaaaatgtgaattacaaaaatattcctatgcaagatcaacaatggaagaaccaggatgcaaacccaacaaaaagacccatgaaagaagaagtagctggacaggcacaaattcatttctagagctagtaagacaaaaacaaaaatgatatggaaaatatatgatagcaagtattgttaccttgacataaaaataatagcattattattcttcaatattattatggttattaaagtcactgagaaaaaaagatcttttaatataggtaaattcaaactttcctctctctctctctctatatatatatatatacatatgtgtgtgtgtgtgtgcgtatatatatatatatatgacataaaaataaaaagagaaataccaatgcaaaaatacaaaggccaaagagggacttttttaaatgtttttcctttccataacacaatcttcacattaattatttaaattgagttcaataaataaaccaagcttccatacaagacaagtactccttcagaattataaacactttgagtataatgtgtaattctctttcggctccaagtagtttgagacttcacaattcccaatgtgatttaaacagaacctttatatatttccctagccaggtgtactgcacatttaaaactaactcatatatgtgcatgctatatcttacctagagtctttgttcttaagaatcaatgaatgagttcatattaagtgcccattttatagttactgctgtcaaatagcattttaagtatctgttttaatatggatggtttgatttctgaaacaacctttattctcttgagagttaataccctaaaatagagaatatagaactatttttttctaaagtatagaaaaatacaaatgatctataaacatttgaacaagtatgctttctgaagttaagaggggaaaattaactggtttctccctcccaccaaaatataaaatacaaactttgttctacagattacttgaatgcactattcaattatttcatatatattttgagaaataaaaagttataataatccttaatcactaaaatattagtcattt

SEQ ID NO: 21649 - DNA, 3120 bp, Homo sapiens
acctcatgtgatatttccaacatgtgggttatcttagagttggtatatgatgattttctcttcccttgagaataagtcacattttcctgaccatttttagaataagtacttttggattatatgctaaacagtgtgactataactctgtacaatattatggagaaactttctggccagaaaatttcctataaaagcaaaaaatggggatatcagtccatgtagactgactgttccatattttgattacgctccaaagcttgcctgcttttattcaatctccacaaccctcagatagatgttatctatattatgtgcagagtttacaaatggttatttgtgagaagatcagtttgttaggagctcacccctccacacaagtattggaaatcctctgaagtgatttttaattttggaggttgtgttatactttttctcttatcagttagaactttattatgatatagcaaattataaaaaccattatgctatcatattcataaatgaaagagagaactcaaagctaaattttcaaatatctggccatgaagactaactgcttgctacacgggattaagagaacaatgagaaaatgtctagtaataattataaaatataaaaactttgttaaaatctgatttgcaagcttttgtcaaagggccacctcatacagaatcttgaagacattaaataaccccaaatagagatccacagtaaacttatctggtagtaaattttactatactagacaaatctacagtgagaytttctgtatttaaatattttctgtatttctgtattttccaaactgaatggtttatttagttaataagtcataccctaacttatttaccatttccagaaaataaccaagtacagaatatttactgataagatgcaatgctcaaaaccaaatattcgacagaaaaaaatttacctagcactacagtgaccaacaagtcaaaatcatttgtgacagactctattgaatatttagtttgatgacattatttgaaggtagaattaacttattttattaacttcgaagcccatatgttgacatgctatccacactaagctcagaatcataaattttgtctgaccattacaatgaaagaaagttccatataacttaaggcaataaatataaatactatgttattatacaacactacgtaatttaaactccatttgtgatttatccaaatgtccattagttattatattatctacaccttaaaaattccactgtagccctccaccccttctctcacagagagtgactttaccaagataattgtgactataatgtgtgaactactcagcttttccgtcaaaacacagtctgatcatttgcgttcctccttctctatgttctctgaatttctaaaaagaaaaaaaaagctttttaatataaaaaaaatttgctgatgcctgtcatggtgcaattgtacttacaatatttacaaattgagaaaatgcatgtacctgtggatttatcatccatccccacttacaacaagggtgcagtaagctgagaactttcaaaacttaataaaatactatctgatgtaatgcccaaatttacaggtatctctcttaaaagttctgactttaggtactctactgtgtgttaggatactaaggatactatactatgtcacatgagctgtgcacacatgatgaccgggttaaaaagaatgacaagatgactgttgttaaaaagaacgacaagaaagacgtgtgaaaagaatactaccaactacagagtttgcaaaactgttcaggacacagtttgcttctttgtgaatagaattacaaaattgcttatattcagccttttttcttgatgttgccaggaagctcccatcaattctgaaatttcacattagcaatcatattggatttgtattttcttgatattctacctttttatatttcatttgtttgcttgtcactgtatttaatatcattctactagagcttaaaaagacactacaagtattttatgaaacaactcaaagaagtaggaaagaaaagcaggcagcatattaataaaaaatgtgaattacaaaaatattcctatgcaagatcaacaatggaagaaccaggatgcaaacccaacaaaaagacccatgaaagaagaagtagctggacaggcacaaattcatttctagagctagtaagacaaaaacaaaaatgatatggaaaatatatgatagcaagtattgttaccttgacataaaaataatagcattattattcttcaatattattatggttattaaagtcactgagaaaaaaagatcttttaatataggtaaattcaaactttcctctctctctctctctatatatatatatatacatatgtgtgtgtgtgtgtgcgtatatatatatatatatgacataaaaataaaaagagaaataccaatgcaaaaatacaaaggccaaagagggacttttttaaatgtttttcctttccataacacaatcttcacattaattatttaaattgagttcaataaataaaccaagcttccatacaagacaagtactccttcagaattataaacactttgagtataatgtgtaattctctttcggctccaagtagtttgagacttcacaattcccaatgtgatttaaacagaacctttatatatttccctagccaggtgtactgcacatttaaaactaactcatatatgtgcatgctatatcttacctagagtctttgttcttaagaatcaatgaatgagttcatattaagtgcccattttatagttactgctgtcaaatagcattttaagtatctgttttaatatggatggtttgatttctgaaacaacctttattctcttgagagttaataccctaaaatagagaatatagaactatttttttctaaagtatagaaaaatacaaatgatctataaacatttgaacaagtatgctttctgaagttaagaggggaaaattaactggtttctccctcccaccaaaatataaaatacaaactttgttctacagattacttgaatgcactattcaattatttcatatatattttgagaaataaaaagttataataatccttaatcactaaaatattagtcattt

SEQ ID NO: 21650 - DNA, 3120 bp, Homo sapiens
acctcatgtgatatttccaacatgtgggttatcttagagttggtatatgatgattttctcttcccttgagaataagtcacattttcctgaccatttttagaataagtacttttggattatatgctaaacagtgtgactataactctgtacaatattatggagaaactttctggccagaaaatttcctataaaagcaaaaaatggggatatcagtccatgtagactgactgttccatattttgattacgctccaaagcttgcctgcttttattcaatctccacaaccctcagatagatgttatctatattatgtgcagagtttacaaatggttatttgtgagaagatcagtttgttaggagctcacccctccacacaagtattggaaatcctctgaagtgatttttaattttggaggttgtgttatactttttctcttatcagttagaactttattatgatatagcaaattataaaaaccattatgctatcatattcataaatgaaagagagaactcaaagctaaattttcaaatatctggccatgaagactaactgcttgctacacgggattaagagaacaatgagaaaatgtctagtaataattataaaatataaaaactttgttaaaatctgatttgcaagcttttgtcaaagggccacctcatacagaatcttgaagacattaaataaccccaaatagagatccacagtaaacttatctggtagtaaattttactatactagacaaatctacagtgagattttctgtatttaaatattttctgtatttctgtattttccaaactgaatggtttatttagttaataagtcataccctaacttatttaccrtttccagaaaataaccaagtacagaatatttactgataagatgcaatgctcaaaaccaaatattcgacagaaaaaaatttacctagcactacagtgaccaacaagtcaaaatcatttgtgacagactctattgaatatttagtttgatgacattatttgaaggtagaattaacttattttattaacttcgaagcccatatgttgacatgctatccacactaagctcagaatcataaattttgtctgaccattacaatgaaagaaagttccatataacttaaggcaataaatataaatactatgttattatacaacactacgtaatttaaactccatttgtgatttatccaaatgtccattagttattatattatctacaccttaaaaattccactgtagccctccaccccttctctcacagagagtgactttaccaagataattgtgactataatgtgtgaactactcagcttttccgtcaaaacacagtctgatcatttgcgttcctccttctctatgttctctgaatttctaaaaagaaaaaaaaagctttttaatataaaaaaaatttgctgatgcctgtcatggtgcaattgtacttacaatatttacaaattgagaaaatgcatgtacctgtggatttatcatccatccccacttacaacaagggtgcagtaagctgagaactttcaaaacttaataaaatactatctgatgtaatgcccaaatttacaggtatctctcttaaaagttctgactttaggtactctactgtgtgttaggatactaaggatactatactatgtcacatgagctgtgcacacatgatgaccgggttaaaaagaatgacaagatgactgttgttaaaaagaacgacaagaaagacgtgtgaaaagaatactaccaactacagagtttgcaaaactgttcaggacacagtttgcttctttgtgaatagaattacaaaattgcttatattcagccttttttcttgatgttgccaggaagctcccatcaattctgaaatttcacattagcaatcatattggatttgtattttcttgatattctacctttttatatttcatttgtttgcttgtcactgtatttaatatcattctactagagcttaaaaagacactacaagtattttatgaaacaactcaaagaagtaggaaagaaaagcaggcagcatattaataaaaaatgtgaattacaaaaatattcctatgcaagatcaacaatggaagaaccaggatgcaaacccaacaaaaagacccatgaaagaagaagtagctggacaggcacaaattcatttctagagctagtaagacaaaaacaaaaatgatatggaaaatatatgatagcaagtattgttaccttgacataaaaataatagcattattattcttcaatattattatggttattaaagtcactgagaaaaaaagatcttttaatataggtaaattcaaactttcctctctctctctctctatatatatatatatacatatgtgtgtgtgtgtgtgcgtatatatatatatatatgacataaaaataaaaagagaaataccaatgcaaaaatacaaaggccaaagagggacttttttaaatgtttttcctttccataacacaatcttcacattaattatttaaattgagttcaataaataaaccaagcttccatacaagacaagtactccttcagaattataaacactttgagtataatgtgtaattctctttcggctccaagtagtttgagacttcacaattcccaatgtgatttaaacagaacctttatatatttccctagccaggtgtactgcacatttaaaactaactcatatatgtgcatgctatatcttacctagagtctttgttcttaagaatcaatgaatgagttcatattaagtgcccattttatagttactgctgtcaaatagcattttaagtatctgttttaatatggatggtttgatttctgaaacaacctttattctcttgagagttaataccctaaaatagagaatatagaactatttttttctaaagtatagaaaaatacaaatgatctataaacatttgaacaagtatgctttctgaagttaagaggggaaaattaactggtttctccctcccaccaaaatataaaatacaaactttgttctacagattacttgaatgcactattcaattatttcatatatattttgagaaataaaaagttataataatccttaatcactaaaatattagtcattt

SEQ ID NO: 21651 - DNA, 3120 bp, Homo sapiens
acctcatgtgatatttccaacatgtgggttatcttagagttggtatatgatgattttctcttcccttgagaataagtcacattttcctgaccatttttagaataagtacttttggattatatgctaaacagtgtgactataactctgtacaatattatggagaaactttctggccagaaaatttcctataaaagcaaaaaatggggatatcagtccatgtagactgactgttccatattttgattacgctccaaagcttgcctgcttttattcaatctccacaaccctcagatagatgttatctatattatgtgcagagtttacaaatggttatttgtgagaagatcagtttgttaggagctcacccctccacacaagtattggaaatcctctgaagtgatttttaattttggaggttgtgttatactttttctcttatcagttagaactttattatgatatagcaaattataaaaaccattatgctatcatattcataaatgaaagagagaactcaaagctaaattttcaaatatctggccatgaagactaactgcttgctacacgggattaagagaacaatgagaaaatgtctagtaataattataaaatataaaaactttgttaaaatctgatttgcaagcttttgtcaaagggccacctcatacagaatcttgaagacattaaataaccccaaatagagatccacagtaaacttatctggtagtaaattttactatactagacaaatctacagtgagattttctgtatttaaatattttctgtatttctgtattttccaaactgaatggtttatttagttaataagtcataccctaacttatttaccatttccagaaaataaccaagtacagaatatttactgataagatgcaatgctcaaaaccaaatattcgacagaaaaaaatttacctagcactacagtgaccaacaagtcaaaatcatttgtgacagactctattgaatatttagtttgatgacattatttgaaggtagaattaacttattttattaacttcgaagcccatatgttgacatgctatccacactaagctcagaatcataaattttgtctgaccattacaatgaaagaaagttccatataacttaaggcaataaatataaatactatgttattatacaacactaygtaatttaaactccatttgtgatttatccaaatgtccattagttattatattatctacaccttaaaaattccactgtagccctccaccccttctctcacagagagtgactttaccaagataattgtgactataatgtgtgaactactcagcttttccgtcaaaacacagtctgatcatttgcgttcctccttctctatgttctctgaatttctaaaaagaaaaaaaaagctttttaatataaaaaaaatttgctgatgcctgtcatggtgcaattgtacttacaatatttacaaattgagaaaatgcatgtacctgtggatttatcatccatccccacttacaacaagggtgcagtaagctgagaactttcaaaacttaataaaatactatctgatgtaatgcccaaatttacaggtatctctcttaaaagttctgactttaggtactctactgtgtgttaggatactaaggatactatactatgtcacatgagctgtgcacacatgatgaccgggttaaaaagaatgacaagatgactgttgttaaaaagaacgacaagaaagacgtgtgaaaagaatactaccaactacagagtttgcaaaactgttcaggacacagtttgcttctttgtgaatagaattacaaaattgcttatattcagccttttttcttgatgttgccaggaagctcccatcaattctgaaatttcacattagcaatcatattggatttgtattttcttgatattctacctttttatatttcatttgtttgcttgtcactgtatttaatatcattctactagagcttaaaaagacactacaagtattttatgaaacaactcaaagaagtaggaaagaaaagcaggcagcatattaataaaaaatgtgaattacaaaaatattcctatgcaagatcaacaatggaagaaccaggatgcaaacccaacaaaaagacccatgaaagaagaagtagctggacaggcacaaattcatttctagagctagtaagacaaaaacaaaaatgatatggaaaatatatgatagcaagtattgttaccttgacataaaaataatagcattattattcttcaatattattatggttattaaagtcactgagaaaaaaagatcttttaatataggtaaattcaaactttcctctctctctctctctatatatatatatatacatatgtgtgtgtgtgtgtgcgtatatatatatatatatgacataaaaataaaaagagaaataccaatgcaaaaatacaaaggccaaagagggacttttttaaatgtttttcctttccataacacaatcttcacattaattatttaaattgagttcaataaataaaccaagcttccatacaagacaagtactccttcagaattataaacactttgagtataatgtgtaattctctttcggctccaagtagtttgagacttcacaattcccaatgtgatttaaacagaacctttatatatttccctagccaggtgtactgcacatttaaaactaactcatatatgtgcatgctatatcttacctagagtctttgttcttaagaatcaatgaatgagttcatattaagtgcccattttatagttactgctgtcaaatagcattttaagtatctgttttaatatggatggtttgatttctgaaacaacctttattctcttgagagttaataccctaaaatagagaatatagaactatttttttctaaagtatagaaaaatacaaatgatctataaacatttgaacaagtatgctttctgaagttaagaggggaaaattaactggtttctccctcccaccaaaatataaaatacaaactttgttctacagattacttgaatgcactattcaattatttcatatatattttgagaaataaaaagttataataatccttaatcactaaaatattagtcattt

SEQ ID NO: 21652 - DNA, 3120 bp, Homo sapiens
acctcatgtgatatttccaacatgtgggttatcttagagttggtatatgatgattttctcttcccttgagaataagtcacattttcctgaccatttttagaataagtacttttggattatatgctaaacagtgtgactataactctgtacaatattatggagaaactttctggccagaaaatttcctataaaagcaaaaaatggggatatcagtccatgtagactgactgttccatattttgattacgctccaaagcttgcctgcttttattcaatctccacaaccctcagatagatgttatctatattatgtgcagagtttacaaatggttatttgtgagaagatcagtttgttaggagctcacccctccacacaagtattggaaatcctctgaagtgatttttaattttggaggttgtgttatactttttctcttatcagttagaactttattatgatatagcaaattataaaaaccattatgctatcatattcataaatgaaagagagaactcaaagctaaattttcaaatatctggccatgaagactaactgcttgctacacgggattaagagaacaatgagaaaatgtctagtaataattataaaatataaaaactttgttaaaatctgatttgcaagcttttgtcaaagggccacctcatacagaatcttgaagacattaaataaccccaaatagagatccacagtaaacttatctggtagtaaattttactatactagacaaatctacagtgagattttctgtatttaaatattttctgtatttctgtattttccaaactgaatggtttatttagttaataagtcataccctaacttatttaccatttccagaaaataaccaagtacagaatatttactgataagatgcaatgctcaaaaccaaatattcgacagaaaaaaatttacctagcactacagtgaccaacaagtcaaaatcatttgtgacagactctattgaatatttagtttgatgacattatttgaaggtagaattaacttattttattaacttcgaagcccatatgttgacatgctatccacactaagctcagaatcataaattttgtctgaccattacaatgaaagaaagttccatataacttaaggcaataaatataaatactatgttattatacaacactacgtaatttaaactccatttgtgatttatccaaatgtccattagttattatattatctacaccttaaaaattccactgtagccctccaccccttctctcacagagagtgactttaccaagataattgtgactataatgtgtgaactactcagcttttccgtcaaaacacagtctgatcatttgcgttcctccttctctatgttctctgaatttctaaaaagaaaaaaaaagctttttaatataaaaaaaatttgctgatgcctgtcatggtgcaattgtacttacaatatttacaaattgagaaaatgcatgtacctgtggatttatcatccatccccacttacaacaagggtgcagtaagctgagaactttcaaaacttaataaaatactatctgatgtaatgcccaaatttacaggtatctctcttaaaagttctgactttaggtactctactgtgtgttaggatactaaggatactatactatgtcacatgagctgtgcacacatgatgaccgggttaaaaagaatgacaagatgactgttgttaaaaagaacgacaagaaagacgtgtgaaaagaatactaccaactacagagtttgcaaaactgttcaggacacagtttgcttctttgtgaatagaattacaaaattgcttatattcagccttttttcttgatgttgccaggaagctcccatcaattctgaaatttcacattagcaatcatattggatttgtattttcttgatattctacctttttatatttcatttgtttgcttgtcactgtatttaatatcattctactagagcttaaaaagacactacaagtattttatgaaacaactcaaagaagtaggaaagaaaagcaggcagcatattaataaaaaatgtgaattacaaaaatattcctatgcaagatcaacaatggaagaaccaggatgcaaacccaacaaaaagacccatgaaagaagaagtagctggacaggcacaaattcatttctagagctagtaagacaaaaacaaaaatgatatggaaaatatatgatagcaagtattgttaccttgacataaaaataatagcattattattcttcaatattattatggttattaaagtcactgagaaaaaaagatcttttaatataggtaaattcaaactttcctctctctctctctctatatatatatatatacatatgtgtgtgtgtgtgtgcgtatatatatatatatatgacataaaaataaaaagagaaataccaatgcaaaaatacaaaggccaaagagggacttttttaaatgtttttcctttccataacacaatcttcacattaattatttaaattgagttcaataaataaaccaagcttccatacaagacaagtactccttcagaattataaacactttgagtataatgtgtaattctctttcggctccaagtagtttgagacttcacaattcccaatgtgatttaaacagaacctttatatatttccctagccaggtgtactgcacatttaaaactaactcatatatgtgcatgctatatcttacctagagtctttgttcttaagaatcaatgaatgagttcatattaagtgcccattttatagttactgctgtcaaatagcattttaagtatctgttttaatatggatggtttgatttctgaaacaacctttattctcttgagagttaataccctaaaatagagaatatagaamtatttttttctaaagtatagaaaaatacaaatgatctataaacatttgaacaagtatgctttctgaagttaagaggggaaaattaactggtttctccctcccaccaaaatataaaatacaaactttgttctacagattacttgaatgcactattcaattatttcatatatattttgagaaataaaaagttataataatccttaatcactaaaatattagtcattt

SEQ ID NO: 21653 - DNA, 1524 bp, Homo sapiens
tggctgctcgtttcccctatatggctccatttgtagcacagtagtagcactgaggcttgtgcatgctgggcaaggctaagagggctcaaagagcaaccagtcacctctgcgagggtgtgccaggagctgggggcacagccaccaacctcactcgctgcaggacatggaacatcagttcttctaacaaaaaggtagggccaagggccatctgcttttcctaaggcctttgctmtatcagccatcaggtggcagccactcaggctgtgggaacatggccatccacttccttgactgggtaaggttggtggctggtccacctcctccagacgcacccctgcagaggtggctggttgctcattgagccagtttggccttgtctggcacgcacagatttgaggtactaacacgctgctctgagtgagcttgtcctgccttggcacaaattctatgtctggccagggccacagaagaccaagtcccctggatggtgatcctggctgctttctgcagtggaacataaactccttctcaagatggcctgtggttggcctcttggcaaccaagaatcgtgcagtggcataggagccctgaggcatggattggagagccgaaggcagcgcataccctgctcctgagcctgctgcttgtttcctctctgtggctccatttgtagcacagttgttgcactgaagcttgtacatgcccggcaaggccaagctggctcaaagagcaaccagccacctctgcaaggaagaacaggtgcaccagttaccaactacaggtcggagatggtacatcagttcttcaaccctagagttgggccacagtgccatctgcttttcctaaggccactgctccatcaggaattaggtggcagccaaggcaggacaaacacactcggagcagtgtgttagtacctggggcctgtgcatgccagggaggccaagctggctcaaagagcaaccagacacctctgcaaggtttggccagggctatagaaggtccccctggatggtaatcctggctgctttctgcacttgaatataaagtcctccccaagatggcctgtggtctgcctcttggcaaccaagaagcccgcagtgccatgtgacacctgaggcatggactggagccccaaaggcagggtacacccttctcctgaacctgcttcttgtttcctctatatggctccatttgtggcaaagttgttgcactgaagcttgtgcatgccgggcaaggacaagctggctcaaagagcaaccagccacctctgcaaaggtgtagcaggagccggtgtaccagtcaccaattagcgtccggacatgtgcatcacttcttccaccctaaaggtagggccacagtgccatctgcttttcttaaggcctctgctccatcagcaataaggtggcagacactcaggctgtgggaacctggccatccccacttcctcgagcgggtgaggtggtggatgctccgcctgcactaggcgcacccttgcagaggtggctggttgctctttgagcc

SEQ ID NO: 21654 - DNA, 1524 bp, Homo sapiens
tggctgctcgtttcccctatatggctccatttgtagcacagtagtagcactgaggcttgtgcatgctgggcaaggctaagagggctcaaagagcaaccagtcacctctgcgagggtgtgccaggagctgggggcacagccaccaacctcactcgctgcaggacatggaacatcagttcttctaacaaaaaggtagggccaagggccatctgcttttcctaaggcctttgctayatcagccatcaggtggcagccactcaggctgtgggaacatggccatccacttccttgactgggtaaggttggtggctggtccacctcctccagacgcacccctgcagaggtggctggttgctcattgagccagtttggccttgtctggcacgcacagatttgaggtactaacacgctgctctgagtgagcttgtcctgccttggcacaaattctatgtctggccagggccacagaagaccaagtcccctggatggtgatcctggctgctttctgcagtggaacataaactccttctcaagatggcctgtggttggcctcttggcaaccaagaatcgtgcagtggcataggagccctgaggcatggattggagagccgaaggcagcgcataccctgctcctgagcctgctgcttgtttcctctctgtggctccatttgtagcacagttgttgcactgaagcttgtacatgcccggcaaggccaagctggctcaaagagcaaccagccacctctgcaaggaagaacaggtgcaccagttaccaactacaggtcggagatggtacatcagttcttcaaccctagagttgggccacagtgccatctgcttttcctaaggccactgctccatcaggaattaggtggcagccaaggcaggacaaacacactcggagcagtgtgttagtacctggggcctgtgcatgccagggaggccaagctggctcaaagagcaaccagacacctctgcaaggtttggccagggctatagaaggtccccctggatggtaatcctggctgctttctgcacttgaatataaagtcctccccaagatggcctgtggtctgcctcttggcaaccaagaagcccgcagtgccatgtgacacctgaggcatggactggagccccaaaggcagggtacacccttctcctgaacctgcttcttgtttcctctatatggctccatttgtggcaaagttgttgcactgaagcttgtgcatgccgggcaaggacaagctggctcaaagagcaaccagccacctctgcaaaggtgtagcaggagccggtgtaccagtcaccaattagcgtccggacatgtgcatcacttcttccaccctaaaggtagggccacagtgccatctgcttttcttaaggcctctgctccatcagcaataaggtggcagacactcaggctgtgggaacctggccatccccacttcctcgagcgggtgaggtggtggatgctccgcctgcactaggcgcacccttgcagaggtggctggttgctctttgagcc

SEQ ID NO: 21655 - DNA, 518 bp, Homo sapiens
agttactgaagaagcagaggcaatgaacttcccttaacgttgacctaagtggataaacgcatggcaacatgctgagtgacttcaacaatgcagacacactcaatgtcaaaatgccacagggctacccggtgctgcaaggctgggactcggtttccgtaagactgtcttaaggcagtgrgatttctgatggaactgtggacataagcatatgcccccatacgccactcccactactcactgtaggaacagcagtgtaacatttgtcccggctaatgatgacaaacaatccccaagtccctatgcaaaccaagtgctggggccacacagtggcctgagcaacatacctatgggtagtaactattgagaagacatttccaagggattgccattccaacaggcgtggggaatgctcaacatcaccaatcatcagagatgaggtaccggtgccatcacacgctggtcagagtggccatttgtcctaagtcaaaacataacatgctggtgtggcagcagagaaa

SEQ ID NO: 21656 - DNA, 629 bp, Homo sapiens
taaaattgaaaatttttaccagatgacagaaatcaaacacttattttgttataggtaaacttccttcttcctacattcttataaaaatatattagggatttgmgttacctggaaaaaacttttcttttcctcagaaatatggagggatgtgagtcctagatgtcaagaggacattttgagcagaaacacaaattttcaaaagtttttcttccaacttgctctctacaccagtgctctgggaagtcttttggtatgactagttagaagttatgtttgtgcttcttttagtaatatatgtctctttaataggcttccaaccagaatcattaataaaccaacattaagaaattatggaatgaaaagggattgacacaggagtgtcatgattctcagcagtgctcaaaaggtgaagccatcatcgttttgacaggaaccaaatctctaaatgatttattttataaatcatattatgtcttcagctagacagagttttattgtggccggccccaaaattaaaaatgcactttatgaaactcacattctcctgggatgtagcctctatagcattaggaaagttatcttccaagatgaatctttaaaaagttaatgattacatattctctgaagaa

SEQ ID NO: 21657 - DNA, 629 bp, Homo sapiens
taaaattgaaaatttttaccagatgacagaaatcaaacacttattttgttataggtaaacttccttcttcctacattcttataaaaatatattagggatttgagttacctggaaaaaacttttcttttcctcagaaatatggagggatgtgagtcctagatgtcaagaggacattttgagcagaaacacaaattttcaaaagtttttcttccaacttgctctctacaccagtgctctgggaagtcttttggtatgactagttagaagttatgtttgtgcttcttttagtaatatatgtctctttaataggcttccaaccagaatcattaataaaccaacattaagaaattatggaatgaaaagggattgacacaggagtgtcatgattctcagcagtgctcaaaaggtgaagccatcawcgttttgacaggaaccaaatctctaaatgatttattttataaatcatattatgtcttcagctagacagagttttattgtggccggccccaaaattaaaaatgcactttatgaaactcacattctcctgggatgtagcctctatagcattaggaaagttatcttccaagatgaatctttaaaaagttaatgattacatattctctgaagaa

SEQ ID NO: 21658 - DNA, 629 bp, Homo sapiens
taaaattgaaaatttttaccagatgacagaaatcaaacacttattttgttataggtaaacttccttcttcctacattcttataaaaatatattagggatttgagttacctggaaaaaacttttcttttcctcagaaatatggagggatgtgagtcctagatgtcaagaggacattttgagcagaaacacaaattttcaaaagtttttcttccaacttgctctctacaccagtgctctgggaagtcttttggtatgactagttagaagttatgtttgtgcttcttttagtaatatatgtctctttaataggcttccaaccagaatcattaataaaccaacattaagaaattatggaatgaaaagggattgacacaggagtgtcatgattctcagcagtgctcaaaaggtgaagccatcatcgttttgacaggaaccaaatctctaaatgatttattttataaatcatattatgtctycagctagacagagttttattgtggccggccccaaaattaaaaatgcactttatgaaactcacattctcctgggatgtagcctctatagcattaggaaagttatcttccaagatgaatctttaaaaagttaatgattacatattctctgaagaa

SEQ ID NO: 21659 - DNA, 629 bp, Homo sapiens
taaaattgaaaatttttaccagatgacagaaatcaaacacttattttgttataggtaaacttccttcttcctacattcttataaaaatatattagggatttgagttacctggaaaaaacttttcttttcctcagaaatatggagggatgtgagtcctagatgtcaagaggacattttgagcagaaacacaaattttcaaaagtttttcttccaacttgctctctacaccagtgctctgggaagtcttttggtatgactagttagaagttatgtttgtgcttcttttagtaatatatgtctctttaataggcttccaaccagaatcattaataaaccaacattaagaaattatggaatgaaaagggattgacacaggagtgtcatgattctcagcagtgctcaaaaggtgaagccatcatcgttttgacaggaaccaaatctctaaatgatttattttataaatcatattatgtcttcagctagacagagttttattgtgrccggccccaaaattaaaaatgcactttatgaaactcacattctcctgggatgtagcctctatagcattaggaaagttatcttccaagatgaatctttaaaaagttaatgattacatattctctgaagaa

SEQ ID NO: 21660 - DNA, 729 bp, Homo sapiens
tctgtctaaaagcaaacttccactttgagagactacagaggaaaatgtttattcagacctttattatcacttagtcataatacttagaaacttctaaaacatagctttgatattctcgtctgctcaaaagctgtcaatgatttcaagttcccaagttctccacaaattgacttcaaatgactttcttggtgttatttttccctactctcttttgcagataaattagacagtagacagcatttcattctctgaatagcttcagtttcttatgttctcttctttgtgatcattttctgtatttggaattctatttatctccatctacatctgtacaaaccctccttcaaggtccagttcaaaagacatttttttttcccaaaatgttttcctctcttcccctaaccaaagcacattttccattgttgcgtgtttttttttttgagacagaatctcgctctgtccccaggctgaatgcagtgtcatgatctcagctcactgcaacctctgcctcccaggttcaaacaattcttctgcttcagcctcctgagtagctgggaatgcaggcatgcgccaccacacccagctaatttttgtatttttagtayaaacggggtttcaccgtgttgaccaggatggtctctatctcttgaccttgtcatccacctgccttggcctcctgaagtgctgggattacaggcgtgagccactgcacccagccccatccttgca

SEQ ID NO: 21661 - DNA, 729 bp, Homo sapiens
tctgtctaaaagcaaacttccactttgagagactacagaggaaaatgtttattcagacctttattatcacttagtcataatacttagaaacttctaaaacatagctttgatattctcgtctgctcaaaagctgtcaatgatttcaagttcccaagttctccacaaattgacttcaaatgactttcttggtgttatttttccctactctcttttgcagataaattagacagtagacagcatttcattctctgaatagcttcagtttcttatgttctcttctttgtgatcattttctgtatttggaattctatttatctccatctacatctgtacaaaccctccttcaaggtccagttcaaaagacatttttttttcccaaaatgttttcctctcttcccctaaccaaagcacattttccattgttgcgtgtttttttttttgagacagaatctcgctctgtccccaggctgaatgcagtgtcatgatctcagctcactgcaacctctgcctcccaggttcaaacaattcttctgcttcagcctcctgagtagctgggaatgcaggcatgcgccaccacacccagctaatttttgtatttttagtataaacggggtttcaccgtgttgaccaggatggtctctatctcttgaccttgtcatccacctgccttggcctcctgaagtgctgggattacrggcgtgagccactgcacccagccccatccttgca

SEQ ID NO: 21662 - DNA, 729 bp, Homo sapiens
tctgtctaaaagcaaacttccactttgagagactacagaggaaaatgtttattcagacctttattatcacttagtcataatacttagaaacttctaaaacatagctttgatattctcgtctgctcaaaagctgtcaatgatttcaagttcccaagttctccacaaattgacttcaaatgactttcttggtgttatttttccctactctcttttgcagataaattagacagtagacagcatttcattctctgaatagcttcagtttcttatgttctcttctttgtgatcattttctgtatttggaattctatttatctccatctacatctgtacaaaccctccttcaaggtccagttcaaaagacatttttttttcccaaaatgttttcctctcttcccctaaccaaagcacattttccattgttgcgtgtttttttttttgagacagaatctcgctctgtccccaggctgaatgcagtgtcatgatctcagctcactgcaacctctgcctcccaggttcaaacaattcttctgcttcagcctcctgagtagctgggaatgcaggcatgcgccaccacacccagctaatttttgtatttttagtataaacggggtttcaccgtgttgaccaggatggtctctatctcttgaccttgtcatccacctgccttggcctcctgaagtgctgggattacaggcgtgagccactgcrcccagccccatccttgca

SEQ ID NO: 21663 - DNA, 555 bp, Homo sapiens
taaaaaaatgaattaacttacagtaaaactgacttttaaaatgtacacagtagtagttctattagtcttttggtttttggtttgtgttttttttgaggcagagtctcactctgttgcccaagctggagtgcagtggcatgatcatggctcacttcagccttgacctcctaagctcaagggattctctcacctcagcctccctagtagctaggrctataggcatgtaacaccatgtccagctaatttttttttttttttattgatcattcttgggtgtttctcgcagagggggatttggcagggtcacaggacaatagtggagggaaggtcagcagataaacaagtgaacaaaggtctctggttttcctaggcagaggaccccgcggccttccgcagtgtttgtgtccctgggtacttgagattagggagtggtgatgactcttaacgagcatgctgctttcaagcgtctgtttaacaaagcacatcttgcaccgcccttaatccatttaaccctgagtggacacagcacatgtttcagagagcacagggttgggg

SEQ ID NO: 21664 - DNA, 1281 bp, Homo sapiens
atgatagcaaaggctatcttaactatcctgacgaggatacttaagagaaaggctatccttggaaactgtgagaatcccrgaaactcctgcttaaagaggaggaaaatatctaaagcccaaccaaaattagtgtggagatcccacaatctgggcattgcaaagcccattaccagaagcaatgacaatgcacatcctagacaatgctttactaataaatagcaatattaacagcacatttggacagaagaataaagagtttattaaaataaaatctttttcacttcctatctcttttggaaagaaatacaaaaactataaattatatctataatgcagtttggatcactcattgatccaatggcttcagatatctgaattataaaatccatgccttcccttcccagagttatagatccagattgatccagttatagattattcattgatccaaactgcagtttgacagaactaacatacaacccagtttttgagggctggaaagtaaggaagacctggtgatcaataatattagaatacttctcaaaggaagaaattaacagatgaccttactaaagaatatgcatttctcaaatgagttttaccagtcaccacattagtcagtagaaaccagatctacagaatggctgataacaagatgaatggaaccaccttctaggtggaaaatagattggatggcagaatctggatctataactctgggaaggggaggtatggattctataattcagatatctgaagccattggatccacagcccagtgaggagcagctcctggatccacagctcagggagcagcagctattggatccaaaaccccgagacccaacatgcatagtcaggcaagaattgcagagcatgtgagtcctggggtagtagcaggaggtgtggcaggggctggactcaacacacaatgtctgacagctgttgggcctccagcaggtctcctgacagcccctatagagagaggaacccagctggcaggtgctgggagagcagaggtcagtgctgtagaccaggttgctggggtaggaagagccacaggaggagcctgggtagtgcaagtaacccccgtgggagcaggaggagaagtttctagagcaacagttgtaggacatgttgacgggaagatgtgagttcagctgagtgtacctgggaagattctgagttttaacgtggcatcctggacagtgtcatttatatcctctcagcaataggtgtggtgcacagcagagtcatccctcacatttttgtgctccctca

SEQ ID NO: 21665 - DNA, 583 bp, Homo sapiens
caactttggccttaatgagaaacctgctgaaaactaaacctacatgtcaccatcctttctcattccacaaaagtttccttcatctattatgtactgttactcactgtgtctcacatccagtgtagagggaaaagtatgagccaagacaaattgaataacattgatgcctatgaccagaaggaaacctggacaattatttggagacatggtgacagcaagggatggaactgagacaatcacaaatgaaaaacaattctggggccttatgaagagaattaaagtgttaaataaacacacaccattgaaatgacagaaaaaaataaatgaattttagattcaatgcatctaatatgaggcccatggtcctaagagattctcattcatatgtgtggcagcctggagaattctcatctcggatcttaaattacaggaggcttaaataaccagtggtcctacctgctgtgttctaaaagttaacactgcatttttggggaagscttgctttctctgggctgctcccaagcaaagactgagcacagtgggatataggaattcctggaagacaattgacggccagctttga

SEQ ID NO: 21666 - DNA, 541 bp, Homo sapiens
gcgggtgcctgtaatcccagctacttgggaggccttggcaggagaatggcgtgaacctgggaggtggagcttgcagtgagccgagattgcaccactgcactccagcctgggtgacagagcaagactccatctcaaaaaaaaaaaaaagtcacaaaaataagttctttttcagtgtatattcagatatatactttgttttatcagcacttttcttaccattaaaggggccatataaacatacattttgaacaaactatagaaatacatactcttcatgttggtctccagttaaatgtgaaagtttatgaagttggtatttcarggctgaatttaaacactaacatgatctcactgaaagcattgaaatgaaaaagatatggtgaatatggcgcagtgttccaaagaaaaagccttctttttaattgagtgttatggttttcatttgtgcatgtacagtttacctttggacaacatgggcttggactgagtgaatccactcatactgagattttgttctacctctgccactcctgagatagca

SEQ ID NO: 21667 - DNA, 840 bp, Homo sapiens
tgaaatggctcatgcaggatgaataatatttcagcttgcagggaaattacatatgtgagaagaacgaagaacgcaatgcacagaagttttgtggggtgagtgatgatgcttagtcttctttgacctaattcctggcacatcatgggtgctcatagattatttatatcaaataattaacttttattttactttcactcaagataaatgtatgcatgtgaaaataatgtttctgcttttaaagttacctctaattaaaagtgaaatgaatattaaatctatcttttataatgaatatatccccaagttaatcataaccagtaaaccaaggcctgttaagatagagcacctcttagaagatgaacggaggatggaaattatggttttagtgcgtaggggaatattctgaacaatctttatagtccttgtatgtgaatgtgcacttgttctcttctcattacacaaggcaacaggatcaaataaaccataattggtaaaggtgctcagttaggttagccagaagtctgggtacaactttacatggcagtagtattttaattatggcttctttccattatactacagatgcaaagaccgtacacactacccaggcatttctcttagctcaaattctccatcacaaccagctatatascagctttcctgaatcactgtggtatcaaagtcttttaattagttttcctctattcctgtagccatatcaatgttatttaggggatgtccagcagtctattatagccactattaatctcagctattttataatttctcaaactcaatgtaattttttaaaagataaaaaataactacaattttttaaaa

SEQ ID NO: 21668 - DNA, 668 bp, Homo sapiens
atcaaaatttctgccttccagtgttttgtaatgtattcataaagttaatgtatgtaaaaattaaaggattttaatatgattttgttaataaataacaatagttaatgctgtaagaatttcaacatggataaaacatactttataccattcaatagaaagatgtagattagtcattacatttgagggagtgggaaaagaagaagagaaagtattgatgagcaggttctacattatgaactargaagagttagatggataatggggtaaatcattagaaaacagatgaattgttcaaatggtgtaaggacgagataatattaactgtatcatttttattgagataaatagagataaatatctatatactttgggattgtgattggtatttttaaaacacaaaataaaagacacaaaagtcaatggtaaaagtttatccctctgacttcattttcaaatactttaatttacgtgtattaattaaaattataaatataatagcaaaattataaatagagaaaaatactagcagcatatgttacaaaaggttaatatcatttatttatacataattaaaataataagccaataaaaatgaagatcaacatagcaatggaaaaataatcaaaacctaccaacattatgtattgttgaattacatagaatttaaa

SEQ ID NO: 21669 - DNA, 524 bp, Homo sapiens
gacaaagatgagtaagacactgcccacgctctctgtatgcatgcaatctggtgcctgcgatgacatctactcaaagaactcagtcaactggcaagctaacaaggtctatagccatgggtgaaacagactgccttgagaatatgggaagattaattccaactgggggatttgctagggtgtgtagtgaccacgtggggatgtcagaggaatgggaaaacaagaagattaagggatgaaaagagacttgaaacatttaagaatggaagtctggttgaggaattcagacttaaccatgtaagtcctgggactggaaataacaatgctcagacgtgtgtttccttagcaagattttatgtgttcttcatttcatacaatgaacaacataaaatatattatttaaggtctacaaaaatctccaamcctaccttctgttgctgatcctcttggccattttgttcctgcaaaagagcactcctttcccaccaaatgcactttctctctgaccccccggcatgtcttgagtt

SEQ ID NO: 21670 - DNA, 560 bp, Homo sapiens
gcaatagaagaccatttgcaggtaactgcttattaagtttgccttgccgttatgtatgttgaccataattatgccaattcaggttttggtggctaaatgttctcaattaggatctaccatcttatgatgctcctaatcccactgaattcagtaggtttatttcacttatgttctccagaagaaaatctctgagattatcatttcaccaaaatctgacagacatacttgtcaggaaaatatataactcctccacacrtgctgtagcaggtgtgtgtgtgtgtgtgtgtgtgtgtgtgtgtgtttaaatgtgcaaaggttgccaaagatattcctgttgccaaaattattcctgtttctaaatccactgaactttcctgtccattaccaacttgaattctcaacagtactgaatacatttatagggataaaataataccatacaacttctcattattttagtccataaaatttaaacccaagtcctattggttacatctccgtatgtctattaaacctggttattctatcaaatcaatttaccgtcactctaatctaagtca

SEQ ID NO: 21671 - DNA, 560 bp, Homo sapiens
gcaatagaagaccatttgcaggtaactgcttattaagtttgccttgccgttatgtatgttgaccataattatgccaattcaggttttggtggctaaatgttctcaattaggatctaccatcttatgatgctcctaatcccactgaattcagtaggtttatttcacttatgttctccagaagaaaatctctgagattatcatttcaccaaaatctgacagacatacttgtcaggaaaatatataactcctccacacgtgctgtagcaggtgtgtgtgtgtgtgtgtgtgtgtgtgtgtgtgyttaaatgtgcaaaggttgccaaagatattcctgttgccaaaattattcctgtttctaaatccactgaactttcctgtccattaccaacttgaattctcaacagtactgaatacatttatagggataaaataataccatacaacttctcattattttagtccataaaatttaaacccaagtcctattggttacatctccgtatgtctattaaacctggttattctatcaaatcaatttaccgtcactctaatctaagtca

SEQ ID NO: 21672 - DNA, 560 bp, Homo sapiens
gcaatagaagaccatttgcaggtaactgcttattaagtttgccttgccgttatgtatgttgaccataattatgccaattcaggttttggtggctaaatgttctcaattaggatctaccatcttatgatgctcctaatcccactgaattcagtaggtttatttcacttatgttctccagaagaaaatctctgagattatcatttcaccaaaatctgacagacatacttgtcaggaaaatatataactcctccacacgtgctgtagcaggtgtgtgtgtgtgtgtgtgtgtgtgtgtgtgtgtttaaatgtgcaaaggttgccaaagatattcctgttgccaaaattattcctgtttctaaatccactgaactttcctgtccattaccaacttgaattctcaacagtactgaatacatttatagggataaaataataccatacaayttctcattattttagtccataaaatttaaacccaagtcctattggttacatctccgtatgtctattaaacctggttattctatcaaatcaatttaccgtcactctaatctaagtca

SEQ ID NO: 21673 - DNA, 658 bp, Homo sapiens
tgtgaggtacctagagtagtccaagttcagaaagtagtaataatggttgccaaaaggtgggrgcatgcagaacacggggagtgttgattgacatcaagtttctgttttgcaaggtaaagaagttccagagatttgctgcaccaacaatgtgaatatacttaacactactgaactgtaaagtggttgtgactacagattttatgttttatgtgtttgccacaaccaaaaataaagattaaattaaaaaataaaagattttatagcacctatcacttaccaaacccactgtacatcttacactcgtgaatattttatgattttcaaaacacctttatttttttcccttatttgttcattccttcatgtataacccacaatgtgttaggttatgtgctgggcagcctggaagacccaaagacgaattagggaagtaccctatatttaaagccttgcaaggacataaatatcagtaatataaagtaaaatatgttcactgctgaaaactgctatacttcctagatttttcaattcaattgcaatttctaatattttgccatgttgatcccacaaattcacttgtgtttaaaagttaacgtgcttgattatcatacagctgcttctttcataagaggaatacagataaaacgctatgggattt

SEQ ID NO: 21674 - DNA, 525 bp, Homo sapiens
tcttttatccacttgagaaatgttctccrttatggctcttctctttaaagagctgggtgaaatatctctgcaaccaacaaacaacctgcctctactccaggcactgctgtgcctctctttctccttcaagatccaacttaaaagtcaccttctctacgaaatcgtccagccttcaaaagcacccatcctgtttcctctgggtttccatttgattttgccctgttcatcttcttttccttagcaacaagcctaggccctatgcacagactgtgtcaaataaatgttgagtgaatgaaagtattaatgatctagaatgggcacagtggagtgggctgcacaacttcaggcatttcccaaactcctttggagaagaggaaagtttctagaatcacaggtagctcagaatttgctcaaactaatccatcacaaatgagcatgaaaagatgcctctttctgtgctcagcataatttaaaaaatatatatctaattcaacattctgctggtaaaggagcatctaaataaaa

SEQ ID NO: 21675 - DNA, 696 bp, Homo sapiens
ttaaaccgtttgttgtcccacgcagagtcagctttggggctgggagccaccacaggacctggctccccacgacaccggctgagcccggaagcagctgaaggttccaggaccctcggggcagctcccaggccggcgaggaagaagccagggtgaaatttgcggaatggatttgtttccactcttggaattcgtgatcactttgctcctctgagtctctaggaattagcaattgtgccatcgaccaaattaaggtgcaaattatttgtattgttaaacgactccagttattacttggagaaaattttgcacttcaattaacaaaagcacacatggggcagtttctgagcaaagccagattttataacactcagaagaatgaggtccggccccgggcctcgccgccctcctcctggctttcagctcagcctgtcccctggcagtgccagcagcttatccgcaggtccccgaggccacccgttcccttcgcaccagagctctcccctctgttctttgagaagcaggaagctagatggatccatctcaagggggatcccccagaagcaaagcctgagagaagagctcttgtgaaagtgatttactgggggaatggtctgggttttatgggrtgaattgcatccctcaaattcccatgttaaagccctaaccctcagtgccccagaatgtggctgtttttga

SEQ ID NO: 21676 - DNA, 557 bp, Homo sapiens
cactgttcaaggaagtgagaatataatcacaaaaattcttccctaattcatattaaattgtatatatggagtgtgtatgtttgtgtatacccattggaagtttgttttattctgccaactgatctaattagataaacttagtcaatatatttgaatcccacattccagcagctattttctccatttgcttttattgctgtttgtggtgagtttgatatataattttaaggtgttaacatccctaacttatgtatgggtacagctcataaatacgaaccygtgtcatgcaactcatatatgactgtgttcaaaataatgtgtattagactgtaaaacgattttaatattttaaataactttcctgcatttgtcggtttcagcaggaaagttatttttaataacttccctgtatttgttggtttcagtattaattaatctcattaatgctaaactttgtgatcctaggttaaaaaacatattcaagatagcttcagaatgtttggtatacaaataggtctggctaaatataagtgttagctttctcaagcatctaaatg

SEQ ID NO: 21677 - DNA, 557 bp, Homo sapiens
cactgttcaaggaagtgagaatataatcacaaaaattcttccctaattcatattaaattgtatatatggagtgtgtatgtttgtgtatacccattggaagtttgttttattctgccaactgatctaattagataaacttagtcaatatatttgaatcccacattccagcagctattttctccatttgcttttattgctgtttgtggtgagtttgatatataattttaaggtgttaacatccctaacttatgtatgggtacagctcataaatacgaacctgtgtcatgcaactcatatatgactgtgttcaaaataatgtgtattagactgtaaaacgattttaatattttaaataactttcctgcatttgtcggtttcagcaggaaagttatttttaataacttccctgtatttsttggtttcagtattaattaatctcattaatgctaaactttgtgatcctaggttaaaaaacatattcaagatagcttcagaatgtttggtatacaaataggtctggctaaatataagtgttagctttctcaagcatctaaatg

SEQ ID NO: 21678 - DNA, 575 bp, Homo sapiens
ccgtctcaaaaaaaaaaaaaaaaaaaaaaaaacttctgcttccctcctttctcccctgctgagataaaacgatatctcaactcacacattatggaaatataatccatttatagggcaagttttgtttttaaatcaccataaccaatattccgtttattaaataactatcattgcatattaaatttctcgatatttgagactgaagagtttatattggttactaatttgtagaaggcgttgataaaaagatttctagtaacacctccagaaactgttttttacattcattgtaaccttacttgatctttccaataaattagagacatttctgtgagaatttcatgtagaaatgatcttgacttaggaatgacaaaatatttttttggagatcacggaatacttatttagtaagttagtgcaaagtttatttatcttgaagttttacatatcataactcaaggtcactaagtgatataaagaacattcaaagtgaggtatacacagaaataagatayatcaatttggcattttgaaaagaacctaatattaaaattatgttagcagagttatataca

SEQ ID NO: 21679 - DNA, 511 bp, Homo sapiens
cacacactgtatatgttatattattaatatgttgtacatattaataatataataaaatataaattatatatgcatgtatctatctatatatacacacatatatatacacacatataattctatataatagyatttaatttttttacatcacactttgaggatggactttgagaaggaaatgtcggtgtgaggagtttcatggacccatatgccaatgaaacaacaatgtctgttaaaaatttttaaaataaagtctctggaaattatcctgagcagataaaaccaactaatagacattattttaaaaataccctaaaatacagtaaatcttggtaagaacaaggaaaatctgtgtgcttgagctttaacctaccaactttttctttccccatctcccattctggaataatagaaacaccattctgggtactgtggccatgaaaatgggattctcgctttcctcagctactaatcagtagaagcagaaagcctacaatttttaatctacaca

SEQ ID NO: 21680 - DNA, 573 bp, Homo sapiens
aaaccattgtattttatgaaaggagtctttaaattagtgatatttccaaaaatatctctcccgtcttccctgtactaacccagtcaggacagggtcactgctgtaataaatagcccccaatcttaatggcataatccaacactgttcatttttcactcacccagaaatcaggattgggcgaagggctctgctccacacagtcctccagggactcaggctccttctatctarttaaactgatcaggggcctgtttctaccacttgctagtgatactctgagcaagttacctaaatcagagttttcttatgtgaataatattagggcatccctcttggatttttgagtcaatttacttggcatagaaactgacaggtattaggtactcaataatgtgaactgctgttattaatcttctacttctggtagtgctgccaccaccatcccccgaggaggcaggaagaatccgtcagaattggaagagtattataataatagctaacacttaggaagctggatagtcttcaaagttcttttcaaagtaactattttttaacaacattctagttttataa

SEQ ID NO: 21681 - DNA, 486 bp, Homo sapiens
gaactaccaatcatgttagtggagataacaaggcaagaccagtatagtgacattagaggcataaaatcaatgggttctataaaatatttgagttgctttataagaactgtgtatcaacaggagtaaagtcatcaagaagaacctcttctaccagtgccatcaagaaarggttcatttatatggggaagctccaacagaatctggatagacagaaataggattctttttcacaggcagggatggagatatgttttagacatggaacatttgagaggataaaagaagcatgaaaccacatgtctggtacctgtgactactaaggcatgtaaataaggcatgctgagagatgagaatgaaggtaaggtggtaaagcaggggtaagattttggaaaccattaaaaaccatgccaaagttcatgaacattttcctttaggcagtgaagatcttttaaggggttttcagcaggagagcaacagagctgtaca

SEQ ID NO: 21682 - DNA, 486 bp, Homo sapiens
gaactaccaatcatgttagtggagataacaaggcaagaccagtatagtgacattagaggcataaaatcaatgggttctataaaatatttgagttgctttataagaactgtgtatcaacaggagtaaagtcatcaagaagaacctcttctaccagtgccatcaagaaagggttcatttatatggggaagctccaacagaatctggatagacagaaatrggattctttttcacaggcagggatggagatatgttttagacatggaacatttgagaggataaaagaagcatgaaaccacatgtctggtacctgtgactactaaggcatgtaaataaggcatgctgagagatgagaatgaaggtaaggtggtaaagcaggggtaagattttggaaaccattaaaaaccatgccaaagttcatgaacattttcctttaggcagtgaagatcttttaaggggttttcagcaggagagcaacagagctgtaca

SEQ ID NO: 21683 - DNA, 486 bp, Homo sapiens
gaactaccaatcatgttagtggagataacaaggcaagaccagtatagtgacattagaggcataaaatcaatgggttctataaaatatttgagttgctttataagaactgtgtatcaacaggagtaaagtcatcaagaagaacctcttctaccagtgccatcaagaaagggttcatttatatggggaagctccaacagaatctggatagacagaaataggattctttttcacaggcagggatggagatatgttttagacatggaacatttgagaggataaaagaagcatgaaaccacatgtctggtacctgtgactactaaggcatgtaaataaggcatgstgagagatgagaatgaaggtaaggtggtaaagcaggggtaagattttggaaaccattaaaaaccatgccaaagttcatgaacattttcctttaggcagtgaagatcttttaaggggttttcagcaggagagcaacagagctgtaca

SEQ ID NO: 21684 - DNA, 522 bp, Homo sapiens
caaccaaccccggtgtctacaggggcatagtataaaggattgatgggccagtccctgatgctgtcatcaacctgaggccataactaatatccaccatcaatcttcttcatcatctattttcagtttgccttgaccagtattttggcagctcgaggcttttctggttggataacccagaccttcatccttgagaaaccttagtttttatttgtctcatcttggttgggccaaggttgctcaatttctcatttatagttgtcaatgaacatggaggcatccaaagataacccagtgaatttccaaattccagagctactcctaccagataccatgatgcaacatcagtcctcatgcaataatcagactcaattatcctaccaatatagaacaccccctttttgcctactgatcctctgatttggggattcaagagtgaccaggggtagagtagcttcattcactggaactcttactgtgtcctcccataggtgtgttatacccrtgagaaaccagacattttat

SEQ ID NO: 21685 - DNA, 528 bp, Homo sapiens
aactactggactagagggagtgtccctgttttcttactgtcttatttgttagggcccgtatttgagcagtgttatcaaacatataaggtacggttctgatcatctaggatattctagtttttaaagagatccacaagtagtatatagtttaaaaaaacaagctctgtggaatgatagcagatcatttcccccttctcatgttccrtaataataactgttcagtttttcctaccagaaatgtatgcatgtgtatatatacacacacaattatatatattatacttttagtatgtattgtgttagaaaactatgtatgattccattatttttaagtgcatagacaggtgtgtgtgtgtgtatgtacacagtgtctgtgtatttaaaatccaaaccaaatgggatcagacatactaaacacacagttttgcaacttaagctttttatttatttagttagtttttgagacggagtctcgctctttccccaaggctggagtgcagtggcgcaatctcggctcactgcaagctc

SEQ ID NO: 21686 - DNA, 595 bp, Homo sapiens
gtgcacgctgccactctgggctaattttttgtattttagtagagatggggtttcatcatgttgcccaggctggtcttgaactcctgagctcaggcaatctgctggcctcagcttcccaaagtgctgggattacaggcgttaagccaccgtgcccagccaattcattctcatttttattttagttcttcctatggctccctttagaactgttacttcttgatgtttttccaacttagaaactatctgtgccttcccactgtgaaagaccagtattctaatacacttacactcctttccccaaacctcctgatttgtcaacttcacctcataaggatttatgtcattttcttccgagactrtctaaaagttgttgagacttggctttccaagctggcaaccccagccctaattcataaggaatcaccatgggtctggtgggggcaggaggaagtaaggtgagaaaggccacaattcctctgaaattcccacctcctttcccatctccttcagccctctccttttagaggaatcattggggggcagagaggggggcattcccttgggctctgacttctgtcctctcccactgcagctt

SEQ ID NO: 21687 - DNA, 569 bp, Homo sapiens
caaaaaatacataatttaaaaacaaatggacaaagagaaaatgtgtaagggccagtaaagcagagcatagttgttaaaggacttgttaacatattataataggctgttagataaactacagcaaacattcttttgaagtcactactatgctcaaaatcattaaaagagcatcctatgggccttagaaaaaaacaatatgtaaaaagctgagactgatcaggctgctcccagaacatataaacttatcattcatagggtgtggagagaaaatgttaatgccagagtgaaacaaaggcagtgagtccatgaaatattccaaagctccaaaatggagctaaacctgaaaggacttctttaagtcaagatccaataagagggaatgctcaattgcttatatgacattgacgttatttctttctcacatggcagtccataggtgawtgctccaatattggtagagtttctcctctgtggaattatccaggaccataaaatggcagattggtgttagtcatactaagcttatggcttccatcactaggtctacagtttaatattatagaagccat

SEQ ID NO: 21688 - DNA, 560 bp, Homo sapiens
ggtagtatctgagtcacttatttaagagacatggtctttaaacaattgaagttaaatcacagtaggaacagataaagtatcaaaaatatttgcctttggggaggtgttggcatgagaaagggcacatacttatctttggttatagccttttaacattgtttgattttttcaaactttgagttcataacattgataagcactaaaaacatattattgtaaaaggccastttgaatgcaatgatgcattttacagccatttctgccatctaaagttgtatgatctaagctttttgctgcccccacagaagcaaccatctgaacaaactgaagcttgaacgccccatagttcaacagaattaatggtagattcctttcaactttgctctctttttccatattacagtcaccttcactagcaggttgcaaatagtcatgcaataatgtctattttatttcatttcaaagagctctgtttaatgcatttgttgtacttttgaatatgactaaatcccaattcattcttccacaggcaggagatgtgaaggcagattgtctgaata

SEQ ID NO: 21689 - DNA, 505 bp, Homo sapiens
tgaagtagcaggcacacaatcagcagctcgctgagattttaggaaagagaaaaacaaccccaccccaccccagctgctytaatagggtgaattcacattaagaccccaaagtccataagataggatctgccctcagcttaactgcaggcatggaggctctgagcctgggctctgggtctgaccgcccaggtaggaacctggcctccgccttgaagcctctgctctgaggaaggtgcgcggcctccccgaccctcagcctcctcatcggagtgcaggggtgagaattcccacatctgggccttgcttcgtaggagagggtgaagaggcaggttcgaagtctgaggaccaggctcagctgaaagccttgctcaagaggctcggtaggatgagcgtgagaaggctcgcggctccacaccccaagcatactcgctgccctgtgtggacttctcagtgctgcaggcaggttggggtctgtattcgtccgttttcacactgctgataaaga

SEQ ID NO: 21690 - DNA, 536 bp, Homo sapiens
ctgcccttccacagcccacgctccctcctcagcccacgccccctcctcagcccacactccctcctcaggctcagcactgggaagagttcgtccttcctcacctcagccctcaagtgtggagtccggcgcctcagtcatccactcaacagacatttatgagggaatgyttgggtgccattaacactgctgggaaagcagcagtggatcagatacaagctcactctcaaagagcttatatttcagtggaaggtggtgagcaatggactaataagccagtgaacacgtaacacctcctctgccaatacgtgaggtgaagagaagacagcagagagggggacagaggcggaatacaaatgttatgttagcagtgaacaatcagtaagtaaaataaaaacatcacttatagtagcataaagaaaccagaagcaaaagaggatgtactgcatgattcaatttatatacaactatttagagacaaatccaatctgtggtgacagaaagcagcacatcagacgcttaatgctgggagtagggga

SEQ ID NO: 21691 - DNA, 1316 bp, Homo sapiens
ttttttttcgagaaggagtcttgctctgttgcccaggctggagtgcagtttctcaatctcggctcactgcaacttccgcctcctggggttcaagcgatcctcttgcctcagcctcctgagtagctgggattacaggtgccggccaccacacccggctaatttttgtgtttttagtggagacagggtttcgccatgttggccgggctggtctcaaactcctgacctcatgtgatccacccgcctcggccttccaaagtgctgggattacaagtgtaagccactgcgcccggccaagagtgaagttctgatagctggggtaagaaaggccgtgggaacagccggtttcagacacgctgggtctaagacgctgcgtctggcgctgctcggcatccaatgggagccgtggagaagccaggcgagtgcgtagggcggagccagcgcacaggaaataggacgtgatgaggtcaaccggctggtccaagtgtggacggaagtagaggatgcaagcaccgagccccggggcccccagcattggcggggaggagctcgcggtgcgggagaagcaggggaccgcgcatcctggagaccaggtggagccagtgcgcccggaaggggcgtggcccgctgacagccgcccaggaggccgggggaggcctggagccgagggccgcgcgtggcaatgtggagagacattttggtggagtcatggggccacagcctgattggtgagaacaggaagggaaattgcagatgggcctgggccccctggctcccgcatactccaggaccagggctgagtcatcgttcaccgtgtgtgaccagggccccgtgtggccggctgtcactcggtatccagttaccctgggcagaccactggcggcaccccccagccagaggccgcagcaacacacacgcctgcaggcgaccaggccggactgcatgccccgtgggggaactgagggcgtttcagtaacagagtgttaggggacacgggttgggtggcttggaaagggcctaaggtggggtttgttttagattggggtggtgagggcgcaggggcccggtaggattctctaacagggcagcagccactcatttagcaacaggagaggcgtccagcgtttcgtgggctgtgcggtgaycttgcttttgtgcttagacacgattacgggtggccttgcttcatctccttctgccatggtctcgtggcccctgtctcagctggcgttccgggaggttgtttacgtccaggaggaaagcaaaagcctggccctgagcatcagggtggctctggacgccagggctgtactgtgttc

SEQ ID NO: 21692 - DNA, 393 bp, Homo sapiens
aagttgaagtaaagaaggttttaccttagctgagttcgtagaatgagatgccagccttctgcatagaacacataccacactcagtaaggggttccagtgaagcagattccatttccacctgaggtracagtaagttttatgcagatggtcacattaaactcgaatttagaagaattagtggtattttgaaacatccagagtgagaagactatttaaatggccagtttagaggcagaaaaataaaaggcataatacaaacatggaaaataatattgggggaatttaaagaatttaagtaagacatggttaaagacattttgaaatgtgaaagccaactaaatagaatttaggcaagaaaaatctgaagaaatatgacacactttaaaataatgt

SEQ ID NO: 21693 - DNA, 553 bp, Homo sapiens
attcaacccgtttcactttggtcagtttcatcttatttccttagttatttaatctgttggcaagccgaaamcattttcccctttaatgtacttatgctcttcaaatatcagtggagttactttatctcttattaggatgacataagagcagaaaaatgataatttgaacatcagagatttcaaccacataaaaggtatctgtcatagtcaatagatataaatgctttttgcactttcctctaactactcttgtccaagtgtggtagaaacttttttttaattacagtaaagagaaaaaaaaagatcagattatttgactgttttaggccagaccccttcagagagttggggtgattatcatgtaggggttagttttcagctgtgtaattagtgatttttccatggagaatcaggcactgggaaataacttattcaaagaagattaattatgtatgagagtattcatgtcatcattttcaacactaaactttttttgtcttacggggttggcaatttacataaagaacattttttatgtgaaggcccacactgg

SEQ ID NO: 21694 - DNA, 528 bp, Homo sapiens
aatcttgcccttcctgcttaggataagtgacaaggacacaagagaagaagataaaaggggagatacacaaccgtgtcttactctagcccaacaataagtaaaaactcaraggtataggtgtgctagaaactgctatatttgcaagaagaaacataaggaaatcagaactggtaaccagattccctaagagtagaccacacctcttgaaaaatatggcccagaagcaatacaacagggttagagaacaggtgatttgaaacagtagcctggagcagcaggtatgactcaaccaaatctaggatctggaagttcccacatatcatgatcaggagacctggaggtacagacaacactgaagacagtgaaattttggacaattagccacatccccaaatgaggacaggcagctactgaacctcagcagtctgcctcagcaggcaagaaatggattcaacagaccactcaaagtcaaagccagatagatagcaggtcatgagtccccatcattttcttgtaggaaacaaattg

SEQ ID NO: 21695 - DNA, 552 bp, Homo sapiens
acccactgatggtaaattataccataaaattttaaattatattttacaatatagaaatgtgcataaataaaacacactgtgtaaaaaaaaataatctacacactgagagacagactcatactcaagcaattctctgctcctgctcctagtaactatcaaattcagcaactcaaccttttgttatcacaatatctttaatagaattgcttcagattaactttttttgtgtattttctttgaataatatattctagctgcctgttgggaaatatcagaractaaattaaactacacatcttctccatattcttttctccagactatatgcaaatatatttattttttattttctgcataatattacaacttttaattttgttagataagcaaattttggctcctattctcatgttctttctaccagctgccgtccattttccatcatttatgccattattttacatttaaaagtaattaatacctattttccatgttaattttaaatctttgtgctttgtgagatagtgtttgagaataaaataaaaatcatca

SEQ ID NO: 21696 - DNA, 552 bp, Homo sapiens
acccactgatggtaaattataccataaaattttaaattatattttacaatatagaaatgtgcataaataaaacacactgtgtaaaaaaaaataatctacacactgagagacagactcatactcaagcaattctctgctcctgctcctagtaactatcaaattcagcaactcaaccttttgttatcacaatatctttaatagaattgcttcagattaactttttttgtgtattttctttgaataatatattctagctgcctgttgggaaatatcagagactaaattaaactayacatcttctccatattcttttctccagactatatgcaaatatatttattttttattttctgcataatattacaacttttaattttgttagataagcaaattttggctcctattctcatgttctttctaccagctgccgtccattttccatcatttatgccattattttacatttaaaagtaattaatacctattttccatgttaattttaaatctttgtgctttgtgagatagtgtttgagaataaaataaaaatcatca

SEQ ID NO: 21697 - DNA, 663 bp, Homo sapiens
gctgcattcctcttgctgagatagtgaaaatagtaattaataaatactgagggaactcagagacgagtgccagtgtgggtcctccgtatgctgagcgccgttcccctgagcccactgttctttctctatactttgtctctgtgtcttatttattttctcagtctctcatcccacctgatgagaaatacccataggtgtggaggggctggcccccttattctttattatacctatttatctacaacattcaataatgcaagcctgattgtgtcaattccttcctttttttcctagagcaatgatgccttcttatttgtatttttaattgacctaatagtcttatatatttgtggagtacaatgtgatattttatataaatatacatgtggaatgattaaatcaagaaaattacacatttctcacctcttattatttttaaggtaaggaaattgaattttgaaatatacattattattaactatagtcaccctgctgtagaatagatctcaaaaaccttattcttcctgtttaactgaaactttgcactttatgactatcacctctttctcaaaatagcgaaaagcacaataagttataagrtcagtctcaacaaatgtgtcactgaatagtaaggaagagtgtctccaatgtgtttcttcaata

SEQ ID NO: 21698 - DNA, 535 bp, Homo sapiens
attctacttttataaaaagaaaaaccgtactatttaaaaaaaaacattttaaagcaaaggaatgttaatattcttagtcaggggaagagatttttcttcttaaaagcaaagtaaaagaagatggggggagtggggagtgtaagtaatcatctctataagaatacgtatgaattctctcattctatrttcagggtttttcacgttttcctaatatacattctcacgtaagaactccagagagtttcctcatttcatttgcttgatacatctttacttggaaagtaataatttggtctttttatatcaatcccatggctacagaagataaaatattcttttaagtcatcatgggagttcatagaatcatgtttcccctatgtaaaaaatacctccttctatcttttcctcccatggatgcctttgttctctcatgctctttccacaacaattttcaaaaatttttaatgaatttcaaagtgggatacacatttaatacaatgtaggagaaaatttgaaagaaaagtaatcagacaaa

SEQ ID NO: 21699 - DNA, 490 bp, Homo sapiens
agtaagtattgagggaattctgtcacataaagagaagtaaaggaagctgaatagggctaagcagaggtgtccctcagctggggactacaggcattctgatccaaaggggaagctraaacacaaatagcaccacaaagtgaatcctgcagtgaggaaagggagtggctatttcctgccctagtgtaagtcagttattggcagacagctttcctccaagggaaatgagattgggaaaagggtatggggagtagtagcctttagggctgttatagaaggcccacccacttttggctaatcaccatagaaaaggcagctgtgaatgatgagctaaaatgcacagcagctggagattgggcaaatctaccaccaaaggaaattatgttgaggcaccagcagcattcactacattgttttaagcaactaagttaagcagggataactaatataataaccacaatagtttcatcattgtctagtcattgctgaagtg

SEQ ID NO: 21700 - DNA, 490 bp, Homo sapiens
agtaagtattgagggaattctgtcacataaagagaagtaaaggaagctgaatagggctaagcagaggtgtccctcagctggggactacaggcattctgatccaaaggggaagctaaaacacaaatagcaccacmaagtgaatcctgcagtgaggaaagggagtggctatttcctgccctagtgtaagtcagttattggcagacagctttcctccaagggaaatgagattgggaaaagggtatggggagtagtagcctttagggctgttatagaaggcccacccacttttggctaatcaccatagaaaaggcagctgtgaatgatgagctaaaatgcacagcagctggagattgggcaaatctaccaccaaaggaaattatgttgaggcaccagcagcattcactacattgttttaagcaactaagttaagcagggataactaatataataaccacaatagtttcatcattgtctagtcattgctgaagtg

SEQ ID NO: 21701 - DNA, 522 bp, Homo sapiens
cccaaagtactgggatyacaggcgtgaaccactgctcccggccttaattttaattcaaagtagggatagtcacctttaacaattaatttcgcatcaacacacacaaatacacataaattgtagttttaccaaagtggtccttgctgtttccgtagtgtagaaatagtatttcctccacgaatttagacacaatgatctgaagaatacatacttaaaatattttgcagactaaagtaccaattcaaaaggaatttctctcaggaataaagataggcagttccttaaatacaactacatgaataaaatatgatgcttttaaacttataacaatttaaatatctcaccacgtaaatatttcttacaacactgctgcattcattattatattattgttttattctcagttatattattctttattatatacttacaaatattttattgcaatttaatattgtcatttatggttcgcggttcctactgtggatttaagcaaactttatattttaaaaattatttatt

SEQ ID NO: 21702 - DNA, 528 bp, Homo sapiens
aggcaggagaacggcgtgaacccgggaggcggagcttgcagtgagccgagatagcgccactgcactccagcctgggcgacacagcgagactccgtctcaaacaaacaaacaaacaaataaaaccaaaaacatttaaacattcattttgatcaaatgaaaactctctaaattaataagtcaatcagtagttaagaaacaaaaatcaataatgcttttgttagggtagtaataaatataaaatgcaacagagggaattgcactcactgtaaaaactaaaaaatactaggaaatgatgaaaactacatcgttagtatggtaaggaagctaaaacatttattaaaagaaaaatataattgtaacatgttttgaaaacagaagtatgtaatgctatcrtggtattcatggaaacatgacttgctggaagttctacttagatgggtgaggcttggacccatccaggagcacatcacgatgagcacaggatctttggatggatcatcttgaagtatttagcatgctattcatctt

SEQ ID NO: 21703 - DNA, 543 bp, Homo sapiens
tttcttataaattttaactaccttggtcttctgaactccaaatgtctcctcaactcagcaggaccactaatctctgttyagttctctgtgttttgtatttaagcgtaggaactctattaaagcagtaagctgaggcaatgatggggcttaactcatttgttttctcttattcaggaatcactttcctgtactgcatatttccgttgttcaatataaaaacaaaaatgaaagcataacaacaaaaaccgttgtttcatatattttgtttggttttctattattttaagattggaaaataaatctggttttcttcactgtaagcaaaagtcagatttttttaaaacttattaaaaatatttatttctctaattccaaatttgttatagagttgtttcatttctattcataccgagagtctgaatatcctaaaggttaagacaccaaatcgcctgggtgtaaatctctgctttgacaattacctcttaggtgaccttgaaaagcctccttggccaggctcatgcctataatctcagcactttggca

SEQ ID NO: 21704 - DNA, 515 bp, Homo sapiens
cacttcagtctagcaacagagcgagactccgtctaaaaaaaaaaaagttgtacatatttttggggtacatgtgatgttttgatacctgtgtaatgatcaaattagggtaattggatgtccatcacttcaaacatttatcttttattgggaacattaccattcttttcktctagctattttgaaatatacaataaattattgttagctataatttccctattgtgctatcaaatactgtaaattattccttctatctaactatatattttaagtttgatggagaattactgaagaatattgaacagaataatctcaaggtcaaaaggattattctggctgctataatagtcttcaggagaacaagggtggaaggagaagccagttatgaattatcgcaataatccaggagagagattatggtgatttgaacctgagtcttagcagtggaggtggtgagaagcattgagttctatatattctgaagctggagttgacagaatttgctgatggatggg

SEQ ID NO: 21705 - DNA, 686 bp, Homo sapiens
aagagacaactgaagaggtttttgcagaactgacctggggagtgatgctggagctctccagactggcccaggaagactggtgaatctctgactctgagctaagtgcagaccatccagaaatacttgctgaatgaaggactagatcttctaaattgccaagctgggtaatttttagagaaatgaaattttaggacattgatgctaaggttaggagggcctatcaatgccaagacttgagaaatagtagaggattggaaggacytctcagactgaactggattgtggatgcttgaagaaaaacttccaccgctgtttagggagtgtgttcttcataattctgtcctcttatgctatactttttttctccttttaagcagcaatatataggattcctctcccagttcaaatatagacagtctctaaagaccatctctctgatcccaaaaaacagaaaaaaaaactagttaaattacaaaatcaccatttattctttttaaaccccaaaagaagggagaattacaaaaccatcatttatctttttaaaccccaaagtaagagacactgggttttgcaaaatgcttttgcaaaaatatctttttgctggcaaatacccatcttggcttcatattttttaccacttgtaaatgaagtccaattctgctgaaattctgaaacgcattaatgca

SEQ ID NO: 21706 - DNA, 528 bp, Homo sapiens
agaactcatgtttgtaaaattgagaaaagattgcttatgagcttttttcgttttctttttctttttttttgagatggagttttgttcttgttgcgcaggctggagtgcaatggcgcgatctaagcttaccgcaayctctgcctactgggttcaagcgattctcctgccttagcctctcgtgtagctgggattacaggcgtgcaccaccacgccgggctaattttgtatttttagtagagatggggtttcaccacgttggccaggttggtttcaaatgcctgacctcaggtgatctgcccacctccgcctcccaaagtgcagggattacaggagtgagctactgtgcccagctgcctatgagcttttagtaaatatctttgaattcaccccattttgggtgcaaagttgcctgaatccctgcattcaccaactggcttccagactgatttatttctctgagtgtgtgtaagtagattataactgaacctatgggggaaaggatatagacgtggaagctgtgggttccat

SEQ ID NO: 21707 - DNA, 578 bp, Homo sapiens
tatattaccattttgtgcaaaagaaattgtgctaacattctcagcataggcagtaaagcactcacactgtaaaatggttctcatttcttgtcccattcatccrctcattcattcactgaggaaacatttgctgaatacctaccatcggccaggtgctgttctaagacagcagacttaaaatacacaaagggctgtgatgtgaatatgatcagcatctagaactataaccactgaagggaaattgccaggaggagatttcagttcaatattaagaactttctgacaattaaaactgcctcaaaggaatggcctctctgttctaaggtagtaaaggcctagtactacagaaattacctagcaacttacttacttacttctgacacatcagaagccctgatgcatcagttagcagagtttgaatattcaccaggttcaattttatatttatatttgatgattccaatatattatatgctatctgtgagattttgagactctatattctgtctgtattctaaggtgactatgagatatagtaggattatatagtagtctcagaataataccaaaaagggaag

SEQ ID NO: 21708 - DNA, 578 bp, Homo sapiens
tatattaccattttgtgcaaaagaaattgtgctaacattctcagcataggcagtaaagcactcacactgtaaaatggttctcatttcttgtcccattcatccgctcattcattcactgaggaaacatttgcygaatacctaccatcggccaggtgctgttctaagacagcagacttaaaatacacaaagggctgtgatgtgaatatgatcagcatctagaactataaccactgaagggaaattgccaggaggagatttcagttcaatattaagaactttctgacaattaaaactgcctcaaaggaatggcctctctgttctaaggtagtaaaggcctagtactacagaaattacctagcaacttacttacttacttctgacacatcagaagccctgatgcatcagttagcagagtttgaatattcaccaggttcaattttatatttatatttgatgattccaatatattatatgctatctgtgagattttgagactctatattctgtctgtattctaaggtgactatgagatatagtaggattatatagtagtctcagaataataccaaaaagggaag

SEQ ID NO: 21709 - DNA, 575 bp, Homo sapiens
cccttgatgcaggaaagtgtggctaacacggcatctaccatatgaatcagctcaccagaaaatgcatccttagtgtccacagcgcagcacatggccagaaggaagaaaacaggaacatgaagtcagtgctttcacagctatgaagccgccagggaaaatcccattcttagagtatcagagcctcctgcttgatgagggattctcccctgctgcccagtgactgctgcccaagccgacaggctgcaaagaacttcaagaagtactataggtcaaaagacactttackagatgtcatgagtagaatgcagtgctgtgtctcctcaatttggtttgaatgttgttgctgtttcataataccattttatagagcagtttaaggttcacagcaaaattacgcagaaagcacagagatttcccatatacctcctgccccacacgcacagcctcccgactaccaagatctttcaacagaatggtctgtttgttgcaatcaataaacatatattgacacatcattattacccaaagtccatagttcacattagggttcagtcttggagctgtagattccatgg

SEQ ID NO: 21710 - DNA, 595 bp, Homo sapiens
tttctagccaatgtgtttccataggtatagcatcctatgcatataacataaattaaataccagaaacacctggtcctcagtgtttaaattgtgatagacttgttaacagtagacaaatctatttcccgcccaccacccccaccaaccgacttttgtgttgcaccatatactggtatttggagggaaaaggttttgtcgcaggagaagttatataattctacagtgttatttttttccttggcaggactayctatggctgaggaccataagagttaaaagacttatagccaattaattgttctaggccagataggaagggttgtggacagccatttgttacttttaaaaattattagtttaagtaaaaaggccagcagaaaaaccaaaaggcaaagttgcaagactgacttatttttaacttctatgtgttgagctgctgtgagtttggtttttgttacagacttacagcaattagctatacaaaacataagcactgctctgaaaaattaaaaatatatatggatagataggtttatttttaccacttatcattgggagtattatacccaggaagctttgtggtaaggtattttat

SEQ ID NO: 21711 - DNA, 595 bp, Homo sapiens
tttctagccaatgtgtttccataggtatagcatcctatgcatataacataaattaaataccagaaacacctggtcctcagtgtttaaattgtgatagacttgttaacagtagacaaatctatttcccgcccaccacccccaccaaccgacttttgtgttgcaccatatactggtatttggagggaaaaggttttgtcgcaggagaagttatataattctacagtgttatttttttccttggcaggactatctatggctgaggaccataagagttaaaagacttatagccaattaattgttctaggccagataggaagggttgtggacagccatttgttacttttaaaaattattaktttaagtaaaaaggccagcagaaaaaccaaaaggcaaagttgcaagactgacttatttttaacttctatgtgttgagctgctgtgagtttggtttttgttacagacttacagcaattagctatacaaaacataagcactgctctgaaaaattaaaaatatatatggatagataggtttatttttaccacttatcattgggagtattatacccaggaagctttgtggtaaggtattttat

SEQ ID NO: 21712 - DNA, 565 bp, Homo sapiens
ccccttgtatatatctttcctacagtgctggtcatattctaacttctaatcatttgtagacttatctgggcattttctcccaggaggtcccaaaggacagagaccatcttgctcacctttgtccccactccagcacccagaatgtttcaataaggttttcctgaattaagtgggaagcaaagtattagattcaataccactacaatgggaaagtgagtgaataattgataaagtatactatgctctggaaatagattattgagtaatcagaggaaaacctcttgcaatgtagtatgtttttatatattaaattttatattatttatttatatttatattattaacatatttttgttattcattttgtttattaagatttactctatatatatatrtgtgtgtgtgtgcgcgtgtgtgtgtgtgtaacccaccttatttctaaaaaaaaattttggcagtcagtgactattaatagtagagcacaaactcttaacctttttttcctcccgctttcccagagtccttatcaccttctaatataataaagttttcttaactgtgatgt

SEQ ID NO: 21713 - DNA, 659 bp, Homo sapiens
gagggtgttggtggttcagaaatctaatctcagccaagctttttctggggggaatttggatgagtcagtttatcrtttggtgcggttacttccttaactatggtggggaaatccaactaatcttatacgtatgtgtgttttacaacgatttgataccacgctctgggcaaggcactgggtggttattggacgataaggtgattgtatggggcttccttgaaagcctagtgaccttcattcaagcatttcattttagttcatttcaacaagcattacctggagcgtctgttacacagatgtcctgaagcccaggatgagtaagacaccatccctgccccgaaaattgaaatctgtcataaataattattcttggaacaggagttgccaatgtgaatgcctagggaacaagacggtgatgctgtaagtccagaaggcagtgaacaggaaaagggttatttatgtgagcacaaaaagcaaggcgctcattaacccagctgtctaaacaagggcatctccaagtcgacttccgtgagaccttatcactaaaataaaagctggcgaactttggaggaattaaagcactcccttctagaatcaaactgctgcccagcctctcagggttttccacactttcatatgcgtgaaaacccccggcacgc

SEQ ID NO: 21714 - DNA, 659 bp, Homo sapiens
gagggtgttggtggttcagaaatctaatctcagccaagctttttctggggggaatttggatgagtcagtttatcgtttggtgcggttacttccttaactatggtggggaaatccaactaatcttatacgtatgtgtgttttacaacgatttgataccacgctctgggcaaggcactgggtggttattggacgataaggtgattgtatggggcttccttgaaagcctagtgaccttcattcaagcatttcattttagttcatttcaacaagcattacctggagcgtctgttacacagatgtcctgaagcccaggatgagtaagacaccatccctgccccgaaaattgaaatctgtcataaataattattcttggaacaggagttgccaatgtgaatgcctagggaacaagacggtgatgctgtaagtccagaaggcagtgaacaggaaaagggttatttatgtgagcacaaaaagcaaggcgctcattaacccagctgtctaaacaagggcatctccaagtcgacttccgtgagaccttatcactaaaataaaagctggcgaactttggaggaattaaagcactcccttctagaatcaaactgctgcccagcctctcagggttttccacactttcatatgcrtgaaaacccccggcacgc

SEQ ID NO: 21715 - DNA, 659 bp, Homo sapiens
gagggtgttggtggttcagaaatctaatctcagccaagctttttctggggggaatttggatgagtcagtttatcgtttggtgcggttacttccttaactatggtggggaaatccaactaatcttatacgtatgtgtgttttacaacgatttgataccacgctctgggcaaggcactgggtggttattggacgataaggtgattgtatggggcttccttgaaagcctagtgaccttcattcaagcatttcattttagttcatttcaacaagcattacctggagcgtctgttacacagatgtcctgaagcccaggatgagtaagacaccatccctgccccgaaaattgaaatctgtcataaataattattcttggaacaggagttgccaatgtgaatgcctagggaacaagacggtgatgctgtaagtccagaaggcagtgaacaggaaaagggttatttatgtgagcacaaaaagcaaggcgctcattaacccagctgtctaaacaagggcatctccaagtcgacttccgtgagaccttatcactaaaataaaagctggcgaactttggaggaattaaagcactcccttctagaatcaaactgctgcccagcctctcagggttttccacactttcatatgcgtgaaaacccccrgcacgc

SEQ ID NO: 21716 - DNA, 549 bp, Homo sapiens
tattcctcttatcctaaattgatgagctggatatttgaatagaattcttttcaattttatatttttactgatgctttcaagacccatatagtaactgaaaatctaggaacacattttagctctgtttctaaagctctggacactaaacaaatcagtgtccaatctaccaagtggagaaccacctgcagtaaaaagatcttagcttgggagactaagatacgaagatacttagagcatgtgacatgggtatttttttcactgtggtatttactgggagtttccactgttttttaattttatctaycaagcctctctaatagactgtcccaagctgggcaccagaaggttatataggaatggttgggatgtatggggacagtccagggaatatgattgtttaaaaccaaataaggcacagtaatacaccgctagcttctatatttaaatgccaacatgtacccagggggcatcagaatgtactacaattttagacatgagatttacataatgatgtcagataaatgcctttttcatttgctatttccatta

SEQ ID NO: 21717 - DNA, 585 bp, Homo sapiens
cttcatgagtgcttaggaccaagagttgggtagagctccagaagagttgaattattttatttggcgttctagaacccaactaggaaaaggagtctaaggttctggtttatttatttatttaattaattttattgtttgttttttatagagacagggtcttactctgtcacccaggctggagtgcagtggcgtgatcgccggtcactgcagcctccagctcccaggctccaatctcagcctctggagtagctgggaccacaggcatgcaccaccacagccatgcgccmccacagctggctcatttttaaatttttttgtagagacgaggtctcactgagtagcccaggctgttctcaagctcccagcctcaagagatccttcctccttggcctcacaaagcgctgggattgcaggcaggagaccccgtgttcagcctaaggttctgattggctcttctcgttgtcctgtgggcgaggggttgggggagtggaccagttcccagagccagctgtggatgtggcgggctccagggtcagatcttccccccatcaccaggaacgttcccctcctatcagaatgaggctg

SEQ ID NO: 21718 - DNA, 1172 bp, Homo sapiens
ctctctatgcactctatgaagagaccggacttttaaaatgttttaaatgccttattcacaacatctcatgatatttttgttttcctcttttaattgctctaatctaattaatgagtttcccctaagcaaagagttctcactttattgttactttttgtcttttcactacacgtatgcaacatttgatcttatttgctatttgtttttaagaacttttcttttttwaaaaaagtttatttatttaatttttattgagatgaagtctcgctatgttacccaggctggtcttgaatgcctgagcttaagtgatcctcctgcctcagtctcccaaagtgctgggattacaggtgtgagccaccgtacccagcctaaaaactttcttttcatttggaaataattttagaaacacagagagttacaacgatagtccagagagctcctgtagattctatccctgctttcgcctaatgttcactcttgattattttttagtttcaaatgtaatccatgttgcttggagaaagcatggaaaatattggaaatgaagtggatttttaaaaaaaaatcagtttaatattagcactaagacataaatccagttacctttaggaatctttctttgcagcatttttttcttttacttttcctttgaaataattatcagattacaggaagtggcaaggagagcagacagggctctcatgggcccttcacccagtttccctgcaacagctgccgctgatgtcaccatagcgctaactgacaccaggaaatgggtattgtacgatgtgtgcacagttctccaccattcgatcgcacgtgtagattcatgaagccaccgcccagtccagggtgtcccatcacccagctatctctctcgggctcccccttgctggtctcctcccccgaaccatcctcaacccctagcaaccactcctttgttctccagtgccacacttggtcatttcgagacagtggtatatacagaatcaggcagaacgtgaccttttgggactggcctttttgcttagtgcaatgcccgtgacatcgggcaggtgggtgtgtgcagtagctcacctcttcctaccgctgtattccagacaccacggtgtgtttagccggtcacctggtgaaggacatctgggttggctgtgtccggtttggggctgtta

SEQ ID NO: 21719 - DNA, 1172 bp, Homo sapiens
ctctctatgcactctatgaagagaccggacttttaaaatgttttaaatgccttattcacaacatctcatgatatttttgttttcctcttttaattgctctaatctaattaatgagtttcccctaagcaaagagttctcactttattgttactttttgtcttttcactacacgtatgcaacatttgatcttatttgctatttgtttttaagaacttttctttttttaaaaaagtttatttatttaatttttattgagatgaagtctcgctatgttacccaggctggtcttgaatgcctgagcttaagtgatcctcctgcctcagtctcccaaagtgctgggattacaggtgtgagccacmgtacccagcctaaaaactttcttttcatttggaaataattttagaaacacagagagttacaacgatagtccagagagctcctgtagattctatccctgctttcgcctaatgttcactcttgattattttttagtttcaaatgtaatccatgttgcttggagaaagcatggaaaatattggaaatgaagtggatttttaaaaaaaaatcagtttaatattagcactaagacataaatccagttacctttaggaatctttctttgcagcatttttttcttttacttttcctttgaaataattatcagattacaggaagtggcaaggagagcagacagggctctcatgggcccttcacccagtttccctgcaacagctgccgctgatgtcaccatagcgctaactgacaccaggaaatgggtattgtacgatgtgtgcacagttctccaccattcgatcgcacgtgtagattcatgaagccaccgcccagtccagggtgtcccatcacccagctatctctctcgggctcccccttgctggtctcctcccccgaaccatcctcaacccctagcaaccactcctttgttctccagtgccacacttggtcatttcgagacagtggtatatacagaatcaggcagaacgtgaccttttgggactggcctttttgcttagtgcaatgcccgtgacatcgggcaggtgggtgtgtgcagtagctcacctcttcctaccgctgtattccagacaccacggtgtgtttagccggtcacctggtgaaggacatctgggttggctgtgtccggtttggggctgtta

SEQ ID NO: 21720 - DNA, 527 bp, Homo sapiens
tctgtcaccacacaggcctgggatccaatatatggctactccagccaccaagtacataaattataattacatactcagggggcagggaagcggccactggatggtcttctggcccaggggtctcactgtgcccaacactttagccaggattcctttttattacctggccccgtcagccccttctctaacagggaggccacagcgacacttttggcctccagtatcaaggtccactcacatcccgcgtccatttgtcctcaaaatctctggattttcccagcgtgcagccagctgagtgagtgacagcgggattctacagaacatccttgtcaaggtattgcctggtccttccttctggtgacctggccacctctgcaatcaatggttccagacaggaaattagctcaagtccaggaatggagtagggaaccacgatattttactggagtccccgccctyggcctctttcttccttcctctgccgtccgccagggcggcttggctcaacatgacccatcgctttctcc

SEQ ID NO: 21721 - DNA, 529 bp, Homo sapiens
gagccctggactcatggctaccatgtggctgccacactcaggcacacttaggcacatacactcacactcaggcacacttagacacacacaytcacactcaacctcagacgcagacacacaccacacactcacagatgcacacagtctcagacacagacacacaccacacacagatacacacaccacagactcaaactcagtctcagacacagacacacaccacacactcagatgcacacaccacacacactcagtctcagacacacacacacaccacatttgcaaacctgctcatcagaagagggacctcgcccccagccgctccgccaccttccaggacagctctgaagggagccctgtcccggagcccagggacctctccccaacccggctgcgcctcacctcaaggaggaaccccggccctggctgggggactgtgaccagggtggggagtggggaccccagacagagccctaccagggacccctgtcactctgtccccggctgggctcaggtggggacctcacgg

SEQ ID NO: 21722 - DNA, 529 bp, Homo sapiens
gagccctggactcatggctaccatgtggctgccacactcaggcacacttaggcacatacactcacactcaggcacacttagacacacacattcacactcaacctcagacgcagacacacaccacacactcacagatgcacacagtctcagacacagacacacaccacacacagatacacacaccacagactcaaactcagtctcagacacagacacacaccacacactcagatgcacacaccacacacactcagtctcagacacacacacacaccacatttgcaaacctgctcatcagaagagggacctcgcccccagccgctccgccmccttccaggacagctctgaagggagccctgtcccggagcccagggacctctccccaacccggctgcgcctcacctcaaggaggaaccccggccctggctgggggactgtgaccagggtggggagtggggaccccagacagagccctaccagggacccctgtcactctgtccccggctgggctcaggtggggacctcacgg

SEQ ID NO: 21723 - DNA, 1283 bp, Homo sapiens
gtctgtctagaacatgttatcttgataatggggaaaaatgagcttttaaaaataaaagacaacgtaataatacaatttaaagataatgatatgtttgtccattaaaacttcgtaagaatgggctccctccatgaaaaattactcataggcctttactgaaagaacctttaaatggtaaggtacgccttttatgtgtttttgggtatgttttcagaatgtttcttaggatcaccagatcagaaggccacaatgaccaaccaccagcttgggcaagaccatgcaaaaccaaacttcagatttcagctaattgtaccccagaaacctcccaaagaaaatgtcaaaagcagctgggcacggtggctcacgcctgtaatcctagcactttaggaggctgaggcaagtggatcacttgaggtcagaagttcgagaccagcctggcccacatgacgaaaccctgtctctactaaaaatacaaaaattagctgggcgtgatggcaggcgcctgtaatcccagctactcaggaggctgaggcaggagaatcgcttgaactggggaggcggaagttgcagtgagccgagatcatgccattgcgctccatcctgggtgacagagcgagactctatctaaaaaaaaaataaatwaaaaaaaaaatgtaaaaagcagtcttgatgaggtgttaaatcctaataaggtcttgcaatcaagtttttctcaaagcataacttcaattccattttatacttgaacaataaatatacttcaacaataacattttccttttattataaaaagaaacatgttcttccaactcctcaaaatataagatatctagttatgtagctgcctcttaactttttagcggtgtttttaaaaataggaaactatttgaaaacatgaacctactgattccaaagccctgcaatgatttagtgaagctcagtgtctcatactttgtttgttcacagcgtgaaccattatggagaaagcttattaaaaagttctcatttcacattacaaatccataatctaacgcgctaatcatactcattcaattgctgcacatccataaatgccattgtacacaatcatcattaaaattcactgtggaataataacttttaaaatctcatcttgaacaaaaagctatttgaaattaccatattatctttatttctagattaaatttggttaaatgcctttgcacgctttttaatataagaatctaaatataatgaagaaacaacccctaaaatattccattaccacagaaaatataaactgt

SEQ ID NO: 21724 - DNA, 1283 bp, Homo sapiens
gtctgtctagaacatgttatcttgataatggggaaaaatgagcttttaaaaataaaagacaacgtaataatacaatttaaagataatgatatgtttgtccattaaaacttcgtaagaatgggctccctccatgaaaaattactcataggcctttactgaaagaacctttaaatggtaaggtacgccttttatgtgtttttgggtatgttttcagaatgtttcttaggatcaccagatcagaaggccacaatgaccaaccaccagcttgggcaagaccatgcaaaaccaaacttcagatttcagctaattgtaccccagaaacctcccaaagaaaatgtcaaaagcagctgggcacggtggctcacgcctgtaatcctagcactttaggaggctgaggcaagtggatcacttgaggtcagaagttcgagaccagcctggcccacatgacgaaaccctgtctctactaaaaatacaaaaattagctgggcgtgatggcaggcgcctgtaatcccagctactcaggaggctgaggcaggagaatcgcttgaactggggaggcggaagttgcagtgagccgagatcatgccattgcgctccatcctgggtgacagagcgagactctatctaaaaaaaaaataaattaawaaaaaaatgtaaaaagcagtcttgatgaggtgttaaatcctaataaggtcttgcaatcaagtttttctcaaagcataacttcaattccattttatacttgaacaataaatatacttcaacaataacattttccttttattataaaaagaaacatgttcttccaactcctcaaaatataagatatctagttatgtagctgcctcttaactttttagcggtgtttttaaaaataggaaactatttgaaaacatgaacctactgattccaaagccctgcaatgatttagtgaagctcagtgtctcatactttgtttgttcacagcgtgaaccattatggagaaagcttattaaaaagttctcatttcacattacaaatccataatctaacgcgctaatcatactcattcaattgctgcacatccataaatgccattgtacacaatcatcattaaaattcactgtggaataataacttttaaaatctcatcttgaacaaaaagctatttgaaattaccatattatctttatttctagattaaatttggttaaatgcctttgcacgctttttaatataagaatctaaatataatgaagaaacaacccctaaaatattccattaccacagaaaatataaactgt

SEQ ID NO: 21725 - DNA, 581 bp, Homo sapiens
tgtccatagaaatattccaccatttaatagtctcagtctctacaagtaatcaaaattcaaaccatgtgattaatggcaatacaataaaatggcagttttattttttcagtaactttgcatctttcagttactataaaaatgcagttttctgtagcatgatagttctaaaaaaaatcctttcttctaaggatattgcttgtgaaaatgatgtaytgactctctacatattaaagttttcaaaatggaattccctccctacatttcagtgatctccaatagataatgttattattcaactgtatcctgctattaagatcagaataagaaatagcagcttcagatttcccatcctttttttttgtttctgttccgttcccagtagtttctttttttcattcatcttcagatttatccatccctggcaatttcaagctagaggaaacaaattaagaaaaaaattaattgactttatttgctttaatgctgccagcctatattatctgctttcttaaatgagtttggaattgccagctttgagggtattacactacattttgggttgctgccagcatatcctgaac

SEQ ID NO: 21726 - DNA, 525 bp, Homo sapiens
cccaaatgatctaaaggaacctggttgttttgctagtcttttatgtgagatgcattcctaatgcaatctgtggaaactcttgtgaacattggcacagattgatgactatatgtacaaaattccacttagtggttttagttataagggctatttttaacaaagtttgaggaagacagtctatgtataattcctttgaagcatattatcctataaaccctcaaaaatggtagcatatctttgagctacgaaatgaatcattctaattgcactaaaacaacaaaactcaccaactaaaacgccatcaacaaaatcttagtatttttctctgacagagaataaaagttcaccatcataatgactttttttttcaaagcttttgatttttctttcctctttttttttcttactctaaaccagtaggtttataagccgtgtacttgaasagcaaagccatttgccatttggtagaactggctgacatttcattttttctgggcagattgcagattagtttgacattatttt

SEQ ID NO: 21727 - DNA, 555 bp, Homo sapiens
tagataacaatttgaagtttttaaaaaaattactgaaacaacatcattgcttcaatttttaatatcttcttttaagaaagtacatacaataaatgtgtaaatttacatttagttataaaattaaagwcatttaattttttaaaaaaatggctggtcttaggacaacctgttattatttattagtgaacttggtcagaaattcaagttttgttattaatcaaaaagataatcattggatacttaagaattttctaaatgcataaaaatttatgaaatcattagaaagttgggaaaaatcctcacaacctagcaaacaaattcccctttttaatactgtcaaatcataatttggaagcaagcatatgattaatgtaaagtccaattttgttagtattattaccttctgtggtaaaggagaaagtatgttagaaaacagttgataatttattttgtgtttattgcaagaatgaaattagttatctattctttataaatgatcagtactcaaggtggattaattatgtagattttaatttcatccacagttgtgaaact

SEQ ID NO: 21728 - DNA, 636 bp, Homo sapiens
gagcatgttgtacatgtgaatcatatgactttcaggtgtattctctgttttttattttatacaaataaaataatagatctgccttttaaataatagatcttaccatttatcttgaaattgaaacaaagaagatcattagagagctacagaatgccatagaaattacaggaaaagaattaggtgactataactaaagggggtcacagtaaaataataccaacatacaccacacacacacacacacacacacacayacacaagcattggctaataatttttcaggtatctttatctaagataaataatttttcaagtatctttatctaagataatttttgttttacccttcagtggatttacttcacatatatgtatagtggccccttaaagagaggcagccaaacaaacactgcatttgtattattgctttcttatttctaccatataaaatgtaagggctgttttgtcttctgttggggatacagtaaacaagggagaaatgagctggtaaggagaggataaactacatctggaaaagtcagagctagtttgagatgggtaagcatgtaaagagaggaagaaagaaggaataatgaatgccaatcaggaagttggggctatagccaagaattttaa

SEQ ID NO: 21729 - DNA, 636 bp, Homo sapiens
gagcatgttgtacatgtgaatcatatgactttcaggtgtattctctgttttttattttatacaaataaaataatagatctgccttttaaataatagatcttaccatttatcttgaaattgaaacaaagaagatcattagagagctacagaatgccatagaaattacaggaaaagaattaggtgactataactaaagggggtcacagtaaaataataccaacatacaccacacacacacacacacacacacacatacacaagcattggctaataatttttcargtatctttatctaagataaataatttttcaagtatctttatctaagataatttttgttttacccttcagtggatttacttcacatatatgtatagtggccccttaaagagaggcagccaaacaaacactgcatttgtattattgctttcttatttctaccatataaaatgtaagggctgttttgtcttctgttggggatacagtaaacaagggagaaatgagctggtaaggagaggataaactacatctggaaaagtcagagctagtttgagatgggtaagcatgtaaagagaggaagaaagaaggaataatgaatgccaatcaggaagttggggctatagccaagaattttaa

SEQ ID NO: 21730 - DNA, 636 bp, Homo sapiens
gagcatgttgtacatgtgaatcatatgactttcaggtgtattctctgttttttattttatacaaataaaataatagatctgccttttaaataatagatcttaccatttatcttgaaattgaaacaaagaagatcattagagagctacagaatgccatagaaattacaggaaaagaattaggtgactataactaaagggggtcacagtaaaataataccaacatacaccacacacacacacacacacacacacatacacaagcattggctaataatttttcaggtatctttatctaagataaataatttttcaagtatctttatctaagataatttttgttttacccttcagtggatttacttcacatrtatgtatagtggccccttaaagagaggcagccaaacaaacactgcatttgtattattgctttcttatttctaccatataaaatgtaagggctgttttgtcttctgttggggatacagtaaacaagggagaaatgagctggtaaggagaggataaactacatctggaaaagtcagagctagtttgagatgggtaagcatgtaaagagaggaagaaagaaggaataatgaatgccaatcaggaagttggggctatagccaagaattttaa

SEQ ID NO: 21731 - DNA, 636 bp, Homo sapiens
gagcatgttgtacatgtgaatcatatgactttcaggtgtattctctgttttttattttatacaaataaaataatagatctgccttttaaataatagatcttaccatttatcttgaaattgaaacaaagaagatcattagagagctacagaatgccatagaaattacaggaaaagaattaggtgactataactaaagggggtcacagtaaaataataccaacatacaccacacacacacacacacacacacacatacacaagcattggctaataatttttcaggtatctttatctaagataaataatttttcaagtatctttatctaagataatttttgttttacccttcagtggatttacttcacatatatgtatagtggccccttaaagagaggcagccaaacaaacactgcatttgtrttattgctttcttatttctaccatataaaatgtaagggctgttttgtcttctgttggggatacagtaaacaagggagaaatgagctggtaaggagaggataaactacatctggaaaagtcagagctagtttgagatgggtaagcatgtaaagagaggaagaaagaaggaataatgaatgccaatcaggaagttggggctatagccaagaattttaa

SEQ ID NO: 21732 - DNA, 685 bp, Homo sapiens
acacaaacacacacacagagaccgagagagagaaatcagcactatagacaagactatataatctgttgtatcaagacaactatcaattatattttttattgggtatacggctaacttgcacagacatcctaaaacattatttaaaaaaatggttggcaaatagaacaagtaatcagaggaagagyagaacctttaaaaaactcgttttcaaggcagcaaaaaactctaacagactctcttaagaagtgttttagctcccactacttagcattaataagtgtgaaagggattcccagtctcaggcctacatccctgtcagctcttagtatttacgtgcagctccttaattcatgctcaaagattatgttatcaacaatgattaccagtggtgggaaagccgggcttgaaaaggctgaataatggctaagactcgcttctcttcgtgcacatttaaaagcagtgctttcattgatagccaaaatcctgctaacaggggtgggtattattgtgcctactcctcagtttcatgaagagatctgttgtttcttagaatttccacgccacctcatctagtttcatgttgtttttccttgtgtcattaaaaaataccttgttcccactttttctgagtgctgtttccactgaggctggccatccagcagtggcctgaggttcttaatatttc

SEQ ID NO: 21733 - DNA, 551 bp, Homo sapiens
cctgaaagttcagtaatagcttcagggcctgtattagaagaaataggttccctcgcrggtaataggaaacttcaccatgttgtttgaattaataggggatgattgtgttcatagtctcaaattagacaaaattgaaacagcagctgaaaggtgttatcaaggaacctaacacctctatctacctgctacatcattcttagagacttttatcctcatagttacaagatacccattgaaaggccaggcattttatctgtatcccaggctgggaagaagggagaaaagagaaagagcaacctgcaaaagtcttcacctttttattcagaaaggagatgcttcctctctgtatatcttattaactagaattattttgcttagatcgccctagctgcaagagaggctgcagaaatggctttcttttatctgagcttactgccacttcagttcttttgttagaaaagtgatattattgggtatgttattggcagtggctgcccatagggatttattgaattgtgaagtaatgattcatcactcatgcaattctctca

SEQ ID NO: 21734 - DNA, 551 bp, Homo sapiens
cctgaaagttcagtaatagcttcagggcctgtattagaagaaataggttccctcgcgggtaataggaaacttcaccatgttgtttgaattaataggggatgattgtgttcatagtctcaaattagacaaaattgaaacagcagctgaaaggtgttatcaaggaamctaacacctctatctacctgctacatcattcttagagacttttatcctcatagttacaagatacccattgaaaggccaggcattttatctgtatcccaggctgggaagaagggagaaaagagaaagagcaacctgcaaaagtcttcacctttttattcagaaaggagatgcttcctctctgtatatcttattaactagaattattttgcttagatcgccctagctgcaagagaggctgcagaaatggctttcttttatctgagcttactgccacttcagttcttttgttagaaaagtgatattattgggtatgttattggcagtggctgcccatagggatttattgaattgtgaagtaatgattcatcactcatgcaattctctca

SEQ ID NO: 21735 - DNA, 551 bp, Homo sapiens
cctgaaagttcagtaatagcttcagggcctgtattagaagaaataggttccctcgcgggtaataggaaacttcaccatgttgtttgaattaataggggatgattgtgttcatagtctcaaattagacaaaattgaaacagcagctgaaaggtgttatcaaggaacctaacacctctatctayctgctacatcattcttagagacttttatcctcatagttacaagatacccattgaaaggccaggcattttatctgtatcccaggctgggaagaagggagaaaagagaaagagcaacctgcaaaagtcttcacctttttattcagaaaggagatgcttcctctctgtatatcttattaactagaattattttgcttagatcgccctagctgcaagagaggctgcagaaatggctttcttttatctgagcttactgccacttcagttcttttgttagaaaagtgatattattgggtatgttattggcagtggctgcccatagggatttattgaattgtgaagtaatgattcatcactcatgcaattctctca

SEQ ID NO: 21736 - DNA, 551 bp, Homo sapiens
cctgaaagttcagtaatagcttcagggcctgtattagaagaaataggttccctcgcgggtaataggaaacttcaccatgttgtttgaattaataggggatgattgtgttcatagtctcaaattagacaaaattgaaacagcagctgaaaggtgttatcaaggaacctaacacctctatctacctgctacatcattcttagagacttttatcctcatagttacaagatayccattgaaaggccaggcattttatctgtatcccaggctgggaagaagggagaaaagagaaagagcaacctgcaaaagtcttcacctttttattcagaaaggagatgcttcctctctgtatatcttattaactagaattattttgcttagatcgccctagctgcaagagaggctgcagaaatggctttcttttatctgagcttactgccacttcagttcttttgttagaaaagtgatattattgggtatgttattggcagtggctgcccatagggatttattgaattgtgaagtaatgattcatcactcatgcaattctctca

SEQ ID NO: 21737 - DNA, 650 bp, Homo sapiens
cccagctctggacagctacttatcaagtccaagtctctttctggaacttcatcaatcgctacaacattcccaccacaaaccgtttactctatcaatgtgctcaccacaacaattcacttatatatttcacttatgacaatgacactcttccccttcttgaaaattaaatgacataagtccactttcagtctttcctgttatttccaattttcaaatatcattgacaatggtcagcaatctctctgcaaggtagtagcatcaggctgcgatgaaatggaaactgctcacagataattttttgaaaagaaaagaatgacttcctatggattctgagaaaagttcagattttaattttttaaccartttccaagaagataatactgcactgctgccaaccaaattgaatcatagtaaatatggttgaataaatagaaaaaaattattttaaattaaaatataagagccactgatttgcatttagtagaatatatcagggctgaaagtttgatttctccacttatgttaatggctactttagaaatgagatcctaaaatgttgcaggttgaggtccccagaaaacagacactgagacagagatttgaacaaagcaagtttattagctctcagcatgtacacttgtgaagaagtg

SEQ ID NO: 21738 - DNA, 664 bp, Homo sapiens
ttgtgagcacacagtgaatctcagctgagaggagtccgtggccgagagtagcatcaacaacattaacatgatattcctgtacctgtaagaaagtatatcttgataggtagttgatttgcaagtactgtgaaaaggtatcctatggaagatgtaaaaatatcttcataacattatttgagaggccaattttggtatccaaaaatttcttacttttaaattaagcaacagaagttagttaacaagttattctactctagtttcagattttttatgtagtgtttttgttttgtttgtagctgagatgattgacaaattgacattgacattcaaccgtacccgccaagctgtcatcacaaaagagttgattgaaattatctctggtgctgcagctctgtgagtaattgtagattgtcgccttcagagaattttttttcctcttgctgtgtctgcttgtttggatgcttaaaagtttttcgtttttktcttttgaagttgaaactcattgctgaaacttgcatcctaactcttaggctataaagatgtggtaaaaatgggacctctttgctttatttttattgtttcagctggaaacactcgggcttagttttcggttttctaaaggattaggaatgggatgtggataattcagtatcatttatgaaat

SEQ ID NO: 21739 - DNA, 542 bp, Homo sapiens
gagggcagttggtccaggacccacacttgctttcctcgtgtttcctgatcctgccttgggtctgtagtcatacttctggaaattccttttgggtccaagacgaggaggttcctctaagatctcatggccctgcttcctcccagtcccctcacaggrcattttcttcccacaggtggaaaaggagggagctactctcaggctgcgtgtaagtgatgggggtgggagtgtggaggagctcacccaccccataattcctcctgtcccacgtctcctgcgggctctgaccaggtcctgtttttgttctactccaggcagcgacagtgcccagggctctgatgtgtctctcacagcttgaaaaggtgagattcttggggtctagagtgggtggggtggcgggtctgggggtgggtggggcagtggggaaaggcctgggtaatggagattctttgattgggatgtttcgcgtgtgtggtgggctgtttagagtgtcatcacttaccatgactaaccagaatttgttcatgactgttgttttctgtagc

SEQ ID NO: 21740 - DNA, 542 bp, Homo sapiens
gagggcagttggtccaggacccacacttgctttcctcgtgtttcctgatcctgccttgggtctgtagtcatacttctggaaattccttttgggtccaagacgaggaggttcctctaagatctcatggccctgcttcctcccagtcccctcacagggcattttcttcccacaggtggaaaaggagggagctactctcaggctgcgtgtaagtgrtgggggtgggagtgtggaggagctcacccaccccataattcctcctgtcccacgtctcctgcgggctctgaccaggtcctgtttttgttctactccaggcagcgacagtgcccagggctctgatgtgtctctcacagcttgaaaaggtgagattcttggggtctagagtgggtggggtggcgggtctgggggtgggtggggcagtggggaaaggcctgggtaatggagattctttgattgggatgtttcgcgtgtgtggtgggctgtttagagtgtcatcacttaccatgactaaccagaatttgttcatgactgttgttttctgtagc

SEQ ID NO: 21741 - DNA, 542 bp, Homo sapiens
gagggcagttggtccaggacccacacttgctttcctcgtgtttcctgatcctgccttgggtctgtagtcatacttctggaaattccttttgggtccaagacgaggaggttcctctaagatctcatggccctgcttcctcccagtcccctcacagggcattttcttcccacaggtggaaaaggagggagctactctcaggctgcgtgtaagtgatgggggtgggagtgtggaggagctcacccaccccataattcctcctgtcccacgtctcctgmgggctctgaccaggtcctgtttttgttctactccaggcagcgacagtgcccagggctctgatgtgtctctcacagcttgaaaaggtgagattcttggggtctagagtgggtggggtggcgggtctgggggtgggtggggcagtggggaaaggcctgggtaatggagattctttgattgggatgtttcgcgtgtgtggtgggctgtttagagtgtcatcacttaccatgactaaccagaatttgttcatgactgttgttttctgtagc

SEQ ID NO: 21742 - DNA, 542 bp, Homo sapiens
gagggcagttggtccaggacccacacttgctttcctcgtgtttcctgatcctgccttgggtctgtagtcatacttctggaaattccttttgggtccaagacgaggaggttcctctaagatctcatggccctgcttcctcccagtcccctcacagggcattttcttcccacaggtggaaaaggagggagctactctcaggctgcgtgtaagtgatgggggtgggagtgtggaggagctcacccaccccataattcctcctgtcccacgtctcctgcgggctctgaccaggtcctgtttttgttctactccagscagcgacagtgcccagggctctgatgtgtctctcacagcttgaaaaggtgagattcttggggtctagagtgggtggggtggcgggtctgggggtgggtggggcagtggggaaaggcctgggtaatggagattctttgattgggatgtttcgcgtgtgtggtgggctgtttagagtgtcatcacttaccatgactaaccagaatttgttcatgactgttgttttctgtagc

SEQ ID NO: 21743 - DNA, 542 bp, Homo sapiens
gagggcagttggtccaggacccacacttgctttcctcgtgtttcctgatcctgccttgggtctgtagtcatacttctggaaattccttttgggtccaagacgaggaggttcctctaagatctcatggccctgcttcctcccagtcccctcacagggcattttcttcccacaggtggaaaaggagggagctactctcaggctgcgtgtaagtgatgggggtgggagtgtggaggagctcacccaccccataattcctcctgtcccacgtctcctgcgggctctgaccaggtcctgtttttgttctactccaggcagcgacagtgcccagggctctgatgtgtctctcacagcttgaaaaggtgagattcttggggtctagagtgggtggggtggcgggtctgggggtgggtggggcagtggggaaaggcctgggtaatggagattctttgattgggatgtttcgcgtgtgtggtgggctgttyagagtgtcatcacttaccatgactaaccagaatttgttcatgactgttgttttctgtagc

SEQ ID NO: 21744 - DNA, 572 bp, Homo sapiens
ctggatgtcatggaagcctggcccatcagcagagaatgataagctggagttctggagggtctgatttccaaggaatcacccccttggaagctcctctaatacaccctgatgagattaacctgattaggtccattgtttgataaaaagaggaggaagtttaatcacttccacattctttgcccacgactaaccctgattggatttggggctatggttcaaatgtatgaccgattgatttttttcacttcttctgttggacttttgaaaaaaagttctctgaaaaggaatttagaggaaagagacttattccagtgaacagttacagtttgcaaacccaasagacacaacttttggtacaaaaggaagttacattccagagaacaaggggaggctttgtcttttctagagaaaattcccgctcagaatcccactcaggtctgcttatgcaaatgaaagattcaaactttttagttctgattacttggctctagctgggttctgattagtcaaagcaggtcacagtctactggtggcgtaaacaggaacaggcagctatgtaagtcccaaagttt

SEQ ID NO: 21745 - DNA, 572 bp, Homo sapiens
ctggatgtcatggaagcctggcccatcagcagagaatgataagctggagttctggagggtctgatttccaaggaatcacccccttggaagctcctctaatacaccctgatgagattaacctgattaggtccattgtttgataaaaagaggaggaagtttaatcacttccacattctttgcccacgactaaccctgattggatttggggctatggttcaaatgtatgaccgattgatttttttcacttcttctgttggacttttgaaaaaaagttctctgaaaaggaatttagaggaaagagacttattccagtgaacagttacagtttgcaaacccaacagacacaacttttggtacaaaaggaagttacattcyagagaacaaggggaggctttgtcttttctagagaaaattcccgctcagaatcccactcaggtctgcttatgcaaatgaaagattcaaactttttagttctgattacttggctctagctgggttctgattagtcaaagcaggtcacagtctactggtggcgtaaacaggaacaggcagctatgtaagtcccaaagttt

SEQ ID NO: 21746 - DNA, 596 bp, Homo sapiens
cgcccaagaatcagggccaggtcacactaggtcagggcagggtaagtgtgacttaagggctacaggcaggtcaagttttcatgggactcagctaccttagacccctccccaccagggcctactccctccctcaatcatgtggttcagcccctccatgtgcacctacaccctgatgtcagagacacaatcatcccagggtccctgacagcgagtgaggtggccttgggagatgcacttcccagccctcctcatcagtcttgggcactgtcaggccccttcttggtgcctccagcacatcagcggtgtggcaggtgccttcaccagagctgctgggtggccaggccaggcctgagacagagcctgcaagggcagagaactctagggccatagtggggcagagaaggggttcctcttggagcctaatcatagaacccctgcctcaagtcacaacctacaagttagaaggaaacttaagggtcctgattcccaccaccctgtctggccccayttcatagatgtgaacgctgagacccctatagcaaagaggaccgctttgatctccaccttctcaatggccctgctgggtaggatcccct

SEQ ID NO: 21747 - DNA, 576 bp, Homo sapiens
acattgttgacctggagttgtcatcctttgatgcaggttatgacacacctccgtgtgatttatgagcgcatgaatcagtctctctccctgctctacaacgtgcctgcagtggccgaggagattcaggatgaagttggtaagtaagctgttcttttgatgctgcacatggacatgtattttcccccagaggaaaattgaggaagtgagttatctgtttgaggaatatggawgttaatagaacagcttgccttttacgatgaaactgtcaggctggaactagcttactagccttagcaattgaatcagttcttacctctccatacttgtaagactggaggaatgtcgcctgacttagggtatagttttgtaataattggacacttgttattgaattatacgtggcagcattttttctaatttgcccaatcttgttatggctctcaaattatgatgctttggtactttacaattaatggggaaaaaaactcattcttcatcttttgagtgtcacgattgttccatcttacaaatgaaaaagctcaaacttaaaatttgagtaacttactggcctgtgtc

SEQ ID NO: 21748 - DNA, 525 bp, Homo sapiens
cagaccagttctctaggggcgtcgacgtgtgaaactgattttaaagaaaacaggcggtggcctttctctcggccccacgtggcccagtagcgctcaccttccgtcccttcttccgcgctcagtaaccaatttaggccgctcctgcagaactcgggctcctgcccaccggcccacagcgtccacctgaggcctcktcctcccagcaaaggtcgtccctccggaacgcgcctcctgcggcctctccagagcccctcccgcgcgtcctctcagccccgctcgcctcctcccggggcctccctctcccgcctgcccccaggcccgtctccctcgcgggctgaggcaggttcggcagcacggcgcccggggcgggggtcactctccaccaccgcgtggtgcccacagctcacggcgctcccgggtgacggtcccctcggctgtagggcgtcctgaagagcggcctgctcggagctgagcgcacggggttgcctgcccctgggcgtctctggccctcaccagccccgtctt

SEQ ID NO: 21749 - DNA, 658 bp, Homo sapiens
aatgaatgaaaaaaaaaaaaaaagaaacggtccctgctttaaaggagctcaaagtctagtagcagaaaaaatgcaatcctaggattccaatgcaatatggtgagtgcagctctagaatcaagtatagaacaccatggggaaccagaaagaagcatctgaaccagcctggggctgagggaatagggccaggcaaggctttctgtggaaagtgacaggtgattgccaaagttgtgtgacactgatggtcaataatgtaggacttgagcagggtgtggaggtgcccacctgtagtctcagctacttgggaggctgaggtggaaggattgctttagcccagggttcaaggatgcagtgagctataattgcaccactgcgctccagcctgggcaacatagcaagaatccatctcttaaaaaraaatctaggactctcctagaatccttgataaaataatctgaaggaagagagatggggaaaaaacagttgaggtgtctttccagggagcttatccagactgcctccaggggagatgttatggccctaaccataggtgttgtctcaatccaatataattaggggtcaagcccagtcaaacccttctcagccctcaagccctccaagttgcatcacaaatgccacctcctccatgtggtctctc

SEQ ID NO: 21750 - DNA, 527 bp, Homo sapiens
cgtggatgctgtctgcacacattgtgtgtttgcatttccagtgtaaaagaataagaacaaaaggaaatggggaaactctgcagggagttgtgggatgaggggcagggaggcagagcttcttcgagaatgaagggagcagaggaaagacagtcacgggctgtgcagaggtgtggttctggggcttccagaagagccgtttccacccagttcctcgtgggtgatgggcaggaagatgctttgattctcccaagcccctaaagtggcatcagcaaattgatggcctagagagtcaccttaaaatggaaagaaggagccaccccaaaggtcagaacaagaaaggcactggttggaaaggagagcaaaggtgaagaagtggcagatactgacgttttcagcctggactaagctcattaagtggctccaggcaggccaggcgtggtggctcacccygtactttgagaggccgaggtgggaggactgcttgagtccaagagttcaagaccagcctgggcaacatagtgagaccc

SEQ ID NO: 21751 - DNA, 540 bp, Homo sapiens
tatagggtttggtactatccgagggttcaggcatctacttgtggtcttggaacatatgccccgcagataaggggggactgctgtacaatgcaaaggacaaagattaaattatattagcaatctaggagcagaagggcaagactgcttttttaaaaaacagctaaaggtttaggaggttttattaatatttaaattgtattgaaaccacagctgcagcctttgactccagcatagagatatgcaaatatggctttcaaaagaaaggcaatttcagacagccctcaaagtaacargaacaaataaaacaaatgattttgtaatttatctttattgactgatgttgcacaaggcacaggccataccctgtgagagtcagcaacagccgagctctctgaggagagaagagaaagccaggctggagggagaggcaggccgacccatagacaggtgacaggaaagacacagagcaggcagatgggagaagaagacaactaaattaaaagggaaggaaaataaaaacccagccctgggtcctgtaga

SEQ ID NO: 21752 - DNA, 540 bp, Homo sapiens
tatagggtttggtactatccgagggttcaggcatctacttgtggtcttggaacatatgccccgcagataaggggggactgctgtacaatgcaaaggacaaagattaaattatattagcaatctaggagcagaagggcaagactgcttttttaaaaaacagctaaaggtttaggaggttttattaatatttaaattgtattgaaaccacagctgcagcctttgactccagcatagagatatgcaaatatggctttcaaaagaaaggcaatttcagacagccctcaaagtaacaggaacaaataaaacaaatgattttgtaatttatctttattgactgatgttgcacaaggcacagsccataccctgtgagagtcagcaacagccgagctctctgaggagagaagagaaagccaggctggagggagaggcaggccgacccatagacaggtgacaggaaagacacagagcaggcagatgggagaagaagacaactaaattaaaagggaaggaaaataaaaacccagccctgggtcctgtaga

SEQ ID NO: 21753 - DNA, 587 bp, Homo sapiens
ggattaaagccacaatagaataacatgttagrccatattcagtagaaaaagatgaacaattaactgataaatttgtgcacatggcaaattagttaatgggaaccataggagaatttatttctagatgtaaataattattttaagtttgccctatggtggccccacacatgagacaaacccccaagatgtgacttttgagaatgagacttggataaaaaacatgtagaaatgcaagccctgaagctcaactccctattgctatcacaggggttataattgcataaaatttagctatagaaagttgctgtcatctcttgtgggctgtaatcatcgtctaggcttaagagtaatattgcaaaacctgtcatgcccacacaaatctctccctggcattgttgtctttgcagatgtcagtgaaagagaaccagcagctcccatgagtttggatagccttattttctatagcctccccactgaagggagcaaagtttaagaaccaaatataaagtttctcatctttatagatgagaaaaattttaaataaagtccaagataattaaatttttaaggatcatttttagctcttt

SEQ ID NO: 21754 - DNA, 587 bp, Homo sapiens
ggattaaagccacaatagaataacatgttagaccatattcagtagaaaaagatgaacaattaactgataaatttgtgcacatggcaaattagttaatgggaaccataggagaatttatttctagatgtaaataattattttaagtttgccctatggtggccccacacatgagacaaacccccaagatgtgacttttgagaatgagacttggataaaaaacatgtagaaatgcaagccctgaagctcaactccctattgctatcacaggggttataattgcataaaatttagctatagaaagttgctgtcatctcttgtgggctgtaatcatcgtctaggcttaagagtaatattgcaaaacctgtcatgcccacacaaatctctccctggcattgttgtctttgcagatgtcagtgaaagagaaccagcagctccyatgagtttggatagccttattttctatagcctccccactgaagggagcaaagtttaagaaccaaatataaagtttctcatctttatagatgagaaaaattttaaataaagtccaagataattaaatttttaaggatcatttttagctcttt

SEQ ID NO: 21755 - DNA, 683 bp, Homo sapiens
aaaaattgccaggcgtggtggtgggcgcctgtaatcccaactactctggaggctgaggcacgagaatcgcttgaacccgggaggcggagtttgcagtgagctgagatcctgccactgtacttcagcctrggcgacaagagcaaaactctgtctcaaagaaaaaaaaaagatgctggccaccttcagagctggcgtcagtcattcagatcatatctgtgcctattgctcagtaaagtcagggaatcaggggatctgagtggggggatctgccagcctcctcctccccctccccactcttgacttccttatggtctaggctgtggctcattccaaacatgcctcctttctgatcaaggcactcctccctccgggaagccctccctagccatttcagtccacacaccctgttctgagtatcacagagcaagccttgtgcagtttggcccgcgggattctgtcattattatttccttggtgtgttaagtagctatagccaccccttccctgaggcagaccacaataagcatttctttttcccatgagggttggcaggtgtggctgcactcgctaatgcgtctgtagggtcaactgacggaggttggccctggctgggtggctctgattcaaataatgggtccagctgagtctggctcctcgttgagggttgggcctagatctgctcc

SEQ ID NO: 21756 - DNA, 556 bp, Homo sapiens
tgacgtgccttcaagccagcagatgatgctcagaggggcgcgctgsggcacagtccaggagcagcagtgtctgcgggctgtgtgcatgggtgtagtaagtacccaaggacagggctgaaggggtggaagtggccactgtggagtggcaggggtgaggcctctgcacgtttgggagtagctcagtattggtttgtaagccagcaccctgtgtgtgtcgccgtggtgaaataaaatacagcttgttttaggggttgagtgaggtccggccccaacagtcacatgttgaagtcctgaccccccccagtacttcagaatgtgcacttacttggaaatagggttgttgcagatgtaatgagttaagatggggtcacactggagcatggtgggtcctgccccaaaatgactgatatccttataaaatggggagacttgcacacaggcacacgcagggagaatgcggtgggaagactggagtgatgccagagccgggagggaggcctgatcagtccctccccagagccttcagaggggcatggccctgctggcgtcttggtcc

SEQ ID NO: 21757 - DNA, 556 bp, Homo sapiens
tgacgtgccttcaagccagcagatgatgctcagaggggcgcgctgcggcacagtccaggagcagcagtgtctgcgggctgtgtgcatgggtgtagtaagtacccaaggacagggctgaaggggtggaagtggccactgtggagtggcaggggtgaggcctctgcacgtttgggagtagctcagtattggtttgtaagccagcaccctgtgtgtgtcgccgtggtgaaataaaatacagcttgttttaggggttgagtgaggtccggccccaacagtcacatgttgaagtcctgaccccccccagtacttcagaatgtgcacttacttggaaatagggttgttgcagatgtaatgagttaagatggggtcacactggagcatggtgggtcctgccccaaaatgactgatatccttataaaatggggagacttgcacacaggcacacgcagggagaatgcggtgggaagactggagtgaygccagagccgggagggaggcctgatcagtccctccccagagccttcagaggggcatggccctgctggcgtcttggtcc

SEQ ID NO: 21758 - DNA, 1222 bp, Homo sapiens
gtttaaagcacttggtgtagtaggtggtctttttaaaagtgtgaataaatactagttcttattatttctgtggatatccaacagccacataattgggccccaaagccatgaagaaggaagaggaaatgtcttaaaggttgtcgatggacagtgtttgctgaacatcaaaatcactttccaggtattacctctgatttgctctaccaactccacaccccacctgcagccacataaccttccatgatcacggccatgcacaacacaccatgtyccccaggcaaggggaccttagaaacataaccaggcttgagacagcactctgcaccggtgtcttggaaatgctcttaagagtgtatggctgagttagggaaccaggatttcaaagtagaaagggagaatctacccaagcccatagaaatcctgaatccactcctttctcagcaacaagcactggcctgggagtcagccacttatgcaccaaccccactctgcccctaattaaatgcatgactttgaaaattcccctcattcttctgagccccaattcagtgattggtgcaatcacaggcttggctacagtgacccattcattgcaggcatggtgagactctcaatccctctcatttccactagaatctaactgttgggatctatgacccagtcagcatagcaggcctgtggggagctctcaggttcaagcatatgccccccctaatctacaagaaattagctgcagaaaaccaaggaatagaacctggaaaaagagagggtttgctagagctgtccctttccctgtctctggaatgccaacaatagggaggctctttggtcttgtctctcaggagtgcccatgccattccaggaaaatgatggcccagctggtggtgtaaggcttggggggcagcgagtgggcatcgtggtgaaagcctcgggatcagggagctgcgtctgcaggcaggcctgctggccggaaacctgccaggaaaggaaggggctgtctcggggcggggccagggaggggtggagacagggccggctgtggtcagtgacaaatgctggctgcaatccagccagccctctgccctttctgagcccgagggactgccacctccactgtgtgcacactcagctacgggacacagtaagtaccgatgccgcaaagggaggtccccagggcttgagggcatgtgaggcgaggagaggatggactctagagttttgg

SEQ ID NO: 21759 - DNA, 1222 bp, Homo sapiens
gtttaaagcacttggtgtagtaggtggtctttttaaaagtgtgaataaatactagttcttattatttctgtggatatccaacagccacataattgggccccaaagccatgaagaaggaagaggaaatgtcttaaaggttgtcgatggacagtgtttgctgaacatcaaaatcactttccaggtattacctctgatttgctctaccaactccacaccccacctgcagccacataaccttccatgatcacggccatgcacaacacaccatgtcccccaggcaaggggaccttagaaacataaccaggcttgagacagcactctgcaccggtrtcttggaaatgctcttaagagtgtatggctgagttagggaaccaggatttcaaagtagaaagggagaatctacccaagcccatagaaatcctgaatccactcctttctcagcaacaagcactggcctgggagtcagccacttatgcaccaaccccactctgcccctaattaaatgcatgactttgaaaattcccctcattcttctgagccccaattcagtgattggtgcaatcacaggcttggctacagtgacccattcattgcaggcatggtgagactctcaatccctctcatttccactagaatctaactgttgggatctatgacccagtcagcatagcaggcctgtggggagctctcaggttcaagcatatgccccccctaatctacaagaaattagctgcagaaaaccaaggaatagaacctggaaaaagagagggtttgctagagctgtccctttccctgtctctggaatgccaacaatagggaggctctttggtcttgtctctcaggagtgcccatgccattccaggaaaatgatggcccagctggtggtgtaaggcttggggggcagcgagtgggcatcgtggtgaaagcctcgggatcagggagctgcgtctgcaggcaggcctgctggccggaaacctgccaggaaaggaaggggctgtctcggggcggggccagggaggggtggagacagggccggctgtggtcagtgacaaatgctggctgcaatccagccagccctctgccctttctgagcccgagggactgccacctccactgtgtgcacactcagctacgggacacagtaagtaccgatgccgcaaagggaggtccccagggcttgagggcatgtgaggcgaggagaggatggactctagagttttgg

SEQ ID NO: 21760 - DNA, 541 bp, Homo sapiens
tgaacctgggaggtggaggttgcagtgagccaagatctggccattgcactccagcctgggcaacagcaagattccatctcaaaaaaaaaaaaaaaaaaaggaaagaaaagaraagattaatttcctgttagctaaatcaaggaaggcttcatggagaaaaaaatatttcaacacacacttgacgtagcagtgggatcaggctgatgttagggaagaatgaatgacattctacactgagaaagagatattcagtatatatatgaagagcagtagagaaactaacaagtggaaatagactcaatttacaatacttgcctgcctggagtactctatacgttgactgtaagttgcagtttactcagaacaatcccactttctacttgtttatcctatgtaatcatttattgggcctccttttgctctcaaaaatatccttgtttggataattatcactctgttcctaaatgaactgccctgtgtcctatcccagtaaaagggtgcattcgggcccttcgtaactgcctccactacatggttgatt

SEQ ID NO: 21761 - DNA, 550 bp, Homo sapiens
taagcacaaggtgacatgagatttcagaatttgaagtcgtctggaggcagctaggatcaggtggggcctgtcctgttcggcaggacctgcaaccacargaggaggatgcgtcaagcagaaagttggaacacaagaggggattcagccataagccacaaaataccttccagagcagagagaaggagaaataccctgaattccgtattttccctgccatttagttccctgctattgccacacattgacgtattccatccagagaagtccattggcatatgagtctgggaaatgtagttcgcagggggacatgatcttaagggaaatagacaatgactggtgcaacaactgacctgtgtgaggcaggagggaaaaaacaggaataatatagtttttctctagatcccttcatgcacaaagatgcaaaagaaatgtgttggcttaatgagccattctgggtggccctgtaggtggctgtcctacgaataagatttttagacaaaacagagatgacttcaaatgtcacaagaaaagtatcagacaggaattaata

SEQ ID NO: 21762 - DNA, 547 bp, Homo sapiens
aaatgccacctgtgctcttggctggtcttgcgcattcaccgaggctcactgtaccttggtgttcccatttctaaaataaggcctgtagtaatccctacctcactgagttgttgagagacttcatgtaaattgtttagcagggagcctggcacagaacaagagcctagcagaaaagtaagctgttgttactttaagcaaatatttagcagcctaaaatggtggctttaccagtttctgtaatggttgaagtgatgacagaattcagccaatccyacccatagtttttcttgctaataaagcagtttgtttctaagtgtgttttgatgcgtataattaatacttcctgtccttgatttttggctgaaaaatgtcttctcttcctcgcaccctctgttattcccgtagtgaatattttcattgtggaagagaaattcccattggctcatggttggcattttatttctcctgtccagagacaatatttccacagcctcaaacgtgaaaactgaaaatctggtgccacttaccaccttgtaaaatcaagtca

SEQ ID NO: 21763 - DNA, 547 bp, Homo sapiens
aaatgccacctgtgctcttggctggtcttgcgcattcaccgaggctcactgtaccttggtgttcccatttctaaaataaggcctgtagtaatccctacctcactgagttgttgagagacttcatgtaaattgtttagcagggagcctggcacagaacaagagcctagcagaaaagtaagctgttgttactttaagcaaatatttagcagcctaaaatggtggctttaccagtttctgtaatggttgaagtgatgacagaattcagccaatcccacccatagtttttcttgytaataaagcagtttgtttctaagtgtgttttgatgcgtataattaatacttcctgtccttgatttttggctgaaaaatgtcttctcttcctcgcaccctctgttattcccgtagtgaatattttcattgtggaagagaaattcccattggctcatggttggcattttatttctcctgtccagagacaatatttccacagcctcaaacgtgaaaactgaaaatctggtgccacttaccaccttgtaaaatcaagtca

SEQ ID NO: 21764 - DNA, 3167 bp, Homo sapiens
cgaggcctctccagtccgccgagggcgcaccaccggcccgtctcgcccgccgcgccggggaggtggagcacgagcgcacgtgttaggacccgaaagatggtgaactatgcctgggcagggcgaagccagaggaaactctggtggaggtccgtagcggtcctgacgtgcaaatcggtcgtccgacctgggtataggggcgaaagactaatcgaaccatctagtagctggttccctccgaagtttccctcaggatagctggcgctctcgcagacccgacgcacccccgccacgcagttttatccggtaaagcgaatgattagaggtcttggggccgaaacgatctcaacctattctcaaactttaaatgggtaagaagcccggctcgctggcgtggagccgggcgtggaatgcgagtgcctagtgggccacttttggtaagcagaactggcgctgcgggatgaaccgaacgccgggttaaggcgcccgatgccgacgctcatcagaccccagaaaaggtgttggttgatatagacagcaggacggtggccatggaagtcggaatccgctaaggagtgtgtaacaactcacctgccgaatcaactagccctgaaaatggatggcgctggagcgtcgggcccatacccggccgtcgccggcagtcgagagtggacgggagcggcgggggcggcgcgcgcgcgcgcgcgtgtggtgtgcgtcggagggcggcggcggcggcggcggcgggggtgtggggtccttcccccgcccccccccccacgcctcctcccctcctcccgcccacgccccgctccccgcccccggagccccgcggacgctacgccgcgacgagtaggagggccgctgcggtgagccttgaagcctagggcgcgggcccgggtggagccgccgcaggtgcagatcttggtggtagtagcaaatattcaaacgagaactttgaaggccgaagtggagaagggttccatgtgaacagcagttgaacatgggtcagtcggtcctgagagatgggcgagcgccgttccgaagggacgggcgatggcctccgttgccctcggccgatcgaaagggagtcgggttcagatccccgaatccggagtggcggagatgggcgccgcgaggcgtccagtgcggtaacgcgaccgatcccggagaagccggcgggagccccggggagagttctcttttctttgtgaagggcagggcgccctggaatgggttcgccccgagagaggggcccgtgccttggaaagcgtcgcggttccggcggcgtccggtgagctctcgctggcccttgaaaatccgggggagagggtgtaaatctcgcgccgggccgtacccatatccgcagcaggtctccaaggtgaacagcctctggcatgttggaacaatgtaggtaagggaagtcggcaagccggatccgtaacttcgggataaggattggctctaagggctgggtcggtcgggctggggcgcgaagcggggctgggcgcgcgccgcggctggacgaggcgcgcgccccccccacgcccggggcacccccctcgcggccctcccccgccccacccgcgcgcgccgctcgctccctccccaccccgcgccctctctctctctctctcccccgctccccgtcctcccccctccccgggggagcgccgcgtgggggcgcggcggggggagaagggtcggggcggcaggggccgcgcggcggccgccggggcggccggcgggggcaggtccccgcgaggggggccccggggacccggggggccggcggcggcgcggactctggacgcgagccgggcccttcccgtggatcgccccagctgcggcgggcgtcgcggccgcccccggggagcccggcggcggcgcggcgcgccccccacccccaccccacgtctcggtcgcgcgcgcgtccgctgggggcgggagcggtcgggcggcggcggtcggcgggcggcggggcggggcggttcgtccccccgccctacccccccggccccgtccgccccccgttcccccctcctcctcggcgcgcggcggcggcggcggcaggcggcggaggggccgcgggccggtcccccccgccgggtccgcccccggggccgcggttccgcgcgcgcctcgcctcggccggcgcctagcagccgacttagaactggtgcggaccaggggaatccgactgtttaattaaaacaaagcatcgcgaaggcccgcggcgggtgttgacgcgatgtgatttctgcccagtgctctgaatgtcaaagtgaagaaattcaatgaagcgcgggtaaacggcgggagtaactatgactctcttaaggtagccaaatgcctcgtcatctaattagtgacgcgcatgaatggatgaacgagattcccactgtccctacctactatccagcgaaaccacagccaagggaacgggcttggcggaatcagcggggaaagaagaccctgttgagcttgactctagtctggcacggtgaagagacatgagaggtgtagaataagtgggaggcccccggcgcccccccggtgtccccgcgaggggcccggggcggggtccgcggccctgcgggccgccggtgaaataccactactctgatcgttttttcactgacccggtgaggcgggggggcgagcccgaggggctctcgcttctggcgccaagcgcccgcccggccgggcgcgacccgctccggggacagtgccaggtggggagtttgactggggcggtacacctgtcaaacggtaacgcaggtgtcctaaggcgagctcagggaggacagaaacctcccgtggagcagaagggcaaaagctcgcttgatcttgattttcagtacgaatacagaccgtgaaagcggggcctcacgatccttctgaccttttgggttttaagcaggaggtgtcagaaaagttaccacagggataactggcttgtggcggccaagcgttcatagcgacgtcgctttttgatccttcgatgtcggctcttcctatcattgtgaagcagaattcrccaagcgttggattgttcacccactaatagggaacgtgagctgggtttagaccgtcgtgagacaggttagttttaccctactgatgatgtgttgttgccatggtaatcctgctcagtacgagaggaaccg

SEQ ID NO: 21765 - DNA, 1646 bp, Homo sapiens
gctagcgctggatgagtctctggaaggacgcacgggactccgcaaagctgacctgtcccaccgaggtcaaatggatacctctgcattggcccgaggcctccgaagtacatcaccgtcaccaaccgtcaccgtcagcatccttgtgagcctgcccaaggccccgcctccggggagactcttgggagcccggccttcgtcggctaaagtccaaagggatggtgacttccacccacaaggtcccactgaacggcgaagatgtggagcgtaggtcagagaggggaccaggaggggagacgtcccgacaggcgacgagttcccaaggctctggccaccccacccacgccccacgccccacgtcccgggcacccgcgggacaccgccgctttatcccctcctctgtccacagccggccccaccccaccacgcaacccacgcacacacgctggaggttccaaaaccacacggtgtgactagagcctgacggagcgagagcccatttcacgaggtgggaggggtgggggtggggtgggttgggggttgtggggtctgtggcgagcccgattctccctcttgggtggctacaggctagaaatgaatatcgcttcttgggsggaggggcttccttaggccatcaccgcttgcgggactacctctcaaaccctcccttgaggccacaaaatagattccaccccacccatcgacgtttcccccgggtgctggatgtatcctgtcaagagacctgagcctgacaccgtcgaattaaacaccttgactggctttgtgtgtttgtttgtttctgagatggagtcttgctctgtcccccaggctggagtgcagtggcgtgatctcagctcactggaacctctgcctcctgggttcaagtgattctcctgtctcagcgccaccatggccggctcattttttttttttttttttttggtagacacggggtttcaccctctttcattggttttcactggagattctagattcgagccacacctcattccgtgccacagagagacttcttttttttttttttttttttaagcgcaacgcaacatgtctgccttatttgagtggcttcctatatcattataattgtgttatagatgaagaaacggtattaaacactgtgctaatgatagtgaaagtgaagacaaaagaaaggctatctattttgtggttagaataaagttgctcagtatttagaagctacctaaatacgtcagcatttacactcttcctagtaaaagctggccgatctgaataatcctcctttaaacaaacacaatttttgatagggttaagatttttttaagaatgcgactcctgcaaaatagctgaacagacgatacacatttaaaaaaataacaacacaaggatcaaccagacttgggaaaaaatcgaaaaccacacaagtcttatgaagaactgagttcttaaaataggacggagaacgtagctatcggaagagaaggcagtattggcaagttgattgttacgttggtcagcagtagctggcactatctttttggccatctttcgggcaatgtaactactacagcaaaatgagatatgatccattaaacaacatattcgcaaatcaaaaagtgtttcagtaatataatgcttcagatttagaa

SEQ ID NO: 21766 - DNA, 584 bp, Homo sapiens
actgggactacctcataggtagaataacgcctggcccagagcaaaggccactaagagctagctatgaacaaggattttgtttcatctctgcgtggttgctgaagtaggcactgcaggcaggaggtgagtggatgtgcctaaaggcactaagtgcgcatcctgctacaaaactgtgaagccagggctccttcctgccacttaaaggaggagtggagcagagggcgcccaagtcaggaatgacttagtggagaggcgtctgtgttggccaggaagggaacagatcagctcagcctttcttgagcagtactgctccaagtgtgacccaaaaccagcagcagcagcagcagcagcccgagctgtgagatggcaaattctcaggccctacccaagacctgaaggagaagctacatttttttttttttkaagacagatttcactctgttgctgaggctggagcacagtggcacaatctcatctcactgcaaccttcgtctcctaggttcaagcgattctcctgcctcagcctcccgagtagctgggactataggcacccgccaccacgcccggcaatttttgtttgtttt

SEQ ID NO: 21767 - DNA, 584 bp, Homo sapiens
actgggactacctcataggtagaataacgcctggcccagagcaaaggccactaagagctagctatgaacaaggattttgtttcatctctgcgtggttgctgaagtaggcactgcaggcaggaggtgagtggatgtgcctaaaggcactaagtgcgcatcctgctacaaaactgtgaagccagggctccttcctgccacttaaaggaggagtggagcagagggcgcccaagtcaggaatgacttagtggagaggcgtctgtgttggccaggaagggaacagatcagctcagcctttcttgagcagtactgctccaagtgtgacccaaaaccagcagcagcagcagcagcagcccgagctgtgagatggcaaattctcaggccctacccaagacctgaaggagaagctacatttttttttttttgragacagatttcactctgttgctgaggctggagcacagtggcacaatctcatctcactgcaaccttcgtctcctaggttcaagcgattctcctgcctcagcctcccgagtagctgggactataggcacccgccaccacgcccggcaatttttgtttgtttt

SEQ ID NO: 21768 - DNA, 554 bp, Homo sapiens
tttccaagatcgctggggaaatgtttagtaacatactcaatagtggaagagggagagggtggttgtctscatgtttcctcctgcctgtgctctgttggcccctctttttctttacaaccacttgtaaagaaaactgtggacacaaagccaaggtggggggtttaaaagaggagtctgattgtggtgccatagaggagttgacacatagaaattattagacatatcaaggaggctggatatagtttctgtctttggtgcttgagaaatgctagctacattttgctggtttgttagctgccccacttatctgctccttcaaattaaggggtatgcttattttcccccagtaggtttcccctgcataagcagaattcaccattcattgcccaaccctgagctatctcttgactcttccatctttgaaaaaagttcatatgctttttcttttccccttccttcctaactgtgcctagaacatctggagaacatcccagggaccagtgaaaactctgcttttcgtttcctctttaacctcagcagcatccctgagaacg

SEQ ID NO: 21769 - DNA, 522 bp, Homo sapiens
gatgtcagtggcctcaggcacccygggccttcttggttaggaggtgctgggcagagtttccccatttcttcctaactctgtgtggccagcttccgtggagtcaccgcctctgtgtcattccttcttccttctgttgctgctgctcctgttcttgtgtggcccctgtcccctctgccccctgctcctgacccttttgggggctcagaggcccctcagaggcttgctggtgagtggacctaagggctgttgagctggacccgtgccccgtgcctgccttcagggacccagcctgcctgtcttctagtcacacgccgtcccctgggcttgcttcacgccctaggggctcggcagggctggggctgcgcgttggtgactcgtggtgcagcactgttggctgaggggttgccgccctgcttcttcatctccctctggccccacacggctcctctggccgctacttgcagctcggctaaatagcattcgcatcatttgctaagctttggtacatgagaaattcttaaa

SEQ ID NO: 21770 - DNA, 538 bp, Homo sapiens
ttgaatggtgataccttttcagaggtttaaagaaatctgtttactttatgagggaaatttagagcatccayccacccacctgtccatccactcatctgctcgcctgctcactcatccatgcctccctccctgaggaagtctccactgataggtcaggtgctgctgcacggtggcccgcggggtgtggaggagcagagcgcttctgctgggagagccagctcagggacggactgagccaggggctgctgaagtgctgcacattgcttgtgggacaataaataattttttttaaaatcaagtttcaattgtcttaagggccgtgcgtggtggctcattcctgtaatcccagcactttgggaggctgaggtgggtggatcacttgaggtcaggagttcacaagcagcctggccaacgtggcgaaaccctgtgtgtaccaaaaaatacaaaaattagccaggcatggtagcgcatgcctgtagtcccagctacttggaaggctgaggtgggaggattgcttgaacctggaaggcagaggctg

SEQ ID NO: 21771 - DNA, 554 bp, Homo sapiens
caatcagagagctctgctagcctagttccccacacccctcctgtcgtgcctcccaggggagccgaggggagctgctcttgtctctctgctacaacccctctgccaactccatcatcgtgaacatcatcaaagcccggaacctcaaagccatggacatcgggggcacatcaggtacggggcttctccagcagaggatgggcgggccggggaggtgctggtgacacaaggtttacaccggatgtggagagcagggtctgcagtggtcctcaccccaacccgccacaccccgacctccagtcctcactccttaccctagagaccctggggcccccctttggagcaccctcatctcggactctgttcaagaatcaagatgtcagcatcatcctggaytatgttcttccaagaatcagaaagagggaacattgtgggaagacctgggttctatccccagctctgatgctacttgtctgagattttgggcaagacctggcctctctggggctcagtttcctcattggtagtaataggagggccccaggtgatcgctaagg

SEQ ID NO: 21772 - DNA, 554 bp, Homo sapiens
tcattcagtccttctgtctgctactaatcttgtcatcattcctaatggctactcatcacacagaccatttttcattggttttgcttctcactttcttgacttcctcacttttgacattttatccattaatcctaacattgtatatctgacaaggaagatattaaaaatcacatgttttgaatcagtgaatcaataaacaggtttaaagagacaaatgcaaaacaaaattgtccagagctgctgttctgggctggactacrgatagatcatgtaagaaataataaaatcatctggtaatttcaatttatctttagaatctttggacagaacagctccaggggagtcaagggatcatagatggtaagagagacaaagaggttaggaggtgagaactggctagggtggcagtccctaacctaaggttttcaaggataatatcaaggtcctcaatttcttttaaatattttttgaaagtgaaaggaaattatgcacatgacccaagctatacataataaggaaattgactcatgtctttgctgagatggaattatatt

SEQ ID NO: 21773 - DNA, 554 bp, Homo sapiens
tcattcagtccttctgtctgctactaatcttgtcatcattcctaatggctactcatcacacagaccatttttcattggttttgcttctcactttcttgacttcctcacttttgacattttatccattaatcctaacattgtatatctgacaaggaagatattaaaaatcacatgttttgaatcagtgaatcaataaacaggtttaaagagacaaatgcaaaacaaaattgtccagagctgctgttctgggctggactacagatagatcatgtaagaaataataaaatcatctggtaatttcaatttatctttagaatctttggacagaacagctccaggggagtcaagggatcatagatggtaagagagacaaagaggttaggaggtgagaactggctagggtggcagtccctaacctaaggttttcaaggataatatcaaggtcctcaatttcttttwaatattttttgaaagtgaaaggaaattatgcacatgacccaagctatacataataaggaaattgactcatgtctttgctgagatggaattatatt

SEQ ID NO: 21774 - DNA, 547 bp, Homo sapiens
tttggatcgcattacaaagaggcactgggtcacctggggagctcataggcacttctggctagtgatgggaaatgtcacaccactcaatctgcctaagttatagccaatagggttgtttatttcaagactttttataaattcagaattaaatatgtaaaaactagaagccccttttattaaatgcactatttaaaatttggtaataatgactctaaatacaaaatatraagacacatgagatattaaatatttttccaagatcattctgctggatagcttcacactgtttaattgtatgtcctgtcttattcaggctcctctcttccaccttatcatatgaattgcaatgacataacaacgattaattttgcaatcaaaatgttggttaatacactcttttgtctccactggctaagggaggatttagagattaaccctaaattggcttatctgggaaagcttagagagggtgtatgtgagagggtgggggctgcaggagcgggatgcaggggtctctgttacggatttggacaatctagagctcatc

SEQ ID NO: 21775 - DNA, 549 bp, Homo sapiens
gaatcctatctgatccttcttcccaaagagtgcagagttcaggtcccatgcttctccatagcccctaagcagagacatcctgcaaagtggttgctccacccctattgtcaaactgaaggaaggagggaaaacatgggctgaggaacttgagggatggcagggtggcccttggagatcctgtgtattgggagaggtgagctgtggctaccatgcaccacgaacttggagagtagagagcctgattgggcactttgccttgggaagccctaaatgctgcacttgggacacaagcttcsttacctttgaccaccctggagggctcaggtgcgtctgacacagcctgatggatgagtctttctagctgggaagggaaacgatctttccagcctgaggctcacagtcatttacactgaatgtcctgggtttgagggggcaccaagcacaggagatccaaacgctgcccttgccgccacaggctaccagcatgcgagttctgggggtccacacagctctgggaacaataacaaggactgtttcaataatgacctc

SEQ ID NO: 21776 - DNA, 619 bp, Homo sapiens
attttgaaagtcattcatgacttacaaagcattttgcctacattcaatcatttcattcccaccacaatcacctaaatactgacctgtttagtggatctggaaactgagtcctggaaaagtgaaggtcccatgcaagaaagaggcagagctgggaatccagatcacctgcctctagacccatggcgattaactaattgcctcacaccccaactatttgagaaccattgtcatctcttgaggcatgtagcacaaaacygacaacactaacaatgatgatggttagctcaatgcctgggaaactttaatcccctaagaatcttcttcacccacagattctgatagagcaggtctaggggaccacccaaaagtcagcctttctaacaaaccccaggcgatgcccacgttgctattccgggaccaccctgaacagcaaatgtttggcttatgcattctcatgctttgaatcttccaaaaagacagttttgtctgtccactgcagctgcataggaaaacatgctgaaggtgaataataattacaatccattgatgtcacctgcatcctgctcgaactcatgctgagagctaatatttcttgggcatctgttggcaaaatgtctca

SEQ ID NO: 21777 - DNA, 544 bp, Homo sapiens
tgtgagggcctgcacagactccaatactcctcggcatcagctcccattcctgctcctccccactgagtgctcctttgtttctcttgcctgtggygtgccctgattttgaagctcagtacacgtgaggaggctagagaggcgatgcgagtagggcctcagttccagagcttccggccacatccatctaccttgaaggggcgcagtaaatggcattggtaatggctagaatgcaggaagaggacaccaagctgccccttatgcacactgcactgatgttgccaacatatacgggcggcacagcccttctccgcagctgccaggtcacgggcctttggacggacccctcttgggctgcccctgcctgggctgccatcccctcttctccactgagtgctcctgagagccaccacgaagaggtggagcatcccctccataggccagagcctcaaggggatcctgacccgcaggggcctctgtcagggctggaatggatttgtccctggaaagtgctgtgtctgatgcagtgttggctcctgcaggtggt

SEQ ID NO: 21778 - DNA, 544 bp, Homo sapiens
tgtgagggcctgcacagactccaatactcctcggcatcagctcccattcctgctcctccccactgagtgctcctttgtttctcttgcctgtggcgtgccctgattttgaagctcagtacacgtgaggaggctagagaggcgatgcgagtagggcctcagttccagagcttccggccacatccatctaccttgaaggggcgcagtaaatggcattggtaatggckagaatgcaggaagaggacaccaagctgccccttatgcacactgcactgatgttgccaacatatacgggcggcacagcccttctccgcagctgccaggtcacgggcctttggacggacccctcttgggctgcccctgcctgggctgccatcccctcttctccactgagtgctcctgagagccaccacgaagaggtggagcatcccctccataggccagagcctcaaggggatcctgacccgcaggggcctctgtcagggctggaatggatttgtccctggaaagtgctgtgtctgatgcagtgttggctcctgcaggtggt

SEQ ID NO: 21779 - DNA, 660 bp, Homo sapiens
tatatattatatataattctagactaatatatgtttgtataatatatacaaatgtttgttctgttttttctatatataatatatattctaggctgaaatatatatttgtgatatataatattttatatatgtatatattatatatttatagtatataatttatttacatattatatatttataacayataatttatttaatttgtaatataatatatttaatttacaatatatagtatatttaatttctaacatatcttatatatttacatattaaatatatttattatatatgtatttatatgtatatatttcagcctagaggacaattatctgaggacgcccaggttactgacaagtctctgaagatgtttcatatatatatagatttatctgtgatttgagacagggtctcactgtcccccaggctggagtgcaataccacaatcacagctctctgcagcctcgacctcccaaagctcaggtgatcctcctgcctcagcacctccgagtagctgggattacaggcacccgccaccacacctggctaatttttgtatttttagtagagacagggtttcaccatgttgcctaggctggtctcgaactcctgacctcaggtgatccgcccgcctcggcctcccaaagtgctgggatgaca

SEQ ID NO: 21780 - DNA, 660 bp, Homo sapiens
tatatattatatataattctagactaatatatgtttgtataatatatacaaatgtttgttctgttttttctatatataatatatattctaggctgaaatatatatttgtgatatataatattttatatatgtatatattatatatttatagtatataatttatttacatattatatatttataacacataatttatttaatttgtaatataatatatttaatttacaatatatagtatatttaatttctaacatatcttatatatttacatattaaatatatttattatatatgtatttatatrtatatatttcagcctagaggacaattatctgaggacgcccaggttactgacaagtctctgaagatgtttcatatatatatagatttatctgtgatttgagacagggtctcactgtcccccaggctggagtgcaataccacaatcacagctctctgcagcctcgacctcccaaagctcaggtgatcctcctgcctcagcacctccgagtagctgggattacaggcacccgccaccacacctggctaatttttgtatttttagtagagacagggtttcaccatgttgcctaggctggtctcgaactcctgacctcaggtgatccgcccgcctcggcctcccaaagtgctgggatgaca

SEQ ID NO: 21781 - DNA, 523 bp, Homo sapiens
cttataaactcacttagggagaaccaacatcttgatgatgccgtaatgtcctaacactgaacaaacgatttctacccacttgcccaagtctgcttttgtgtctttttaaaaggcaccgtatagtgctttcaatatgtcttaattttatgcctaaatattttcatcattyttgttgcttttgtaaatgattgttttatttgtaattgtatcccctacctggttatgttttggtgggcgtggagccttttgatctgagcagtagctctcaagagtaggctttggtttggagaaagtgcctatgaaacagtctgtgcctggtggtctcatatgggagatttccttcgtaaggctatttcctctgtacaaatgttcttttatccttttgggcgctattggggtcaattatatagtgagtgtattttcacaagaaattacatagttcatatagttttacaaggttatcggcatagagatgtgtaaagaggcccctctgatttttaaaaatttcctctttattgttatt

SEQ ID NO: 21782 - DNA, 498 bp, Homo sapiens
cttcctgagtttaaaaaggcaatcccaggggaaagaagaaaaggctttacttttgtcagaggtatccaagagagtgatggggtctcagggggtacaataggtggatgaggctgcatccccatctcctgcctggaaccctgggtaactctttggtgggaaaaagacaagttgatttcttgattgatattggagccacgtactccttccttgacatggtttggctctgtgtccccacctaaatctcatcttgtagctcccatatttcccatgtgttgtgggaaggacctggtgggaaataattgaatcatggggttttccckgcacaagctctctctctctttgcctgctgccatctctttgcctgctgccatccatgtaagacgtgacttgctcctctttgccttctgccatgattgtgaggcttccccagccatgtgcaatagtaaatccattaaacctctttcttttgtaaattgcccagtcttgggtatgtcttca

SEQ ID NO: 21783 - DNA, 510 bp, Homo sapiens
ctgggcagtccatgtgacatcctcatggccccggcaattatttggaaacagatcgtctccgtgctgtgtgtggacctcacacaccgagacaacacactttagttactccacaacactgtctccccgagtcyaacatatcacctgagttcagctttctcatggagccatgtttatctctagcttctaatattactttcctaccccattcattcattcctgacctcatgctagatcgggagagcaagtgaggtgtggttgaaggctctgctctgaagaccgacttcaggtgacatagaaacagacgggaatgtggtgactcaggtgacaacctaatctttaaggtaacaaggatgcactgcttccctctgtcagtgagaaattctcaccagtgtcatgggccaacggcctgtttttgagagcacagccccaggttcacccaactatgtgaggtcataggtgcctgttggcttggggtgaagggaggagacctggtctctcttggatgtcact

SEQ ID NO: 21784 - DNA, 1432 bp, Homo sapiens
ttgaaagcatattttaagttttaatctttataaacctcgaaattatgtttaggtatattcttccatacatatcttaattataatttttaaatgatagtctgtatttgactctatgtaaatataaaaacrtatttaagtatgttaagatgtgaagttatactactaaagagaaatttaagcatttccttccagttgagtatgctataacaatcttgaagtctgtgttaccatgagagagtctattagaatttaaaggattaggctgggtgcagtggctcacgcctgtaatcccagcgctttggaaggctaaggcgggcagatcatctgaggtcaggagttcgagaccagcctggccaacatggcaaaaccccatctctactaaaaatacaaaattagctgggcgtggtggcacattcctgtaaatgccaccttttcaggaggctgagacattagaatcacttgaaccggggaggcggaggtaagagtgagccttgatagcgccactgcactctagccttggtgacagagcgagactctgtctaaaaaagagtattaaaacattgtagggtttgcagtggaagaaatcatttatttcttccttgattagtagtaatagagacatgagtcagtgtctataaatggcacttaactaatttttttcttttattaagttttatttcacaggcttaaccaatacgtgttaaaagcaagttacattttctcttttaggaaattaaccattttctctcagtaagtgtttatgatgcacttccattgacaagacttgaaggactaaaggatcttcgaagacaactggaactacataaagatcagatggtggacattatgagagcttctcagggtgctaattttaaatgacatgggctatttctacctgtttctttttgaaagaatattttgcaaagtcttgctcttggtttcattgtcacagacttagttcagactctcatcatttagttcagaccctcatttctcatctaactgtaaaactggtcctaactggtcttctcaccctgaactcttcctgttttattcatcctctgccagatgatttctctaaacccaaatatgatcatgtttttctactgcctaaattttttttttaagagacagagtttttttttttttttaagagtctcactctgtcacctaggctggagtgtagtggcaccatcataacttactatgaccttgaattcctgggtacaaggaattctcctgtctcagccttctgaatagctggaacaacaggcacacaccactacacctagctactttatttattttttttattttttgtagggacaggggtcccactatgttgcctaggttggtctcgaattcttggcctcaagtgatcctcctgccttagcctcacaaagcattgggattagaggtgtgagccacggca

SEQ ID NO: 21785 - DNA, 909 bp, Homo sapiens
aggccactcccacacacactgcttacttcataggctgtggccctcagatgcacctgggggactgctttcctcccatttcattagctctccaagacagtccatctcactctaaaacctacactaggatggtgagttgtagactctcctccattctcccagtgcagtgtgacttccagagagtgctcccccatcctcttacctcaactgatgtgaaaagggccagtgcctgggcagttagatgttcagtgacctcacaggtccagcatcgcccagggcctggccccacagcctggcacctctcccctacctggccttcatgccagccttttctcttctgtcaccaatgtcaagtgacattcacctgtgycacactcttatgagtgtggtaagtgatgggtgggtaaaccccagctgagtgcctgtgactctaccctcttacctttcactcaagtgacattataagcataattttacatttgatttaatttatggcataatcttttcttataacatttctgacaatagccctcacaaccaaaggagactgggttacagaacacatgggcaaggctggagtagcaggtttcacttactttattccaatgtgaaatgaagatgtgatggtttaaaaccaagacaaagttgtttatcagctgtggggttgctacacttgctagctcatgctcacttcctttgaaacaaggaatctggagagactatattcataagtagctctttgcaaacccccaggcagaagccccagtcagacgcagctccctcaggctcccagggcggcaacctcctcctccatgttgggctctgccagcaggtcaagggaagagctccctcaggctcccagggctgcaacctcctcctccatgttgggctctgccagcaggccaagggaag

SEQ ID NO: 21786 - DNA, 909 bp, Homo sapiens
aggccactcccacacacactgcttacttcataggctgtggccctcagatgcacctgggggactgctttcctcccatttcattagctctccaagacagtccatctcactctaaaacctacactaggatggtgagttgtagactctcctccattctcccagtgcagtgtgacttccagagagtgctcccccatcctcttacctcaactgatgtgaaaagggccagtgcctgggcagttagatgttcagtgacctcacaggtccagcatcgcccagggcctggccccacagcctggcacctctcccctacctggccttcatgccagccttttctcttctgtcaccaatgtcaagtgacattcacctgtgtcacactcttatgagtgtggtaagtgatgggtgggtaaaccccagctgagtgcctgtgactctaccctcttacctttcactcaagtgacattataagcataattttacatttgatttaatttatggcataatcttttcttataacatttctgacaatagccctcacaaccaaaggagactgggttacagaacacatgggcaaggctggrgtagcaggtttcacttactttattccaatgtgaaatgaagatgtgatggtttaaaaccaagacaaagttgtttatcagctgtggggttgctacacttgctagctcatgctcacttcctttgaaacaaggaatctggagagactatattcataagtagctctttgcaaacccccaggcagaagccccagtcagacgcagctccctcaggctcccagggcggcaacctcctcctccatgttgggctctgccagcaggtcaagggaagagctccctcaggctcccagggctgcaacctcctcctccatgttgggctctgccagcaggccaagggaag

SEQ ID NO: 21787 - DNA, 528 bp, Homo sapiens
catatatatatatatatatatacacatatatatatatatacttattatgagctaaaagtaattttcttttctttctttttttttgtgtgattgagtcttgctctgttgcccaggctggagtacagtggcctgatctcggctcactgcaacctctgcatcccagattcaagtgattctcctgcctcagcctcccaagtagctgcgactacaggtgcgcgccaccacgcccagctaatttttgtatttttggtagagagggagtttcaccatattggccaggctggtcttgaactcctgacctcatgatccacccaccttggcctcccaaagtgctgggattataggcgtgagcaccgcgcccagctgagctaaagtaattttctttgccaatacaggaatataaactagtaggcttctacttaggcaaataatatattcatgaaatgttttatgaaaatccatttttatatttaaaatcagatagaactgtaccactggggcaattatttgaaggayttccatgatgca

SEQ ID NO: 21788 - DNA, 551 bp, Homo sapiens
catcagtaccagtatattaattttcacttctgggatttccagcctactcttagcttcaatgttagtgtgaatatttcatggtagaatgcacaaactttgaggaaggtgcaatgctttccctgtttcttccacttatgttcaggttctgcacatactgtatgttctccataaatatttattggtgaagagaacagttattaatgtaagaatctctctattcagaaaatatccaaggaaactgtgatagctgctggtttccaaagatggtcttccaatgaactatgtctctcagtattcggaattttgcataattccttccccttgatctggactggctctgtgacttgrttataaccaacagaacatggtggtgggttaagcaatactcatttcatagggggcatttctggtcacatgatacttaatggtccatggtcaaatactaggatccagcaaagagccaagagctgtttctcaaaaaaaaaaaaaaaaaaaaagaaaaagaaaaagaaaaaaaaagaaaaaagaaaaaaaaagttatctgcagagta

SEQ ID NO: 21789 - DNA, 551 bp, Homo sapiens
catcagtaccagtatattaattttcacttctgggatttccagcctactcttagcttcaatgttagtgtgaatatttcatggtagaatgcacaaactttgaggaaggtgcaatgctttccctgtttcttccacttatgttcaggttctgcacatactgtatgttctccataaatatttattggtgaagagaacagttattaatgtaagaatctctctattcagaaaatatccaaggaaactgtgatagctgctggtttccaaagatggtcttccaatgaactatgtctctcagtattcggaattttgcataattccttccccttgatctggactggctctgtgacttggttataaccaacagaacatggtggtgggttaagcaatactcatttcatagggggcatttctggtcacatgatacttaatggtccatggtcaaatactaggatccagcaaagagccaagagctgtttctcaaaaaaaaaaaaaaaaaraaagaaaaagaaaaagaaaaaaaaagaaaaaagaaaaaaaaagttatctgcagagta

SEQ ID NO: 21790 - DNA, 541 bp, Homo sapiens
tggaaattcagagaaatacaattcaaaaggccttcaggacctttttcctggatggcaataaattattgagggcttcctatgtagaaaaaaaaaaaacagaggaaagtaatttctgcttgaccatcataaaataagcaaatataggctttgcgagatattaaaatacaacagtaaccccactcattaaatgaatagaatagtggaataatgtataaatttaaagccaaaagtaaaattaaagttgtttatgcacatatttttgaagtaaaatatttgtyctatcaacataaaaggcatagtagatgacctgaaaaagtttccacctccaagaagataacaaatcaagtcaaagtcacagtatgcctgacgttgtgtcatcctcaaaaactgggaagtcaggatcagtccaagactccagaagtgaggaggctctaaaagacacctccacttcagcctctgcttattcaaggccccagccatggaaactcgatggtgtgaactgctgagctgagaactgggggtaagtgaggactgtcttctc

SEQ ID NO: 21791 - DNA, 567 bp, Homo sapiens
tctctcctggtaactatggctcaggcagggggctatgaccaggtcactaaccccaccatggcaaagaagaaaagacaaggcaaagaagccaatatctgtggagggcttacaaatgagtacctggcacaggaataagcccttcacaagtgttctctcatttcaacctcacagcatccctgcaaggtaactataattaccccatttgcaaataaggaaatcaagactcagagttgtaatttgtcccgctactggtaagtcacaaagcaagattcaaaaccatgggctagtagacctgcaaagtcagtgctccatttacatgtaggtaatatgggcactgataccacctaggcagtgagccacaagctattacaagcaggttctatccaagtgggaggmaccttgctctaggtacctagcaggttctatccaagtgggaggtaccacctgctgcagagtgccccacttctccctgcacctaaaacagtggataaaagacctggatttcccatgttttatcctgagttgctggcaaattctttcctaatctcagtcttcactagataagca

SEQ ID NO: 21792 - DNA, 589 bp, Homo sapiens
gttcctcttccccatacccacarttgcctcctcaactaaggaaggtgatgggaaaatgacaatgacaccaataggacaatgggacaaaagcatggacaggaaactcacaaaagcatggacaggaaacacgaatagccattaaacagttaaaaagaatgttgacacttaacaacaaatgtgcagtttaaaggagcaataagagaccatttcatctatcaaagtggcgaggattctaatgtggagggttggcgagagtaaggacacaggcagacactactaactggagtagaaaggcctcactgctttctggagaatggcttggcaacacatagagaccaagagctttaaaacaagtctatgtcttcaccctttcactcagggttttcacttctagaatttagcctaaggcaataattagccatgcaaatatgtaagttcaaggatatttaccgaaggtctgggcgcggtggctcacacctataatcctagcactttgggaggccgaaagaggtggtcagattacctgaggtcaggagttcgagaccagcctggataacatgatgaaaccccgtctctactaaaaatacaa

SEQ ID NO: 21793 - DNA, 589 bp, Homo sapiens
gttcctcttccccatacccacagttgcctcctcaactaaggaaggtgatgggaaaatgacaatgacaccaataggacaatgggacaaaagcatggacaggaaactcacaaaagcatggacaggaaacacgaatagccattaaacagttaaaaagaatgttgacayttaacaacaaatgtgcagtttaaaggagcaataagagaccatttcatctatcaaagtggcgaggattctaatgtggagggttggcgagagtaaggacacaggcagacactactaactggagtagaaaggcctcactgctttctggagaatggcttggcaacacatagagaccaagagctttaaaacaagtctatgtcttcaccctttcactcagggttttcacttctagaatttagcctaaggcaataattagccatgcaaatatgtaagttcaaggatatttaccgaaggtctgggcgcggtggctcacacctataatcctagcactttgggaggccgaaagaggtggtcagattacctgaggtcaggagttcgagaccagcctggataacatgatgaaaccccgtctctactaaaaatacaa

SEQ ID NO: 21794 - DNA, 589 bp, Homo sapiens
gttcctcttccccatacccacagttgcctcctcaactaaggaaggtgatgggaaaatgacaatgacaccaataggacaatgggacaaaagcatggacaggaaactcacaaaagcatggacaggaaacacgaatagccattaaacagttaaaaagaatgttgacacttaacaacaaatgtgcagtttaaaggagcaataagagaccatttcatctatcaaagtggcgaggattctaatgtggagggttggcgagagtaaggacacaggcagacactactaactggagtagaaaggcctcactgctttctggagaatggcttggcaacacatagagaccaagagctttaaaacaagtctatgtcttcaccctttcactcagggktttcacttctagaatttagcctaaggcaataattagccatgcaaatatgtaagttcaaggatatttaccgaaggtctgggcgcggtggctcacacctataatcctagcactttgggaggccgaaagaggtggtcagattacctgaggtcaggagttcgagaccagcctggataacatgatgaaaccccgtctctactaaaaatacaa

SEQ ID NO: 21795 - DNA, 536 bp, Homo sapiens
acccatggaattattgagcctgaggagaggagagagacagaagaattagatgggttgsaaaaataaatcaataactaacagctgcaaacttgcaaaaattgttcaaaaacctattttttttttttaatctaaagatccacgaatcccccacaaaagtacaaataaaaccataccaaggccatattgtgatttaggaaagcagcaggcaggactttcaattgacttgatatgatttatcatttttactatttgtaagaatggaaataagttcttagagttttggtcttggagaaagtctgacgttaaggacaaacgacagttattaaaggcagatgactttccagacttgtcttaaatgttccattcttcaccttagaacttatttaaatttgtttcttccaaatactgcagtaatattgatgctccagagagatgtcccacggagattctgctcttgtgcgtctgccctgcacggagctgaggcagtgtctatcagtttcagaagcgagtagtcgtgcagtacttaacctgaaaaa

SEQ ID NO: 21796 - DNA, 536 bp, Homo sapiens
acccatggaattattgagcctgaggagaggagagagacagaagaattagatgggttgcaaaaataaatcaataactaacagctgcaaacttgcaaaaattgttcaaaaacctattttttttttttaatctaaagatccacgaatcccccacaaaagtacaaataaaaccataccaaggccatattgygatttaggaaagcagcaggcaggactttcaattgacttgatatgatttatcatttttactatttgtaagaatggaaataagttcttagagttttggtcttggagaaagtctgacgttaaggacaaacgacagttattaaaggcagatgactttccagacttgtcttaaatgttccattcttcaccttagaacttatttaaatttgtttcttccaaatactgcagtaatattgatgctccagagagatgtcccacggagattctgctcttgtgcgtctgccctgcacggagctgaggcagtgtctatcagtttcagaagcgagtagtcgtgcagtacttaacctgaaaaa

SEQ ID NO: 21797 - DNA, 536 bp, Homo sapiens
acccatggaattattgagcctgaggagaggagagagacagaagaattagatgggttgcaaaaataaatcaataactaacagctgcaaacttgcaaaaattgttcaaaaacctattttttttttttaatctaaagatccacgaatcccccacaaaagtacaaataaaaccataccaaggccatattgtratttaggaaagcagcaggcaggactttcaattgacttgatatgatttatcatttttactatttgtaagaatggaaataagttcttagagttttggtcttggagaaagtctgacgttaaggacaaacgacagttattaaaggcagatgactttccagacttgtcttaaatgttccattcttcaccttagaacttatttaaatttgtttcttccaaatactgcagtaatattgatgctccagagagatgtcccacggagattctgctcttgtgcgtctgccctgcacggagctgaggcagtgtctatcagtttcagaagcgagtagtcgtgcagtacttaacctgaaaaa

SEQ ID NO: 21798 - DNA, 1322 bp, Homo sapiens
taacaattatttttatttttatttacatttttttgagacagagtctcactctgtcacccaggctcgagtacagtgatgagatattggctcactgcaacctccgcctgccaggttcaagtgattcttctgcctcagcctcccaggtagctgggatacaggcatccaccatgttgcccagctaatttttgtatttttagtagagacatggtttcaccatgttgaccaggctggtttcgaaccgaggtcaagtgatccgcctgcctcggcctcccaaagtgctagcataacaggcatgagccaccatgcccaaccaattacaattatttttaatttttagattttacaatctttctggcctcttggcttttgaggcaaactgagctttgaaattaggcaatcctctattgcaccaatgtgcaatagaagtaaaatgtgagccacatgtgacaattagaatttactagtagcagcataaagaaaaagaaaaatgagtgaaattgatgttaacaacatagctcaatatatccaaaatattttaacatataatcagaatgaaataattaaagaaacatatatatgtgtacatatatacgtacacacacatagacatatgtttctttaacccagcattatatatttttatgcacatatgtatatgtaactaaatatttaaatattttcttgtatttctccccagcatatcttagttcatgctgggcacaatacagttgytcagtagcccctgtgcccagtggctgccacattgcaagtgcatctctgagggctctgacttttctgaccttagggaagttaaagggcctgaatcctccttttctgccagataggagtgaatgccccttctctgccaatatcactcctgtttaaaggataagagaggtggtgccctgagagacagtagggcctacaagaaacaagtgttcacaggtagaacactgctgtccacttttgcttggtgtggactcatcaatcctccagagatcatacagcagtccaaaaagtggggcccccgaagagggaaacctcatgtttttagatctgtccataggcttgatctgatgtggagagactagattaaaggcaaactttttatcttgcaacttggccttggcaaattaaatagaaatatgtcactataaaaatcaattaaataaaaaggaaggcagtaagagcagaaaagaggagaaaatacctacaagaaacaaatagaactattaacaaaatggaagtagtccattcttttcacaattaaaatgaatatatacatagagtaaaatttccaacagaaatgtgtaaattggcta

SEQ ID NO: 21799 - DNA, 1322 bp, Homo sapiens
taacaattatttttatttttatttacatttttttgagacagagtctcactctgtcacccaggctcgagtacagtgatgagatattggctcactgcaacctccgcctgccaggttcaagtgattcttctgcctcagcctcccaggtagctgggatacaggcatccaccatgttgcccagctaatttttgtatttttagtagagacatggtttcaccatgttgaccaggctggtttcgaaccgaggtcaagtgatccgcctgcctcggcctcccaaagtgctagcataacaggcatgagccaccatgcccaaccaattacaattatttttaatttttagattttacaatctttctggcctcttggcttttgaggcaaactgagctttgaaattaggcaatcctctattgcaccaatgtgcaatagaagtaaaatgtgagccacatgtgacaattagaatttactagtagcagcataaagaaaaagaaaaatgagtgaaattgatgttaacaacatagctcaatatatccaaaatattttaacatataatcagaatgaaataattaaagaaacatatatatgtgtacatatatacgtacacacacatagacatatgtttctttaacccagcattatatatttttatgcacatatgtatatgtaactaaatatttaaatattttcttgtatttctccccagcatatcttagttcatgctgggcacaatacagttgctcagtagcccctgtgcccagtggctgccacattgcaagtgcatctctgagggctctgacttttctgaccttagggargttaaagggcctgaatcctccttttctgccagataggagtgaatgccccttctctgccaatatcactcctgtttaaaggataagagaggtggtgccctgagagacagtagggcctacaagaaacaagtgttcacaggtagaacactgctgtccacttttgcttggtgtggactcatcaatcctccagagatcatacagcagtccaaaaagtggggcccccgaagagggaaacctcatgtttttagatctgtccataggcttgatctgatgtggagagactagattaaaggcaaactttttatcttgcaacttggccttggcaaattaaatagaaatatgtcactataaaaatcaattaaataaaaaggaaggcagtaagagcagaaaagaggagaaaatacctacaagaaacaaatagaactattaacaaaatggaagtagtccattcttttcacaattaaaatgaatatatacatagagtaaaatttccaacagaaatgtgtaaattggcta

SEQ ID NO: 21800 - DNA, 1322 bp, Homo sapiens
taacaattatttttatttttatttacatttttttgagacagagtctcactctgtcacccaggctcgagtacagtgatgagatattggctcactgcaacctccgcctgccaggttcaagtgattcttctgcctcagcctcccaggtagctgggatacaggcatccaccatgttgcccagctaatttttgtatttttagtagagacatggtttcaccatgttgaccaggctggtttcgaaccgaggtcaagtgatccgcctgcctcggcctcccaaagtgctagcataacaggcatgagccaccatgcccaaccaattacaattatttttaatttttagattttacaatctttctggcctcttggcttttgaggcaaactgagctttgaaattaggcaatcctctattgcaccaatgtgcaatagaagtaaaatgtgagccacatgtgacaattagaatttactagtagcagcataaagaaaaagaaaaatgagtgaaattgatgttaacaacatagctcaatatatccaaaatattttaacatataatcagaatgaaataattaaagaaacatatatatgtgtacatatatacgtacacacacatagacatatgtttctttaacccagcattatatatttttatgcacatatgtatatgtaactaaatatttaaatattttcttgtatttctccccagcatatcttagttcatgctgggcacaatacagttgctcagtagcccctgtgcccagtggctgccacattgcaagtgcatctctgagggctctgacttttctgaccttagggaagttaaagggcctgaatcctccttttctgccagataggagtgaatgccccttctctgccaatatcactcctgtttaaaggataagagaggtggtgccctgagagacagtagggcctacaagaaacaagtgttcacaggtrgaacactgctgtccacttttgcttggtgtggactcatcaatcctccagagatcatacagcagtccaaaaagtggggcccccgaagagggaaacctcatgtttttagatctgtccataggcttgatctgatgtggagagactagattaaaggcaaactttttatcttgcaacttggccttggcaaattaaatagaaatatgtcactataaaaatcaattaaataaaaaggaaggcagtaagagcagaaaagaggagaaaatacctacaagaaacaaatagaactattaacaaaatggaagtagtccattcttttcacaattaaaatgaatatatacatagagtaaaatttccaacagaaatgtgtaaattggcta

SEQ ID NO: 21801 - DNA, 641 bp, Homo sapiens
ctctgatgtccgccctcaccctttttaaaygctgtataaacatcctccaaaataaagagaatactacaatgaactctcatatccctgctctcagccctaacaaccatcaatgtttttatattcttatttcatctacactttctcttcccagcaaatcccttatttttattcttagtatttatttattttaattatgatgattattattattattttgagatagagttttgctcttgttgcccaggctggagtgcagtggtgcaatctcggctcacggcaacttctgcctccagggttcaagcgattctcctgccccaacctcccaagtagctggaattacaggtgcctgccaccatgcccagctaatttttgaatttttagtggagacagggtttcaccatgttggccaggctggtctcgaactgctgacctcaggtgatccacctgcctcccaaagtgctgggattacagccatcacacccagccttattttatttttttagaggtgggggtcttgctatgttgccctggctggattcaaattcctgggctcctgcctcagcctccggagtagctgagattacaggcaggtgccactccatctggctccctggattattttaaagcaaatcttaggcttt

SEQ ID NO: 21802 - DNA, 641 bp, Homo sapiens
ctctgatgtccgccctcaccctttttaaacgctgtataaacatcctccaaaataaagagaatactacaatgaactctcatatccctgctctcagccctaacaaccatcaatgtttttatattcttatttcatctacactttctcttcccagcaaatcccttatttttattcttagtatttatttattttaattatgatgatkattattattattttgagatagagttttgctcttgttgcccaggctggagtgcagtggtgcaatctcggctcacggcaacttctgcctccagggttcaagcgattctcctgccccaacctcccaagtagctggaattacaggtgcctgccaccatgcccagctaatttttgaatttttagtggagacagggtttcaccatgttggccaggctggtctcgaactgctgacctcaggtgatccacctgcctcccaaagtgctgggattacagccatcacacccagccttattttatttttttagaggtgggggtcttgctatgttgccctggctggattcaaattcctgggctcctgcctcagcctccggagtagctgagattacaggcaggtgccactccatctggctccctggattattttaaagcaaatcttaggcttt

SEQ ID NO: 21803 - DNA, 641 bp, Homo sapiens
ctctgatgtccgccctcaccctttttaaacgctgtataaacatcctccaaaataaagagaatactacaatgaactctcatatccctgctctcagccctaacaaccatcaatgtttttatattcttatttcatctacactttctcttcccagcaaatcccttatttttattcttagtatttatttattttaattatgatgattatkattattattttgagatagagttttgctcttgttgcccaggctggagtgcagtggtgcaatctcggctcacggcaacttctgcctccagggttcaagcgattctcctgccccaacctcccaagtagctggaattacaggtgcctgccaccatgcccagctaatttttgaatttttagtggagacagggtttcaccatgttggccaggctggtctcgaactgctgacctcaggtgatccacctgcctcccaaagtgctgggattacagccatcacacccagccttattttatttttttagaggtgggggtcttgctatgttgccctggctggattcaaattcctgggctcctgcctcagcctccggagtagctgagattacaggcaggtgccactccatctggctccctggattattttaaagcaaatcttaggcttt

SEQ ID NO: 21804 - DNA, 641 bp, Homo sapiens
ctctgatgtccgccctcaccctttttaaacgctgtataaacatcctccaaaataaagagaatactacaatgaactctcatatccctgctctcagccctaacaaccatcaatgtttttatattcttatttcatctacactttctcttcccagcaaatcccttatttttattcttagtatttatttattttaattatgatgattattattattattttgagatagagttttgctcttgttgcccaggctggagtgcagtggygcaatctcggctcacggcaacttctgcctccagggttcaagcgattctcctgccccaacctcccaagtagctggaattacaggtgcctgccaccatgcccagctaatttttgaatttttagtggagacagggtttcaccatgttggccaggctggtctcgaactgctgacctcaggtgatccacctgcctcccaaagtgctgggattacagccatcacacccagccttattttatttttttagaggtgggggtcttgctatgttgccctggctggattcaaattcctgggctcctgcctcagcctccggagtagctgagattacaggcaggtgccactccatctggctccctggattattttaaagcaaatcttaggcttt

SEQ ID NO: 21805 - DNA, 815 bp, Homo sapiens
atcttatatccaatgtttacatttccccaactgtccccttaagtgtctttttatactagaactgcacaaatcaggatctgaaaagggggtacatgttgcatttggttaatgtctctctctctctctctctctttttttttttttgagacagaatctcactgtgtctcccaggctggaacgcagtggcatgattttggctcactgcaacttctgcctcctgggttcaagtgattctcctgcctcagcctcctgagtagctgggattacaggtgtgtgccaccacgcccagctaatttttgtatttttagtagagacggggtttcaccatgttgactaggctggtctcaaactcctgacctcaagtgatccacctgccttggcctcccaaagtgctgggattacaggcgtgagccactgcgcccagccaatatgcctaactttcttttactctataaccatttaccacttcccctccccacttcctcttttctttttattgttaaagaatgcaggtcatctgtttcatattttccatatcctacatatatcttttttttttgttttgacatggagtcttgctctggggcacgtgcctatgggggatactggaaaccatttttcctggstattgagacgtggcatgtaagttgcttccagcagccgacttctggaggctactttctcaagcctgttaggggaattgctttagaggagaatattacagtgcaggaaggctctgggggataatttggttttactgtgaaatgtttcttttctttcaccaaaagatggcagtaacctccatccaacttcta

SEQ ID NO: 21806 - DNA, 815 bp, Homo sapiens
atcttatatccaatgtttacatttccccaactgtccccttaagtgtctttttatactagaactgcacaaatcaggatctgaaaagggggtacatgttgcatttggttaatgtctctctctctctctctctctttttttttttttgagacagaatctcactgtgtctcccaggctggaacgcagtggcatgattttggctcactgcaacttctgcctcctgggttcaagtgattctcctgcctcagcctcctgagtagctgggattacaggtgtgtgccaccacgcccagctaatttttgtatttttagtagagacggggtttcaccatgttgactaggctggtctcaaactcctgacctcaagtgatccacctgccttggcctcccaaagtgctgggattacaggcgtgagccactgcgcccagccaatatgcctaactttcttttactctataaccatttaccacttcccctccccacttcctcttttctttttattgttaaagaatgcaggtcatctgtttcatattttccatatcctacatatatcttttttttttgttttgacatggagtcttgctctggggcacgtgcctatgggggatactggaaaccatttttcctgggtattgagacgtggcatgtaagttgcttccagcagccgacttctggaggctactttctcaagcctgttaggggaattgctttagaggagaatattacagtgcaggaaggctctgggggataattyggttttactgtgaaatgtttcttttctttcaccaaaagatggcagtaacctccatccaacttcta

SEQ ID NO: 21807 - DNA, 1348 bp, Homo sapiens
tggaaacaaatacaaacatggcaggcaatgtgaacatrtgtctcttcttgctactttaagtgcccttccttaatgcccactatggcaaagccctttcctccatggactcctcctaacaaactggcagacattattaactcccctttccacagtggaggaaacagtttgagaggctaagaacttttccagcatcacccaaccgttcagtggctgagcagggatttgaattcagatctgccttacaccaaagcccacgacttagctgctaccctataccatgggaggacctgggttcctcccaccctagaaagagtgattgtacctggtagttctttgggttctgatcattcttttgggtttcctatggggctgggaacattgtagggatttagtaaataaggcaatgactcattttcacaatagcaaaactcttgcaaatatagaaagacagaccactccattctgccgctttctagctatgtgatcttggataagttgtgttgtctgggcctcagcttcttcatctgtaaaatggtaataaaaacagtgcctaccacataatgatgttgtaaagatggaatgaggcccagtgtggtggctcacactggtaatcccagtgttttggtagaccaaggtgggaggatccctagaggccaagagtttgaggccagcctgggcaacaaaacaagaccctatctctacaaaaaataaaaataaaaaaattagttgggtgtagtggtgtgagcctgtagtcccagctactcaggaggctgaggtgggaggatcactcaacccaggaagtcaaggctgcagttagccacgaccgcaccactgtactccagcctggacaacagagctagaccctgtctcaaacaataataactaaaaaggatggaacaaaatgcatgtaatgttcttgtcatagagatagcatttgattaatgtttgctattattattcttattgacaaatgtctgaattccaggaggattctagaaattatgaagcagacagcatcattggaagaaaaaaaatgtgctgctgcccatagcaactactatgagaccatcacactactgactgtagaggagtgattgtgaagaaggcagccactctcaccagctggggctgatgtgctggtatcttggccaatgagatgggaccagcactcttgtctgatgtctcattggtagccttcattagaggagcttcctgggctgggtaagtaacttttgcttaaactagctgggcagaaccgcaaaatgagtgttctttttgccttggaataagttgagaaagggtacaggcagcaggaaggaagacaagatttggagtagagaaaaaagaa

SEQ ID NO: 21808 - DNA, 1348 bp, Homo sapiens
tggaaacaaatacaaacatggcaggcaatgtgaacatgtgtctcttcttgctactttaagtgcccttccttaatgcccactatggcaaagccctttcctccatggactcctcctaacaaactggcagacattattaactcccctttccacagtggaggaaacagtttgagaggctaagaacttttccagcatcacccaaccgttcagtggctgagcagggatttgaattcagatctgccttacaccaaagcccacgacttagctgctaccctataccatgggaggacctgggttcctcccaccctagaaagagtgattgtacctggtagttctttgggttctgatcattcttttgggtttcctatggggctgsgaacattgtagggatttagtaaataaggcaatgactcattttcacaatagcaaaactcttgcaaatatagaaagacagaccactccattctgccgctttctagctatgtgatcttggataagttgtgttgtctgggcctcagcttcttcatctgtaaaatggtaataaaaacagtgcctaccacataatgatgttgtaaagatggaatgaggcccagtgtggtggctcacactggtaatcccagtgttttggtagaccaaggtgggaggatccctagaggccaagagtttgaggccagcctgggcaacaaaacaagaccctatctctacaaaaaataaaaataaaaaaattagttgggtgtagtggtgtgagcctgtagtcccagctactcaggaggctgaggtgggaggatcactcaacccaggaagtcaaggctgcagttagccacgaccgcaccactgtactccagcctggacaacagagctagaccctgtctcaaacaataataactaaaaaggatggaacaaaatgcatgtaatgttcttgtcatagagatagcatttgattaatgtttgctattattattcttattgacaaatgtctgaattccaggaggattctagaaattatgaagcagacagcatcattggaagaaaaaaaatgtgctgctgcccatagcaactactatgagaccatcacactactgactgtagaggagtgattgtgaagaaggcagccactctcaccagctggggctgatgtgctggtatcttggccaatgagatgggaccagcactcttgtctgatgtctcattggtagccttcattagaggagcttcctgggctgggtaagtaacttttgcttaaactagctgggcagaaccgcaaaatgagtgttctttttgccttggaataagttgagaaagggtacaggcagcaggaaggaagacaagatttggagtagagaaaaaagaa

SEQ ID NO: 21809 - DNA, 499 bp, Homo sapiens
tcgcccctgccccyggcggcggcctcgcgtgcgagagggcttccttcacctcggtgcctcagtttccccagctgtaagatagggacagggcgacccagtggcggagaggagccggctgtggagccctgcccgccccctgccctctaggtagcccgccgtctgatgaggattgttattctaagtgcaatacttggccctccggcttcccgctgctcccaccgtgctcacgcaataacctgcccagccgccgtccacgcgcgtcccgcggtgacctcctggagcagtgccccagctccctccagcacctgcgccgaggggcgggccgtcctggctgcgcagggcgcgtgggcgaggctgcaaaggctggagtcccgccgctgtgattaatgtactgacgaaccgaggcagcagtgcccccatcacgacccccacgccccactaacccccacgcccccactccgcgcaataaacgacagcattggcaaaaaaaaaaaaaaaa

SEQ ID NO: 21810 - DNA, 499 bp, Homo sapiens
tcgcccctgcccctggcggcggcctcgcgtgcgagrgggcttccttcacctcggtgcctcagtttccccagctgtaagatagggacagggcgacccagtggcggagaggagccggctgtggagccctgcccgccccctgccctctaggtagcccgccgtctgatgaggattgttattctaagtgcaatacttggccctccggcttcccgctgctcccaccgtgctcacgcaataacctgcccagccgccgtccacgcgcgtcccgcggtgacctcctggagcagtgccccagctccctccagcacctgcgccgaggggcgggccgtcctggctgcgcagggcgcgtgggcgaggctgcaaaggctggagtcccgccgctgtgattaatgtactgacgaaccgaggcagcagtgcccccatcacgacccccacgccccactaacccccacgcccccactccgcgcaataaacgacagcattggcaaaaaaaaaaaaaaaa

SEQ ID NO: 21811 - DNA, 593 bp, Homo sapiens
ctgggtgacagatcaagaatctgtctcttaaaaaaaaaaaaattaatgctttccaagagtaaatattcatgtggaagaatgcccattatacgctgtttagtgaaaagggcttaaaaacgacatactgcaacacttcattattgttgcatgcatatctgcagatgtgcagagaaatactggaatggagaattagccagactttaaccatgtctgtccctctgtgtgagatcacaggtggtttggggggtttgttgttgttttgttttaacataatacctttccatattttccaaattccttataataatcctgagttgttcttataaccagaggagtgggaaacccacagtaaactgctttttgaaactaaaatgctttctggccctgagcacacctctccaggcatccctgcctcacccrggcccccgtggcctctttgactgttgacttcactttaagcagatgcccaggccctaggtcttccaccgggcccaccgcccgcccctgtgatggagctccctaccagcaccagggcgatgcagtcctctgtggtggaggccgaggagcaggtcacgctgccttcgctcaagcca

SEQ ID NO: 21812 - DNA, 544 bp, Homo sapiens
gatttttaaagtggcactgctcgagtcgaaatggttaattacctagcagaaattgatttctctatctccgtagcactcaaagcagctggcaggctcttgcaatagtcattcgttttygtggtgacaagaatggttgcgccttcctccatagctgggagtggaaagcaatggtcagagtcgaccttcggtttgctcttgatgcagtcttcacaggtgcattcttccaccgtgtactcgaggcctctcggaagaataatttcatcaccagtcctgctcttttccaggtcaatgttagccatgcccaggagacctgatcctaattatgtagaaacggaaacattaacccaaacttcacagagaatgtggtcatgagagtcttagcagtacacatcgggactcaaagcaatgtgagagagattttttcattttttagaggtggggtcttactgtgttgcccaggctgcattcaaactcctgggctcaagcaatcctcccacgttagcctacagagcagtcgggactacagctccatgccaccacaccc

SEQ ID NO: 21813 - DNA, 543 bp, Homo sapiens
agattcaccatcaaaccaacctgtgtttttaaactcgtcctttaatggttcagagcttatcttccttagcaaaaacattagcacgaaaactgccaaagaaattattaagctcagtcccaaacaggtccagagaatcgcattcgttcctttcactgaattggtcacacctttatgaaaagaacatcagacagataatgagctgataacataatattcacatactttattgttattatttatttatttattttgagacaaagtcttgctctgttgcccaggctrgagtgcagtggcgcgatctcggctcactgcaacctccacctcccaagttcaaacgattctcctgcctcagcctcccgagtagctgggattacagacctgtgccaccatgcccagctaattttttgtatttttagtagagacagggtttcaccaggttggccaggctggcctcaaactgccgacctcaggtgattcacccacctcggcctcccaaagtgctgggattacaggtgtgagccatccaccgcacccggctgtcat

SEQ ID NO: 21814 - DNA, 543 bp, Homo sapiens
agattcaccatcaaaccaacctgtgtttttaaactcgtcctttaatggttcagagcttatcttccttagcaaaaacattagcacgaaaactgccaaagaaattattaagctcagtcccaaacaggtccagagaatcgcattcgttcctttcactgaattggtcacacctttatgaaaagaacatcagacagataatgagctgataacataatattcacatactttattgttattatttatttatttattttgagacaaagtcttgctctgttgcccaggctagagtgcagtggcgcgatctcggctcactgcaacctccacctcccaagttcaaacgattctcctgcctcagcctcccgagtagctgggattacagacctgtgccaccatgcccagctaattttttgtatttttagtagagacagggtttcaccaggttggccaggctggcctcaaactgccgacctcaggtgattcacccacctcggcctcccaaagtgctgggattacaggtgtgagccatccaccrcacccggctgtcat

SEQ ID NO: 21815 - DNA, 511 bp, Homo sapiens
caaatacaagtggagacaaaaccactcctctctcaataattgatagggcaaataggaggaaaataagtaaggatatagaagacttaaatactaccaaccaacttgacctagttgacatttacaagacactccactygacaacagaatacatacacattttattctcaagtgcacacagaacatttcccaagatagaccatattctgcattcaaatatacaaagacttttccagaaaataggaaagtagcaaagacttttcagctcactcttttttttttttttcctgagacagagtctcactctgtcacccaggctggagtacagtggcatgatctcagctcactgcaacctccgcctcccaggttcaagcaattctcatgcctcagcctcccagtagctgggattacaggtgcgtgccaccactcccaactaatttttgtatttttagtagagatggggttttgccatgttgtccaggctggtttcaaactcctggcctcaagtgatttg

SEQ ID NO: 21816 - DNA, 511 bp, Homo sapiens
caaatacaagtggagacaaaaccactcctctctcaataattgatagggcaaataggaggaaaataagtaaggatatagaagacttaaatactaccaaccaacttgacctagttgacatttacaagacactccacttgacaacagaatacatacacattttattctcaagtgcacacagaacatttcccaagatagaccatattctgcattcaaatatacaaagacttttccagaaaataggaaagtagcaaagacttttcagctcactcttttttttttttttcctgagacagagtctcactctgtcacccaggctggagtacagtggcatgatctcagctcactgcaacctccrcctcccaggttcaagcaattctcatgcctcagcctcccagtagctgggattacaggtgcgtgccaccactcccaactaatttttgtatttttagtagagatggggttttgccatgttgtccaggctggtttcaaactcctggcctcaagtgatttg

SEQ ID NO: 21817 - DNA, 534 bp, Homo sapiens
cctgagcccggggtgtggctttgggcagggccagctgggcctcagccgccccctccgtgggggcggcgggagtgaggcacctctcatttcttctaggtattttggagataacggcagtggaggtgggcattgtggccatcaggggtctcttctccgggcggtacctggccatgaacaagaggggacgactctatgcttcggtgagtccaggctgtcacgtgggtgggcgctgacggagtagcggtctggcctgcacatcaagccaggggacgggggatgtgggcagtagaatgctttgccaagggtacatgggayccaagctaggaccagaccctggcccagggctccacgcccagtgatctttggctgtgtctgttagaggctgctccgcgagtgacctggagcctggccctgggggacctgggatctggagaatgccaggttagcaaaggtttcccccatccttgtcatcactaccaccctcccttgagagtagctgagagcagggaagtgattgttctccaaatttccacc

SEQ ID NO: 21818 - DNA, 1655 bp, Homo sapiens
cactctcctacttacaggactcaacatactagtcacagccctatactccctctacatatttaccacaacacaatggggctcactcacccaccacattaacaacataaaaccctcattcacacgagaaaacaccctcatgttcatacacctatcccccattctcctcctatccctcaaccccgacatcattaccgggttttcctcttgtaaatatagtttaaccaaaacatcagattgtgaatctgacaacagaggcttacgaccccttatttaccgagaaagctcacaagaactgctaactcatgcccccatgtctaacaacatggctttctcaacttttaaaggataacagctatccattggtcttaggccccaaaaattttggtgcaactccaaataaaagtaataaccatgcacactactataaccaccctaaccctgacttccctaattccccccatccttaccaccctcgttaaccctaacaaaaaaaactcatacccccattatgtaaaatccattgtcgcatccacctttattatcagtctcttccccacaacaatattcatgtgcctagaccaagaagttattatctcgaactgacactgagccacaacccaaacaacccagctctccctaagcttcaaactagactacttctccataatattcatccctgtagcattgttcgttacatggtcmatcatagaattctcactgtgatatataaactcagacccaaacattaatcagttcttcaaatatctactcatcttcctaattaccatactaatcttagttaccgctaacaacctattccaactgttcatcggctgagagggcgtaggaattatatccttcttgctcatcagttgatgatacgcccgagcagatgccaacacagcagccattcaagcaatcctatacaaccgtatcggcgatatcggtttcatcctcgccttagcatgatttatcctacactccaactcatgagacccacaacaaatagcccttctaaacgctaatccaagcctcaccccactactaggcctcctcctagcagcagcaggcaaatcagcccaattaggtctccacccctgactcccctcagccatagaaggccccaccccagtctcagccctactccactcaagcactatagttgtagcaggaatcttcttactcatccgcttccaccccctagcagaaaatagcccactaatccaaactctaacactatgcttaggcgctatcaccactctgttcgcagcagtctgcgcccttacacaaaatgacatcaaaaaaatcgtagccttctccacttcaagtcaactaggactcataatagttacaatcggcatcaaccaaccacacctagcattcctgcacatctgtacccacgccttcttcaaagccatactatttatgtgctccgggtccatcatccacaaccttaacaatgaacaagatattcgaaaaataggaggactactcaaaaccatacctctcacttcaacctccctcaccattggcagcctagcattagcaggaatacctttcctcacaggtttctactccaaagaccacatcatcgaaaccgcaaacatatcatacacaaacgcctgagccctatctattactctcatcgctacctc

SEQ ID NO: 21819 - DNA, 990 bp, Homo sapiens
tcaggcttcaacatcgaatacgccgcaggccccttcgccctattcttcatagccgaatacacaaacattattataataaacaccctcaccactacaatcttcctaggaacaacatatgacgcactctcccctgaactctacacaacatattttgtcaccaagaccctacttctaacctccctgttcttatgaattcgaacagcatacccccgattccgctacgaccaactcatacacctcctatgaaaaaacttcctaccactcaccctagcattacttatatgayatgtctccatacccattacaatctccagcattccccctcaaacctaagaaatatgtctgataaaagagttactttgatagagtaaataataggagcttaaacccccttatttctaggactatgagaatcgaacccatccctgagaatccaaaattctccgtgccacctatcacaccccatcctaaagtaaggtcagctaaataagctatcgggcccataccccgaaaatgttggttatacccttcccgtactaattaatcccctggcccaacccgtcatctactctaccatctttgcaggcacactcatcacagcgctaagctcgcactgattttttacctgagtaggcctagaaataaacatgctagcttttattccagttctaaccaaaaaaataaaccctcgttccacagaagctgccatcaagtatttcctcacgcaagcaaccgcatccataatccttctaatagctatcctcttcaacaatatactctccggacaatgaaccataaccaatactaccaatcaatactcatcattaataatcataatggctatagcaataaaactaggaatagccccctttcacttctgagtcccagaggttacccaaggcacccctctgacatccggcctgcttcttctcacatgacaaaaactagcccccatctcaatcatataccaaatctctccctcactaaacg

SEQ ID NO: 21820 - DNA, 539 bp, Homo sapiens
actatagtcttttgagactataagaaaagtgttcattagtaccttttcactgttaacaatttttttttgtttttcttttttttttgagacaagtttcactcttgtcacccaggctggagtgcagtggtgtgatcttggctccctgcaacctctgcttcctgggttcaagcgattctcctgccccagcctcctgagtagctgggactacaggcgcgtgccacctcgtccacctaatttttgtatttttagtagagatggagtttcaccatgttggccaggctggtcttgaactcctgacttcagatcatccgcctgctttggcctcccaaagtgttgggactacaggcgtagmcgctgcgccccagccactgttagccattattaaaggaggttatgttttaatactgattttgcatctaaaacttttgatcaggctgggtattaaaatttggtcttttgtgtgtttggaaaatatatcaatgcagttttcatcttatttttcatagcctatatgtcttttttttttttttttttttttt

SEQ ID NO: 21821 - DNA, 539 bp, Homo sapiens
actatagtcttttgagactataagaaaagtgttcattagtaccttttcactgttaacaatttttttttgtttttcttttttttttgagacaagtttcactcttgtcacccaggctggagtgcagtggtgtgatcttggctccctgcaacctctgcttcctgggttcaagcgattctcctgccccagcctcctgagtagctgggactacaggcgcgtgccacctcgtccacctaatttttgtatttttagtagagatggagtttcaccatgttggccaggctggtcttgaactcctgacttcagatcatccgcctgctttggcctcccaaagtgttgggactacaggcgtagacrctgcgccccagccactgttagccattattaaaggaggttatgttttaatactgattttgcatctaaaacttttgatcaggctgggtattaaaatttggtcttttgtgtgtttggaaaatatatcaatgcagttttcatcttatttttcatagcctatatgtcttttttttttttttttttttttt

SEQ ID NO: 21822 - DNA, 559 bp, Homo sapiens
tcttctggtggaacaacaatcgtttctatttggatgtttgtatttcactaagtaatgatggctcaaaataatatttagtttccttgttcctttgtgctgtttttaaaatggcatgttagatttgggggtgggagggsatatccttttgctaaatttcactttatctgagcaggtttaaaatatatatgttgtagaagtgtatcaacagaataaatgacttcaatcgaaggcacattttacccactttcaaggcttaacattgttttctatgaaatttgcatccataggcagaatttctaattgtcttgtaagaaattattttttaagctattagagaaatcaaaggagagctcactgccttgcagggattacaaccacctttcttaactggctaaatattaactagctgaattgtcaggctgcttagattcagcccgattttccctcatctcctcttcctaccataaataataataaaaatacataatgtgtcatggctccaggcgttttccagcacagtgtgttaccgcaggagtatctgctgagtctgcgggtgtct

SEQ ID NO: 21823 - DNA, 559 bp, Homo sapiens
tcttctggtggaacaacaatcgtttctatttggatgtttgtatttcactaagtaatgatggctcaaaataatatttagtttccttgttcctttgtgctgtttttaaaatggcatgttagatttgggggtgggagggcatatccttttgctaaatttcactttatctgagcaggtttaaaatatatatgttgtagaagtgtatcaacagaataaatgacttcaatcgaaggcacattttacccactttcaaggcttaacattgttttctatgaaatttgcatccataggcagaattyctaattgtcttgtaagaaattattttttaagctattagagaaatcaaaggagagctcactgccttgcagggattacaaccacctttcttaactggctaaatattaactagctgaattgtcaggctgcttagattcagcccgattttccctcatctcctcttcctaccataaataataataaaaatacataatgtgtcatggctccaggcgttttccagcacagtgtgttaccgcaggagtatctgctgagtctgcgggtgtct

SEQ ID NO: 21824 - DNA, 568 bp, Homo sapiens
tcccctgagcttccctcctatagaggggtcacctttggactcctgcttcagggcagcagcctgccctcatcttgggttctcgggcacacggcaacctggcagtgggcagggctggagaccagagcccgggagtttccctgggaactgctgggggccccaggtgtrgagcaggaggggcatggacacccagattgccttggtcagatttttctggctcctcccagtcctccagagggggtcctgccaagaggcagccggagccttgacaggaaagggcatcggaagtcccctggccccagcaggctgctcttgctctctctctcttaaaacattattgtgtcctctctcctctctctgtcagactgtgccccctgactgcacccctctctgaatttcttgtgcaccccccacccccgccactacatctcctctcttcttggccaggtgtcaggaggtagcagagctaaggcatttagagcagcgacctccttcctgtgcctcttccatgcctcttagggagcccaggtgaccacacatcccagcccaggcctgcacagggctgcactgg

SEQ ID NO: 21825 - DNA, 632 bp, Homo sapiens
ctcccttaaagcagagatcaagatgaaaagggcttcagctgcagcatggcacatggagattagagtggggcttttggatgctgaggagcagacctagaatgggaaatagatgggagccacagaagtgaaggtccccctccctcattgctcaacctactccacatctccaggtctgcacatctgttcagttactgaatcctgtgtaagctaccttctttttcttttttcttttatttatttatttwttttttttttgagatggagttttgctcttgttacccaggctggagtgcaatggtgcaatctcggctcactgcaccctccaactcccaggttcatgcaattctcctccctcagccttccaagtagctgggattacaggctgcaccaccatgtctggctaatttttgaaaaatcagtagagagagggtttcaccatgttggccaagccggtctcgaactcctgacctcaagtgatccacccaccttggcctcccaaaatgctgggattacaggtgtgagccaccatgcccgctgtaaactaccttcttaaaagctctagaagagggcttttaaccttttgttgtgtgtcatgcaccttccgcaagctgatgaagttgatagacccatct

SEQ ID NO: 21826 - DNA, 518 bp, Homo sapiens
tttctaatctggagggaagggcacatgtcctccctagggaagcatagcacagcctgatgtcctccagctagtcagccttccgtgacaatgcccaatcaatgtgaatccactctgctgtcactggaagcagaggtatcctcgtaatggctttttggcctctatcaaattctgtcaagaagaaatcacctctcagtcctaactgttctstgatactatttgacaacaaccccagcaaatgctcacattccttatcattgatgctaatcccacagtcagaaggttttctttaggctatcaatctagcaactcccttcaccatccttccagtgtagggctataaactacacagtgccatgcacaatatccttagaagactaatacacaacaagatgtctaacaacatacaacacattttggtaaatccaaccccaagttggattcatagtacccaaggatccatttaccttactgtgggaaaattccccacacatactgcagtgactgtccctggacccttg

SEQ ID NO: 21827 - DNA, 518 bp, Homo sapiens
tttctaatctggagggaagggcacatgtcctccctagggaagcatagcacagcctgatgtcctccagctagtcagccttccgtgacaatgcccaatcaatgtgaatccactctgctgtcactggaagcagaggtatcctcgtaatggctttttggcctctatcaaattctgtcaagaagaaatcacctctcagtcctaactgttctctgatactatttgacaacaaccccagcaaatgctcacattccttatcattgatgctaatcccacagtcagaaggttttctttaggctatcaatctagcaactcccttcaccatccttccagtgtagggctataaactacacagtgccatgcacaatatccttagaagactaatacacaacaagatgtctaacaacatacaacacattttggtaaatccaaccccaagttggattcatagtacccaaggatccatttaccttactgtgggaaaattccccacacrtactgcagtgactgtccctggacccttg

SEQ ID NO: 21828 - DNA, 848 bp, Homo sapiens
ccagctagtcgggaggctgaggcagagggtgcagtgagccgagactgcatcaccgcgctctagcctaggagacagagcgagactccgtctcaaaaaaaaaaaaaaaaagtttttttttaatcgccaaatgttctggagaggcccccttctcttctgttctcctgcagtctgggctgcaggccaaggtggtccctgtgggtggagacaagggccggttccacctgacactacagaccccttcacatgggagggatacacttccagacccatatatctccgagtagccatctttggcgagatttactggtactgcagtggaaaggaaggactcgctgtactgggtgaaaaaagtgaaaacatgggactcctatcgcagactctgacagcagaacctggtgtgggttatttgggaggagggagggaggagggagaaaggaagagctgttgtgggtgctatcagcgaaactgcaccgggggcatgaagctcagtttggtcagcaccacctggcaggtgtaccaaaagcccacccgactgtccctgcacggtagagaggcaggagcgcctctccctgcacggatggtgccccggaggctaccaggggcggccgaggacactgatgctgcatcccaggaggacctgtccttcagctgtaatcagcagacacrggggacaggatggccaggggcacagcaccttttctgtaaaccccacaccctgaccccccccacccaaaaaagcaaaaaacaactatttgtctacacatacaattttatgcccagatggaaaaagatccaaatgattcacagtggtgatggctctgagggtgacgctgtctgcttaaggccca

SEQ ID NO: 21829 - DNA, 528 bp, Homo sapiens
gcggcctgagtgagcagctctttcctggggcacaaaaggccctcagccgtggtcactgcagcattctgcagtcagcgacacgtctgtccctccactacatttcaggtatacagggggaggctggctaatttcccaccatcctatcctgaggtcctagtatgcggtaaggggggctccatcagtgtgaagggagacaattcaaagtagtggaaataygtccaaccttccttcttagcattccgtacttaaagtttttaaatgtcggccgggtgcggtggctcacgcctgtggtcccagcactttgggaggctgaggcgggcggatcgcgaggtcaggagatcgagaccatcctggcaaacacgatgaagccccgtctctactaaaaatacaacaacaacaacaaaaattagccgggcgtggtggcaggcacctgtagtcccagctactgtggaggctgaggcaggaaaatggtgtgaacctgggaggcggagcttgcagtaagccgagattgggccactgcactccagc

SEQ ID NO: 21830 - DNA, 528 bp, Homo sapiens
gcggcctgagtgagcagctctttcctggggcacaaaaggccctcagccgtggtcactgcagcattctgcagtcagcgacacgtctgtccctccactacatttcaggtatacagggggaggctggctaatttcccaccatcctatcctgaggtcctagtatgcggtaaggggggctccatcagtgtgaagggagacaattcaaagtagtggaaatacgtccaaccttccttcttagcattccgtacttaaagtttttaaatgtcggccgggtgcggtggctcaygcctgtggtcccagcactttgggaggctgaggcgggcggatcgcgaggtcaggagatcgagaccatcctggcaaacacgatgaagccccgtctctactaaaaatacaacaacaacaacaaaaattagccgggcgtggtggcaggcacctgtagtcccagctactgtggaggctgaggcaggaaaatggtgtgaacctgggaggcggagcttgcagtaagccgagattgggccactgcactccagc

SEQ ID NO: 21831 - DNA, 556 bp, Homo sapiens
ggaactccccacagccatgctgctcgcgcccacacccttgggaagccaggccttccctggcccacactgtgccgtgctccctgcgttttgtctgtggtgctgacccccgggcacgttacaccgtccttgtctctgccccactaggatgagagttccatgaggacagcaactcggctcgttccggccaggtccctggagcatagagcagataagctagctatcacagactccgtcgcctggtcaaaggctgatgaggatgagatgtgagccctgccccttatcctgtatccacttcctgctggtgtggctgtggcttgtgccttttatttaaaagaatttgggttggcctggccgaggggcacagcaggtctcatggtctcggtagactgggccagtcaggcccttgagtttggtctccatggagacgaggcattccggcactcgaaggttacatccacatgggcccrggagtggctgtatctgtgggtgcagccagggttccaggacacacctgtgcaggagaaagcgggtaggaccaacctcagtgaactacctt

SEQ ID NO: 21832 - DNA, 587 bp, Homo sapiens
tggtttatggcaggaaaagatttccgtctgatgagatttggtagctttgcatttaaaatactcatttctcctggcctcttttctgtgttgaaacgtttggtgccaactgagtgrtcactgtgtgtgtccttggcactgacattgggcctctgggttgaagtccagtagtaacggtatgtggtgtgtgtctgttattttttccccagagggagagacaagctcaacgagaagatgccctcgagctcacggagaagctagaccaagactggaaagaaattcagactctcctgtcccacaaaactcccaagtcagagaacagagacaaaaaggaaaaacccaaggtgggagccaagtactgaaacaaactcttcactcactgagcttgggtgaccgactttctccagagaaagggctggggctggacggctcttctacctgtctcctttagggcaagtttctgttgaacattgatactgaattacctgctgtgtgtaatcttggggtggaagtagattcagttacttgagtctctattgcaggtgaattaaactgaaaaaagtggtgtttctggatggaagaagtacttc

SEQ ID NO: 21833 - DNA, 587 bp, Homo sapiens
tggtttatggcaggaaaagatttccgtctgatgagatttggtagctttgcatttaaaatactcatttctcctggcctcttttctgtgttgaaacgtttggtgccaactgagtgatcactgtgtgtgtccttggcactgacattgggcctctgggttgaagtccagtagtaacggtatgtggtgtgtgtctgttattttttccccagagggagagacaagctcaacgagaagatgccctcgagctcacggagaagctagaccaagactggaaagaaattcagactctcctgtcccacaaaactcccaagtcagagaacagagacaaaaaggaaaaacccaaggtgggagccaagtactgaaacaaactcttcactcactgagcttggstgaccgactttctccagagaaagggctggggctggacggctcttctacctgtctcctttagggcaagtttctgttgaacattgatactgaattacctgctgtgtgtaatcttggggtggaagtagattcagttacttgagtctctattgcaggtgaattaaactgaaaaaagtggtgtttctggatggaagaagtacttc

SEQ ID NO: 21834 - DNA, 587 bp, Homo sapiens
tggtttatggcaggaaaagatttccgtctgatgagatttggtagctttgcatttaaaatactcatttctcctggcctcttttctgtgttgaaacgtttggtgccaactgagtgatcactgtgtgtgtccttggcactgacattgggcctctgggttgaagtccagtagtaacggtatgtggtgtgtgtctgttattttttccccagagggagagacaagctcaacgagaagatgccctcgagctcacggagaagctagaccaagactggaaagaaattcagactctcctgtcccacaaaactcccaagtcagagaacagagacaaaaaggaaaaacccaaggtgggagccaagtactgaaacaaactcttcactcactgagcttgggtgaccgactttctccagagaaagggctggggctggacggctcttctrcctgtctcctttagggcaagtttctgttgaacattgatactgaattacctgctgtgtgtaatcttggggtggaagtagattcagttacttgagtctctattgcaggtgaattaaactgaaaaaagtggtgtttctggatggaagaagtacttc

SEQ ID NO: 21835 - DNA, 588 bp, Homo sapiens
aaataaatatatttttaaaatgaagaatttcttctttctaccttagcccgatgcatatgacatgatggttcgcgagcttggctttgaaatgaaggcgcagccctctaacaggatgaagacggaggcagaattggcaaaggaagagcaggagcacctcaggaagctggaggtagggtggcagcacctcaggagcagggctgtgctgctgtccgtccacagccccttctgctccattttgcaggatgggctgaagagaatactctgtttgatcagtggaatattttagtctatttaaagtttatatttattcatgaatacctttttttttttttttctttgagacagagtttcgctctgtcacccagctagagtacagtggcacaatcttggctcactgcaaactccacctcctgggttcaagtgattctcctgcctcagcctcctgagtagctaggattacaggcgccygccaccacgcccggctaatttttgtatttttagtagagataggatttcgccatgttggccaggcggtcttgaactcctgacctcaggtgatccagtcacctcggcctcccaaagtgctgg

SEQ ID NO: 21836 - DNA, 1210 bp, Homo sapiens
gaaatgtggtccctgcctgggcaattgttccttacccactcctctctattatggaaagacaggaatgaactgtggtgagcagttaatcatcttagcccatagccattttctagttgtattgaagatggaattttctgttatattttcattctttttgttgctttcagtgggtttcagagaagggagtacagtaaacatcttttaacttgtttacaagtatgtcttttccacccatctgtgatctcctctaaatggggaccatgacttaacttgttttctattttccagcacccagcatgatggctgacacagagcagatgcttaataaatgtttcttggatgaaaaartgaatgcattcctgtcctgagtgggtgaaaacggctcttcccaccttccttattctcaacttactcttcctatcccctctctctcctctctgtaggagaaaggaggaattgtcaggatggctccattcttttttctctgtttccccttcttatcatggtttggctcaaggcttgtgtctcctgtctccagcattgatttacctctccccagaatgaaatttcattctagctttgcctgtggtgcagcctgcttcctgctgcccaaccgtttaacaatgtcctccttgcagcttggggaaagacactggggaaagaaaaatctctctctgtccacagaaccataactcactggtaaggtagccagctgccctatcactccagctggtgttaaaagtcatggacattaagtgggactaggatgtggatcgaacatgtatgaaggagcctgcccaagaggagaccctctcctgctttaaatgccctgatctaagtgggccactctattaaaatccacctacagtggcaagttacttttctaaaatagagagtcctcaggaggaaacatcaacagaaatggagtagaatgaaggagctcagagcatgatcactggaatccaacagacttgtgtttaaatcctgctctgccatttactggctgtatgactttggacacattatgtaagcaatttgagcttcagtttcttcattcataacactgagataattatatctatcctgttgggttgttatgaggatgaactgagttcaattctaggcatgtaagaggcattccatattttttgaatgaataaatgccaaatgtacataatgtaatgcctggcacgttgataagcaatccata

SEQ ID NO: 21837 - DNA, 1210 bp, Homo sapiens
gaaatgtggtccctgcctgggcaattgttccttacccactcctctctattatggaaagacaggaatgaactgtggtgagcagttaatcatcttagcccatagccattttctagttgtattgaagatggaattttctgttatattttcattctttttgttgctttcagtgggtttcagagaagggagtacagtaaacatcttttaacttgtttacaagtatgtcttttccacccatctgtgatctcctctaaatggggaccatgacttaacttgttttctattttccagcacccagcatgatggctgacacagagcagatgcttaataaatgtttcttggatgaaaaaatgaatgcattcctgtcctgagtgggtgaaaacggctcttcccaccttccttattctcaacttactcttcctatcccctctctctcctctctgtaggagaaaggaggaattgtcaggatggctccattcttttttctctgtttccccttcttatcatggtttggctcaaggcttgtgtctcctgtctccagcattgatttacctctccccagaatgaaatttcattctagctttgcctgtggtgcagcctgcttcctgctgcccaaccgtttaacaatgtcctccttgcagcttggggaaagacactggggaaagaaaaatctctctctgtccacagaaccataactcactggtaaggtagccagctgccctatcactccagctggtgttaaaagtcatggacattaagtgggactaggatgtggatcgaacatgtatgaaggagcctgcccaagaggagaccctctcctgctttaaatgccctgatctaagtgggccactctattaaaatccacctacagtggcaagttacttttctaaaatagagagtcctcaggaggaaacatcaacagaaatggagtagaatgaaggagctcagagcatgatcactggaatccaacagacttgtgtttaaatcctgctctgccatttactggctgtatgactttggacacattatgtaagcaatttgagcttcagtttcttcattcataacactgagataattatrtctatcctgttgggttgttatgaggatgaactgagttcaattctaggcatgtaagaggcattccatattttttgaatgaataaatgccaaatgtacataatgtaatgcctggcacgttgataagcaatccata

SEQ ID NO: 21838 - DNA, 596 bp, Homo sapiens
gtgggctggtgcaaatgttgctgccttatctatgcgacttcagggtggctggtgggcaaactcctggctacccacacaagcctctgggacacaaataggcattaggaatgtggtgaccctgggctctacagtgataaagaaacgtgaattcctgggcctgaccgtgataaagaaactctgccatcggttttattattcttagggacccagctctaaattcattgtgtatcagtcattyagtaaacatctttataagccagtcatttagcaagcatctttatgagttttagcacacatctataaagcttcttttaaaaatgtttagcaaacatctttaaaagcctcacgtcaggcctttgggatacaaaggtggtgaaaaacagacgtgatcctggtttgggagcttacggtataggagatagacatctattagctcatcacacaaaagcatgaaagaataccctctgtgttgagtttactgaagaaatgtatgtgattctaggagaacatgtaacaaagcaacccctatgaaatgataaagacagggaaagtttccctgagtacacgtaactttagcaaaagaacttgttattcat

SEQ ID NO: 21839 - DNA, 596 bp, Homo sapiens
gtgggctggtgcaaatgttgctgccttatctatgcgacttcagggtggctggtgggcaaactcctggctacccacacaagcctctgggacacaaataggcattaggaatgtggtgaccctgggctctacagtgataaagaaacgtgaattcctgggcctgaccgtgataaagaaactctgccatcggttttattattcttagggacccagctctaaattcattgtgtatcagtcattcagtaaacatctttataagccagtcatttagcaagcatctttatgagttttagcacacatctataaagcttcttttaaaaatgtttagcaaayatctttaaaagcctcacgtcaggcctttgggatacaaaggtggtgaaaaacagacgtgatcctggtttgggagcttacggtataggagatagacatctattagctcatcacacaaaagcatgaaagaataccctctgtgttgagtttactgaagaaatgtatgtgattctaggagaacatgtaacaaagcaacccctatgaaatgataaagacagggaaagtttccctgagtacacgtaactttagcaaaagaacttgttattcat

SEQ ID NO: 21840 - DNA, 596 bp, Homo sapiens
gtgggctggtgcaaatgttgctgccttatctatgcgacttcagggtggctggtgggcaaactcctggctacccacacaagcctctgggacacaaataggcattaggaatgtggtgaccctgggctctacagtgataaagaaacgtgaattcctgggcctgaccgtgataaagaaactctgccatcggttttattattcttagggacccagctctaaattcattgtgtatcagtcattcagtaaacatctttataagccagtcatttagcaagcatctttatgagttttagcacacatctataaagcttcttttaaaaatgtttagcaaacatctttaaaagcctcacgtcaggcctttgggatacaaaggtggtgaaaaacagacgtgatcctggtttgggagcttacggtataggagatagacatctattagctcatcacacaaaagcatgaaagaataccctctgtgttgagtttacygaagaaatgtatgtgattctaggagaacatgtaacaaagcaacccctatgaaatgataaagacagggaaagtttccctgagtacacgtaactttagcaaaagaacttgttattcat

SEQ ID NO: 21841 - DNA, 598 bp, Homo sapiens
ataaaaatataaaaattagctgggcctggtagtgcacgcctatggtcccagctactctactcaggaggccgaggcagaagaatcacttgaacccaggaggtggaggttgcaatgagccgagatcacgccactgcactccagcctgggcgacagagcaagactctgtctgcaaaacaaacaaacaaacaaaaactgtggcctctagctcagagcagtaggaaaccagaaaaggttttacccagaggaaaagagtggcatgactgcgcttgtttttggaaagctgacttttgctactgagagaaaagatatgggggaggagaggtgagcagtggarggaagagactagtgtgaaaaacacttgccattgtgctggggaaagatcacaaagcatggactaggtaggtgtaggggaggtggagccacgctagggtgtgatgtggttagacccagggcaagagaaagggacaaagatgagctctcagttccagaacagcaactaagcagatggtgatgccactacagaggggctgtcaggctggtggagtaggcagatcatggctttggggttgttgatccgggttatgtataaactaaaaca

SEQ ID NO: 21842 - DNA, 598 bp, Homo sapiens
ataaaaatataaaaattagctgggcctggtagtgcacgcctatggtcccagctactctactcaggaggccgaggcagaagaatcacttgaacccaggaggtggaggttgcaatgagccgagatcacgccactgcactccagcctgggcgacagagcaagactctgtctgcaaaacaaacaaacaaacaaaaactgtggcctctagctcagagcagtaggaaaccagaaaaggttttacccagaggaaaagagtggcatgactgcgcttgtttttggaaagctgacttttgctactgagagaaaagatatgggggaggagaggtgagcagtggaaggaagagactagtgtgaaaaacacttgccattgtgctggggaaagatcacaaagcatggactaggtaggtgtaggggaggtggagccacgctagggtgtgatgtggttagacccagggcaagagaaagggacaaagatgagctctcagttccagawcagcaactaagcagatggtgatgccactacagaggggctgtcaggctggtggagtaggcagatcatggctttggggttgttgatccgggttatgtataaactaaaaca

SEQ ID NO: 21843 - DNA, 667 bp, Homo sapiens
taaatcagactgttccacaaatatttactgagcacctgctacatgccagtcatgggtctatactctggtgctgcaacagtgagcagagcaaagccccgccctcgtggatcgtccattctaatgggactaacagtaaacataaaaataaataaaaatgtgatagtggtaagatgaatgcagggtaygtgataagaagaaaattaacccagctgggggaacagagaatgatggtcatatcatttttgtcctgaataagtgaggagcccatcatgcggatgcaaaacaagagcattctagacaggggagccatggtgcaagaggcccagaggggaagtctgcttgttgtatggaaagagaaatcaggaatccagtgtggctgagcagtcagattgtggaaagcggcagttgagcgtagcagtcatcacagactaaaccaagaagggccctgcaggtgtggtacccatgagatacaggaaatccaaccactgggcagtagtttgtgcagtttgttcactagtcttatctgtgagattcctgccaatcactacaaaccttgtacacacacttgccctcccaaccaaatcagatgcagccttataggctgtagtggacatatggctgcgaataccttcattcaattcatttattctccagacatttactgggc

SEQ ID NO: 21844 - DNA, 509 bp, Homo sapiens
ctgcattttgttgcagccaacactgcattgcaatcctagttagctcaggggctttttaagtatttgacttatgacctaagtagctgggcaggctgataagaacagacagtgagccattttgcaggctgataaaccttcatcttagactaaacttctttggttctgatgagggcaagaaaagtggggtgtaccaataagcaggtgtcagctatccaaccaggagcctagtatcttctgttttttttgtgtagtttgctgacctaagctgatttaaggcactttgtcttgraaatggaccactgtatacattatttcctccagagggactgtccttcctccaccccagccccagtacccaggctgtgtgggtcgtttgcacctttgcgcagcatcaggggcccctccctgtgggttttactgtgcactttattttggaagggttgaatcgtggagctttctccccaccacatcgtgagcgtctcgaacgcttcacttttgttctcccaggg

SEQ ID NO: 21845 - DNA, 526 bp, Homo sapiens
tcgtccttatgtcccttaaactgaaagcgtaggttgggactcaagccagggaaccttcgcagctcacctgggtttctcttcccactcttgtgttttcagggcagcgtttatacaactatttgctgaactgaytaggtgtgaattccaagctgatagctcttcatcacttagcattacaaaactgtatcaaagccccatgtataaacgtgtttttgcactttccttcatcttttttcatactttcttgccccaagaaaaactttttatcacctccctaaggaatttaatagctgtgaattacaaacccaacagctatcacaactttcttaacatttactaagaagccagagttgattgtttttccttctgtaaattcaacgtcaaatgcttacaaagtcgagcaccagtaaatatggaggcttcaaatgagaagcttcatccttaggaacagccaggatataggagactttcattttcaaagtgagttcattgtgtgtgtctacggaggtgtgtcccaaaacctcta

SEQ ID NO: 21846 - DNA, 526 bp, Homo sapiens
tcgtccttatgtcccttaaactgaaagcgtaggttgggactcaagccagggaaccttcgcagctcacctgggtttctcttcccactcttgtgttttcagggcagcgtttatacaactatttgctgaactgattaggtgtgaattccaagctgatagctcttcatcacttagcattacaaaactgtatcaaagccccatgtataaacgtgtttttgcactttccttcatcttttttcatactttcttgccccaagaaaaactttttatcacctccctaaggaatttaatagctgtgaattacaaacccaacagctatcacaactttcttaacatttactaagaagccagagttgattgtttttccttctgtaaattcaacgtcaaatgcttacaaagtcgagcaccagtaaatatggaggcttcaaaygagaagcttcatccttaggaacagccaggatataggagactttcattttcaaagtgagttcattgtgtgtgtctacggaggtgtgtcccaaaacctcta

SEQ ID NO: 21847 - DNA, 560 bp, Homo sapiens
agggaggccctcctggaccagcagagtctgggacctcccaggtgagtgggtctaatcctgcattcaggtaggagcccactcacctgcagatataagctgaatattccagcctaacttttcttatgtaataaaggtgatattttctttcccatctgctcattcttttttcttatttcttaattggtttgaaattttggcaggaaagaggggatgttacttattgtgtctgatatgggtttggctgtgtcccaatccaaatgtcatcttgaattatagatcccataattcccatgtgttgtggaagagacctggtgggagataattgaatcacrgggggggggcggtttcccccatactgttctcgtgatagtaaataagtctcatgagatctgatgattttagaaggggtttcccctttcacttggctctcattctctctcttgtctgccaccatgtaagatgtgccttttgccttccgccatgattgtgaggcctccccagccacatggaactgtgagtccattaaacccccccttttttttttttttataaattaccca

SEQ ID NO: 21848 - DNA, 535 bp, Homo sapiens
cgtctctactaaaaaaaaaaatacaaaaaattagccrggcatggtggcaggcgcctgtggtcccagctactcgggaggctgaggcgggagaatggcgtgaacccaggaggcggagcttgcagtgagccgagattgtgccactgcactccagcctgggtgacagagtgagattctatctcaaaaataaaaaataaaaataaacaaataaataaacaaataaaaataaaaataaaaaaataaaaaataaaaaatagaaatatgcttaaagaagcaatgtgcttctctgcacttttgggatgagatggaaatgttcctgcccactagcaatccttagctctggcccctgtaccgagagcttcagcgggtggcattattagtggggatgcactttaagtattattccaagaattggaaacagaaaccctcccacactgagcacagatgtggtgatggatgatgtatctcagtggcatggccccatcaaatcccgtgttcaactgactacatgaacctattttggtcagtgattatttcc

SEQ ID NO: 21849 - DNA, 533 bp, Homo sapiens
agcctttgctcctccttagccttctgccatgattgtgaggcctctccagccatgtgaaactgtgagtccatgaaacctctytcctttacaaattacccagtctcgggtatgtcattattagcagtgtgagaagagactaatacacactgtcttcaaggggatgcatctttctgtgctcatcattccaggcctcatatctgtcttcactttcaacacgtttacttttgtcagccgtcccccgctcccaccctttctgtcctccaagcctaggggcccctgctgtttagggattgtctcaccactttttcacatttccttctcgagcctttgtaaaacctcacgtctatgtgggtgtctgctggcagtgtgaccctcttccaggtgaagctctgagaggccagaggccttagctgtcttgctctctcctgcatccttagcactcagcaggcatcctgggtcttggtagaatcctgacaacattggtgagtgatttggggcaagggagggatagggaagcataagtggtttgtcca

SEQ ID NO: 21850 - DNA, 547 bp, Homo sapiens
agcagcttcccagtacatttgctgagtatttgtgtgtgtgcatgtgtatactgtgtttatagatatataaaatcagtgggtatatatacatatatttatatatatacatacatatgaattaagacattttttctgaagagcttaacattctcatttcttctacattttagggatctggccgagaggccagaggaagccattcttttcctcatctagtcagtcatctacttggcatttgctaaggttcactccatatgacatcttagagcatgggactagtacttggaacacagctgctttcagagcctgtgacttcttgtgtgcctctcctgtttctcagcaacactggcatagggcctgggataccaggtctggggatctcagggactcttagcactttaagacacatgtgttcccaggccctggtgtgttcctctagtgccagaaagatgtttcatgctttgctgactttgtataaagtctgtttgtagctgttttgacagaatctcagygtataactgagggtggggacattagccaagctgca

SEQ ID NO: 21851 - DNA, 556 bp, Homo sapiens
ctctctcaatttcaacaagacaaacaacagttggtattaggaaccaaagtctcacttgttgagaacattcatgttttgggaaaagaacaggcttcacctaaaaacgtaaaaatggaaattggtaaaactgaaactttttctgatgttcctgtgaaaacaaatatagaagtttgttctacttactccaaagattcagaaaactactttgaaacagaagcagtagaaattgctaaagcttttatggaagatgatgaactgacagattctaaactgccaagtcatgccacacattctctttttacatgtcccgaaaatgaggaaatggttttgtcaaattcaagaattggaaaaagaagaggagagccccttatcttagtgggtaagtgttcatttttacctttcgtgttgccaatcactatttttaaagtgtttattcagtagacttggtatgctaacaatyaagagtgttataaactatgtcttttcagccatttttgtgtagtcagtttgggggagtatggtttgatatacagatacacagattcagtattcgtat

SEQ ID NO: 21852 - DNA, 792 bp, Homo sapiens
gctgcctgttggagagtgtttctagtgcaaacaccagttgccaggcacttcacagcctctcacgtgatgctctcagcaaccctccgtagctgctcccctagttagcccgactttaccgatgaggagatggagacaccgagagctgaagggactcactcagcggcatgagctcacaagtggcagagccgcgacccgaagaccagcccccacatccgagctcatcaccagctccctaatctccaccacagacagcgatttaatttccaggggcagcaacctcctggctcttgtttcagaagagctgaacagagcccgctcttctttacctcgggaattcagatagcagaacccatggcccggtggagctctttctacatcttattggcgaaaccacgtcgtttgcacataaaagatgctcctctttgattctcagagcaggcaagcaaggcaaggacaaaatgaggcaggaagaaagagygcaccaggagcctggaatagagcagggctttggaacatgggggaccacttgtgacaagaaccctcataaaaccctcataaaatgttcatctcaattgttgttttaagcgtctttattcatggggtacacacagccatgattttacaaaaatgtgcaaatgtgataccatcattgattgtaacaggatatgcaatagtgcaaaaatggaaacgacctaagttcccaagtaaaaggctgtagcaggaaagtgcagactattgaaaattagtggaaaggcacaggatgaggtgacattcattcattcactcattcac

SEQ ID NO: 21853 - DNA, 514 bp, Homo sapiens
tttctcacttaattattctctgccacaggggkatatggaaagctctgtgaatcctaattgataaggtatttggatgactacctgaacagctaactcagatttatccatattttagagaaaatatcagagtctgttctacagtttccttttttttaacttaaaaaaagtgtaattagcttaaaatatacagatcctgagtgttcagtttgatgtttgaagagagtgaatttccatgatgccaaaaagtccccctgtatccccttccagttagttctctcaccattttctggtttctatttctgtaggttagttttgcctgtttctgaatttcatatatgttgaatcatacaatgtgtactattctttttgagggtggggaatggagagagatctggctgctttcacataacatgtttttgaaatttatcctgttttgttaatttattctttattattattccgttgtatgaatataccataatttgtttacccacttcttttgatggttatctgg

SEQ ID NO: 21854 - DNA, 546 bp, Homo sapiens
tttgcttttttgctttaggtgatgttaagtaaaatggtatttcatttaacagtaaatgcaaaaggattatgtggaacatctcctttgttcagtggaaaagtagggaaaagttgctgtttttgcaggtcatttgcttttcctcccacctcagaggtyactgtgtatagcaaatggatagagggataatcagaaacacctggaggaatacttctgctgaacttccacttggtgataatgaagagatcttaagatggatctgagatgctaaatattccaagatgtgtatgaaagtaatgttaagacactgaagataacagtaaacctaactcactggtttttggattaagtaatgggaatattagaatgagtagaactttaagaccaaaatgttcttctgtcctgggaaaactactttccagtcccctgggtaacttgctaaagcaagttgttttgtgctagtccttttacaaaaaaattaatttgatgtttagaggtgagatcttgctcttttgcccagggctggagtgcagtggcacaatcataact

SEQ ID NO: 21855 - DNA, 525 bp, Homo sapiens
ttttttttgagacagagtcttgctctgttgccaggctggagtgcagtggcacgatcttggctcgctgcaacctccacctcccaggttcaagcgattcttctgcctcagcctcctgagtacctgagattacagccacctgccaccacccccggctaattttttgtagtcttagtagagacggggtttcaacatgttggccaggctgktctcgaactcctgacctcaggtgatctaccagcctcggcctcccaaagtgctgggattacaggcgtgagccaccgtgcccggccttccatgacacttttaagactactgttagcattcagagggtgtaggtctgttggagtcttcaaagcagaacagctataagagaaaccatctcgatatacaggattgtccgtgtcaatcccctgtcaccaccattccctttgaaggtttcctctggatggcagagacttcccagaagccccttttgtggttctagctttgttccccagtgagaggctctagagaaagatctagaag

SEQ ID NO: 21856 - DNA, 581 bp, Homo sapiens
cgcaccacgttccaggtcctgtgctatcgcatacattgtttcctttaatcgtcacaacagctctgcacacttggccttgttatccagatttcatgcataaagagactgagcctcagataattttttaactactaactaagatcacacagcagtccctgaattggctgaattctatatccatgctcttaccacttaattaaaggagagcagaagccttttaacagcacttcatcatagggaggaagggaaagaatgacaccaatatgcactcactcgttcattcaagaaccatgccttcagcacatactctgtgtgaagcactgagctaaattctttccataaattgtctcagtaaatcttcacaacaccactagcagatgagaaccaggattatcccaattttgcagatgaggatatggagctcaaggaggttcaactgttgtgctmgccatcatagagctaggaaatggcagtatctggattgaaaattaagtttgtctgtcttcaaagcctgcactctttccagaatattgtgctacttctagaaggcaaactatgttttactgtatgcaaagcaatag

SEQ ID NO: 21857 - DNA, 522 bp, Homo sapiens
cgcctgaaggcragggccaaatttatgtgagcctttgtaataattctgagcacacggagcaaactgtaaactggtcattaatagtaatctaaggactcggctcggagtcagggattcagaggtaatttagttcagctcccagctgcatcagctgcagctaatttttgagcctgtctctggagatcactttccccggtctataatgaggagaatttgttgatctcacatagggacgaaaaataaactgatttaaagcattcagaagtgacaacaggcttgaatgtttacttgtaccccatatacaagagaaaattaggaactcttccctggggttagctttctggaattaacaactgatattacagcaccctcccgttattgagtctccccacagccctgccaggtgcgtgtcttcattcccgtttcctagactgggagaggtgtgtgtggtgactcaccgaggttggcatggctgctaagtggcagggccagtgtacgccttaggccatcaaagtccaagcc

SEQ ID NO: 21858 - DNA, 522 bp, Homo sapiens
cgcctgaaggcgagggccaaatttatgtgagcctttgtaataattctgagcacayggagcaaactgtaaactggtcattaatagtaatctaaggactcggctcggagtcagggattcagaggtaatttagttcagctcccagctgcatcagctgcagctaatttttgagcctgtctctggagatcactttccccggtctataatgaggagaatttgttgatctcacatagggacgaaaaataaactgatttaaagcattcagaagtgacaacaggcttgaatgtttacttgtaccccatatacaagagaaaattaggaactcttccctggggttagctttctggaattaacaactgatattacagcaccctcccgttattgagtctccccacagccctgccaggtgcgtgtcttcattcccgtttcctagactgggagaggtgtgtgtggtgactcaccgaggttggcatggctgctaagtggcagggccagtgtacgccttaggccatcaaagtccaagcc

SEQ ID NO: 21859 - DNA, 522 bp, Homo sapiens
cgcctgaaggcgagggccaaatttatgtgagcctttgtaataattctgagcacacggagcaaactgtaaactggtcattaatagtaatctaaggactcggctcggagtcagggattcagaggtaatttagttcagctcccagctgcatcagctgcagctaatttttgagcctgtctctggagatcactttccccggtctataatgaggagaatttgttgatctcacatagggacgaaaaataaactgatttaaagcattcagaagtgacaacaggcttgaatgtttacttgtaccccatatacaagagaaaattaggaactcttccctggggttagctttctggaattaacaactgatattacagcaccctcccgttattgagtctccccacagccctgccaggtgcgtgtcytcattcccgtttcctagactgggagaggtgtgtgtggtgactcaccgaggttggcatggctgctaagtggcagggccagtgtacgccttaggccatcaaagtccaagcc

SEQ ID NO: 21860 - DNA, 522 bp, Homo sapiens
cgcctgaaggcgagggccaaatttatgtgagcctttgtaataattctgagcacacggagcaaactgtaaactggtcattaatagtaatctaaggactcggctcggagtcagggattcagaggtaatttagttcagctcccagctgcatcagctgcagctaatttttgagcctgtctctggagatcactttccccggtctataatgaggagaatttgttgatctcacatagggacgaaaaataaactgatttaaagcattcagaagtgacaacaggcttgaatgtttacttgtaccccatatacaagagaaaattaggaactcttccctggggttagctttctggaattaacaactgatattacagcaccctcccgttattgagtctccccacagccctgccaggtgcgtgtcttcattcccgtttcctagactgggagaggtgtgtgtggtgactcaccgaggttggcatggctgctaagyggcagggccagtgtacgccttaggccatcaaagtccaagcc

SEQ ID NO: 21861 - DNA, 544 bp, Homo sapiens
cttaagccttcttgcgccttggagtagagtcctatttctgcatcgaggagccaatggaattcaatggaaatctgtcctccactgtggtgcaggctgaaaacacaaacaggtttgtgaaggttcagggaaagcagttcttaatagaagattaaaagggagttagggatggaattccctatgatccagcaatctcactactgggtatatatgtaaaagaattgaaataaatatatcgaagaggtatctgcactcccatgttcattgtagcactattcacaatagygaagatatagaatcaatataagtcccattaacggatgaatggatgaagaatacgtggcatatatacataatggaataccactcggccttaaaaaagaaggaaatgctgtcatttgttgtgaatatgctgtccatgtccataacatggatgaacctgaagaacattgtgttaagtgaaataggctaggcacagaaagacaaatacagcatagtggaatctaaaaaagttaactcagaagcagagagtagaatggtggttacc

SEQ ID NO: 21862 - DNA, 544 bp, Homo sapiens
cttaagccttcttgcgccttggagtagagtcctatttctgcatcgaggagccaatggaattcaatggaaatctgtcctccactgtggtgcaggctgaaaacacaaacaggtttgtgaaggttcagggaaagcagttcttaatagaagattaaaagggagttagggatggaattccctatgatccagcaatctcactactgggtatatatgtaaaagaattgaaataaatatatcgaagaggtatctgcactcccatgttcattgtagcactattcacaatagtgaagatatagaatcaatataagtcccattaacggatgaatggatraagaatacgtggcatatatacataatggaataccactcggccttaaaaaagaaggaaatgctgtcatttgttgtgaatatgctgtccatgtccataacatggatgaacctgaagaacattgtgttaagtgaaataggctaggcacagaaagacaaatacagcatagtggaatctaaaaaagttaactcagaagcagagagtagaatggtggttacc

SEQ ID NO: 21863 - DNA, 616 bp, Homo sapiens
ctgccagactcaggtggggccatgtgggaggctctgtgtgccttgctcagacattgcattttatctggggcaggtgctggggaggagcctgtctgagcggggcaggtgctggggaggagcctgtctgagcagggcagggctccgccttttaccatgggtcctcatagcagcccaggcagctgggcactggggtggaagggcatcgctgaggccgtgctgcctggcatttggcccacccacattccatcagggcagagtagggggccgattgctgtgtctgtctcargccctgcccttccctgcacccttctgctctgtgcctctgtccggtgccgtgctatcctgagagcctccctctggccccttttgctagagatttatgctggatgtaaacgattactggctggccactcacttcctccaccatctgggtgtcctcagccctgcctttccccaggagtcctttggacctgctgtcccagctcctttgaaaggctgcctcgggtctccacttgcccttgccaagcctgggtgagggtggacagcgtgctccaagtaccgcacctgctgggtgctctgcctcgtgtgccaggcgacagcccttggggctctcctg

SEQ ID NO: 21864 - DNA, 616 bp, Homo sapiens
ctgccagactcaggtggggccatgtgggaggctctgtgtgccttgctcagacattgcattttatctggggcaggtgctggggaggagcctgtctgagcggggcaggtgctggggaggagcctgtctgagcagggcagggctccgccttttaccatgggtcctcatagcagcccaggcagctgggcactggggtggaagggcatcgctgaggccgtgctgcctggcatttggcccacccacattccatcagggcagagtagggggccgattgctgtgtctgtctcaggccctgcccttccctgcacccttctgctctgtgcctctgtccggtgccgtgctatcctgagagcctccctctggccccttttgctagagatttatgctggatgtaaacgattactggctggccactcacttcctccaccatctgggtgtcctcagccctgcctttccccaggagtcctttggacctgctgtcccagctcctttgaaaggctgcctcgggtctccacttgcccttgccaagcctgggtgagggtggacagcgtgctccaastaccgcacctgctgggtgctctgcctcgtgtgccaggcgacagcccttggggctctcctg

SEQ ID NO: 21865 - DNA, 575 bp, Homo sapiens
tgcctgtctcataagaatccatgtttaaatagcaagtctagaagagtgtccagcatataacaggtacccaggatgtctctttggtttaatccacccgaagaggttgacttcctccttttgattcagtgattggcttggcggcgactttccagaatggaattccttataaggggccttcccagattggaattgcayggcgatctcgaagcttgcagacatggagcggttgccaccagggcatggctcctgtcatcccgcagcctgggaaaggccacatagaggctgtctctttggcctggtggcaactgtgactcaccgtcaccatcccgaccccaccctcagagcaggtggccttccctccaggacttgggaggggccgctggacaggatggcatggacagtcccagctaaggctgctcagactggactctgagaccctgcacactgatcaacctgtgggtgagcctggtggatcctgtcccatctagtctgtcgctggctgagccgaggcttcacatgtgccatgccatgcccttcctgagcttcagtttcctgatgtgcgatgtgtgcagggg

SEQ ID NO: 21866 - DNA, 513 bp, Homo sapiens
cttgctcctgtgttattagttcgtttttatttttaagagatggggtctcactctgtttccaggctagaatgtagtgatgatatcatggctcacygcagcctcaaattactgggctcaagcgatcctcctgcctcagcttccccagtagttggaactacagatgagcgccactacacaccatcaactcttcattgctaccgtaggccacgtggctccaccttcacttcctcccacctgaaacacttgacccatctgtctgcaatgcagtgcacaatgtagtaagagagagcctttacctccttaatttattagaatctttggacctgggctgtctctaagctgctgttctataaatgagccaacaatggcctgggcgtatggacccatggggttttttatttcttccctacagattcacatctgttagctcaaaagcccactgctgccaaactcaaatttgtacacatccagttattttaaaaatagtcccaacaattagactgttagccattt

SEQ ID NO: 21867 - DNA, 531 bp, Homo sapiens
gccccttgaacacccgatgctacgtgtcccaaaggaaactggtctccacccacccccsgcccgtcctcgtcctgggtaccccaccttagtaaatggcgccaccatctgcccggtcactcagcgagaaactcaactcctggcagcagatgacgggcactctggttaaatgactctctccagcctccaagttcaacctgcagggaagccctggaaatcctgtctccctctgccctgcctctccttcagctccgaaccccaccccactcagtacatggccccccaacaggctttcaaatgtctgccttccccaaaccaatctgtggttttaaaagaagtaaggtcaggtacagtagctcatgcctgtaatcccagcactttgggaggccgaggcaggcggatcacctgaggtcaggagtttgagaccagtctggccaacatggcgaaaccccgtctctactaaaaataaaaataaaaaattagcctgggtgtggcggtatgtgtctgtagtcccagctactccggaggctgagg

SEQ ID NO: 21868 - DNA, 531 bp, Homo sapiens
gccccttgaacacccgatgctacgtgtcccaaaggaaactggtctccacccacccccggcccgtcctcgtcctgggtaccccaccttagtaaatggcgccaccatctgcccggtcactcagcgagaaactcaactcctggcagcagatgacgggcactctggttaaatgactctctccagcctccaagttcaacctgcagggaagccctggaaatcctgtctccctctgccctgcctctccttcagctccgaaccccaccccactcagtacatggccccccaacaggctttcaaatgtctgccttccccaaaccaatctgtggttttaaaagaagtarggtcaggtacagtagctcatgcctgtaatcccagcactttgggaggccgaggcaggcggatcacctgaggtcaggagtttgagaccagtctggccaacatggcgaaaccccgtctctactaaaaataaaaataaaaaattagcctgggtgtggcggtatgtgtctgtagtcccagctactccggaggctgagg

SEQ ID NO: 21869 - DNA, 531 bp, Homo sapiens
gccccttgaacacccgatgctacgtgtcccaaaggaaactggtctccacccacccccggcccgtcctcgtcctgggtaccccaccttagtaaatggcgccaccatctgcccggtcactcagcgagaaactcaactcctggcagcagatgacgggcactctggttaaatgactctctccagcctccaagttcaacctgcagggaagccctggaaatcctgtctccctctgccctgcctctccttcagctccgaaccccaccccactcagtacatggccccccaacaggctttcaaatgtctgccttccccaaaccaatctgtggttttaaaagaagtaaggtcaggtacagtagctcatgcctgtaatcccagcactttgggaggccgaggcrggcggatcacctgaggtcaggagtttgagaccagtctggccaacatggcgaaaccccgtctctactaaaaataaaaataaaaaattagcctgggtgtggcggtatgtgtctgtagtcccagctactccggaggctgagg

SEQ ID NO: 21870 - DNA, 530 bp, Homo sapiens
ggattcttccctcacctggccattactggctaccagcatgtggaagtctcagccctcgaagtcatatagatgacctactgtttagggtcatgtggatgctatggtcatgtccactgctcccactcacccctccccatggccacagtgtyaggctcattcctctctgtcacgtgaagattgtgagctgccaaactctgcagatgtgtgtgtgggcagccaagtggctcctgtcatctcgtggcaggcaaagcctttgcggtcctgtgagcaccgcagctaaccaatggctgttgtacatgtggctcttatggtcacgtgagattccgcaccctcccattcacgtgaagattgagtgctccgaatcctgtcagagaggtgcttccggctccacaccctgactcaggcggaagttttattggacttcggctcagatctgaagccttccggcaactttcatatcctgacgcgctggaaggaagtctggtacgagtggaaccagccggtactagaagtttactgagaattgggct

SEQ ID NO: 21871 - DNA, 307 bp, Homo sapiens
tccaccaagtggaacctcctgtcttttgaaacccacagcagacgggacaagcagcctccctcggggaaggggcccctcctgggaggcagcccagaactggagccagtgtgggcaaggggagaatcccagagaaggacttcaggagccctgtcccccsgcctgcacttcctgcagcccaaacagggcctttgattagaatttcccgtttgaaaaatcaatatttaaagccctctgcctgccaaacagaagggaaggccttgcttgtaaatatttgtctcgcctggcagagtcgggcccctggctcacc

SEQ ID NO: 21872 - DNA, 522 bp, Homo sapiens
tgagcgattcagattaccagagagctcatactcttgttgtcattatcaatttcccagtgaaaaagttaaaataatgcaaaaattaacttgtgcagctctttcttttctttctttctctctctctttctcttcttatcttttttttttttttttgacggagtcttgctcttgttgcccaggctggagtgcaatggcatgatttcggctcactgcatcctctgcctcccaggttcaagcgattctcctgtctcagcctcccgagtacctgggattacagacatgtgccaccatgcccagctactttttgtacttttagtagagacggggtttcgccatgttagccaggctggtcttgaactcctgacctcaggtgatctgcccgcctcggcctcccaaagtgctgggattaccggcgtgagccaccgcacctggcctgtgcagccatttttatagttctcacactracttcatttgactctcaactcccagcaggtcctcgagtgatcatgcttgtgttggctc

SEQ ID NO: 21873 - DNA, 536 bp, Homo sapiens
ggtccactgagacctccggctcctctgacttctcctcctactcctcccctcgcacaccagccaagccgtttcccgggaaaggctcacactgcccacctccctgtgctggtccacacaaagcccctgcccagaatgtccttcccaccttagctgtccatatgttctcaccaacctggyctctggcccccacaccctccaggctgcccagccctccaagcctttgatcctgtctgtatctccctctggaatacgcttccagccccatttcactcccaacttctattcatgcttcaaaaccctgcccagacaagtcctcctctctggcggagcttcgtcgtcctctacctgtaaagagcccatggttccctctctcaggtgactactttgcctggaccacgagcaggcacttggtgagtctccaccccttcaagggctgtgggttctgtgtgggccaggccgatgcctgcttattctccacagtctcaggcctgtcacccagtgaatgcaggtggaagggaattaaaccacctcctcca

SEQ ID NO: 21874 - DNA, 484 bp, Homo sapiens
tgagcacttcgttgggcagaccccaygatccttacatgaaacattttgaacttcctcttccttcccacacaccgggtgtacggaagaacatctccatccatcctccaggtgcccaaacagaagctcagctctgtacccctcttgctccaagatcttcacatccaaacacccctgggtctcgctcagattctcccacttccagaacccgcttctgagcacggccacctcttcctgcatctgcagtcccaccgccctgcgtgacccactgccttgcacgacccaccgccctgcaggcaccagcttctggcatctgatctgatggccccacaacgctcactgcagagcaaccttcctaagacacaaatctgaccatgattctccctgatttagaatcatccttggctccctgttgccatcagcagagaatccggagtcctcagcacataggcgatgctcggggggcctggcctctgcgtctccccaa

SEQ ID NO: 21875 - DNA, 522 bp, Homo sapiens
gaggaaatggagaaaaattttaatcagaaaaggggcagaccaagacagtttgattcaacacacatgtatctatcaaggttctatgtaggcagaatactagctgattgattgtgctaagggctgatggaatggtttattaatcagggtaggccactgctataaggaacaaccccaaatccttcatgaggattcacatcagaacccaatgcctgtcatagtgaaataagaagagaacttagctctactccatgcagtcattcaggaacccagcctcctgccatcctgtggcttccccatcccctagcctcagagtttcccactggaacctctgcatccagcttgtagacagggggagaaacagaacatagagaaccatatgggtggttttttagtaaggartaaagccagaaagtagacaagtcacttctgtcctcatcaactcaggcacatggtttctcctgactacaggaaatgctgagaattatagcctcactcatgcccaaagaaaaaggaaagagtctg

SEQ ID NO: 21876 - DNA, 554 bp, Homo sapiens
cgagatggcagcagtacagtccagcttcggctaggcatcagagggagaccgtggaaagagggagagggagagggagagggagaggtgaattcttttttataattacattttaaaaagtcacagtgtcaacttgatttttgattggttttaatctcacagtaccttttctggagtagggttataccccacagtagctgcaaattctgcagagccccaattctactgatcaggatgaaaagaaagaaggctrctgcctccacagaagcccagtaactatgactcgactcttgaatatatctcctatcatttattgtttttctacattaggcaataaaatttgtagtaacactgagtttctaaggctttttgatgaagggcacaagctttggagttggatccttctagatgcaaatccagctctgataaaactagccatgtgaaccaattgaaaaaaatttcctcaaacctcagtttctttatctgtaaaatgatgacagtagtgcctgcctcagagggttattgtgaagacagaataggtactatatagaaagcac

SEQ ID NO: 21877 - DNA, 696 bp, Homo sapiens
tcaaagtcacatgaagttgtgaatacatactattaaatgcatattttgcattcgatgaacagtgcatattttggccactgttagagcaaggggcaagggtatggtttggaggagcagtttctatggcttaatacccataagaccctattagttgcctactaagtatccattcacccattctatgtttcaatttattcctaacaggtaaggttcctgttgcattttacagattaataattcgagattcaaagaagtaatcctacttattccyaaccagattgctagttaaaagcctgagacaggattctaatcccaggtttcccaagaatccgagttcttaaccatagtgtttttgattagttaattgtcatctactcatttctccaagctctgcccttggcttttgcttttcatttccagctaagccttggagtacagcaacctacaagaagcaaccttactctggctggcatttactctgtttgttcattctctcccctagagcagtagcctcaggagataatgtcagaaaaaacaaattgttggcaccaggatctgcataccccaattaacaaaatgatgctttccacccaccctcctgcaaatatttgaagcaggaaactgcccctctcacaacctgggtcagcctcctaccagccattcttaagacaaaagtctttttccttttagtgggtg

SEQ ID NO: 21878 - DNA, 533 bp, Homo sapiens
ctaattaatgttagttactgtttaacatgcatgccatctcttttaatcctcataacaaccttataaggaaaatatctactatatatttcatacaaagcaaactatttacataacattccaagttttttcccattacccttattttgttctttctgcctggaattcttatgttcctgatctttgatgaactyatccatttcctaaggtctagttcaaatgtctcctttaatatctacatcaaatatacaagtgtataagaagaagactgttttacaagaagatattagaatttaattctgagttggagtagtggagcagcattgaacatagtaaagcagaagaactataattcaacagtaaataatccctgggtcttttcctgtaaaccagcacttggcctacagtgcaaggccaaatagcacactgatgattgtcaaagataagaataaaattgcttgacccaccactggactataaatgcctaggaagcaacccagagcatgtgagcaatgactccatttccagaatatttt

SEQ ID NO: 21879 - DNA, 522 bp, Homo sapiens
tatgtgttcatatgttttatatatattgtttttatatattayatataatgttttatatattatatatgttttatatattatatatgttatatatattaaatatgttatagattatgttttatatgttatatatgtttatattttatatataattttacatatatataaaaacatagatgtcacattattaaaacaatatattatttaacaaaatatgataaattttatactgtctgcattattcatgtcataaatttttatacttactttttataattcacagttatttacataaagactaaaagagaattggccccaatttgacttcttctgtttcaaaatctatggtatagctaaatgaaatatgtttctttgtccaaagttatggtgaaattgtttcctggggttgttatgggcataaattaattgcagaagaaagtgctttgaaaagagttctaaacaaagataaatggcttattttattgcaatcgtccttaacatataaacttacctgagacttgc

SEQ ID NO: 21880 - DNA, 474 bp, Homo sapiens
gtagaaagataaatgtttgagatgatggatataccgattaccctgatttgatcattacacattgtatacaagtatcaaaatatcatacataccctycaaatatgtacaactattaaatatcagttttaaaaatggaaaggaatcatgtacgctcccaccatccaaatccagtggggtaccttctgcacagcatcttctggtcccaggcacctgctcctacatttgatattgttccactcatggtacacatactgcccaaaacgtaatggcctgttagccctttacacaaacatttccgtgtccttccacagtggccgcagcaggcatgggcaatttcatgctctttcaggctactctttgctaagccagtgcactaatttgggactggagggtattccctttgttgtcgttgtgctgttatagacacactgcactttgggaggctgaggcaggtggatcgcttgaggtcaggag

SEQ ID NO: 21881 - DNA, 574 bp, Homo sapiens
tatggcacgctgccccttccatgagagccctccaaacctgtaagagctttggttctcctgaaccacagctggcatttggttggcacttttcacgaagtgaatgccaagctggctgccaagaagcctgaaccccatttgtggtcttctctaatgacagctgctgtcccctggcatctgttctctgtgtgcacccacctggctctatcctatttccccaccttcccttccttttggcccaaaccttaattatcccatgggttgctgaccatttcctaaagggccagatagtgcattctttagagtatgcaggccctacagtctctgcagcaatggctcaaccccactaccacagcacaaagcaaccagagacaacatgagaaccatggagcgtggctgtgttcagtctatcgttccctacaaaatgcaggggccggatccggctrccacagttggctgcccgatgtcttctactgttctatcctgcccccgagtccacatccccctcagctgctctcagatcttttggaataaggaagtgatatgaatgcataaataaatcgtttaaaagacagtc

SEQ ID NO: 21882 - DNA, 503 bp, Homo sapiens
caaaatgtccaaatgtgcatttgtccaaatgtgcatctccaggatggacccgggagagactatacattcccagacagaacccttggctgtccaagagcctctgagggcacagttgaagaggagagacaatggagtcaatgggtttgacctgggccttaggggaacagtttgctcctgagcaaccagcagccaccctcctaggactgaaaactcccagcagggcagggcatggcagggcagggcagggcagggcagggcagggcagagcagggcaggtgtggagtctagaaaagaacttgcctcaaagccgggcctctgagggstggacatgcctggcccaaggcaagaacaccaaccagttttcaagggccggtccagtcgtcatccaaccgcccccgcccccagctgtcacttgggtgtgccttgaattgctttctgtcttacccgtcagcccttccttcccaactctccagccttcagccttggtatattcctgggttgtt

SEQ ID NO: 21883 - DNA, 481 bp, Homo sapiens
gggcaactgaagactcccctccacctccaacctcaaacatcctcccagaaatatagttgttcycatggctgacttctgcatatttattataatcctattctattgtaccaaacttaagattcaacgaagaattgctttctcttttctgccagtctgcatcctggtctgggactctcctggtctcaaggacctacctgggaattggtgaatattgttgttcgaaagcccttatgagattttctgtccagtcccctgctgctcggatatgaatggagaagaaatcttcctctggagcagaggtcaaagtaaaaggatgccattccaggagagagattgaggggcaattaacaaagatatactgccccacttccatgctgaagccacgcttgttcatctgcaattccaaaactttggatgggtgcataacaacctgtgaatgaagcacatagaccaaagaaagcaaactctaatgacgacaggg

SEQ ID NO: 21884 - DNA, 555 bp, Homo sapiens
ctcaaccattaaacttctttccatctctactgccagcatcctagcctgatccaacatcattttttaaagaaaattttacctttgccctccgataatctattctttacaacagtcagaattttttttaatgcaaaactatctttgtcaccccaccctcagccctggtcaaaaccctttagtggacccccattcccccaggaccaaatccaaatttcttatcayagcttctaaagttctcaataatctggcttctatgtatctcttcggtctcacctttttgcatccctcctctcactatttcattcagtaatacattcattcatatactcattcacttacttataaatctgtcatcagtttatttatccattcatttaataaatgtttacttagcatctactgtgtgcttactcttatactggacaccagagacagagagataataagatgtttttgctcccatgcaactcccagtctgcttgtctttcaagccattttctccagaaagccataactcattttctcaggtggaagttatcccttaatcttataata

SEQ ID NO: 21885 - DNA, 540 bp, Homo sapiens
gccagggcccagccccctgccctatagaacctctcagccacgcagctcccatgaatggcctggcagagggaagggctctgggccctccaggtgtgctgggtgcatctcctgggacaggctgggcccagagcactcaccgcagccccgctcggcagcacaggcaccaaattctgcctctctgtcatgtcacaccttccacgcggaccctgtggggaccagagtgtgaattctgctttcgtacctgctcttgccactgccatccatgaaaggcctgaggataggggtcaggtggagtctgggtctccaagcacagggctgatgaccagggtgtggycctggctcccggaagctcagatatgtttcagtttgtcacttcggctctgcttggtgtgcttccttttcttttttacttatccagatacgacttacaaacagcgatgtgcgcaggtcttaagggtacagctggaggaactcctcctgcatccacacccagacaatgaccgctgagttcaggatccagagcacagggcgccagagcct

SEQ ID NO: 21886 - DNA, 557 bp, Homo sapiens
gaactatactccatatcaaacacattcagatgcwtgcagcaaatcatatgaacaaacacacttagtataattatagcctcactttcctgcagattaggctttgctaccaaaagaattgcaaaacattttctagtttccagagtgtgttggatttgggatttgcaggcgagggactgtggacctgtaaatataaagcccttagaagagaatgtggcactaagtaggtgctgtgggcctagcatgcagcagccacttggtacatgttagtttccttctctccagccaggctctgatagcacccaagcctctcatagctctccccttctatttccccaggagatgagataatccccactcctctcttgccccagaaggtggtagcacttgcaaattcctacttaccagtctgtatgggcatcatcgatcaccaacaggatcctgggtctttgaacaatgggcgtggagggacctggaggctccatcagtcctgaggtggcctgaggggcctgcttcatggcactggagagggagctaaaaaggctggatcctggagagga

SEQ ID NO: 21887 - DNA, 542 bp, Homo sapiens
aacaaatatttctgtgtctggccatcaaaattagaaatcagaaagaagaatgtgttttttttaatgtattgtgtttcatgttcatcagttgccaagcaccaactctcccgtttttctggaggttggattgctgtatgctyatgtattatgaggtttttattgtgctttttctctgaagatcttaacatgagcagctttggaaggattacagggaatatattttaaaagacattttgagttccacgaagcattccttttcatgagtactacatttactttcaaagttttgtgtatccctccaaaagtggacaaagtaaatagagagtcacttcctttcttacccagtcctgccctgcccctccccttttctgaggatactacaaagtcaagcagcctgtgcctttgaggtactgtggatccagttggtgatctctggctttcaggagaagaagtgattgttacaggatctgctacacaatgaggaggtgttattgggaattgcattattttcctacattgtttttgtacactgttccaaattt

SEQ ID NO: 21888 - DNA, 404 bp, Homo sapiens
ctacagcatgccttcacatttgtttacaattggactatgtcctaagcacgttgtattttggcatttgacccttcttgagtgtctgccctttgtttatcctacagcatgccttcacatttgtttacagttgggctatgtcctaagcccattgtattatggcatttgacacacagcttccattggaagtgggagttataatccctgttgcacagttaaagaaactgaagcccactgaggcaagtgactcactcaaagtctctccattatctcctagcaggaggcagagtcccagctttaacccaatctttctatcgcccaatctcaagttstttccaccactccacaactcttttctgaattatttttccgtcctaagttttaagaaagagctttcaaagaaacat

SEQ ID NO: 21889 - DNA, 520 bp, Homo sapiens
agccatctcaaatttgctcccagtagatcagtctgaagttggggattcaggttgcatttagccaaaaccaaaataaaaagtgaaaaaataatctgtcatacctttagtgttttatatgtatgaaaaaaactatacagatattttgaaaatactcagactgaatttgtccctctaaatctcttagggaccagagacatattagtattcatgtaagtacttgacacttatctggggtttgttatacttattcctttaaaatacacatttatactactataagttttaagtttgcttgatgccaaagcagtgtcagctaatatatataatttaaaatgtttaatgtaaggatttgtaatcctgtggagtttttacattcctccttaaaaaaaaatttagggacaatcctaaagtcataaaataatatatagtatayacagtaattatttctaaaattatttactttgaaggttgaaaaggaccttgaaggtcattgtgtactaaaacattctgacagtttaat

SEQ ID NO: 21890 - DNA, 589 bp, Homo sapiens
atgctgaaccggtaatgtttgtctaggtagggcccagtcttatcatttactaattagctgcccagtgtgctctactatgtataatatgataaacatttcaccatattttggaaaccatgctgtagtgcagcaaggctgtactcaaaatgcagtaggggccataggggtatatttaggactgtccaggttaattgtgtgcattcctgatgtctttcaacttgctaacctctttaacctcaaatttggactctattaaaaaaagcccaggtaactcaaatatgagtgatgtggcagactgaataatggtccccttacaatatccatgtcgtaatccccaaacctttgaatatgttatgttacatggcaaaggggaataaaggtcactaatcaatggaccttaaattagagattatccaagtgggcccaatataatcacaagagtattaaaagtggatgagggagtcagaggaagagctgcggtgacaaaagcaggtcagagagacgccatggagctggctttgcggatggaggaaggaggatatgarccaagggatctgggcagcctctggaagaaggaaatagtaagaaa

SEQ ID NO: 21891 - DNA, 459 bp, Homo sapiens
taatgcgtgttcttttctaatattctgcccaataccattttcttttatttaattttaactttttttaaggtctccttgtaagcaagcccaatgctattctctacagagcgctggtgtcacttttgggagacaaaaacacttttgattggttcagaagttcttgcctgtctcatcccagacttgagagatgccgtctccctgtgtactttcacatccaaatctgttttgaatattgcgtagtatgctccgttttgattatttattctccaaatccggttgtatgtgtccttctatctgtcattgaagtaacagtctayttagactttttcagtgctatctgggttatgctggcgttcgcatgataatcgttctcgttttcgttatctaaactctaaaaatctggccataatattcacaatgttaaaaattaaactaaggccgggcgcggtggctcaggcc

SEQ ID NO: 21892 - DNA, 868 bp, Homo sapiens
atgatttgaccttcccccttccttgcttatatcactaagagccctaagtagatgattatttatctatatgcaaattaacttgtctaattacaaataagcctatgatacaaataataatgcaaacatctcccagtttctctaacaagycccgatccctctggccattgaatatgctgttccacttgtccagaacattcttcctgctacctctaacctcacccctcttcagctggccagctccttctcactcataggtctcagcttagatgtcactgcctctgggaagccctcactgatctcctcagtgtggctcgaggccttggtcccctgtgctgcgccatcctagcacttatcaccctgtgttgtgactgtttccctagcaggacaggaaatgtccatggagaccagaacagcttgtccttcaccaaagttaagttctccataaacttttttgattgaatcatttatgccaagggttggcaaagctgttctgcaaagtgccagatagtattttcagctttgtgggctgtatgatctctgttgcaaccattcgactctgcggttggagggagaaagcagccatagctgatacttaaacaaatgagcatggctgtgttccaataaaactctatttgtgggcactgaaatttgaatttcatatgaatttcacatgtcataaaatattattccttaaaaacattttttcaaccatacaaaaatgtaaaaaccatttttaaaggttcaccggctgtacaaaaacaggtgatggaccttagtttgctaaccctgattaatactgagagtcacatgttctggattttccaggtcattctcaaagatacaacaggatcacataaagcagtaatgc

SEQ ID NO: 21893 - DNA, 616 bp, Homo sapiens
cgtctcaaaaaaaaaaaaaaaaaaagaaatatgaggagttgttattgtcaactaagtgcaacagttctagaaagctascatttctgagttaaaaggttttataacttgttatagacttaattttcagtggggagattaaaatgtgacagatggaagaattgcttggacaaaatcatgtagctcattttttggcagattcaggattcctagttgatttttcattattagtttgcctttccagtggtttctcagccccactgtgctgccttttcagatcctgtggaaaagcacataaaggataagaggttaccttctaatgacaatacaaattgaagactgtccgtttagcgtttataatatgtgcagcctattacaaattctataaaataatgatgcaagtttcacaaagagataaacttttaaaaatattttcaagtattatatttttaggaacactgaataaaaatcttaatatacaaatcctctcttgccaacataaagttatatgcatttgtgatcttacatgtgatacagtttattaaagactggaaagtgactgatactcatttaagggtttctcttcatttatagagtcaataactttttttttttttga

SEQ ID NO: 21894 - DNA, 606 bp, Homo sapiens
tgcccaggctggagtgcaatggcatgatcttggctcactgcaacctccgcctcccatcaagcaattctgctgcctctgtcttctgagtagctgggattacaggcgccaaccaccatgtctggctaatttttgtgtttttagtakagacggggtttcacaatgttggttaggctggtcttgaactcctgacctcaggtgatccacctgcctcttctcccaaagtgctgggattacaggcgtgagccaccatactcggccagaagtgatggatttgactggggtaatcatcttaccatgtatacatatatcagaacatcacattgtacaccttaaatacacacaatttttgttaatcatacctcaataaagctggaaaaaaagaataaattcagttctatcatctctcttctttttaaaattttcactgactctcctgccctcatacacacatttgcacaactagacacgtcctagcacatgtaggtacctttcttaagactctcattcaatcctcactcatcgatttactacgttagtcattcatccattcacaaacctatctgcctacttctttcttctatgggcttcttgaggacagagtgaatg

SEQ ID NO: 21895 - DNA, 517 bp, Homo sapiens
gtgcccacatccgtttgagcctgcaatgggatggtcagaaggccccgggtgagataaccgtgctgcagttcacagaagcacacatgcatgtctgtcattgtctctgttcgacaccttccccgactcccctatgattgcaagtgtttctgtcatgatagagaaggtgcagagcagggcatgctacgacctcggagtcctgaccgggaggtacggggcagcactagcaacgcctgcgggaagagcttcctctgggtacctcaggcctccatgactggctgtgcttccagaaattgaattgtgacagtatttacctggggattccaagggaggaaaggatcacatcacctgtgagcttgcttaacatgaaagtgactctcaccatccagagtaaggaaatagaaggccaccataaagtgacacagaagtgtgacaatgaaagagargaaagcaatgaaaataattccagagaaactgaaattcttccatacggcatccagtctttctaaaagtttaaaga

SEQ ID NO: 21896 - DNA, 595 bp, Homo sapiens
ctagctgttacttgtaaccaaaaggaaaaaaaagatattagtaaccaataattagcaaacaatgcccatatatttcctttttttttttttttttttgagacaggggcttactcaggctggatgtgatcatggcttacaggagcagccttgacctcctggrctcaggtgatcctcccaccttagcttcatgaatagctgcaaccagaggcatgagccaccatgcccagctaattttcttattttctatagagacgggattttgccatattgcccaggctggtctcgaactcctggactcaggggatctacccgctttggcctcccaaagtgctgggattacaggtatgagccacacacctggccatattttccatattttatttatttttattctgaaacaaaatgtttatttaagaaaggccatccagcctggccaacatggtgaaaccccgtctctactaaaaatacaaaaattagccaggcatagtggtacacgcctatagttccagctacttgggaggctgaggtgggagaatttcttgagcccagaagacacaggttgcagtgagctgagatcgcaccactgcactccagc

SEQ ID NO: 21897 - DNA, 595 bp, Homo sapiens
ctagctgttacttgtaaccaaaaggaaaaaaaagatattagtaaccaataattagcaaacaatgcccatatatttcctttttttttttttttttttgagacaggggcttactcaggctggatgtgatcatggcttacaggagcagccttgacctcctgggctcaggtgatcctcccaccttagcytcatgaatagctgcaaccagaggcatgagccaccatgcccagctaattttcttattttctatagagacgggattttgccatattgcccaggctggtctcgaactcctggactcaggggatctacccgctttggcctcccaaagtgctgggattacaggtatgagccacacacctggccatattttccatattttatttatttttattctgaaacaaaatgtttatttaagaaaggccatccagcctggccaacatggtgaaaccccgtctctactaaaaatacaaaaattagccaggcatagtggtacacgcctatagttccagctacttgggaggctgaggtgggagaatttcttgagcccagaagacacaggttgcagtgagctgagatcgcaccactgcactccagc

SEQ ID NO: 21898 - DNA, 523 bp, Homo sapiens
ctggctaatttttgtattttctgtagagacagagtttcatgatgttacctaggctgatctcgaactcctgagctccactgatcctcccrcctcagcctcccaaagtgctgggattacaggcttgcaccactgcccctagcctaaattaatcttcaattaatgttgtaagcttaaaaacagatcttcttatgtttttaagtttaacttccatatcctgatattctatttagaaatcttgcaggttttggataaaagtaagagtaataacttgttctttgattaatacacaattagcccatgggcttgacatatttaatttgcttgaacattactcatagcatttacaaacttagttaattaaattctcttaaatatttaaactacatttacaaatttaatatacttgatttttttcccaaccacttccaattcctcagggtagatttacaagtcaaacaagaaggaagtattcagcatgtaaataattctcataaacctaataattcagactcttaaatgtggc

SEQ ID NO: 21899 - DNA, 523 bp, Homo sapiens
ctggctaatttttgtattttctgtagagacagagtttcatgatgttacctaggctgatctcgaactcctgagctccactgatcctcccacctcagcctcccaaastgctgggattacaggcttgcaccactgcccctagcctaaattaatcttcaattaatgttgtaagcttaaaaacagatcttcttatgtttttaagtttaacttccatatcctgatattctatttagaaatcttgcaggttttggataaaagtaagagtaataacttgttctttgattaatacacaattagcccatgggcttgacatatttaatttgcttgaacattactcatagcatttacaaacttagttaattaaattctcttaaatatttaaactacatttacaaatttaatatacttgatttttttcccaaccacttccaattcctcagggtagatttacaagtcaaacaagaaggaagtattcagcatgtaaataattctcataaacctaataattcagactcttaaatgtggc

SEQ ID NO: 21900 - DNA, 523 bp, Homo sapiens
ctggctaatttttgtattttctgtagagacagagtttcatgatgttacctaggctgatctcgaactcctgagctccactgatcctcccacctcagcctcccaaagtgctgggattacaggcttgcaccactgcccctagcctaaattaatcttcaattaatgttgtaagcttaaaaacagatcttcttaygtttttaagtttaacttccatatcctgatattctatttagaaatcttgcaggttttggataaaagtaagagtaataacttgttctttgattaatacacaattagcccatgggcttgacatatttaatttgcttgaacattactcatagcatttacaaacttagttaattaaattctcttaaatatttaaactacatttacaaatttaatatacttgatttttttcccaaccacttccaattcctcagggtagatttacaagtcaaacaagaaggaagtattcagcatgtaaataattctcataaacctaataattcagactcttaaatgtggc

SEQ ID NO: 21901 - DNA, 549 bp, Homo sapiens
tgcatagtacattagaaaatggtaagtcctacatagaaaatgaagatattataaaactaaaattggctctttaaagttttttaatttatatttttctgagtgctctttcaagctgttgctgtggactcccagtattgctattttcttttttattagattccatggatgtcaagaaggagaatcaagagaaaactcctcagtcaagtacatcttctgtacaaaggggtaggttttaaagtaatttaatacagcatagttttcttcctcactagtgttaaaattaactttaagtgcaarttttcttattgttttgatttcttattgtacagtctgtatactgtaaacttctgtaaatacaaaatgtaataagaaaggtcaaaaattgtattttattttgaaaattttacttagagataagttgacacggattaagtaaaagggtaactttgtatatttcagtgcaaattttcctaaattataggtatctagttattaattgccatgtattaccaatttaaaataatttggttattagcaaaaacccttcta

SEQ ID NO: 21902 - DNA, 546 bp, Homo sapiens
tgcctatagaggtaatccccacggaattgttgttctctcactgtagctgggccctcagtgctcccttaactttctttaccatggccttatttgttcttcaactcttccctgggacccccaaatcctctgaggaaatggaggccattgaattagactgttccttatccctacaaactcctctccatctgtttttaaaaatataacagctttactgagttataattcaaatatcatataattcacctatttagagtgcacaattcaatggttttcagtatgttcacagagttgtgcaaccaccaccacagtcaattttagaacatttttatccccctaaaaagaaatcctgtacccattaacagtactccccatttctccctagtgcctcctgtctcccccagctctaggcaaacacrggtctactttctgcctctatagattttcccattctagacatttaattaaaaaaatagattacttaagttgatagccatctgcagatacttctcaggcctgggccctaacatcctattttagaaatcagtg

SEQ ID NO: 21903 - DNA, 580 bp, Homo sapiens
acctgccccccacccaggaggtcgtaagttgctgggttacagaaggaggtgagggagttagaggatagttcagcaccgcggacagagccacactgccgcttccatcgactctctttcctgggactgactagctgggggcaaggaaggtcagtctctgtatgtgaaagggatccacagtctaatcctgatgggggccaggtgacacctgtggtcttgacccccacatgacgcagccccggtccctgcttcgggagcaagtttcagggaggacaatggtctcgctgcagagacagcttcgactgcacagggaggggccgtataataaatatcccctcgatctcttttataagttgtaagtgacccccatactgtgcaagcagcaaagcatgaagcctgagcctgtgtgaacagattaatcccccaaacatggtttgagcacctactgtgttcaagggctgtgctggtagccacagggcatgtagggatgagagagagatacagccgccgcctcaagccacctgcagcttgtcaaacatggttcattggttgttaraaaggagagcagccttgaagataacca

SEQ ID NO: 21904 - DNA, 628 bp, Homo sapiens
aacctgaattagctcagctaacatatcctgacccatttcttcattaaaagccgtctttgtgaggttttgttccctccatctcttatggtccaaaccttcttgcattccccatgcgcgcrcgcgcgcgcacacacacacacacacacacacacacacacacacacacacacacctcttttgctgtgaggaaactcaacagtctaaggatttgtttttttaaatcatcacccaactctgtctactttcttctatttactaaactgaatgctttctggtttagcatgagatgtcttttcaatataaaataaacatacaaggcagtccccagttctgcacttaaatggatccaccttctataccaactgtaaagctggaattgccagtctttatcccataggtttgtttttgtaaacacagagggcaaaccatggtgcttgttagtttctctctccataatcacattatcaacattacatgcagtcccatcacaactagaatgatgagaggggaggtgaggaactcaaactcttgtctgcaccatggatttttcaaagtgagctttgcctcagaaagtcacaatgccgtgctttggaatttggtcacctcatcatttatcctgattgttaag

SEQ ID NO: 21905 - DNA, 612 bp, Homo sapiens
cgctttgggccaaccagcataaagatcagccttttaggaaataggattagtcaccaggmatgttcaaatttgctcagacttgtcaagatggcttcagctggcttcagttcagaaattataagaaattggagcaagttgtgaagatctgtgtttgtgggtagtgagcatcctggcagaggaaaaacgaatagctctaaagagggggaaaaaaaagaaagatttaaagaaggaacaggtactgtcctaaccacggaagtccttgacagtgagtagaatattctgaagtgaggtcaaaggtttgtttagattgaaaggcaaaagtctcacacttttagcatgaaaaaataggcctacaacggtaaaaactccaaacaaaaagagagaaggaaggaaggagagagacagggagagagggagaagccaatcactgagagaatatgtcaatatactcattatcttcataaggagcataattaatacaacaggacaggaaaggatttagattcattttacaagtgaggaaattgaggctcagaagagctttctgctttcaggttttaagcatcaacaactcaaaaatatgtactttgtcatagtcttaaatattgggtc

SEQ ID NO: 21906 - DNA, 586 bp, Homo sapiens
ccaagccccagtgggaatgctgctactggagcttgagctttgaggcagcctcccctcctggagggcctgcaaggcccagtgtggtgcccccttctgcctgcatcctcctgtcaactccagctgtgctgccattctactttgagctgcttttcactctttagaagtttattgccctgctctgcatccctgcctgcctgccagccaatgtgtctgcaaacagtggggcaggaggctttgcagacgcaagcagccctgcgatgtttcttggattaacaggaggaggaggaggagtatgccgcagtggtactgaccccctccaccttgggaggcactcctcttacgatcaggtcagcccaggctacagccatctttcctgttcagctcaccctgccaacctaggctggctcctggtctaatgagaaaggggcaattggtgggggaacatttacagggagcccaaagcctgtctttcctgcaagcccaggaagtgactgctactttttccccctcaaggaatagggagcaaccaagtgagcacaggcagggtgactgcagaaggccaaagaatgtctagcccagmtccatc

SEQ ID NO: 21907 - DNA, 572 bp, Homo sapiens
gttgtgtgtttctaccagaaaatgtgggaatgtgcgtgaagacgacctagcagagtgcctggcacacaggaaggagcttgttgaatgtatagttccgggctccaaaacaaaggcagcccatcttagcctgagccactctgacttcactctaggaaatactgcctagatatctaaaggaaagtgatagcaactgcaaccaactgtttctgaggtctgcctgcccaccaatggccccctcagcacatgggaacaygtgtggaggtgcctggaacagacactgactcagcggggttctgtacagaggcagtgcgggtgaagaaatgaatgcagattccccaacaatccagaggtatatgcaagaggaggggcaggggttctttcaagtcaccttccaggtgaccaggtgcctttacaactctaaggctctgtgagtatgtttttttcttaccttatggaataaagggaaaaagaagacagctgccctgggtatggctttgggtcggaataaacatttctcaaattgaagtgtttcagcaatgtcttgaaaaatcagatttgttcaggattgctgg

SEQ ID NO: 21908 - DNA, 568 bp, Homo sapiens
cacaccatagattcagccccagaaacgagctatttccctgggcacagtgggtgagtaacagagcatcttatctaggagtaaggatgccacatgaccaaaccagacaggctggcttggccggccaactcagtggtctaccaccaggccacggctcaatgtcttgcttagcaatctgcctgcatgtggcctgatggctgtagcctgggatgccaccaatatcttttataatgcctatgggcgctgtctattggaatggagcccctyccaacacatcctagtggttggggcagcatctgccaggagtctgatggttcaagtctccctaaccgaccagtagccggtgcatggtggctctgggggcacatttctcttctgctgttctacccaagtgttaaaaattaatttaactctgatcgcacagacaggggaaaagttaatagaagttttatttttaatatatgaggaaccttaacaggatttaagcttaatgcctcagaaatgggaaggactgctgacaatttatctacccgaatctgcagactttagaggagagctaaagaaatggaag

SEQ ID NO: 21909 - DNA, 520 bp, Homo sapiens
cccaaccccagagattctgatgggagttatatgtgtggctggactgtgcatttttcgtttatgtttttttctttgagataaactttacatggagtgaaatgtacaaatcctaagtgtactgtctcatgggtttttaataaatgagtccctttgtgagacccaacccctgtcaagatagagaacaacatgaccatcagcccagaaagttccctggtgtcccttcccaatcagtccccactggggatcttcagtggcatcccagagctgtttgctatggtggcagtagctggagagctactgttaattaatttgagcaacagtgcrgctgataaatttgatctagcagggaggtctgggactgccatcctgaactcaaggttctcaaatcctgtagctcttgggtcatattgataggggctatatttttaaaaagggatagttgggcagctggttggaaggaaatggcaatgagttcatctttgggcctgtttactgcccccttttgaaactgggtcgtttc

SEQ ID NO: 21910 - DNA, 577 bp, Homo sapiens
acagaggcattcatgcaggctacctcccaacttgttcataaaaatgttaagtgatggacaaaataatgtctttacatttttcttaaacgtttggttcctgctgctgcttatctggtagagaggctcatcagaggagaaaatgaaggaagattcccttgtcaaacatcacaacagagagcaagcatctttgttcagcctgtcaggatcatctttcacattcaatttagaaaaatggcagatgttaatgtttttcctgttaagagataatttctttttaaaatgtttgttttttttttccccttactatgcctagtcctgctttttatatgataacagcctaggagtggaaagaatgagagtttgggtgacagagatccttacatttgaatctcaattccacttagaggctatggtcatgacttagaggctatattaagaccayttagaggctatggtcatgaccttgagtccgtttccctgagtttcactgcctcagactaatcataccgaataggccagtattgccaaatcccagtgctaggatggggattaatgagaaaacatttgccaaaaaacc

SEQ ID NO: 21911 - DNA, 577 bp, Homo sapiens
acagaggcattcatgcaggctacctcccaacttgttcataaaaatgttaagtgatggacaaaataatgtctttacatttttcttaaacgtttggttcctgctgctgcttatctggtagagaggctcatcagaggagaaaatgaaggaagattcccttgtcaaacatcacaacagagagcaagcatctttgttcagcctgtcaggatcatctttcacattcaatttagaaaaatggcagatgttaatgtttttcctgttaagagataatttctttttaaaatgtttgttttttttttccccttactatgcctagtcctgctttttatatgataacagcctaggagtggaaagaatgagagtttgggtgacagagatccttacatttgaatctcaattccacttagaggctatggtcatgacttagaggctatattaagaccacttagaggctatggtcatgaccttgagtccgtttccctgagtttcactgcctcagactaatcatacygaataggccagtattgccaaatcccagtgctaggatggggattaatgagaaaacatttgccaaaaaacc

SEQ ID NO: 21912 - DNA, 521 bp, Homo sapiens
ggtctccctatgttgccacatctggtctcaaactcctgggctcaaaggatccttccacctcagcctcccaaagtgctgggattacaggcatgaaccactgcgtccagccttatctgcatttacaaattattctacagggagtatgtatcactctcacattaagaaaaaaaagacagttatttaaataaagtgtctgttgaaggaaggaatccctagatggagtttggcttttccagcaaaggatacaatctttccccttgaacagagttttccctgtcagcatctctgccatgatacagcccacagaccagatgtccactgcagagggagggagagtgtcacctggactgtctggggcccagcagtcagtcagcaccgagtgaccagatggccccaggaccgccctctcaggcattgaccactgacctgtctggttgtagtgcatccagctgaggatcacctcgggggctcggtaccagcgggtcaccacrtagccagtcatctcggcgtctgcatgtcgc

SEQ ID NO: 21913 - DNA, 588 bp, Homo sapiens
ccagcactttgggaggccgaggcgggcaggtcacgaggtcaggagatcgagaccatcctggctaacacggtgaaaccccgtctttactaaagatacaaaaaattagccaggtgtggtggcacacacttgtattcccagctactcaggaggctgaggcagaagaatcacttaaagccgggaggtggagcttgcaatgagccgagatcgcaccactgcactccaacctggacgacagagcgagactctgtctcaaaaaaaaaargaaagaaagaacacaacatcttttcccaacatcctgtagtacttaaggctcaaagagagcttctcacagacccttgaactagataatacagctcaaataaatcacacaaagccaatgagagcatgccagggcagatgcaaacctaagccagtctcagtagaatcgtacccacccctgatgagactgtggattcatcctagggcaggagagcgacccagctgagatatgacatactctctgtctccaaggctgacacgaactcatccacaactgcccaaaacttcaaagagcgtgagtatctctgctattataagaattatcacagc

SEQ ID NO: 21914 - DNA, 564 bp, Homo sapiens
atttttaaagtacaggggaggcacaaagaagaaaatgaaagtgaagatataagtctaagaatttagaagacatttctcttggtttccttagaccatgtgaaatagaatctgtgaatcagaaaatctatgacagatgagaatgtcagccttttgtaaacttgatcttttaatacttaatttttcctttatttgctctcttatatgttttcttcttattttttttatttgaggcagagtctcactctgtcacccakcctggaatgcagtggcatgatcttggctcactgcaacctctgcctcccaggctcaagtgatcctcccacctcagcctcccaagtagctgggactacacgcctggctaatttttgtatttcttttaaagaaggggtttcatcatgtagcctatgctggtcttgaactcctggacccaagtgatctgcccacctcggcatctcaaagtgctggggtttcaggcatgagccactgtcactggcctacttattctttgtttttagtaatgctgttttgttttgcttttgcttttgtttttgtttttgttttaca

SEQ ID NO: 21915 - DNA, 561 bp, Homo sapiens
cacattcacattaatcccaaaaataggctaaaaacctaagccattagatctctggatcattcgacttgtttacttggtcagaagctaagattttgcttattgtgttatttagtattttgaagcattgagtggtattgtttcataagcactaggcccaaagtgtttggcaacctttttttatacctataataataaatgttctatgatttgcacttaaaccaaaatatgccaaaataatttgttcatataaacatgtaatgttagasctgtattatgagcatttcaggcccacgattttcacatagcctgttgtgtttcttagcagcatctcttcaaaaaatctacatatgatgcctacttcttacccaaatgaaaacaaaacaaataatcagggattaagggagcataaaattgaattgttcaataaattttgtttttattgtcttccttacggacatagatcaactgcaaatagctgccacaaagtggcctaagggataaacaaaggatttgggaaaaacacacgtttgacttggtgacccttgggaaagtcacttaact

SEQ ID NO: 21916 - DNA, 526 bp, Homo sapiens
cagtcttcagacctcctggatgtagtctctctgcagatagctgtaactctggcttgttttctgctcattttctgcagacatgtagaatccactgctagggtccactgagctgtcttctgggtggtttttggtgctgcaggagataaacacatgtgtcttcctggttggacccagttgatgcactaacctaattctgtcctttgcctgccctgatctccatagcctgcttcttcctggaaatttgctgctgctgctgcttcttttttttttttttttttttgagacagggtctcgctctgtcgcccaggctggagtgcastggcgtgatctcagctcactgcagtctctgcctcccgggggttcaaaccattctctctgcctcagcctcctgtgtagtgtggattacaggcaccccccaccatgcccagctaatttttgtatttttagtagagatgggttttcaccgtgttggccaggctggtctcgaactcctgacctcaggtgatccacccgcctcggcctccca

SEQ ID NO: 21917 - DNA, 600 bp, Homo sapiens
tacataataacrttttataggatatagactcatttgctgtctcttgctgtctctcttttgcatgacacttcagcacagtgcttctcaaccaggaatccttctgctctcagtgaacactcagcagtgtctggagataattttggtcgttgaaactgagaggtgctactggaatctagtgggtggaggccagagatgctgctcaatatcccacaatgcatgggacagtaccctcctccacaaagaatgatttggtcttaaatgtctgcaaaagaactgttgcctgagacagccagctttcccctactagctgtgcagagtccgtcctcctcactgggagctgggctgtctgccttgcactgctgaatttctgtccctcagcctggcacttggcacacagtaggtcttccctaggggtttgctcaaagatttaatgaattcatggaacctctccccttcctgcttcttcacctgaccagctcggacccttcctttcgttttcagcttggagattgctttcccaggaagcatcccctgagccccctactctggcgttaagtcctccttcccccattaggcatttccatgatcctccttgctctt

SEQ ID NO: 21918 - DNA, 600 bp, Homo sapiens
tacataataacgttttataggatatagactcatttgctgtctcttgctgtctctcttttgcatgacacttcagcacagtgcttctcaaccaggaatccttctgcyctcagtgaacactcagcagtgtctggagataattttggtcgttgaaactgagaggtgctactggaatctagtgggtggaggccagagatgctgctcaatatcccacaatgcatgggacagtaccctcctccacaaagaatgatttggtcttaaatgtctgcaaaagaactgttgcctgagacagccagctttcccctactagctgtgcagagtccgtcctcctcactgggagctgggctgtctgccttgcactgctgaatttctgtccctcagcctggcacttggcacacagtaggtcttccctaggggtttgctcaaagatttaatgaattcatggaacctctccccttcctgcttcttcacctgaccagctcggacccttcctttcgttttcagcttggagattgctttcccaggaagcatcccctgagccccctactctggcgttaagtcctccttcccccattaggcatttccatgatcctccttgctctt

SEQ ID NO: 21919 - DNA, 600 bp, Homo sapiens
tacataataacgttttataggatatagactcatttgctgtctcttgctgtctctcttttgcatgacacttcagcacagtgcttctcaaccaggaatccttctgctctcagtgaacactcagcagtgtctggagataattttggtcgttgaaactgagaggtgctacyggaatctagtgggtggaggccagagatgctgctcaatatcccacaatgcatgggacagtaccctcctccacaaagaatgatttggtcttaaatgtctgcaaaagaactgttgcctgagacagccagctttcccctactagctgtgcagagtccgtcctcctcactgggagctgggctgtctgccttgcactgctgaatttctgtccctcagcctggcacttggcacacagtaggtcttccctaggggtttgctcaaagatttaatgaattcatggaacctctccccttcctgcttcttcacctgaccagctcggacccttcctttcgttttcagcttggagattgctttcccaggaagcatcccctgagccccctactctggcgttaagtcctccttcccccattaggcatttccatgatcctccttgctctt

SEQ ID NO: 21920 - DNA, 529 bp, Homo sapiens
gttctagtgttcgatagcacagtagggggactagtcttaacaataacttattgtatatttcaaaatagctggaagagaaggttgaaatgctcccaacactaatgctcctaacaagaaatgataaatggtggaggcgatggataccccaatatcccaattactctgatttgatcattatacattgtaggcatacatcagactatcacttgtgccccataaatatgtactattattatgagtcgataaaaaagaatccaagtagcatggttggagcatgccaggaaggctgtgggggtctcaaggaagtgtctgacctgcctggrggtcagggatggcttcgtgaaagagatgatgcctcagctgagtcttgaaagacaagatggaattccccacacgggagagaggagcggatggctgggaaaagctgttaaatggaaagccattaaatgtccctggccatgaggctggaagcagggggagtagacagggagagattagcaaagccttgatgtcatgggaaggatcttga

SEQ ID NO: 21921 - DNA, 529 bp, Homo sapiens
gttctagtgttcgatagcacagtagggggactagtcttaacaataacttattgtatatttcaaaatagctggaagagaaggttgaaatgctcccaacactaatgctcctaacaagaaatgataaatggtggaggcgatggataccccaatatcccaattactctgatttgatcattatacattgtaggcatacatcagactatcacttgtgccccataaatatgtactattattatgagtcgataaaaaagaatccaagtagcatggttggagcatgccaggaaggctgtgggggtctcaaggaagtgtctgacctgcctggaggtcagggatggcttcgtgaaagaratgatgcctcagctgagtcttgaaagacaagatggaattccccacacgggagagaggagcggatggctgggaaaagctgttaaatggaaagccattaaatgtccctggccatgaggctggaagcagggggagtagacagggagagattagcaaagccttgatgtcatgggaaggatcttga

SEQ ID NO: 21922 - DNA, 1492 bp, Homo sapiens
tcttccacagaagggcacaccccgtccaggattactcaaaaaagttccttgcccgaaacttttcagaccacatagcatgaattcaaggacagaccctcatgcaaatcaacttgtaattacaattttccccttattcactcagcaccagtgttgaaataggtggttttcctcagtgtacccttttgtgatgaaggtttatatttgtaatcactgaggatgtagggtcccaactttgtaggcgatggtcctttgttaagtccttccaccttgggaaggccttctaggctttgtctcttgtctccatactccaaatggcaaaactgaatacacaaattcaccaggatttggccaataccctcagggagaagctgactttgtagaatgctcccttctctagatcccaatttttactctatgtttggcctctgaagattccagctcagtaatgtattaaaatgtacgtacatattttgccttttatccagcattttaattattttcagtagaagtgttgttcatggtatatagcctaccgtattgctagaaaaagaagtctctgttcgctrtaatgtattgtctccaacaacaaagataattctgcttcacgagtaaatcagaaatctttcaaagttagtttaaatgtttagccttttatgtttaagagagtaactcatgatctctttcatctcaaatttattagacaagtttcacaataaggaaaaaaaggctctcctgctttcagtttttccagttctttagctttcccaacaaagactattcatattagtttactgtccacccaagaactttatccataaaattgggatggttttatgtcaagaacaagaatatgcagcttacaagacaaactgtcattcttttgaaagagcctggaaatcatcttagtccccacttagcactaactaaagagagcacagagaagttccacatcatggaggggatgatactgtgtcactcttgctggagctgctgcactcattcatttttttttaagaccaagtctcactctgtcacccaggctggagtgcagtggtgcgatctgggctcactacaacctctgcctcctgagttcaagtgatactcctgcctcagcctcccgagtcgctgggattacaggcacgcaccaccacacccaactaatttttgtatttttagtagagatggggttttgctacgttggctatgctagtctcgaactcctgacctcaggtgatctgcccacttcggcctcccaaagtgctgggattacaggcacgagccaccatgcccggccatctttttttttaattgtgataaacatgtacaaataacataaccatttttaagtgtgtagttgagtaggtgttgagtatattcacattgttgtgcaaaagatctctagaacatttttatcttgcaaaatcaaaactctacacccatgtacataaattccctatctccccctccccacgacacaaattcttacacctaa

SEQ ID NO: 21923 - DNA, 564 bp, Homo sapiens
atggtgatgatggtgattatgatgatgatagtgatggtgatggtggtraagatgataatggctatggtgatgatgatgatgatgataatgatggtgatgacaatggtggttataatcacaataatgctgaaaacgctgcacacaacacttacaaggcattgtgcaaatatctgacatcatttgctattttccctttccccatcccccccatcctccaaccccaccctctatactccctttatcctctcatctttcatcctccatgccccttcccccatccccaattccctcattccttctgtcctccatttattcattcattcatccgtttagtcattcatttgccacctactaggtaccaggatcactgggttttactgtaggctgaaagctttgtgagttactagaatattgggaagttccttttgcccatcttcctgcctctaggtagagttagtgcatctttaccctcagggaaaagattaacgcagacattgctggattccatctctggagcacaaggaagaaccagctcagcctcctgactagttctctgatcctgga

SEQ ID NO: 21924 - DNA, 564 bp, Homo sapiens
atggtgatgatggtgattatgatgatgatagtgatggtgatggtggtgaagatgataatggctatggtgatgatgatgatgatgataatgatggtgatgacaatggtggttataatcacaataatgctgaaaacgctgcacacaacacttacaaggcattgtgcaaatatctgacatcatttgctattttccctttccccatcccccccatcctccaaccccaccytctatactccctttatcctctcatctttcatcctccatgccccttcccccatccccaattccctcattccttctgtcctccatttattcattcattcatccgtttagtcattcatttgccacctactaggtaccaggatcactgggttttactgtaggctgaaagctttgtgagttactagaatattgggaagttccttttgcccatcttcctgcctctaggtagagttagtgcatctttaccctcagggaaaagattaacgcagacattgctggattccatctctggagcacaaggaagaaccagctcagcctcctgactagttctctgatcctgga

SEQ ID NO: 21925 - DNA, 555 bp, Homo sapiens
agcttcaagctctccacagagggtccctcacctcctaccagctgtgcgatccaggatagtcgccttaaatcctgagtcccgaccttggaacagcatgagtaatgacgacggcccctccacggccgatctggcgcagtgctgagctgtgagtggggcccttgttagtggcaactgtggacaggtgtctggcaagcgcactgagccaggagagaaagggtcaccgggagctcccaggacggggctggctgcagggggaccgactgtgagacagaaggaccagagtgctcagccccaccctgacttccagggagtggtgaaagctggagatggagtgaactgccaacggccaaggatgaaatcagccacacccatgtgatgaaatctccgtaacaacccgaaactaggctctgagagcttccggctggagcgctgggagggcagccaccccaactgcatggagaaggaggaacctgctcttgggatccctccagacctcacccctgtacctgttcrtctgcccattcatctgcacccgtcccctatcacaaaccctcg

SEQ ID NO: 21926 - DNA, 527 bp, Homo sapiens
cttggaagtggggtacagacataagttctgggactgagtttttaggctttggctaaagccccatttttagttagttttagttaagttctttgtgtcagtgaccaagaaaccacattactgaataaagtgcattgagaaattagagattaataataaatgcttgcaccccatctgttgattcagctaatctgccctgagacttacacagagctgacacatttaaatcagcttcaaatgtttccatttacttgtttggagattcctaacagatgcaacacagccatagagagcagaatgctaaccactagcagaggtggagtactgttttcactgggacaaatcattttttatcatttcaacctaccctgaaagttgtgaggaaaaaaaaatgtgttaaaatgaytgtcaaacattgaggaagtatggaaaatactattcgtactacgattttaaagccaggaaacgtatggacaactgcccctctgctttctaaacacctatagtgttaagtcccacaaatcacaaaa

SEQ ID NO: 21927 - DNA, 519 bp, Homo sapiens
agtttgttcttgtcgcccaggctggagtacaatggcgggatcttggctcactgcaacctctgcctcctgcacgtccagctaattttttgtagttctttgaaataaagayggggtttctccatgttggtcaggctggtcttgaactcctgacctcaggtgatccacccacctcagcctcccaaagtgctgggattacaggcgtgacccactgtgcctggccttagtttcttttttctaaggaaataatagccagccactttccttgaatgtctttctcacctgggtgattccactcataacactctttaacctaattgctgtggtccttgaaaagtaggcctcgcttacattaatctcccagagcacaccaaattaacgctgctatttaagtctgtctatttcaatctcaacatttacagatagaaaaaaggcattaacttgctcattttattgaatttgtcatacatggcggggaggggcacttgaagggagctttaggagaaatgatttagaagagtg

SEQ ID NO: 21928 - DNA, 512 bp, Homo sapiens
ttctccaattctttccaaaatgactttagagaaggtgtcatatatttttattaaaggacccctggagacaagtgattactatggtcatgcatatattcaaattgtatattatggagtcgaatctgcttacactgagttaatttaaacgattatgacaagaacttctgggaaatatgtcagctaaattaygtgtttgcaaactcctctggctcttctcttcaacccacaaaaataatgtcatcagacatgaatgcaaggaactaagaataaagcaaaattcctcactctcaaactgaaaacttgaaagcatacagtttggatgagtggagagcaatccggacacaccatggtgcagtgttgaggtcgggcaggggttcaatgcaggaggttctgaagacccccatggaccccctaactaggagggagagacgcacagaccacgggatgggaaggggtaccctgtgctgttgagtttccctgtgtaggatgtcagcagagacagtggaagaaaa

SEQ ID NO: 21929 - DNA, 576 bp, Homo sapiens
tttagacacaaatgccagtttgaatttgggaagaatagagtactgagaaacgagacactcttttaaagtacctaacagggtctataggaagttcttgtgaaatgttagttagctattattctgtgtagtgtaataaattaagctgctgccttcatttgttggcagccaagttgccaaaggcccttgtttgtttacatccagtgatatttactctaagggactatgggacacagatgcagtattttagagtactatttttttgagatcacatgttacctgtgaaaaacatcccagaggctatacaaaaattaattgccagtatttaagttacttggtttttctaatcccagtacagtagttacatttagcagtcatctaataactgttatcattgagacttcacatacttaaatagcatcagtgtaggatttcctttctttcttttttagaaactttcacctcactatacttattactaaamtctatttgctttttgccacacttcaaagaaagggagaggatacgtgactaggaagccctctgagctgtaggtgggtggggcgggtggtggacaat

SEQ ID NO: 21930 - DNA, 535 bp, Homo sapiens
gtttctcattcatcctgtgtgcatttatggrgcacctatgaatgccccactgggagcaaggactctgcagtctgatgagctcagccctatctggtgccccctccctccagccaccccctgaatctctggagttggtcttcaggtcacacggcatccactggaagcttccaggtgcttgtcctgccctgccctgttgggatgcagagagggggccgtcaagggagaaggttaaatggattccacatgtccagagacttctaggattcgggggaaataggttttgggggagggaggacagtacagtgtgactctcgagtcagacactcctggggtcggccccgagctgcccttcaccaccgttctgtatccttggacaaccctctaccctccgtcttctcatctgtggggtatcccgcaaagatgaatgacgtttgcactccatgccaagtctacacagcatcctgagcagaggaaggtgtcacagtgcctgtttctcagagttctctagagtgagaggtggaccccacaaaagatg

SEQ ID NO: 21931 - DNA, 535 bp, Homo sapiens
gtttctcattcatcctgtgtgcatttatggagcacctatgaatgccccactgggagcaaggactctgcagtctgatgagctcagccctatctggtgccccctccctccagccaccccctgaatctctggagttggtcttcaggtcacacggcatccactggaagcttccaggtgcttgtcctgccctgccctgttgggatgcagagagggggccgtcaagggagaaggttaaatggattccacatgtccagagacttctaggrttcgggggaaataggttttgggggagggaggacagtacagtgtgactctcgagtcagacactcctggggtcggccccgagctgcccttcaccaccgttctgtatccttggacaaccctctaccctccgtcttctcatctgtggggtatcccgcaaagatgaatgacgtttgcactccatgccaagtctacacagcatcctgagcagaggaaggtgtcacagtgcctgtttctcagagttctctagagtgagaggtggaccccacaaaagatg

SEQ ID NO: 21932 - DNA, 525 bp, Homo sapiens
ggcacatggtcctggggcttcacttcagctcagccagtggctcctgtgtgcctgtgcaaaggcacggtactctcaggacaatctggaaagcccgagtcctcccattgtctggaattgccttttcctttcatagccactccaagtcccacctcatttctggtaggatttttgaagtgcctcacagccacggcacactctgactactgctctcactgaatatrggtgctgctcacctccccgccatttggagagtccctcccccacctccctgttgctcccattcttcctatttgcccaaagggccactatcacaattctgttccacataacattttaggaacaatggaggggaattacagttcagggcacatgaagtaaatatttaaaatggactatgaggccgggcgcagtggctcacacctgtaatcccagcactttgggaggctgaggcaggcggatcacctgaggtcaggagttcgagaccagcctagccaacatggcgaaaacccgtccctactaaaaata

SEQ ID NO: 21933 - DNA, 553 bp, Homo sapiens
gggaaccaaagacattttgcactgaaataaagaataacacttaacagctatagtcaagctcatgacaaaattgtgaaataggcaaagttttttactaggattttcccatcatctctggctgggtgtttctcctcttactgtcccytcgctcagctccaaggcaactattgctctctaggtgccaggaaaacaaaacaaactattttacactaaagtgtcattgactccctgtgagttctaccccaaggacatttgtgttctatatgagtctgtatgcaatcaagagagagaaactatacagtagtttgaacagggaaagtgtaatataaagaattactcattataacaggagactaaagtaacaaagaattgattggtaagatgtaaaaagaactctaaagaatatccgaatggcagctataaggagcagccactacctttagagctgagatagaggccaagaaagaggccccccagggctgagatccagactttttgaaggctcagctctggcataggggatgacagagagaacagagaggtgaaacttcct

SEQ ID NO: 21934 - DNA, 523 bp, Homo sapiens
aagttttacaaccatcaccactatctcattccagaacattctcatcctttaattcatttatttttaaaattttaaattaattggttaatttttagagacagggtctccctctgttgtccaggctgaagtgcactggtgtgatcttggctcattgcagcctcagactcctgcctcaagtgatcctcctgcctcagcytcctgagtagctgggactacaagtgtgcaccaccatgtctggctaattttaaaattttttgtagagatggggtctcactatggtgccctggctggtctcaagctcatcctcctttttaaattctcacttttgaacaagatggagccatgggctccctggagatccacattccttgggttccttgccaggctttcccattggcttggattgagatgtttctttcccaagcactttactgagttcatttttctcatctgaggtgaaaaggtaatctcagagcgggaggccagcagggcatggtggctcacgcctgtaattccagtgctt

SEQ ID NO: 21935 - DNA, 569 bp, Homo sapiens
atatattttaatattaaattcatttcgatttttatattactaaaacccctatgatgaayggtcttgaacacagaattgtccgtgcacttttattctcttagggtaaattgtcgggaatggaattgttaggtcaatggcatgaacagaatagttctgtgcatttacatttgtgatagtgttacctgagttatctgagatttttactctcctatattctcagaatttttgatatcattttatcatttatagaagtttgacacattaaaaatatacattttaagtattagtgagtttgaagtttgttcatatgtttattgattgtgttaatcacctgtttagatcttttgccattttaattgaactatttgtcttccttactgattcgtaagagctctttatatattaagagctcttgccttttgcaagttttttttttccgaaaaccagtttgtgtttacattttttaatggaatgttttgacgcacgtcaattttaatgtaaccaaatctataaattatttcctttataaattatctctttgctgttgtacctgcataagaaaaatcgat

SEQ ID NO: 21936 - DNA, 560 bp, Homo sapiens
ctcccgagtaagtctctagagggcattgtaaccctagtcattcattagcgctggctccactggagcccagttttagagtttcttttctagggactctgaaggtagtccttctaacaccatccaagtgcctcagtggggacagtttccctctattcctgaaaataacgacagcttcgttcttagcaaccaaggggagggtcttctgaggccccgtagctcaggctactcatgatgggacaagcaggaggccactgcacgtttcaaatgaggaactttcagtgagagggcctcagggggacactctcacagtggcatctgatggggtttcgggaataattgccgaggtcagatgtgggttagtgcaacctgtgcttctcatgggagggtggagactgagaggcagaagtgatgatatagagggttagaatcacttaattttacttacagaaaaacctaggctcaaagtgttgaagccatttgtgcagragtgagtttgtagcagagctagaactggagcccggatttcctttgctgctatattttccctttagaaatgccca

SEQ ID NO: 21937 - DNA, 524 bp, Homo sapiens
ttgaagtacgtgagggtcatcaatagtgctgagacgcagagcagcctgggcttttatgataagcatcccgggagtgcagagtgggctggaatggtcagagacacttcctaggtcagatgggatacaagctgagcccttaaagtcgggtgggactctgtgtgtgtgtatatatgtttgtgtgtgtgtgtgtgcgtatgtgcaatttacatattgtttgcagtttaccttttccactctgcattgtggtctgagctgtgtctatgttgatattgaggtctcttcatcccttttcacaatcctatagcattctactatataaacacttgagccgtttccctggccatagcccccactttagattcctttcagttttttagcattataaataacacttcaataagtgttcttatacaygtctttttgggcacataggcaacctggacccagaattgctgggttataaggtctgagcatgttcagtttattagacactgccttatggctgcataattacatgcccacca

SEQ ID NO: 21938 - DNA, 530 bp, Homo sapiens
cttcttaaagctcccctttggctctgactcagtaatccagctccatagacaatttttttgttctgctttgaactcctctccaggtagccctcctgtgccaaatcctctttaagtgttccaggtcagctctctctcaagcccaccatgaaaaaatgcacccctttgtcctatcaccgatggggctgcagttatctcctaagccactgctttctactctggaaccccaggctgatgtccagcttccctttggcccactgctccacatgctgccagagaccccaatccagcccactggattggtggtctcctgcagccactctccrtgaaagggggagttagccccttcatgtcctcatgttactatgtcaacataaccaccactgtcttgagacaattctctaatttccaacttcagcctctttgcaagagttgggttcaatgacctcaaaggattctcctagcttctacatccttggttttcaccatctttggaatccacaattttatggctctgccaggtgctgtaccac

SEQ ID NO: 21939 - DNA, 553 bp, Homo sapiens
tttaaaaagaaaacaataaaaaagcctcagcgctattaccacttctcctcagaaggcttctgaagtccccccgccccccaaccagctcctctaagcccttgcttctctgaactattctccaccaggccctgactgtgtcacatcctagcagttgatttacttcccatttccccctccaggctgtgaactccaccagcgagtggtgatgttgaatttatatctgaatttccagggtctggccaattgcaaggaatctagaagctcaataaaattatgaaactaaagggagctatttagggggcccccatgggtgagtattgagcagctacataaagaggctgcagagggtgcagggaacaaatgtggaccctgccctccctgctggagacatatggcagtaatttttaggaccataayccagtaagggcttccagcataaatgcttccagctgcaccctccactgtggacaggaaactgggaacctcttaagacaggatcttgatggcttccagctcagtcggatgcccatcaaaagaagcagagggtaggagc

SEQ ID NO: 21940 - DNA, 964 bp, Homo sapiens
gccccaggctccggtgatggccaggtgcagaagcaggagccacctccatcccagcacctgagtgccggttccctcagcccaggccacgtctctgggcttcacttagctcccagattccacaccccatggcatggtgggggcagccagccctgaactggggtccagcctacagcttctccaggaataaaaagtacagccaccccaaaagggcctctgaggactagakcatgcagtcactgtgtttggggggatggtatgtttattgcatctccaccagcacccccagatccatggttaagagagctgaccggagcaggaacaggagactttgtcaccctctgactcctggtggccaggggcacagtgaaaagggtaggcagcttgcaggaagcaagccttatttgggcttttttttcccagcatgttgcttttgaaaactccagccagtcctctctttgcaccacagtgcagggcttccaaaatgactacacattgaaactgtgtgatcctagtaaaccacggggaaaatgacaattgttccataatctttaaaaacttttctttttttttttttttgagacagagactcgctctgtcacccaggctggagtgcagtggtgcgatctcagcccgctgcaacctccgcctcccgagttcaagcaattcttctgtctcagactcccgaggagctgagattataggtgcccaccaccacgcccagctaatttttgcatttttagtagatggggtgtcaccatgttggccaggctggtttcgaactttggacctcaggtgatctgcccaccttggcctcccaaagtgatgggattacaggcatgagctactacacctggccaaagcttgtcagaacattgaaagctgttgtactgttggtctattggttataaacataaccaacgtattttactgtttggttataaccatacagagaaatgaaaaagat

SEQ ID NO: 21941 - DNA, 964 bp, Homo sapiens
gccccaggctccggtgatggccaggtgcagaagcaggagccacctccatcccagcacctgagtgccggttccctcagcccaggccacgtctctgggcttcacttagctcccagattccacaccccatggcatggtgggggcagccagccctgaactggggtccagcctacagcttctccaggaataaaaagtacagccaccccaaaagggcctctgaggactagatcatgcagtcactgtgtwtggggggatggtatgtttattgcatctccaccagcacccccagatccatggttaagagagctgaccggagcaggaacaggagactttgtcaccctctgactcctggtggccaggggcacagtgaaaagggtaggcagcttgcaggaagcaagccttatttgggcttttttttcccagcatgttgcttttgaaaactccagccagtcctctctttgcaccacagtgcagggcttccaaaatgactacacattgaaactgtgtgatcctagtaaaccacggggaaaatgacaattgttccataatctttaaaaacttttctttttttttttttttgagacagagactcgctctgtcacccaggctggagtgcagtggtgcgatctcagcccgctgcaacctccgcctcccgagttcaagcaattcttctgtctcagactcccgaggagctgagattataggtgcccaccaccacgcccagctaatttttgcatttttagtagatggggtgtcaccatgttggccaggctggtttcgaactttggacctcaggtgatctgcccaccttggcctcccaaagtgatgggattacaggcatgagctactacacctggccaaagcttgtcagaacattgaaagctgttgtactgttggtctattggttataaacataaccaacgtattttactgtttggttataaccatacagagaaatgaaaaagat

SEQ ID NO: 21942 - DNA, 545 bp, Homo sapiens
aaaaaaaaccattttttgaatactctttgttccaagacttgactgatttaatatttgagaggtcaggatataagacactattcaaaacatggggagaaaaaagacagacttcctgtcatttaggagtttacaacctagtgaaacaagatttataatacaaggtactctctgtacagattttttaaaaaatattstgttctattagacgatgaaggacatgaaatagaaaaatgaattattgaaatattctgcttgattgccttctgctctcccacttccctggcattgggaaagaagaagaaacctctttgattctcctcttacttactcctgtgctaacagtggccttgggtagccactgcctctgacagtttggggttttcttttattcaatgaagaaaaaaaacatcaaaagagaatgtgcaaagaagcagagagggcacatagccagtgatacgagttgcaaaaatcaaacaaactgtatttttgtttacttttaaaataaagtactatgttaactatattaccattatgttgatactgtg

SEQ ID NO: 21943 - DNA, 338 bp, Homo sapiens
ccaaattgccttytaatgtagccataacattttgcattcccgcaaaaaataaataaataaataagggtttctgtctacattcttgtcagtaattgttaattctcaattttcagattttaatcagtctaataggtagtgctatcttactgttgtttataaattatttttaaatttccagcctctgtaatataggattgcacaccagaaagtggttgggatgaatactgagtgccaattgactatatctacaataggttacttgagttgcttgggggtacaaagataacaaccggggcagttgttaacctcagttggcattttctacaagactgaaaatg

SEQ ID NO: 21944 - DNA, 338 bp, Homo sapiens
ccaaattgccttctaatgtagccataacattttgcattcccgcaaaaaataaataaataaataagggtttctgtctacattcttgtcagtaattgttaattctcaattttcagattttaatcagtctaataggtagtgctatcttactgttgtttataaattatttttaaatttccagcctctgtaatataggattgcacacyagaaagtggttgggatgaatactgagtgccaattgactatatctacaataggttacttgagttgcttgggggtacaaagataacaaccggggcagttgttaacctcagttggcattttctacaagactgaaaatg

SEQ ID NO: 21945 - DNA, 1302 bp, Homo sapiens
ccaggagcaatggatgaggctgtctttgccttcagcagctgttgggatcagagtccaccagacagtccttcctttaaggggatgtatgtgaatggccactgcacacatgactgccctcctgagaacatgacttttgctagaagcagtcagccttggagccaggcaaatgtagctttaagctccagagggaccacttctgtctgcacggctttgagtgagctagttaacagctctgagcttctggagagtggagccttatggggttgtggctatcactgtacaccagggttctcgactgtccatcagtgtacaccagggtcctcaactgcatcactatgaacatttggagctggatcattccttgtggtagagggctgtcctgtacattgcgggatatcacgcagcatccctgacctctacccaccacattgcagtagcccacacctcagttgtgacgaccaaaaatttctacagacattgcccaatgtcctttggggaaaaaaaatcaacttccctcactactgagaactgttgctgtactaatgtagccagcagagctcagaggcagcttccgatttcagagttgcaaggaatgactcttccacctcctagatactctattcccttcctgtgctgctgctgcatgaaatcccaacacgggagagaaatgcctgtggcttctatgatttattttaaagtatcaaaggagtgtattttaatgtatttgcttaacatgggttcgatgtctattaattagtaatggtcttgttatcaatatccttccctaaattcattaactttattcacaaaacaatgtgggtgcacttcaggtgatcatcttgggcagccatgccttggacaaaataaatgcttattatgtattaaaaaacaaattgatttaatgagtgaattccacagcagggacacacgcggcaagagtaagagttggaagctgagggagtcaatataatcttccttcttctctgggttttctaattttccagccaarcaattgagaccattgaattcagagccattgaggtgactttccttcagcatcagggcaagagagcacagcccagtaccagattctagaatgatagaggggaatcactgcgagaaggttgcattctattcagcatagtctgagaaaacagaatagataatctagtaaagcaaggtttttatacaaattgcaaaaataaattttacatgtaaagagaaggtaagtttaaatgaataaaaagccatctttgtgttagtcaccaagttggatccttttaataaattagcacttttgat

SEQ ID NO: 21946 - DNA, 545 bp, Homo sapiens
tgcttgtatttgctttaaaagtggatgcaaagaatgaattggtactctaaagtgtgaaacttctagcatgatttatgtctaaaatcctctgaactaattttgtcattatatcacattaacactaattgaacagactcagatttagagtcttgttgtttgtagatgaaacataatttaaattccaagaaatgcagactgtcatcgctkcttatgttaaattaaattgctagaaaattatgctgatatgtcttaaagtaactagaactttacaactaaaaactttctctgaaacatttaaggagtaatcacaatcataaggcaactatttgtaatcccagcattttgggaggctgaggcgggtggatcacctgaggtcaggagttcgccggcagcttgactaacatgatgaaaccatgtctctactaaatacaaaaaaaaaaaaaaaaaaaaaaaattagccgggcgtggtggcacatgcctgtaatcccacctacttgggaggctaagacaggagaatcccttgtatctgggaggcagaggttgca

SEQ ID NO: 21947 - DNA, 532 bp, Homo sapiens
tagggtgttataataagaaagtctaaaaataacatatccagtttaaattcggtgtaagatttaattactttccaaatcaaacatgtatttcaatctggactggaacacatttacataatagtttattcccagcaaataaagttgcatgaaaacactgcatataaaccacaaagatattaatataaaattacaattaatttgaaagagttctaattctattataataacagaattgtttgaaaatgaacatttaaaaatcaggataacttgaagtttattttaaattcatattctatagagcttcatagattaattatattttagtttctactactgttttcataaattttagcattaataattttctttgagcaaaaaaamctgcattctttcttttctgagaattggaaatgctttgttacaaataagcaaatattttagggtttgaattacaagaagtcatctctctttccattattctttctatgaacccgacagaaaataaaacttctgataaatccattacttaagc

SEQ ID NO: 21948 - DNA, 530 bp, Homo sapiens
atcacttgagcccaggagtttgaggttacagtaagccatgattgcaccactgcactccaggctgagcaacagaaatatgctgtctctaaagaaaaaaagaagaaagaaagctaatgatgacagcaacataaattcttacagcaaatgtatatgtgagaaattaaaaataaaattgaatataccagcatacctggataatttcatgatcataaagttcaggataaatgttctattaaagtaagracattcatatgttcttacatttgagaacattaatatatgtttttgaattcccacattttctttttagaagttttaatttagctttttttgtatcatattttttgttgggaaatattactgtttgcctcatattactaaaatacatagtcatttcagtgcaaatcaaaaggttaatagaaatagacacatatggatacattttgaattaataattaccatatatcttctaggaaaattttatgctgtcgatttttttaaattaaatattaaaagatgtagatccattt

SEQ ID NO: 21949 - DNA, 530 bp, Homo sapiens
atcacttgagcccaggagtttgaggttacagtaagccatgattgcaccactgcactccaggctgagcaacagaaatatgctgtctctaaagaaaaaaagaagaaagaaagctaatgatgacagcaacataaattcttacagcaaatgtatatgtgagaaattaaaaataaaattgaatataccagcatacctggataatttcatgatcataaagttcaggataaatgttctattaaagtaagaacattcatatgttcttacatttgagaacattaatatatgtttttgaattcccacattttctttttagaagttttaatttagctttttttgtatcatattttttgttgggaaatattactgtttgcctcatattactaaaatacatagtcatttcagtgcaaatcaaaaggttaatagaaatagacayatatggatacattttgaattaataattaccatatatcttctaggaaaattttatgctgtcgatttttttaaattaaatattaaaagatgtagatccattt

SEQ ID NO: 21950 - DNA, 1357 bp, Homo sapiens
ggtgaggcctagtgtctccagtgggatcaaagaggcaaagaaagaagctcacaggtgaagaggaaccaagaaggggtcaaggataacaattagtcctaaaagtaaggtaggtctaaggctaaagktatggcaccaaagccaatggaagaagaggaagatctacaccaaagagacaacctctaccagctctgtccagtcctgccctgtccagcgaactacttctgggtgctacaaaagccaagaagacatgatttgtaagctcctgaagctcactggtttctagacagcaggcgattacaaagcccaataatacatgagtgccggaggtgagtgcagggtgctaggagcaaacagaggagcaatcctaaccttgcttggagtcccgaggaaagcctcctggaggagacgggtataggttctttgagggcaggaacaatactgtgtacatgcatgcacacgcatgtacacgtgtgtgatatgcaccctccacatccctgcacaatattttgcatatggtagatacttaataaaggtgaatcctaattcttgagtgaattcaagaattaattattttttctactatgtctgtgaacactcctctgctttcttcctaaatcttcttcctcttcttttcctttgctggaaatatccaaagagcttcatttgggggtaaaatccagcaatctgaatgtcaataagttatagaaacggccattttatgacattagacaaaatgagagaaaagtatacttgtagccccagttagaatgagaaatcaccatcgttatgctcatcatagagcatttgttcaatactcactgtgtgctagttgctattttaagtgctttaagtatgaattttgctaaatcctttaatccccacagcagcccagtgaggtgaggagtattgcaggtttagactcttacacacagaggggtcgtgtaacttgctcaaggtcccagggcaagcagatggtcgagccaacacagtctggctccagagtctgtaactcatactacatcccaccctcaggactgaaaacttgaaaattcaagcatctggaatttacactgtaatgtatagaccagagatcgctcattatttaaaaaccttttgaggctgcataatctccaccggttcatttttctctgacaccctctgtttccctgtagggactgacaagtactaaattcaaagagctttatagttggtatcttttgcccaggcttttattccagtgataataaatgtacagcataaaaaaaagatactgttagaaccatgggactcatccttttctccatcagatagtagggacaagtcaaaatcctactgcattctggcaatacgaggtcaa

SEQ ID NO: 21951 - DNA, 1398 bp, Homo sapiens
aatcatttttataaaaatgaattttgccatacatattaagtaaaatgtttcaaatttaattataattgaagataatagggagggaaataaagtcaaattttgtagaattgtttctgtgtatgaaaaagtaccacctccaggatctatcacttaaactttctatgggaacttgagcaaattacttaacatttctgtgctttggaattctgatctgtaaaatgggatttaaagtatctaaatcatagggtgttgtgaggagtaaaaaggtataaggtagaacattgagaatagcacctggaatacaatgattcatgcatgctatttctttttagattagctcaattatayagattcattttaaagaaaatgaattatgaaaaacaacagaggtgggaatcatgtttttgagttgagtttaattttgaaaaaaatttagacagttttatttggttttctgctatgaaaggtggagaaatttatcatgctttctctccctccctcccacttccttcccaaccacatcctgacttctattttattgtttttatttaactaagaatattaacatctgcattctgctctctacctataattctgatagttgtttcatcatgatttcagattgaaattaatgcaatactcagtactcatggtttgaggtcagtgtgcacttttctgagacctttattttgattcatcttttgattgatttcacatggatttcactttggagtcactgctttcatcaaaggctcatgggtacgctctcctctgattgtttcctgaccaagaatgtctgttagtttagtacctgagcaataatttaagctgaatattatattcttcagtaatacttttctgcagatttttatatgtgtttttgtattacttcctggaatttaatggcagttatttttcctttctgtaagtgaattgcatttcccttggataagtaaagatttcttttctctcattacacttaatgttcagtaacctctttatgacctgtcttcatgcagatcttctattaatagaaatcttgcacagaacacaaaatgtccctgtgttctgtagatttagtgctacctatatttaggtaaattttcttctgttagatcttttcaaaaattaattgtgaaagatatatacaactgcattttaggggtctctaaggccaccttcaggttcagtgattcactggaaggactcacagaactcaacaaagctgttatactcacaataacagtttattatggcaaaaggatacagactaaatgcagcaaaaggaaggggcatgtgaggcagcgttccagacaccaggggtgggctcccagttgtcttcctctatgggagctgtgcagacacggctcacctgtcccaacaatgacgtgtgtcaac

SEQ ID NO: 21952 - DNA, 556 bp, Homo sapiens
tattctctcttcaacatgcccctccagtgacaaattagcaaagaaaagtgcaatttgtattttgtatagttcaagttctctcaggatgtgtcataatatcctattagacagtagtagtgtagtgacagggaagataaagaggttctggtctgtgctttgaatgctgaacttatttgtattaagaatgtgacagttggatggacttctgaaacctgtgaagctgcttctaaaatctctcattgacctaatctctacagtacaggatatgtgtacagtgtttttgytctaagcaaaaggatgtaacactatattacagagtaaagttaaattcccataaccatcgcccttttgaaatgtattcatgtgcaactttaagtgaggcttctaagaccctaccgatatcggaggaacccacccctgataattcaatgtgggttcttttctatttccccaagtgtcagccggtctgagaaataaagggacagagtacaaaagagagaaattttaaagctgggtgtccggggggagacatcacatgtcggcaggttctgtgatg

SEQ ID NO: 21953 - DNA, 331 bp, Homo sapiens
tggactgccttcttttcaaaaattccwctgtttggagaaggaaggcagttccagtcacagtaaattggattcttttataggaagtaaatctgaaaagtacccacacacacctgtatacactattggaattgataatacatctaattccacatgaccttgagagccaagctgaatgccatcctagctaacctcaggaatgattcccactaaccaaaggctagaattgcatttctctctctgcctatttttctttgcattcattcagatgcagaagccccaacacaaaatctaatctccctcctttccactagacttcacagcatgtgccttg

SEQ ID NO: 21954 - DNA, 331 bp, Homo sapiens
tggactgccttcttttcaaaaattccactgtttggagaaggaaggcagttccagtcacagtaaattggattcttttataggaagtaaatctgaaaagtacccacacacacctgtatacactattggaattgataatacatctaattccacatgaccttgagagccaagctgaatgccatcctagctaacctcaggaaygattcccactaaccaaaggctagaattgcatttctctctctgcctatttttctttgcattcattcagatgcagaagccccaacacaaaatctaatctccctcctttccactagacttcacagcatgtgccttg

SEQ ID NO: 21955 - DNA, 508 bp, Homo sapiens
actgatacaaagaccacgcataaatcttatctttctgtcagaaagtttgaaaataccagccctactgaatctgtttcccaaatcgaattttcaaagactctgagaacttgctaatttcctagcaaggtgcctggtccaaccccttccttgggactcttgttgtaccaaggacagtggaattttaggatacatgtagcaccgatgtatggctccacatacatcgtgtcaaatcacrttcccaccacaaggtcaggctcaaatccaaccctgcccccctagaatgcattacaaaggtatttggtctctatctcctatcagtgaacccagtgcccaagcttgataggagctttccagcgatgtgtgtgtgtgtgtgtgtgtgtgtgtgtgtgtgtgtgtaataatacttcatctgggccagggaagcttccaaaaatgattctggtgctctttgcatcactgttttgaaccagaaccagttctatacttactagttgtgtctttgggcaac

SEQ ID NO: 21956 - DNA, 628 bp, Homo sapiens
tgtgtggggacaagcagcaccatcacctctcagcaccagctgcacacttggggaaaacaaaaagcatcaggcctgacccagcagccccagcagatgccgtcccagcccagggtggccgggggcccctcgccaccggtcctgtccctgaggatggagaggcaggacggggcatagacagaaggagcggagacagcaaggcctcaaggaatgcagcgtatgtatcggctgtgggcagagctctgcacagatttagtttagttttattctttttttgagacaagttcttgctctgttgcccaggctggagaacagtggtgtgatctcagctcactgcagcctccgcctcctaggctcaagcgatcctcccacctcagcctccagaatagcggagaccacagccgtgtgccaccacgcccagctaatttttttgtactktggggacagatgcgattctcaccatattggccaggctggtctcgaatgcctgagctcaagcaatctgcctgccttggcctgtatatatatatattttttgagacagagtcttgctctgttacccaggctggagtgcaatggtgccatctcggctccctgcaacctctgcctcctgggttcaagtgattctcct

SEQ ID NO: 21957 - DNA, 517 bp, Homo sapiens
cagatagcaaagctgtacctatctatagaaccatgctggggaataacagaagaaaatggaggcccatattcagtgtatatagtatatgcttacaacagaaaaggagcaagaattatataccttgtgatccgtgttgtggtattagtctatttttaagtctatctatgaatggcaatataagccttgccagtgctgagggaatcagagccatttaaaacaaacaaaagaaacagtgttcttataataagatgtctaaatttgtgaatttccttaactgtgactttggaaagttagaataagtaaaaatcaacgtacctgtttattaaaaaaaatgttgtgcaaaggctaactttgagaatgagaagatatatgtgtgtgtgtatgtgtgtgtgtgtgtrtgtatatatatatatatatatatatatatatatgttttattttattttattttattttttttgagacaaggtcttactctgtcatccaggctgagtgcagtgacctgatcatagctcac

SEQ ID NO: 21958 - DNA, 517 bp, Homo sapiens
cagatagcaaagctgtacctatctatagaaccatgctggggaataacagaagaaaatggaggcccatattcagtgtatatagtatatgcttacaacagaaaaggagcaagaattatataccttgtgatccgtgttgtggtattagtctatttttaagtctatctatgaatggcaatataagccttgccagtgctgagggaatcagagccatttaaaacaaacaaaagaaacagtgttcttataataagatgtctaaatttgtgaatttccttaactgtgactttggaaagttagaataagtaaaaatcaacgtacctgtttattaaaaaaaatgttgtgcaaaggctaactttgagaatgagaagatatatgtgtgtgtgtatgtgtgtgtgtgtgtgtrtatatatatatatatatatatatatatatatgttttattttattttattttattttttttgagacaaggtcttactctgtcatccaggctgagtgcagtgacctgatcatagctcac

SEQ ID NO: 21959 - DNA, 593 bp, Homo sapiens
ctgttttctaggcatgtggccttggccaaatgtcaagcattcttattctcagttttctcatctaggcaatgaaagcattagtatctgcctaaatgggttactcagcagattaaataaaataatcatttctggctcaaattctaagtatttaataaatgatatcttctattagtattttgttgcatttagcaaaacatatgtgaatgttggataaaacactgaaatccaacagaatttcctccctatggtagtaatgttgcccataaaaataaatcctcctagcttaaatgattgtccatattggcagaaatttctcagtgggtcttcaatcctggcaacaataaacaagcaaaatggagggaaaataaaactsggaattctgaggctactttttaaaaaaaataaggtcttagtttttgagaaccttagaatttaacgaaattttattcctaactaaatttaaattcagccttgataagaataagtccctctagacttactttgtaagcacacttttacagttctttttgaagagtagcaggaagtccacatgacttgtataaatgctttaacacaaaccagactaactaggg

SEQ ID NO: 21960 - DNA, 531 bp, Homo sapiens
cgttgtatgctagtttctagactttgcctggagacccctttggaaatctgtcttctttttaaactcacttaatatgccttaatcatctgtgtgtaatggagtcatccgctcctcaatctaaccctcctcccctggggctttggctgtcctcaatgagagtttcatgcagaatggaaaatcctctatatgtacaatctctctccccctcatttctcttcctcctcacctccaccacccctttgcacatcagcattttaacagctgatcttttgagaagcctgtatctttttcctcttcagtagatacccttcttcatggtcctttgcctaatcaaacagaggcytttggcctttgaaaatccatgacaaggcctcagaaatcagtgttgtggaggattactccatgccaccggagaaactctggtgaaagagaaacctcgtggtctttaggatgttgggattttgagtgaacctgacctgatagcctcaggattcagggaaaggacaatcagatggcggtgttttccagggg

SEQ ID NO: 21961 - DNA, 525 bp, Homo sapiens
cccaacacgtgatgaccaaaaatgtgcccaaacattggcaagtatcgcctgggagcaaaatcaccccaggttgaaaactgtagggaattagggatattcatactagggataaggacatttccaaagaggatagtggatggggtcactaatgggatttccagcaggattgcagacagggaggtgaaaatttaggacaaatcatgcaaagtaggtgtttgcctccaccttctacatgagacagactcagataaacggtyagggatgaaggggatgaagtctcccattttatagatggggaagtagaggtccacagggaagggctttgttatctggcaagcagtgagacctgggtgcctaaaacacacccgtacaaatgcatatgcatgtagtatgtgcatatgtattagataaatatttgacatgtattatatgtagcaactctattagaaatggaactctgttagaaacgtagaactcttgaggccaagacttcgagaccagccaggccaatgtggtaaaaccctg

SEQ ID NO: 21962 - DNA, 525 bp, Homo sapiens
cccaacacgtgatgaccaaaaatgtgcccaaacattggcaagtatcgcctgggagcaaaatcaccccaggttgaaaactgtagggaattagggatattcatactagggataaggacatttccaaagaggatagtggatggggtcactaatgggatttccagcaggattgcagacagggaggtgaaaatttaggacaaatcatgcaaagtaggtgtttgcctccaccttctacatgagacagactcagataaacggttagggatgaaggggatsaagtctcccattttatagatggggaagtagaggtccacagggaagggctttgttatctggcaagcagtgagacctgggtgcctaaaacacacccgtacaaatgcatatgcatgtagtatgtgcatatgtattagataaatatttgacatgtattatatgtagcaactctattagaaatggaactctgttagaaacgtagaactcttgaggccaagacttcgagaccagccaggccaatgtggtaaaaccctg

SEQ ID NO: 21963 - DNA, 525 bp, Homo sapiens
cccaacacgtgatgaccaaaaatgtgcccaaacattggcaagtatcgcctgggagcaaaatcaccccaggttgaaaactgtagggaattagggatattcatactagggataaggacatttccaaagaggatagtggatggggtcactaatgggatttccagcaggattgcagacagggaggtgaaaatttaggacaaatcatgcaaagtaggtgtttgcctccaccttctacatgagacagactcagataaacggttagggatgaaggggatgaagtctcccattttatagatggggaagtagaggtccacagggaagrgctttgttatctggcaagcagtgagacctgggtgcctaaaacacacccgtacaaatgcatatgcatgtagtatgtgcatatgtattagataaatatttgacatgtattatatgtagcaactctattagaaatggaactctgttagaaacgtagaactcttgaggccaagacttcgagaccagccaggccaatgtggtaaaaccctg

SEQ ID NO: 21964 - DNA, 525 bp, Homo sapiens
cccaacacgtgatgaccaaaaatgtgcccaaacattggcaagtatcgcctgggagcaaaatcaccccaggttgaaaactgtagggaattagggatattcatactagggataaggacatttccaaagaggatagtggatggggtcactaatgggatttccagcaggattgcagacagggaggtgaaaatttaggacaaatcatgcaaagtaggtgtttgcctccaccttctacatgagacagactcagataaacggttagggatgaaggggatgaagtctcccattttatagatggggaagtagaggtccacagggaaggrctttgttatctggcaagcagtgagacctgggtgcctaaaacacacccgtacaaatgcatatgcatgtagtatgtgcatatgtattagataaatatttgacatgtattatatgtagcaactctattagaaatggaactctgttagaaacgtagaactcttgaggccaagacttcgagaccagccaggccaatgtggtaaaaccctg

SEQ ID NO: 21965 - DNA, 525 bp, Homo sapiens
cccaacacgtgatgaccaaaaatgtgcccaaacattggcaagtatcgcctgggagcaaaatcaccccaggttgaaaactgtagggaattagggatattcatactagggataaggacatttccaaagaggatagtggatggggtcactaatgggatttccagcaggattgcagacagggaggtgaaaatttaggacaaatcatgcaaagtaggtgtttgcctccaccttctacatgagacagactcagataaacggttagggatgaaggggatgaagtctcccattttatagatggggaagtagaggtccacagggaagggctttgttatctggcaagcagtgagacctgggtgcctaaaacacacccgtacaaatgcatatgcatgtagtatgtgcatatgtattagataaatatttgacatgtattatatgtagcaactctattagaaatggaactctgttagaaaygtagaactcttgaggccaagacttcgagaccagccaggccaatgtggtaaaaccctg

SEQ ID NO: 21966 - DNA, 613 bp, Homo sapiens
tttttggtagagatggggtttcaccatgttgcccaggctggtcttgaactcctgagctcaagcgatccacccacctcagcctcccaaagtgctgggattataggcgtgagccactgcacctggcacagctgcattttagagcttccaaatgcttagtgcgtatttcatttgtttccaaagtacattttaaaccattaaaatcacaataaaaaatagcacacacacttgtgggtggttatatgaataattcgtggactttggacaccaatgtcytgttaactcaggctgccagtgcagtcttcagaataaagtagatttttgtaatttctctgccgacatgtaaacttatacaagtgtgttattgattaagaagctgagtagagcactgccctggtattttgaaaagttcaggttcatgcatgtgcactaataatgtattttacaagtgaacatacctatacctacagtcaatcaaatgccaggcaaggtgtggctcgtctgcttcaggcatggtcttattgtataatagcatcgtaagtgaagtcccaacatctcatttgtatgctgggtagtaattacatgtttcaaatcacctgggggccttttaaaaatc

SEQ ID NO: 21967 - DNA, 613 bp, Homo sapiens
tttttggtagagatggggtttcaccatgttgcccaggctggtcttgaactcctgagctcaagcgatccacccacctcagcctcccaaagtgctgggattataggcgtgagccactgcacctggcacagctgcattttagagcttccaaatgcttagtgcgtatttcatttgtttccaaagtacattttaaaccattaaaatcacaataaaaaatagcacacacacttgtgggtggttatatgaataattcgtggactttggacaccaatgtcctgttaactcaggctgccagtgcagtcttcagaataaagtagatttttgtaatttctctgccgacatgtaaacttatacaagtgtgttattgattaagaagctgagtagagcactgccctggtattttgaaaagttcaggttcatgcatgtgcactaataatgtattttacaagtgaacatacctatacctacagtcaatcaaatgccaggcaaggtgtggctcrtctgcttcaggcatggtcttattgtataatagcatcgtaagtgaagtcccaacatctcatttgtatgctgggtagtaattacatgtttcaaatcacctgggggccttttaaaaatc

SEQ ID NO: 21968 - DNA, 1160 bp, Homo sapiens
cccagctacgtgggaggttgaggcaggagaattgyctaaacccggaaggcagaggttgcagtgagccaagattgcactactgcactccagcctgggagacagagcaagactctgtctgaaaaaagaaaaaagggtgactactatcagttacattttcttactgcaaactctactcccttccccaccctaggactaggctaaagttgaacccagaatactcaataatacggcctcctccccctaattttggaaaatgctttaagataaatacctgctgttcagaaggagacatctgctaagtctgcagagggactgataatgtcggttgggattctggagcagtgcccacatctgaagggctcgggagcctgggaagaaaacaattccagtatattgtggggcattccttgtatcctcatgtcccatcttgcccagccagcccttacctaactcaatggccaaatccaggtgtcccattatgagcttgttgaagaccagtgtctcagccacgtatgccacgatttcaatgccctcgcctttcagggggaggttgaagatgtgctccatggccatgacttcatatttgaaccacacacctttgtagccagccaggtggtggtatagcgaatagtctaggtaagccttaatgatctgaaatggcagagtggaggaagagtgaggcagaacgcaaagcagaaagctcaggaacatcactcaatgtctgccagtaaatgtttgtttattaagtttgggaatagagctggacatttggccgaagccatgggcttagaaatagaaatcaaattgggtttctgctacctgtttactgagtcattcaggataagcttgatggccccttgcccatgtagtccttaaatgaaatataaaaattttaatttctgtgaaaaataaaagcaatagcttacatattagatgtataattgcagagcaaaaaggctgcaaggatacactccaaagtgtaaacagtagttatatatttgttgggggtgggaggagagattttactttatgcacctctgtgatgtttgttataacaagcatgtataatttttgtaatttaacaaaaaagaaagaaaggttggttttgtttgtttggctttttttttttttttaaataaggactagttttaaacctaatt

SEQ ID NO: 21969 - DNA, 1160 bp, Homo sapiens
cccagctacgtgggaggttgaggcaggagaattgtctaaacccggaaggcagaggttgcagtgagccaagattgcactactgcactccagcctgggagacagagcaagactctgtctgaaaaaagaaaaaagggtgactactatcagttacattttcttactgcaaactctactcccttccccaccctaggactaggctaaagttgaacccagaatactcaataatayggcctcctccccctaattttggaaaatgctttaagataaatacctgctgttcagaaggagacatctgctaagtctgcagagggactgataatgtcggttgggattctggagcagtgcccacatctgaagggctcgggagcctgggaagaaaacaattccagtatattgtggggcattccttgtatcctcatgtcccatcttgcccagccagcccttacctaactcaatggccaaatccaggtgtcccattatgagcttgttgaagaccagtgtctcagccacgtatgccacgatttcaatgccctcgcctttcagggggaggttgaagatgtgctccatggccatgacttcatatttgaaccacacacctttgtagccagccaggtggtggtatagcgaatagtctaggtaagccttaatgatctgaaatggcagagtggaggaagagtgaggcagaacgcaaagcagaaagctcaggaacatcactcaatgtctgccagtaaatgtttgtttattaagtttgggaatagagctggacatttggccgaagccatgggcttagaaatagaaatcaaattgggtttctgctacctgtttactgagtcattcaggataagcttgatggccccttgcccatgtagtccttaaatgaaatataaaaattttaatttctgtgaaaaataaaagcaatagcttacatattagatgtataattgcagagcaaaaaggctgcaaggatacactccaaagtgtaaacagtagttatatatttgttgggggtgggaggagagattttactttatgcacctctgtgatgtttgttataacaagcatgtataatttttgtaatttaacaaaaaagaaagaaaggttggttttgtttgtttggctttttttttttttttaaataaggactagttttaaacctaatt

SEQ ID NO: 21970 - DNA, 1160 bp, Homo sapiens
cccagctacgtgggaggttgaggcaggagaattgtctaaacccggaaggcagaggttgcagtgagccaagattgcactactgcactccagcctgggagacagagcaagactctgtctgaaaaaagaaaaaagggtgactactatcagttacattttcttactgcaaactctactcccttccccaccctaggactaggctaaagttgaacccagaatactcaataatacggcctcctccccctaattttggaaaatgctttaagataaatacctgctgttcagaaggagacatctgctaagtctgcagagggactgataatgtcggttgggattctggagcagtgcccacatctgaagggctcgggagcctgggaagaaaacaattccagtatattgtggggcattccttgtatcctcatgtcccatcttgcccagccagcccttacctaactcaatggccaaatccaggtgtcccattatgagcttgttgaagaccagtgtctcagccacgtatgccacgatttcaatgccctcgcctttcagggggaggttgaagatgtgctccatggccatgacttcatatttgaaccacacacctttgtagccagccaggtggtggtatagcgaatagtctaggtaagccttaatgatctgaaatggcagagtggaggaagagtgaggcagaacgcaaagcagaaagctcaggaacatcactcaatgtctgccagtaaatgtttgtttattaagtttgggaatagagctggacatttggccgaagccatgggcttagaaatagaaatcaaattgggtttctgctacctgtttactgagtcattcaggataagcttgatggccccttgcccatgtagtccttaaatgaaatataaaaattttaatttctgtgaaaaataaaagcaatagcttacatattagatgtataattgcagagcaaaaaggctgcaargatacactccaaagtgtaaacagtagttatatatttgttgggggtgggaggagagattttactttatgcacctctgtgatgtttgttataacaagcatgtataatttttgtaatttaacaaaaaagaaagaaaggttggttttgtttgtttggctttttttttttttttaaataaggactagttttaaacctaatt

SEQ ID NO: 21971 - DNA, 1160 bp, Homo sapiens
cccagctacgtgggaggttgaggcaggagaattgtctaaacccggaaggcagaggttgcagtgagccaagattgcactactgcactccagcctgggagacagagcaagactctgtctgaaaaaagaaaaaagggtgactactatcagttacattttcttactgcaaactctactcccttccccaccctaggactaggctaaagttgaacccagaatactcaataatacggcctcctccccctaattttggaaaatgctttaagataaatacctgctgttcagaaggagacatctgctaagtctgcagagggactgataatgtcggttgggattctggagcagtgcccacatctgaagggctcgggagcctgggaagaaaacaattccagtatattgtggggcattccttgtatcctcatgtcccatcttgcccagccagcccttacctaactcaatggccaaatccaggtgtcccattatgagcttgttgaagaccagtgtctcagccacgtatgccacgatttcaatgccctcgcctttcagggggaggttgaagatgtgctccatggccatgacttcatatttgaaccacacacctttgtagccagccaggtggtggtatagcgaatagtctaggtaagccttaatgatctgaaatggcagagtggaggaagagtgaggcagaacgcaaagcagaaagctcaggaacatcactcaatgtctgccagtaaatgtttgtttattaagtttgggaatagagctggacatttggccgaagccatgggcttagaaatagaaatcaaattgggtttctgctacctgtttactgagtcattcaggataagcttgatggccccttgcccatgtagtccttaaatgaaatataaaaattttaatttctgtgaaaaataaaagcaatagcttacatattagatgtataattgcagagcaaaaaggctgcaaggatacactccaaagtgtaaacagtagttatatatttgttgggggtgggaggagagattttactttatgcacctctgtgatgtttgttataacaagcatgtataayttttgtaatttaacaaaaaagaaagaaaggttggttttgtttgtttggctttttttttttttttaaataaggactagttttaaacctaatt

SEQ ID NO: 21972 - DNA, 612 bp, Homo sapiens
tgaggtcaggagttcaagaccagcctggccagcatgctgaaaccctgtctctactaaaaatacaaaaattagctgggcatggtggcacatgcctctaatcccagctagttgggaggctgaggcaggaggatcacttgaacctgggaggcagaggttgcagtgaactgagatcatgccactgcactccagcctgggcaacagagcaagactctgtctcaaaaaaaamaaaaacaaaaaaaaaacaaaaaacagtactgccacagtcactcattgtaactgatggctaactggcaagcaacttgaggacagagtctatctctgactcttctgtcacctatgtagcaggaagcaggacctggcactgacaggtacataataaataaattattaccaaagaaaaagaagaagattgcattcctgcacaactgaagccaagaatagtggaaacccacgtaatccattgtggcatcatttaaactgtccgtggatactgaaatgaactccaacactgttatgttttggagtcctgaatggagcagaagaaggagatgagtgtgagtgagccacccagctgggtgacagggagaagatcatttttttaaaagatgcatc

SEQ ID NO: 21973 - DNA, 578 bp, Homo sapiens
caaaggccttcaaattttttaaaatgcatggtgggggcccactctgagatctgcctctcgattaggtctggcaagtgaagtcaccatctgctctgctccaagaaagagaaggaagcacagacggtctggatcacccaaagggggttccctggctctgattttgtttttgtttttgtttttttttaaatatccaacttgggcaatgtcagggcaaagcaaagttaacactgcttcactggaagtaagaggctgaccacacaggccaacgtcggccaacaggtacatttttcaacaactgttgacgtactactatgtgctggagcaacaggcaggtgtggtaaacatcccctaagcaggycgtctccttctcctcctgcggcacttgcaggggctcccttacgtcttgctgccatctcaggctcacctctcctgaatccctgactcattgacttccaagagctgaaccgggaacaatattgagcaaacaaagatagatgcccaagagacaaatgctgaactgagtcgaagggaccactgtggattaacagacagaaaacaaatgagtagatagatttgtg

SEQ ID NO: 21974 - DNA, 578 bp, Homo sapiens
caaaggccttcaaattttttaaaatgcatggtgggggcccactctgagatctgcctctcgattaggtctggcaagtgaagtcaccatctgctctgctccaagaaagagaaggaagcacagacggtctggatcacccaaagggggttccctggctctgattttgtttttgtttttgtttttttttaaatatccaacttgggcaatgtcagggcaaagcaaagttaacactgcttcactggaagtaagaggctgaccacacaggccaacgtcggccaacaggtacatttttcaacaactgttgacgtactactatgtgctggagcaacaggcaggtgtggtaaacatcccctaagcaggccgtctccttctcctcctgcggcacttgcaggggctcccttacgtcttgctgccatctcaggctyacctctcctgaatccctgactcattgacttccaagagctgaaccgggaacaatattgagcaaacaaagatagatgcccaagagacaaatgctgaactgagtcgaagggaccactgtggattaacagacagaaaacaaatgagtagatagatttgtg

SEQ ID NO: 21975 - DNA, 604 bp, Homo sapiens
ttttacactcaaatattcaattcaacaaatttatcaagtgcactcaagaagtatagaaagtagcaggaggaaaaggcatgatcactgttctcaaaagtcttggacaagaaaggagatgggatacatcacaccaaaatcaaagcagattatgacatttgtgctatgaagggaaaaaaaaattgtgggctgggcgcagtggctcatgctgtaatcacagaactttgggaggccaaggtgggcggatcacttgaggcgggagttcgagaccaacctaatcaacatggcaaaaccctgtttcaactaaaattacaaaaattagccgggtctgagagcacatgcctgtaatcccagctactcaggagtctgaggcacaagaatcgcttgaactgggaggcggatgtcgcagtgagccgagattgtgcctctgcactccccactgggcaagagagcaagacattatctcaaaaaaaaaaaaaaattgtgagttcagaagaaggagcccttttggkttggggagattaggaaagaagacttgatgtatgaatattaggagaaaaaaggagcaacaaatatgaagaaattagattctgtctgattcatttca

SEQ ID NO: 21976 - DNA, 579 bp, Homo sapiens
atcaaatggtcataccacagatgactcaagttttattcccacatgcatttaaccatatccatgtttcctaatacggtactttccttccttagacatctaagctcagatttcccctactccctaaatgccacatctcttcatatcmcatgctttgaattggtcaaggaaaaaaaaattcatgaggaataccgaatagtggtaaactatattttgtattttgttactatagtttgcatttaaacagaaagatgatcttgccagggaaagcatatccccttttagtccctaactgctgctataaattcaattaatttcataatatttaccatcccctttactactttggcagggtagtccttaaaagtttgttctatccaaactcttacataaaaactgacttccaaagatgtttaacattcttccagttactcattggtacgcactcagttttatacaattcctctataactatatgacaaatctctgcattaatggaacaagagcagttaattgaccttttcagtggggaatgagttgcacttagcttttcatatatacaagagtagtatttaaattgca

SEQ ID NO: 21977 - DNA, 607 bp, Homo sapiens
ggaaacaaacctgcttcaggaatagaccaacatattaataacattcacttttaggttttgggattgtgggtgamctttattttatttttaatttctgttatttattcaaaaatttttaatatgagtagcacttttatgccaaaaggaaaaaaagggacatacaaccacgtgaatcttggacaatgttgacctttgtctaagctattttaactacatttgaaccaaacgaagaattttactgataggaacaaaaatatacgtagagtgagcatgaaaatgaaaaaagaaaacccaatactgttggtaattcatctctctatggttgatatttctttattttttcataatacagtgtcaccaaattctgtgaaatggcctcaagggtcaccatcataagacctctgtctctgcctcgtcttttccactccctcttgctgctttccaaattagccctatgtaaagtcacccttctgcttcccagtctagcagctcatatcactctgtgcattccttccacagcatccatcataaaggatgtgattactcacttattttatttctccttataccaggaggtataagccccatgtggagtacttttaaaagg

SEQ ID NO: 21978 - DNA, 1870 bp, Homo sapiens
tcctgctgaaatgtcaagatctcagttcaaaagaatcctgctgttgaaactcgagaactgagctctggagcatctactcttcagaatcctttacccacgcccagaagctaatgatttccagaggtggccacagcaaagaattcataggaacattggttattgtgtcaagagtcatgtcaagaagggaaggtcactggttccaaaaattccagaggtgaaaagtcactcttacaaataccgtgtcctccacattcagcacatcatggtatgtgctttatcataatttggtgggccaccagctgtcaccaaggcagacatcatccaaatgaaattcttcaacctcactagccaggtgtcacttttacagctggttgacactttctgccaggcatggacakgggtcaggtttttgcctcttgaatggactaagtcagtggttcccgaagtgtagtctaggaacaactgggggttcctgagacacttcttgtgggtttatgcagttaaaatattttcataataatccaaaatgttatttgtccttttcactcttctctcacgaatttacagtgtagttttctagaggctacataacaaatatttcgttgttctgatggctaatggaatgggtattcttgtattttgaaaatttttcaattttaatatctaatatagttaatatttatagatatagcccagataaacataagctctctgaagtcatcaacaactttaagaatgtaaagagatccgaaaaacagaacatttgagaagtgctggactaagtgaagcaggtatccattaccatttccatttcttcaacgactggtctaccctcttctttcccagataattccttctcacagtcccagcaatgactagtgtgatccttacaactcaccaaggagactgccatgccaatgactagcaggcagacaactataattgagccttggtcactttggcaaacagaatactaaagatgtacagctataggactctgcaaagtcactcatcatatgacataagccacaaactacccttagtataatcaagagaattttaaactgttttaaattttaaacttcttttgcataaagaaggatgtggtatatattaatttttaaagtgcatttaaaaaaattacctggttttcccaaaccaaaaaaaaaaaacaaacaaagaaaaaatcagttgaataaattgcatctgacagagcatatccttggaaaaggaaatccctgctacctcctaaagaatgtcttcaacacacacatgaaacccttcatagacacatatggtatttaatacatacctgctacggaacagctgatgcttttaccttttcatgaactatgagtcatccccctgccctggagaagattttctgagcttcataaatattgatcatactccctaaattctaacaggtggtttcttcaaatatgagtaatacttcccaacgtcaccctttattttctacatttagtcatgatgtatttgttgactaccacagaagaaagaggtattccatataaatgaatattccggatcactgaaacttagccacttcaaatcccaagacatttattcattcaaaaacattcctggaccatgagctgggccttgagactactacgaccaattaagcaaaaagtgcccttagaattgctcatattctaatggatgttgaatagaatctgtcctaaaatttattccagtcatcttaaaagtggtgtatgtgaagaaaagattagaacatctaatttaatctttatcttattttggagtatgttttattatataaacaatatattcatttaatagcacatgcataaattataaataaataaaaacacatctattgagagcg

SEQ ID NO: 21979 - DNA, 547 bp, Homo sapiens
agacactgttgtttttattagaaacccttwggcaactcaatataaaatatgggattttgaaagtttaaaaatattgtgtaaggccgggtgcgaagtgctgtaatcccagcacgttgggaggctgaggcgggcggatcacctgaggtcgggagttcacgaccagcccgaccaacacggagaaacctatctttactaaaaatacaaaattagccgggtgtggtggcacatgcctgtaatcccagctacttgggaggctgaggcaggagaatcacttgaacccaggagggggaggttgcggtgagccaagatcgtgccattgcactccagcctgggcaacaagagtgaaactccgtctcaaaaaaaataaaataaaattgtgtaattttgcagtaaagagttcacaagtttgagtggtctaaaatctgcacattccaaagaactatttagtccttgcctgactccttggaagtaacctctaagtccttgggatatccctccaaagtatctttgacaagaatatctttgtttagctggaggccttctacca

SEQ ID NO: 21980 - DNA, 547 bp, Homo sapiens
agacactgttgtttttattagaaacccttaggcaactcaatataaaatatgggattttgaaagtttaaaaatattgtgtaaggccgggtgcgaagtgctgtaatcccagcacgttgggaggctgaggcgggcggatcacctgaggtcgggagttcacgaccagcccgaccaacacggagaaacctatctttactaaaaatacaaaattagccgggtgtggtggcacatgcctgtaatcccagctacttgggaggctgaggcaggagaatcacttgaacccaggaggsggaggttgcggtgagccaagatcgtgccattgcactccagcctgggcaacaagagtgaaactccgtctcaaaaaaaataaaataaaattgtgtaattttgcagtaaagagttcacaagtttgagtggtctaaaatctgcacattccaaagaactatttagtccttgcctgactccttggaagtaacctctaagtccttgggatatccctccaaagtatctttgacaagaatatctttgtttagctggaggccttctacca

SEQ ID NO: 21981 - DNA, 547 bp, Homo sapiens
agacactgttgtttttattagaaacccttaggcaactcaatataaaatatgggattttgaaagtttaaaaatattgtgtaaggccgggtgcgaagtgctgtaatcccagcacgttgggaggctgaggcgggcggatcacctgaggtcgggagttcacgaccagcccgaccaacacggagaaacctatctttactaaaaatacaaaattagccgggtgtggtggcacatgcctgtaatcccagctacttgggaggctgaggcaggagaatcacttgaacccaggagggrgaggttgcggtgagccaagatcgtgccattgcactccagcctgggcaacaagagtgaaactccgtctcaaaaaaaataaaataaaattgtgtaattttgcagtaaagagttcacaagtttgagtggtctaaaatctgcacattccaaagaactatttagtccttgcctgactccttggaagtaacctctaagtccttgggatatccctccaaagtatctttgacaagaatatctttgtttagctggaggccttctacca

SEQ ID NO: 21982 - DNA, 542 bp, Homo sapiens
gtactcagtttcctaaggtcttccttccagttttctccyaaagatttctataaggttgttaagcaagaattcatcaatgagaaaactcgttacttgcccaaacatatttgaaatctcaagcaagagttggatgttaacgagtaaaagtaattcattttagatacctctacttctcaggattccttttctttttatttacttttttcctgtaagaaacaaacaaacaaacaaactattttcactagcattcctatacaccaagaaaagtcaagctgagagccaaatcaggaatgtaatcccatttacaattgccacccaaagaataaaatacctaggaatacaactaaccagggaggtgacaaatctctacaagaagaactacaaaacattgctcaaagaaatcagagatgatacaaagaaacgggaaaacattccatgctcatggataggaagaatcaatattgtcaaaatggccatactgcccaaagcaatttatagattcaatgctattcctattaaactaccaaagacattcttcagag

SEQ ID NO: 21983 - DNA, 542 bp, Homo sapiens
gtactcagtttcctaaggtcttccttccagttttctcccaaagatttctataaggttgttaagcaagaattcatcaatgagaaaactcgttacttgcccaaacatatttgaaatctcaagcaagagttggatgttaaygagtaaaagtaattcattttagatacctctacttctcaggattccttttctttttatttacttttttcctgtaagaaacaaacaaacaaacaaactattttcactagcattcctatacaccaagaaaagtcaagctgagagccaaatcaggaatgtaatcccatttacaattgccacccaaagaataaaatacctaggaatacaactaaccagggaggtgacaaatctctacaagaagaactacaaaacattgctcaaagaaatcagagatgatacaaagaaacgggaaaacattccatgctcatggataggaagaatcaatattgtcaaaatggccatactgcccaaagcaatttatagattcaatgctattcctattaaactaccaaagacattcttcagag

SEQ ID NO: 21984 - DNA, 721 bp, Homo sapiens
taccatacttagaaataggcatgtgaggaggtgcaaagaatagcagtgtgccttccagatgctctgccaattgaagaaatttgaaaaccaatgaattgaaaatacattccatttagaaaaagctactgtctttctggattctagaatctgacatgtaaattcatagtcattcattctcattcttcttctctctgcctttgtctgygtgtattcactccatgcagtctgtaagcaacaaattctgttgttcttatgtaacagttcacttcctgagctgctctgctctgtagttctcccttcttgtcactccctggcatgtcttggtttctggtcagagacccaatcacacacagaaagtgtaccaatataatttactcccatcagggatttggtaacaacttaaagagtctttcatcaagcctagaagttttgttttgttttcctttctccttactttcagatgtggcacttccttgggtattttggatttttactatattaaaagaaaggatggggaatctaacttctagtccaaatacttatttttaatctccctttttttaaagtatacataaatgatacaacttaaaattctctaagactcgaaaatgataaattataatttccattctcatcatgcttaactacgcagttgtattgggaaagacagctaatgatatcatcagagctaagatacacaataaaattattcttaacaata

SEQ ID NO: 21985 - DNA, 543 bp, Homo sapiens
tcatatcatctctggattacatataatacctaatacaatgtaaatgttatataagtatataattgtattctttttaaaattgtattctttttcattgttgtattaattttcctgaatattctcaatccatggttgtttgtatccacaaatrtggaacccacagatatagaactccagatacagagggccaactttctaacgctgatatggcaaatttcaagttaaaaaaaagatagattcagtatacaaaaaactcaaacaaaactacaatcaaaacgaaaaggaaaaatactagaactatagttccaataaaaatgagatggaggtgggtggtgccaagatggccgaataggaacagctccagtctacagctcccagtgtgagcgacgcagaagacgggtgatttctgcatttccaactgaggcaccgggcgcatctcactggggagtgtcagaaagtgggtgcaggacagtgggtgcagcgcaccaagcatgagatgaagcagggcgaggcatcgcctcacccaggaagcgcaaggggtca

SEQ ID NO: 21986 - DNA, 543 bp, Homo sapiens
tcatatcatctctggattacatataatacctaatacaatgtaaatgttatataagtatataattgtattctttttaaaattgtattctttttcattgttgtattaattttcctgaatattctcaatccatggttgtttgtatccacaaatgtggaacccacagatatagaactccagatacagagggccaactttctaacgctgatatggcaaatttcaagttaaaaaaaagatagattcagtatacaaaaaactcaaacaaaactacaatcaaaacgaaaaggaaaaatactagaactatagttccaataaaaatgagatggaggtgggtggtgccaagatggccgaataggaacagctccagtctacagctcccagtgtgagcgaygcagaagacgggtgatttctgcatttccaactgaggcaccgggcgcatctcactggggagtgtcagaaagtgggtgcaggacagtgggtgcagcgcaccaagcatgagatgaagcagggcgaggcatcgcctcacccaggaagcgcaaggggtca

SEQ ID NO: 21987 - DNA, 543 bp, Homo sapiens
tcatatcatctctggattacatataatacctaatacaatgtaaatgttatataagtatataattgtattctttttaaaattgtattctttttcattgttgtattaattttcctgaatattctcaatccatggttgtttgtatccacaaatgtggaacccacagatatagaactccagatacagagggccaactttctaacgctgatatggcaaatttcaagttaaaaaaaagatagattcagtatacaaaaaactcaaacaaaactacaatcaaaacgaaaaggaaaaatactagaactatagttccaataaaaatgagatggaggtgggtggtgccaagatggccgaataggaacagctccagtctacagctcccagtgtgagcgacgcagaagacgggtgatttctgcatttccaactgaggyaccgggcgcatctcactggggagtgtcagaaagtgggtgcaggacagtgggtgcagcgcaccaagcatgagatgaagcagggcgaggcatcgcctcacccaggaagcgcaaggggtca

SEQ ID NO: 21988 - DNA, 622 bp, Homo sapiens
tagcagaagaaaaagttgcagtctcagaaagccttccattaaaasaatttattttatcactacccagagtctcatatttctgtctctgatactttccctgccatggttccaccgagaacccctggcccctggtctccttggaattttctgtatactccactgggatcctgtagtgtgtcatctaggggtgtagagaggtgggtggccttctcttgccgtcatgctcccagtgtctgtgtaggctttactgctgattgaggtgaagaagagttgaatcccccagtaagactccacaagtcgctcagagggaatctggccagagcaggagctagcacccttttcttccctgcaactcacaggggtaaagtcatagagtcaattcttggtgggtgacatgtgatagaaacagacaaaaagtaggatgaatgaaaactctgcgggtaaattgtttagcctcatttaaagcattaattccagcctttcttcctgccctccttttccttcccttacagctctcagtcactaagtgaatgggctcttgtggacgtcacctcttgcccaagattctctctctggtggggatgctaaggaatacaaatagtccaaacagtaaaaagccaaa

SEQ ID NO: 21989 - DNA, 571 bp, Homo sapiens
gtcctctcaggaagtaaacaagtagacttcaagagtcccttaaattttggattagaggtagcagtagtaataaaatagggagcttttgttgagaactctttcctgcccaatcacctgtggcatataagacggcaccacaaatcagatgtggccctgtgtattctttctcatattttctttctcgtagttttcagggtcattctcagaaacctggagagtgatgatggatagattccagcccactgtcactctgggtgggtcctttcaaaacatcaaaatgtgattttgctgtcatttgagtgtcaatttcttttctctcaagagtatttaccaagaacatcactggaaagagtttgtcttatacccatattttaagcacgcaatgcaggatcttwgtatttttaaagccaaataaagcaaggaagacataagtcaatagagaaattgaaacatagaatctagatttgttgcttaaatctgattcaagagcttatgcaatccttagaatgggactatttctatagaatcacagtgagtttgacataaatataaaggagagagggtttaggta

SEQ ID NO: 21990 - DNA, 569 bp, Homo sapiens
tgcaggatatttctacttttcagttgggatttaagtaaaagagaaagaacttctatttccttatagcaaaaactcaatatagcattttctatcaaatgggagagcaaacctcagaaataggtaacaagcctcaactttagaccccacttccagtttcacrtctttgaaagatttcatatgacttctttaacacttctgaaattaaattccatgtcatttatgtctctgcaaaaaaaactttctttctttattactcagttctaacatttctgaaaatcaaaacatccagaaatttccttcctggctctgacatcaatatcccttcttcccagttctacaaaacctgcctcatcacacggatccgcgtcccccattctgcgagccttctacatgtgacccccctcccatgactgcccattttcctgctccaaatgagaggttgagtacataggattgaatctgtaagtgactatgaccttctttgttgaaaagaattgtcaaaatggccttcagttatactgtaattatcttccttcttggtcttaatgttttctttcagattcgcaatg

SEQ ID NO: 21991 - DNA, 569 bp, Homo sapiens
tgcaggatatttctacttttcagttgggatttaagtaaaagagaaagaacttctatttccttatagcaaaaactcaatatagcattttctatcaaatgggagagcaaacctcagaaataggtaacaagcctcaactttagaccccacttccagtttcacgtctttgaaagatttcatatgacttctttaacacttctgaaattaaattccatgtcatttatgtctctgcaaaaaaaactttctttctttattactcagttctaacatttctgaaaatcaaaacatccagaaatttccttcctggctctgacatcaatatcccttcttcccagttctacaaaacctgcctcatcacacggatccgcgtcccccattctgcgagccttctacatgtgaccccyctcccatgactgcccattttcctgctccaaatgagaggttgagtacataggattgaatctgtaagtgactatgaccttctttgttgaaaagaattgtcaaaatggccttcagttatactgtaattatcttccttcttggtcttaatgttttctttcagattcgcaatg

SEQ ID NO: 21992 - DNA, 536 bp, Homo sapiens
ttttgtaattttcccaattggaaacattctctgtctccttttccacttaattaaatcttacccttcctccaatcttcagttcagatcgcatttcttctaaaaatcctttcccaactcactcatctgagactactgtagcatttatttacctgaatcrgaaaaccaaaatttcaacagtaaaaagcacccttggtttgcatttgtgccaagaagtctgtgaaatagtagaattttcccattaaatacctttaaaagtaatgtataaggtaagattatagtactttcacaaacgagaactgtatttatataaaactttcaggaactatagtttttaagtaaggagatttaacataaataaagaattcattataactgatactgagttctgctgttttgaccagaataactttgggaaaactaggaaagtttcatgctttcattttcactttgcaaaaattgtcaaccagctaatgaatactattatgaaaagaaagactaaatagcacaggaggaaaacaaaatcatgatagattcca

SEQ ID NO: 21993 - DNA, 536 bp, Homo sapiens
ttttgtaattttcccaattggaaacattctctgtctccttttccacttaattaaatcttacccttcctccaatcttcagttcagatcgcatttcttctaaaaatcctttcccaactcactcatctgagactactgtagcatttatttacctgaatcagaaaaccaaaatttcaacagtaaaaagcacccttggyttgcatttgtgccaagaagtctgtgaaatagtagaattttcccattaaatacctttaaaagtaatgtataaggtaagattatagtactttcacaaacgagaactgtatttatataaaactttcaggaactatagtttttaagtaaggagatttaacataaataaagaattcattataactgatactgagttctgctgttttgaccagaataactttgggaaaactaggaaagtttcatgctttcattttcactttgcaaaaattgtcaaccagctaatgaatactattatgaaaagaaagactaaatagcacaggaggaaaacaaaatcatgatagattcca

SEQ ID NO: 21994 - DNA, 536 bp, Homo sapiens
ttttgtaattttcccaattggaaacattctctgtctccttttccacttaattaaatcttacccttcctccaatcttcagttcagatcgcatttcttctaaaaatcctttcccaactcactcatctgagactactgtagcatttatttacctgaatcagaaaaccaaaatttcaacagtaaaaagcacccttggtttgcatttgtgccaagaagtctgtgaaatagtagaattttcccattaaatacctttaaaagtaatgtataaggtaagattatagtactttcacaaacgagaactgtatttatataaaactttcaggaactatagtttttaagtaaggagatttaacataaataaagaattcattataactgataytgagttctgctgttttgaccagaataactttgggaaaactaggaaagtttcatgctttcattttcactttgcaaaaattgtcaaccagctaatgaatactattatgaaaagaaagactaaatagcacaggaggaaaacaaaatcatgatagattcca

SEQ ID NO: 21995 - DNA, 536 bp, Homo sapiens
ttttgtaattttcccaattggaaacattctctgtctccttttccacttaattaaatcttacccttcctccaatcttcagttcagatcgcatttcttctaaaaatcctttcccaactcactcatctgagactactgtagcatttatttacctgaatcagaaaaccaaaatttcaacagtaaaaagcacccttggtttgcatttgtgccaagaagtctgtgaaatagtagaattttcccattaaatacctttaaaagtaatgtataaggtaagattatagtactttcacaaacgagaactgtatttatataaaactttcaggaactatagtttttaagtaaggagatttaacataaataaagaattcattataactgatactgagttctgctgttttgaccagaataactttgggaaaactaggaaagtttcatgcyttcattttcactttgcaaaaattgtcaaccagctaatgaatactattatgaaaagaaagactaaatagcacaggaggaaaacaaaatcatgatagattcca

SEQ ID NO: 21996 - DNA, 596 bp, Homo sapiens
ccactctgccagtgccaattctctgtattcgtccattttcacactgctataaagaactccccaagactgggtaatttataaagaagacaggtttaattgactcaccattccacatggctggggaggcctcaggaaacttacagtcatgacagaaggtgaaggggaagcaaggcacatcttacatggtggcaggtaagaaagggagcaatggaggaagtgccactttaaaaaccatcagatattgtgggaactcactcactatcatgagaacaacatggagggaaccatccccatgatccartcatctcccatcatgtccgtccttcaacatgtggaaattacaatttgagatgagattcgggtggagacacagagccaaaccatatctggtagcaactgggatgtaccaaccctcttggcctctgattgcaggacaaagatatgtgagtctgaggactaggtacgttgacctggggcactgtataagggattctgcacgtgagggtgatttgccaaggccaaaagaccctcagttttaagtaaccctgggataaaggtgaggtgagccaggagtggccagtgaagaggagtcagtg

SEQ ID NO: 21997 - DNA, 573 bp, Homo sapiens
aattatctctaaacagggtactcggtccattaatgagtgtwtgtttagcaggcgtgtttttctgtctctcctggtgaaagttcttgtctagtggccagccatgaaagtgagcctcacagatctgggactgcgaggagcccagctgtggtactacgaactccatacctgtctgcatggaggccatgcttcccataagtggttcctagccagtgatggagtggtagggtcacttacccagcacagttcctgcaggctgctggactcctgcgaaggtggattcccccatggctctgctcatctctcagatgaacaagttctggagatctagcgtacagcacagtgactatatctaataatactgtattgtgtacttgaaatgtgataagagtagattttaagtgttctctacacacacacacacacacacaaatggtaactataggtggtaacagaaatgttaattaatttgactgtagcaatcattatataatgtgtatacatatcaaatcatcatgttgcacaccttgaatatatataatttttatttgtcaattaaatattttaaactaaaac

SEQ ID NO: 21998 - DNA, 590 bp, Homo sapiens
acggatggatgggtgcagcaaactaccatggcacatgtatacctatgtaacaaacctgcacattctgcacaagtatcccagaacttacagtataattttttaaaaaagaaaaataaattaataaaagaaattctgaaatcttgagattagaatacacattacatggatgtgtgcatgctagaacaatctatgtacctgagcattctatgtatacctatgtaacaaacccgcacgttctgcacacrtatcccagaactcaaagtataatttaaaaaaagaaaaataagaaaaataaatctatgaaaaaagaaattctgaaatcttgagattagaatacaaattacatgcatctgtgctagaactatctatgtacctgagcattctatgcccagcaatgtggatagacatcagtttatagaacagaaatgggttggcacggtggctcatgcttgtaatcccagcactttgggaggccgaagtgggtggatcacctgaggtcaggacttcgagaccagtctggccaacatgatgaaaccctgtctctactaaaaatacaaaaaaaaaaaaaaaaaaatagcctggcatggtgg

SEQ ID NO: 21999 - DNA, 516 bp, Homo sapiens
tggctaacacggtgaaactctgtctccactaaaaatacaaaaaaaaattagccaggcgtggtggcgggcacctgtagtcccagctactcgggaggctgaggcaggagaatggcgtggacctgggaggcggagcttgcaatgagccgagttcctgccactgtactccagcctgggtgacagagtgagactccatctcaaaaaaaaaaaaaaaaaaaacttatttgatttttaaattacaatacgtacatatgtacatatttgtgatgaagtraaataatagttaaggattatgtgcaatctcagaatcccataataaattctcaatagctacaaaacatttcattataaatatgtcttattttactatatatctaactcatctaacattttttatcattacatgttgtggtttaatgaatatccttatgattgtttcttagaagtaattattatttactgagaaccctttttggttttttttgttttgtttttttgttttgttttattttgtttttg

SEQ ID NO: 22000 - DNA, 516 bp, Homo sapiens
tggctaacacggtgaaactctgtctccactaaaaatacaaaaaaaaattagccaggcgtggtggcgggcacctgtagtcccagctactcgggaggctgaggcaggagaatggcgtggacctgggaggcggagcttgcaatgagccgagttcctgccactgtactccagcctgggtgacagagtgagactccatctcaaaaaaaaaaaaaaaaaaaacttatttgatttttaaattacaatacgtacatatgtacatatttgtgatgaagtgaaataatagttaaggattrtgtgcaatctcagaatcccataataaattctcaatagctacaaaacatttcattataaatatgtcttattttactatatatctaactcatctaacattttttatcattacatgttgtggtttaatgaatatccttatgattgtttcttagaagtaattattatttactgagaaccctttttggttttttttgttttgtttttttgttttgttttattttgtttttg

SEQ ID NO: 22001 - DNA, 518 bp, Homo sapiens
taattaaataagtaaatagctaamcctgctgacgctactgcatgagagaattccagggagagcttggaaactgagcatctctttcggtggtatcttctgctgatccttagttactaggttttccaaagtcctaaaacctgatgtcagcaaccagagctgtggggacagaggaaaagagggaggtggcttagtaggatgagtgtccccaggaggggctgagagtgtcactgggcacacagaagctctgcaaagggatggctctagccctgcctgagcggaccaaagagaccactgtctatgttgagctgaggttggctccccacaagccttccgagaaccttgatctgctcagataaaccccttccttagccctctagaataaaaaggagagagcatcttattgtaggctgtaggcaggggtgggtggaggagctgaattgggcccactttaggctgggcattggatcccagtttcaccagtgtctttctacattgtttgagctctcccagattgtcag

SEQ ID NO: 22002 - DNA, 518 bp, Homo sapiens
taattaaataagtaaatagctaaacctgctgacgctactgcatgagagaattccagggagagcktggaaactgagcatctctttcggtggtatcttctgctgatccttagttactaggttttccaaagtcctaaaacctgatgtcagcaaccagagctgtggggacagaggaaaagagggaggtggcttagtaggatgagtgtccccaggaggggctgagagtgtcactgggcacacagaagctctgcaaagggatggctctagccctgcctgagcggaccaaagagaccactgtctatgttgagctgaggttggctccccacaagccttccgagaaccttgatctgctcagataaaccccttccttagccctctagaataaaaaggagagagcatcttattgtaggctgtaggcaggggtgggtggaggagctgaattgggcccactttaggctgggcattggatcccagtttcaccagtgtctttctacattgtttgagctctcccagattgtcag

SEQ ID NO: 22003 - DNA, 539 bp, Homo sapiens
tgggctattctttctttacctctttctgtacttgcaaatgttctaaaatagtcatataactttttaatgatcaaagggttttttttgtttttgtttttgagacagagtttcattcttgttgcccaggctggagtgcaatggcgtgatctcggctcactgcaacctccgcctcccgggttcaagygattcttctgcctcagccttccaagtagctgggattacaggcacccaccaccaagcccggctaatttttttttttgtatttagtagagacgcggcttcaccatgttggccaggctggtctcgaactcctgacctcaggtgatctacctgccttggccttccaaagtgctgggattacaggcgtgagccactgcacctggccaaagttttttttttcttcttttttttagtattaacaactttgaccaggaaaaacaaaccctgcttttcctttacagtctctcgtcaggtcttcgccacaaatctctgtccagaggatcgtggctgaggcaccatggaatgctgctgttctactg

SEQ ID NO: 22004 - DNA, 592 bp, Homo sapiens
aatgggtttccagacttttacaagcagaaacccttatacatgtgattatatgctgtccgtcaacatgtaaaacaggccaagcgtggtggctcacacctgtaatctcagcgttttgggaggccaaggtgggaggaccacttgaggccaggcgtttgagaccagtctgggcaacatagcaagaccctatctcttaaaaaaaaaaaaagaaaagaaagaaagaaaagaaaaagaaaaagaaaaagaaaaaaaaaagtaggccaggcacggatcacctgaggtcgggagtttgagaccagcctgaccaacatggagaaaccccatctctactaaaaatacaaaatttgccgggcgtggtggcacatgcctgtaatctcacctactagggaggctgaggcaggagaatcgcttgaacccgggaggtggaggttgcagtgagccgagatcgcgccattgcactccagcctgggcaataagagtgaaactcagtctcaaaaaaaaaaaaaaaaaaagtgaaacacagaaatgtgggaygttgtttttgacacagaggtggcctccattcctatttttcttcaagagaaccatgaagctc

SEQ ID NO: 22005 - DNA, 627 bp, Homo sapiens
atatgaactcagggttttcaattaaaatacagtgcctaaattgagatggggaaatataaagtacaaacatatcaaagatttagtataagagagagttacatatctcaatttttatattgattacatgttaaaatgacaatatatgtattttggttttaagccatcctaatagggaaataagtattattaaatgtgtgaggaatgaatactgatacatatctattgagaatatacattagaagagttttctggaagattttttgggaatgcaaagcaaaaatctaaaacacgagtacttatttatcaagcaattttgcatgtagctttatgttatagagatatacatatcacaaaaaagaacatgtttattacaatttatttaaaatagcagcaaactaaatctctccaaatagaagagatattaaattaatcatagtataatcatacaatgaaatgttaggaagtcattaaaattacaaatgtatgtgtgttaatatgtgaagggagtcatgaattttaagttagagaagttaataatmaaatggtatatacctgtaacatcatattattaaaaaatttataaaatataaataatgtatgtttaaataagttcatagaaacatttcc

SEQ ID NO: 22006 - DNA, 627 bp, Homo sapiens
atatgaactcagggttttcaattaaaatacagtgcctaaattgagatggggaaatataaagtacaaacatatcaaagatttagtataagagagagttacatatctcaatttttatattgattacatgttaaaatgacaatatatgtattttggttttaagccatcctaatagggaaataagtattattaaatgtgtgaggaatgaatactgatacatatctattgagaatatacattagaagagttttctggaagattttttgggaatgcaaagcaaaaatctaaaacacgagtacttatttatcaagcaattttgcatgtagctttatgttatagagatatacatatcacaaaaaagaacatgtttattacaatttatttaaaatagcagcaaactaaatctctccaaatagaagagatattaaattaatcatagtataatcatacaatgaaatgttaggaagtcattaaaattacaaatgtatgtgtgttaatatgtgaagggagtcatgaattttaagttagagaagttaataataaaatggtatatayctgtaacatcatattattaaaaaatttataaaatataaataatgtatgtttaaataagttcatagaaacatttcc

SEQ ID NO: 22007 - DNA, 507 bp, Homo sapiens
aggcaaaaacaaaacaaaacacaaaaacaaagaaggcaggactcaagtgaaaagacaaagggtctgcctctccaggcctctgaaaagakgaaggcaagggtgttttcactactgttgagtcattccaaccttaatcaaatgtctgcacttcaacatagttctcccacctcctcaaggatgttaaaaatgcacaagattactgtctgaagatatgtgtgaagatagctgcctgtagtttttgtaatcttaataattcaataaaaatccatacatcttgggtcagacttaccaaatggttttaagtcatgaataaaaggatttagaaagatgttcacctgaaatcatctcacaagtttcttcttcatttcactcactacttcttggggaaaaaaaaaatgaacattttacttttactgatagttaattgttgtcagaggtaatatccacacacacaaggaattttaaactaaaaccaaacaaaatctctcaaagctgatactgggtata

SEQ ID NO: 22008 - DNA, 507 bp, Homo sapiens
aggcaaaaacaaaacaaaacacaaaaacaaagaaggcaggactcaagtgaaaagacaaagggtctgcctctccaggcctctgaaaagatgaaggcaagggtgttttcactactgttgagtcattccaaccttaatcaaatgtctgcacttcaacatagttctcccacctcctcaaggatgttaaaaatgcacaagattactgtctgaagatatgtgtgaagatagctgcctgtagtttttgtaatcttaataattcaataaaaatccatacatcttgggtcagacttaccaaatggttttaagtcatgaataaaaggatttagaaagatgttcacytgaaatcatctcacaagtttcttcttcatttcactcactacttcttggggaaaaaaaaaatgaacattttacttttactgatagttaattgttgtcagaggtaatatccacacacacaaggaattttaaactaaaaccaaacaaaatctctcaaagctgatactgggtata

SEQ ID NO: 22009 - DNA, 571 bp, Homo sapiens
gaggtgaacgggggaactggaaagtagtgaatataaattaagtcaccttttttattgagaatccataatattgcctaatattgataagcttgtaaacatatatattatctatatatayaggttatatatagtctccctttttatcttatatgttatatatcttaatatatatctatatattatatatattatctccttttattttatatatatatatatataaaatctccctttttagtaataccaatagtgttgccatgaacatacatgtacatatctccttgaacgtgtgtaagagaatctttacacagcttaaagtggaattgcccctgggttgtaggttatattaattttcatcatagcattataacatatattacatatgtaatagccatgatgataatcaagaaaagaagtataagtatttataagtaacaccatttaaaaatgtattcttctgaactgtgaaaagggaaaaggctgaagacttatattgtatgctttgatttgttaccatgtacatctattattttgagaatttttatgtggtagaataatcatttttagaaaa

SEQ ID NO: 22010 - DNA, 571 bp, Homo sapiens
gaggtgaacgggggaactggaaagtagtgaatataaattaagtcaccttttttattgagaatccataatattgcctaatattgataagcttgtaaacatatatattatctatatatataggttatatatagtctccctttttatcttatatgttatatatcttaatatatatctatatattatatatattatctccttttattttatatatatatatatataaaatctccctttttagtaataccaatagtgttgccatgaacatacaygtacatatctccttgaacgtgtgtaagagaatctttacacagcttaaagtggaattgcccctgggttgtaggttatattaattttcatcatagcattataacatatattacatatgtaatagccatgatgataatcaagaaaagaagtataagtatttataagtaacaccatttaaaaatgtattcttctgaactgtgaaaagggaaaaggctgaagacttatattgtatgctttgatttgttaccatgtacatctattattttgagaatttttatgtggtagaataatcatttttagaaaa

SEQ ID NO: 22011 - DNA, 638 bp, Homo sapiens
tgcgcccggcctctctcatttattttcaatcactcctaaccctgccttccttcccacttctgcaccctcaaaaagaaatgtacagaataatgcaagcaattgccgctgttttagcagttttgctcatagccactgcctctctttggaattatattctatcccattcaccaacatcactgaactgtccaccaaggtattgtgttcggtccctatttcactcagaaatatattgtacattttccctccataattccatccacctgtctgaacaagtgaaaaaaaaattgtgccacaatttctactgtcttgacaaagattacttctgatttgcttccccaccccagataagctaaagagagctaaagggagtggaaggattagaagaggaaagaaacttcaatacggtactcaaagtsatagattttgcctaaactggtgtgtgcaaatattttaaactattttattttcaaaatggatacttgtaaacatcagcggaaattttgtcatgaatcccttttaggcagaagatgtttataaaatgaattatcttaatttaagggagctattgccctcaggattttggtaataacaaccgtagctgcttctgtacctaacaaatggttatgtaaaaacaatta

SEQ ID NO: 22012 - DNA, 518 bp, Homo sapiens
actgactttctctctctttccccttctgtttctttgaccatctctctttaggcctaccagttttggcaacagaagttaccggtcaataatcagcaagttaaaaagtatcggatgcgatttcaattatcagacttggtagctgcctcctaggctgtgggtatcctcaatgatctgaattacttctgtcatcttgaggagtgagagtggaaggaaatgtttggtgtgggttcctgggccaggaggttttctccctggggttcccattccagaacgctgtcctcattcatggttgctgttcacctttcaccactccctgcattatttcatgtgggcgaggaacgwgtgtggaaatggggattggggactaatagacttgtctcttcaccaggtctccccacacttccagaccagaaaacactttttagttatagaaatggatatatcggctgggtgcagtggctcatgcctataatcccagcactttaggaggccgaggcaggcagatcacgaggtcagga

SEQ ID NO: 22013 - DNA, 518 bp, Homo sapiens
actgactttctctctctttccccttctgtttctttgaccatctctctttaggcctaccagttttggcaacagaagttaccggtcaataatcagcaagttaaaaagtatcggatgcgatttcaattatcagacttggtagctgcctcctaggctgtgggtatcctcaatgatctgaattacttctgtcatcttgaggagtgagagtggaaggaaatgtttggtgtgggttcctgggccaggaggttttctccctggggttcccattccagaacgctgtcctcattcatggttgctgttcacctttcaccactccctgcattatttcatgtgggcgaggaacgtgtgtggaaatggggattggggactaatagacttgtctcttcaccaggtctccccacacttccagwccagaaaacactttttagttatagaaatggatatatcggctgggtgcagtggctcatgcctataatcccagcactttaggaggccgaggcaggcagatcacgaggtcagga

SEQ ID NO: 22014 - DNA, 977 bp, Homo sapiens
tggagtgtgcattatttccaaaacattatgctacccctccagagtaacattgtattaataatttatgggcaatggaggcatgttataacacattgcagtgtgtttgttcctttggatagctctaatatttttctgatttactgaccaaacatttagagtaagcaattagcaaacagatataaataattattctggtatctctaaaggaataaattttaagtaaataccacacaccttaatgatatttttacaaccatgtctctcaattctggatgactaatacataatttgatgtggttgaatcttaatatattaattgcattaatataagaataaattctacaatactctctcaaatttcttcaaacacttcaaataattaaagcagtctctaacagttttttttggtcatattagaccagacaagcaattgagaatataatttcatttaccttagccatcttaaagaaatttggattaaattaatgatggaaaaaaaactataatcaactgaagttagttttatttcttactcaaaatctacaggtgccatgaaattgctgtctgacttgtaactataatcttattagtataagattattagaaggaaaagaatagaaaggcatgtagactagcccatttatttaaaaagctctgctaaattccagtgcttatacctacaatacatatacgtacgtgtgtgtgtgtgtgtgtgatctaaccaaagaaactataatgccaaaactatatgaaaatacctgacagctggtagctaatggtaaaaggaaatcaccaaaaaataaaaaataaataaaaagtaaacactgcaggctgggtgtggtggctcacacctgtaatcccagctctttgggaggctgaggcaagcagatcacgaggtcaggagatcaagaatatyctggctaacacggtgaaaccccgtctctactaaaaatacaaaaaattagctgggcgtggtg

SEQ ID NO: 22015 - DNA, 526 bp, Homo sapiens
ttttttttcttttaatgggagcttacctttagctcacacccagctaataaatgctgcaaatgtgttttggagacagcatgctgattctacgtattatttaagatgctgccttacccagagtttccattagcaaatgctttcaaatatctgcaacctcatctgttctgtacagactcaccaacagttcttcccatttgagtgccatgctttctagactgccgcactttatcctacaagggagcagcctgataattgcatgaagcatgcatgtcaagaggctgagcttccagtatgtggactagagtgtgaccttggattaacattaaatttagctcctagttaccagcaagccattcagacatgaatcacaattaaagacaagtaccattcaaattattcacccatttttgactactgattatcagctaggaatggggttgacaatgtatagaatacagagaataagatattatgccatttactattaagaactgtacagatayactcagtgttagaaataagtgac

SEQ ID NO: 22016 - DNA, 536 bp, Homo sapiens
tgaaggagtttaaaattattgaaggttaataaacctcataggtataaggcttctacataaaacayttactaagattattaaactgaagaaaagccactgttgtccaaaatatctagataatttagcaggcaaaattttttcttcttagagtcttggtttattgcctctctaacttcactccaaagtttcagtataaaaattttaaaatgtaatgataaaaatatcacaattgtttttgttcttggtaagtccaatttaagaatgcatccacattaataaaaaagcaaaagaaaatgctcatactttggtatgcttgaaatatcttcattcataaaactaaaagtgaacatgtaaatggtatttaaacaatgaatatttaagcttatttcattttatattagcaaggtctatccccaagtcaactgaaaaacatttgacattattttgtgttttaagaactataaagccaggtcaggccagccatacggtggctcatgcttgtaatcccagaactttgggaggctgaggcaggagga

SEQ ID NO: 22017 - DNA, 562 bp, Homo sapiens
cagaatggtttttactgtagaaaaatgttgtatattataattatgtcctcggcccacctataagtcttttcattcattaggcaactgaaatgcacaatttatggtatgttggaaacaaattgttgttatacatgtacagcatccccatgagagatggggacattgggaagactggcatacttctagcagatcttcagagggaagatccattgaaaatggagagagggaagacacagatactgggtcaaaggggcaggaagcagggaaccctgcaaagggagttatttctagccctcaatgactcctggagaagcggggggkgggggtgggggttgagcaggcaaggagcaacacattctccctgggggcccctggaatcctgccagcaggagactacatgaaccccatggacaactgagctggcagagagagctgcttagagaagtagtatgggcagaactccagccattgtggaacccagagagtttggtgtgggagcatctggagtggagcactactagggacacccatcccccagggctgccttgcacccttaggaaac

SEQ ID NO: 22018 - DNA, 578 bp, Homo sapiens
tccaatctcctgctgatgcacaacactggccatgtgcagttggtagtcagtggtcaagggagcccaagagtgtggttcaggttcagcttccccagggaatagcagggtggacaaagatagagagtggatttggataggcaaatagaataatccagtaaaaacactgaaggctagactttgttgttaatacctgtattttttggtttcccatcccacacatagtaggtttgcagcagttgacttggccatggatttctttgggtaaggagatgatctttgatccctgtattccagggcctatcccagtacccccaaaagatgctccataaatgtttatgaaatgactagtgaatgaatgaatgaataaatgaagtgagctcagtgggaattttcccttaattttgctcactgtttcactccttggaagtagccacttctctgcttcacttgtaggccagwtccagttattaaatttctaaattatccttctgtctatggggctgactctctaatgaggtcttgtaagtctttgcttccatcctcggagtccagacaaggagctcttgcctcaggcacag

SEQ ID NO: 22019 - DNA, 545 bp, Homo sapiens
acagatgataaactttcaggtagcacagaggatgaacactgctgagaagaaaattaaacgagatcatggagccatagaatggagagtgtttatgtgggggagggggtattttaataggaaactttgactttgtacactactaatctctaacaaatcacacttcaaacctctaatctgtgtcctcccccaccccacccctagatttactcaggcaggtctagtcycagaaactgaaaagttattttctttccacttcaaataatggctttgaattatttttccttctcactccagcacttgatactctcatatgagctcccctaccacctctgttctcagcagatggtatcccactgccctggattcttctcccacagaccctccattctaaatattctggattagttaggactttggaatatccaacaaatgatcacagtaagatcccagtggttaatgatggtttcaggaagatagaccccttgcatttaacacacacacataaaaaatgctttcatagtaactacatttatatagcttcatca

SEQ ID NO: 22020 - DNA, 675 bp, Homo sapiens
tgggataagccgaacatttttcacttctgattgttgactgtgtgttggttcctctctgttttcccctccactctccaccctttgccttggcttgtgctctgggaggctgacgcctacaactgtgtcatctgactctccttgtcctctggcttccaattgggtttggctratggctggtgctgactggggattagaaggcaggaagccaggtcagcctatttatcccactgtgactccttgttgggacatggttttgcagtggctgcattcctctttgccacgggactttcaagtgttcccttctccacagctgtggctctcacaggggtccagtaacaccatcaccacttgcttctacgcgtctatgagtggcattggcttcctgctgtgcttgtccctggttcttcaccactctttgccgagttcccttaaggctgttgcacctctgttaatagtccatttattaaactcacttcaattaaatcctttgtgcaaaccagctatttcttgcaagaccagatacaagtggggaaatattctgacctgatactactgttctcctagccttttgttcatgccttctgaagacatatgatgaatggaggaacggacgcagtgtgagaaaatcacaggcaggagggatgaactcacatgctttcccttcccactttctct

SEQ ID NO: 22021 - DNA, 627 bp, Homo sapiens
cctctgagggaactggagagattagcttctgctctcactgtggggatactggctgtggaagcagccctctaccagttctccaattcaagaggctctgggtccacctgccccacgtgggcagggctggggcagtggaaggtttcatttgtattggtccatagcctcttcctttgagaagaggcaggaagaaactctcttactaagggaacagagtaagacactggactgacaagcagacacaaggataagaggaaggtwtctgggagaatggggagtgagcagagcatctttgagaggcattccagcaaaatgtctaattcagtacagcctcttttgtgctacgtggggagcatgggagaagaagagcatgggaagaagagtaggttagacctaggcatgacttctgttccctccacactatactgctttgtaagatctgcctgatcctccatttaaattttaaatacttctgtgaactccaagtatctgagacaggtcccagtcaatttggaaagtttattttgccaaggttaaggacatgtgcccatgtcatagcctcacgaggtcctgacgacatgtgcccaaggtggttggggcacagcttggttttacacattttagggagac

SEQ ID NO: 22022 - DNA, 556 bp, Homo sapiens
aattagaaataatatcatcaatgaaagcttgagtgactcttctgcttgaaaaggatagcctccttactttgaagaacaaggtccaatttcttgccactgtgaaatgtaaaacaatctcttgtacttctccaatacagttttgaagggaatttcttaaatttgtgttaggcaaagctgtctgccccatcacagccagtctctgcttcaatagaacttttaaggctggaaacaccaatcaaaactgctataactaaaagttagaaaacaaataaacagcaaacaaaaaagattgtaatgcttaaagcccaaaagattctcccttcsaaagggataaatttttattgaactaatatcttcaaggtaaatcagactccttctgtgttccttaaacccaaaggaaaagtacagtttatataccccaactaagagctactacttgttggctggagactgtaggaaaacagtccagaatatagaaatactgacaagattttattaacattatcaggtgatggtaaatgtaaaacattaacatatgataacgtatagaattaaa

SEQ ID NO: 22023 - DNA, 624 bp, Homo sapiens
attatttatgtgtatgtgtgtgtgtatccacagttcatctttaaaagactgtaaacgcttggctcttkttaatgtatctgacaaatttctttgacaaatacttgctgaattgctaccacgtaccaggcactgtggtaggcagtgaaaaagtaaacatgattaagacacagatagcgccttccctgtagtcaaaatcccacttattcctaaaggcccagtatagatgcagccacctcttcattaatttctttcaacaaggatttttagtaactgtgaaggatataagagtaaataagtcatggttcttaccctccaagaatctggtacctacttaggaagatggaatatgtgcactaaaagataagagagcttaccttgtaatatttttttgtgacaaatattatttaattgatagcagatccttggagagttgacagaaaaacagtcgctctgtggtagattgatgggtgggagaaggtgggactttgagtatctgaaggaggtcataccttgctcagtgagcaaggcagcagcatgagcatgtttggaggacagtgggtagctgtgtgaatggtttttatggtagatttatatgaaatgtagtatatacctttatcttaagat

SEQ ID NO: 22024 - DNA, 504 bp, Homo sapiens
actacaagaaacagtgcagaaaccacaaaaactgattaaattaaataagtgctcatgaatgatgtaaatatatatacattatgtgtatatacacatatatacatatacactatatagtatatatgtagtatgtatagtgtgtatatagtgtgtgtgtacagtgtgtatatagtgtgtgtgtacacacatagtgtgtatatagtgtgtgtacacacatagtgtctgtagtgtgtgtacacacatagtgtgtatataktgtgtgtgtacacatagtgtgtatagtgtgtgtacacacatagtgtgtatatagtgtgtatatagtatgcacatacacacatagtgtatatagtatgtatatacacacacacatagtgtgtatatagtatgtatatacacacacacagtgtgtatatagtatgtacacacacacagtgtgtatatagtatgtacacacacacatagtgtgtatatagtatgtacacacacatatagtgtgtatatagt

SEQ ID NO: 22025 - DNA, 504 bp, Homo sapiens
actacaagaaacagtgcagaaaccacaaaaactgattaaattaaataagtgctcatgaatgatgtaaatatatatacattatgtgtatatacacatatatacatatacactatatagtatatatgtagtatgtatagtgtgtatatagtgtgtgtgtacagtgtgtatatagtgtgtgtgtacacacatagtgtgtatatagtgtgtgtacacacatagtgtctgtagtgtgtgtacacacatagtgtgtatatagwgtgtgtgtacacatagtgtgtatagtgtgtgtacacacatagtgtgtatatagtgtgtatatagtatgcacatacacacatagtgtatatagtatgtatatacacacacacatagtgtgtatatagtatgtatatacacacacacagtgtgtatatagtatgtacacacacacagtgtgtatatagtatgtacacacacacatagtgtgtatatagtatgtacacacacatatagtgtgtatatagt

SEQ ID NO: 22026 - DNA, 504 bp, Homo sapiens
actacaagaaacagtgcagaaaccacaaaaactgattaaattaaataagtgctcatgaatgatgtaaatatatatacattatgtgtatatacacatatatacatatacactatatagtatatatgtagtatgtatagtgtgtatatagtgtgtgtgtacagtgtgtatatagtgtgtgtgtacacacatagtgtgtatatagtgtgtgtacacacatagtgtctgtagtgtgtgtacacacatagtgtgtatatagtgtgtgtgtacacatagtgtgtatagtgtgtgtacacacatagtgtgtatatagtgtgtatatagtatgcacatacacacatagtgtatatagtatgtatatacacacacacatagtgtgtatatagtatgtatatacacacacacagtgtgtatatagtatgtacacacacayagtgtgtatatagtatgtacacacacacatagtgtgtatatagtatgtacacacacatatagtgtgtatatagt

SEQ ID NO: 22027 - DNA, 575 bp, Homo sapiens
tgtttgtcttcttaaggccattgttgttttggagctttggttacaagcagctgaacccaatcctacctgaaattccctacttcaccacctaaatcaagaatgtcctaaaacctggcttttatttgttccttaaagacaagtcaaatatttttgtttctagggtctgtgttctgtccatctgtaagaataggtgattacacaccattatgagatatagcaaagcaggtatgaatacatttttttgtttatttgtttgagaggtgggaagggagagaattaagaggaaaatgaaagaaactctggaatattagatgatacttgagaactaggaaaggaatcagggtttgtagtttctgttartgatagatatctgatcccactggaaagcaatgcctttgtggatgcaagaattttacatggtgatggccatgtggtgcctatatagactggaaactatatcctatcatcttgggtgcttcagtagtgtccccatggctgaacttgggatgaagggagaagaactatgggtggaaccatttcttttactatataccaaaagcatcagaaaccaaaat

SEQ ID NO: 22028 - DNA, 516 bp, Homo sapiens
aaccttgagtggggagttatactcccaataacagtggtcgaggtaattaggcctgaatttcccacagaaaataagctggcaaacatgttgaaaaaaaaaaaattattcccaaaagcaccaaagagctaaggagagtaaagaattggggatcaaactttaggagaagcaagaaacaattcctgatcctagcactcaaatctgcttttgyctggaggcattttgctgatgaaagacacgcgtggaccgggtgtggtgcctcacacctataatcccagcattttgggaggctgagtcaggcagattcctttgagctcaggagtttgagaccagcttgggcaacatggtgaaaccctgtctctaaaaaaaatacaaaaattagctggcatggtggctcacacctgtagtcccagctacttggcagactgagcctggagaattgcttgagccagggaagcagaggttgcagtgagcagagattgtgccactggcatatgccagcctgggccacagagtgag

SEQ ID NO: 22029 - DNA, 576 bp, Homo sapiens
ttacaattgccctgaaaaactacaaagcctttccatctccccttcatcatccaagccttgtgtgttttgtgagggtccctgtggagtgggccattgcctgccttccagcatatggctgacccctgatgagtgtttctggagcactttgtgctgtgttgtttgccactctgcagtaccacttggcgttgacttccattttcccctgtggacctggagcttccctgagacagagactgttgtcttcattttcctaccctcagagcctggaacacgtaatcactcagggagcatatgacgtatacatctgagtgtacacctggagtatctctggcaacactctgttcactagcacgttcgattatccagaaagctgccttcctgtcttgctcartaacacctcatgtgggtcctcgctgtgagccgtctgtgttacctggggcaccttgcttcctctgagatgactgagctgatgggagagaaagatgagtaatttcatatccagggatgagatagatggaaaaaccccatcccaagttttgtaataagattcactatacaataaaatgctccctggga

SEQ ID NO: 22030 - DNA, 533 bp, Homo sapiens
acgccatcactgtgatgctgagctagcatctcaaggtaccagtgaagagcagaggacctggaagggtgctgagccagggatggagggctgggagcatctcaaaggtaagggacactgtcacacacacacacatgtacacacacacagagccggggaaaggcgctgtcaacgccacagtgaatggctgccatcagcaggcagaggggaaaagccatgtgggctctggctgctcccacatccccctcagggggacyctagcagtaagggaaggggcacctagagtaagtaagaacctcggccaatgcaaggccaaaggagactcccagagaagagtctaggagctccccagcagctagggtaagccttctccaaaatggtttctgcttcaggtgaaggcaacaccgacaacagcttcaaacgaaaatcccagcatgaagacattccaggagactggcagacatgacttccagatgttccatgtcaaggagaaaaatgaggccctggaggtcaaatccaggtcctgtctactcact

SEQ ID NO: 22031 - DNA, 1028 bp, Homo sapiens
aaagttctctccagaaaatacttgaggaaaagattacagccacacagaagctctccatttagtgcgactttgcattttgctgatgtttcttgagttctatgccactactctctctcctcccccaggaccaaagggcatatattttgctttcgatgacttgtgcagttgttgatttccagcaagcttctgactgtagtttcacactgatgatataggattaccatttgatggtagaataaaagcagtatgatgtattggaaagaagactgggtgaggatttgaaagctgtggattctaggcccgttgctgatcctaggtatatttttggtctacttcgatgactgtatgtctacctcagtgactgtatttggttataaggttgtgttactgttataataattgcaggtttactaatcaacctgtctatccatttcaaagggaaattgttattttggtgtcaattgcagggtatgatggggaaagactttctctgttcaatttcagtttctaagaatacactgttgctaaaagtagtgataaactttatatacaaggtgtgcattttaaccatcacagccatattatactgacttactttctaactctccatcttagatgtagtcaacatattgatcataggttttaaagtatccaaggacttgcccctctttctggatagggagatcttcaacctgttgaccacataattagatgaaatatatattctcatgtaacaaacctgaygccagtagtgttaggcagctcctaagggagtcagaagctgcttccagcctcgtaaataatgagcacataactaacagaacctgatcttcccagcagaaataagtcagcctacttcacagtatgcaatatggtcaatgaatcagtggttgctgagtgaactgcacttcccccagctggaggagaaacaagcttttttaggagcgatagagcatgcaataggatgtagatgggaaaggaatctgatgaattgattttcactggaaaagtctcagagattcttcacc

SEQ ID NO: 22032 - DNA, 549 bp, Homo sapiens
tctgaaaatgtaatagctgagaacaatgaccatttatcatctttcacaattcggtgtaggactggtctcagctgggtagttcttccgctctgtgtggtattgactggggctgtcatcttccgaaggcacaatgagacggtaatgtctrtgatggctcaattacatagctggctgtcagtgctggctacaggacagagctcagctcagctgtcagccagggctccttgaatcctcttgctagctttctacatggattcagctctgcatagcatggtggctggttccaggagcagaattccatctacgagaaagcagaagttaaagaggcccacccttgaaaattacaccctgtcgcctctgatgcatcttattgatcaaaggaagtcacaggaccagctaaaatttaaggcaaagggaaacagattacatcttttgcatgagcagaggcaaaatacaaaaatgaaataaaatatgcccatctttaatacacaatgtacagaaaggaatgtatctgggatgactgtagaaaagaaagtagtcttatcagta

SEQ ID NO: 22033 - DNA, 582 bp, Homo sapiens
gatttcttgaggataatgataacccaggaaatatttaaattatctgagctgagctacttattcatcttcagcaactcccatcactagaaatgcttcacttctcattcaagaattagaggactgagctttagttccatttctccttctgaataagtcataaagacatgcctcatttgcccataggccatatttccagccatccaatccacacaaagtgatcgaaattggttaaacagatttctaagaacaamaagagctctcacaaatcctgtacccttttgctttttggtgagatatgacacaacctttatagcagaggagacttaatgtggtttgtaaagttaagcttcttaggagagaatactagaagtagtggaacagtgagggtttctgcatatagacaatgcagtataatggttaaaatctaagttaacacaatgcataagtagcagttccaagtccaaatgtgcttcactgctctggacccaatttccgtatatgtaaaatggagatagatactttgcagggttgctgtaaattctgtaaactctttatatcacatagcatagtgccaggaaacag

SEQ ID NO: 22034 - DNA, 722 bp, Homo sapiens
tgagagtacataagagccagatgtatcctgtgtacttgtgtgacaaccgtaactccagttgtatccaaacatttcactgaatttggccaaacagccaggaattttagaaacttctgggacaaatatattcatctatagcttctgtattaagttctttcatcggtaggcaagtttggttaaggtccgtgagctccttttgacagagtactacactgatacagcttctatcatcctaagtttgctctctaaagctaaagaaaagcaaaatcattactcatactgaaaattctgtcaatttcttcaaattgtgactttatttctctaataaagccttcataaatctgatatcattgaatgcaacacaattcggcagtagaaatgactgggcacaaggtaataactgctctattcagatgtctgacatgagtctaaatttctatacttcctaagaaaaatcagcaatgtttttgttttctccccctgcagtktcatatttagggtatacagatgtcctgtcacagcagttaaaaagtacagtcttgtgagtcactaggggtctgacaagtagagtctcaaagcccgataattacaaaaagtccttgatttgaaaagagctcatttcatttttttttccagcaatttctacattgttgcctgcattaacaaaagaataaaaatcataaaaattaagcttctatattctgttcagccacataagtatc

SEQ ID NO: 22035 - DNA, 573 bp, Homo sapiens
tcaggcaaaaacaatgcaagtttatgaatttattgccaccatgttttatttgagagcttgaactcttaaagattgagagaaaagctaaaacatttttcttcaagacagctacaagctaaggcttgttattaatagaggttacacttgaggygggaaaataggctgtgactctggccaacgttaagcttggagagaagcccaaatgaacagctttgaaagtagacaatctctccaacttctgtacaatagaggcagacatctctttggaaagcttaaatggtggaagaaccaagttgccaagtactagtcatgacagagcaatgtttccagcatgagagaatgttgagagagtcacagactcaatggctaatgtgtagaaactgcaagtagtgacctgagagttttaagcccttctgttagtaatggaacaacaatgaaagtattcaaagaatataaacatccaaacagagacacaaaaaaggtcatgaaaggaaaagtctactttctgaaatacaaatgaaaagatcaatatataaattcctagaagaggctagctaattcgagtgctcttgt

SEQ ID NO: 22036 - DNA, 573 bp, Homo sapiens
tcaggcaaaaacaatgcaagtttatgaatttattgccaccatgttttatttgagagcttgaactcttaaagattgagagaaaagctaaaacatttttcttcaagacagctacaagctaaggcttgttattaatagaggttacacttgaggtgggaaaataggctgtgactctggccaacrttaagcttggagagaagcccaaatgaacagctttgaaagtagacaatctctccaacttctgtacaatagaggcagacatctctttggaaagcttaaatggtggaagaaccaagttgccaagtactagtcatgacagagcaatgtttccagcatgagagaatgttgagagagtcacagactcaatggctaatgtgtagaaactgcaagtagtgacctgagagttttaagcccttctgttagtaatggaacaacaatgaaagtattcaaagaatataaacatccaaacagagacacaaaaaaggtcatgaaaggaaaagtctactttctgaaatacaaatgaaaagatcaatatataaattcctagaagaggctagctaattcgagtgctcttgt

SEQ ID NO: 22037 - DNA, 1470 bp, Homo sapiens
  misc_feature (1)...(1470): n = A,T,C or G
tgcataggcacaatcacataaatatcgcacaaaatatgtcccgaacagaaacccagaggtacaaaaacatatttcactttgtaaagaagtctgtgagaaaatataactctgtgattgtacagacacgtttcctgataatacattgacattcatgaacagtagattgcactgcagtttgtacacattttaagtttcataaacttctccttgattttcaaagagagtacaataccgtctactaaaactcctttttgtttcaactaagtatctcacatatattagtttataataatgtttctattattttttaaagtgttttccattcaaggaaaaagaagtaaattcctatgtcagagtaaccaaggtggttgaagaataggtattagccaaagaggtctagatggtaaaatcaatcttcaagcctcaaagaatctccgtgaacagagaggaatgccaggtgtcacacagctttccttcactctaattcattcttgactagagcctgtatgcctgttccagggacatttgaactcgtaaaggatttcttatgatcttcactaaatacattaagaagaatgccaaccagtgcccttttgtgtactgggacatgtagtcatgtgattaaaacaggtaacatgaactctgactttaaaatgtattgtagatacaaatgctctaagctaggaaaggttttccacatccacagtcaacgatgggaacctttcattcctcagaaataagccctttttaggtcatcgaaaaagagtacaactgctgcagctcatgatgcaatatcttcatgagcccagagcacatacaaatcctaagggaaccaccataatacaccgctaattcctggcaccggaacagatgaaacacactctatcctgcacatacctnnnnnnnnnnnnnnnnnnnnnnnnnnnnnnnnnnnnnnnnnnnnnnnnnnnnnnnnnnnnnnnnnnnnnnnnnnnnnnnnnnnnnnnnnnnnnnnnnnnnaagccccattcctcccgaggtactgtaacaaatctcttcatttttcccaccatacatgaatagctgtcccatatattcataaaacataagaatttttttcttgattaataaacttcattttttagagtagttttaggctcacagcaaaattgagtggaaagtagaagagttcccatagactccctactcccatacacacacagcttcccccactgtcaacatcctgcaccagaatgatrcatttgctataatcgatgaacctacactgacacatcactatcacccagagtccacagtttacattagggttcgataaaataattttttacaacttaaatcccccaataaacttaacattacttctctgggccatacatttttctgcatcagtaaaatgggataagaatatttatttggagctgggagtggtggtgcatgcctgtagtctcagcttcttgggaggctgaggtg

SEQ ID NO: 22038 - DNA, 1470 bp, Homo sapiens
  misc_feature (1)...(1470): n = A,T,C or G
tgcataggcacaatcacataaatatcgcacaaaatatgtcccgaacagaaacccagaggtacaaaaacatatttcactttgtaaagaagtctgtgagaaaatataactctgtgattgtacagacacgtttcctgataatacattgacattcatgaacagtagattgcactgcagtttgtacacattttaagtttcataaacttctccttgattttcaaagagagtacaataccgtctactaaaactcctttttgtttcaactaagtatctcacatatattagtttataataatgtttctattattttttaaagtgttttccattcaaggaaaaagaagtaaattcctatgtcagagtaaccaaggtggttgaagaataggtattagccaaagaggtctagatggtaaaatcaatcttcaagcctcaaagaatctccgtgaacagagaggaatgccaggtgtcacacagctttccttcactctaattcattcttgactagagcctgtatgcctgttccagggacatttgaactcgtaaaggatttcttatgatcttcactaaatacattaagaagaatgccaaccagtgcccttttgtgtactgggacatgtagtcatgtgattaaaacaggtaacatgaactctgactttaaaatgtattgtagatacaaatgctctaagctaggaaaggttttccacatccacagtcaacgatgggaacctttcattcctcagaaataagccctttttaggtcatcgaaaaagagtacaactgctgcagctcatgatgcaatatcttcatgagcccagagcacatacaaatcctaagggaaccaccataatacaccgctaattcctggcaccggaacagatgaaacacactctatcctgcacatacctnnnnnnnnnnnnnnnnnnnnnnnnnnnnnnnnnnnnnnnnnnnnnnnnnnnnnnnnnnnnnnnnnnnnnnnnnnnnnnnnnnnnnnnnnnnnnnnnnnnnaagccccattcctcccgaggtactgtaacaaatctcttcatttttcccaccatacatgaatagctgtcccatatattcataaaacataagaatttttttcttgattaataaacttcattttttagagtagttttaggctcacagcaaaattgagtggaaagtagaagagttcccatagactccctactcccatacacacacagcttcccccactgtcaacatcctgcaccagaatgatgyatttgctataatcgatgaacctacactgacacatcactatcacccagagtccacagtttacattagggttcgataaaataattttttacaacttaaatcccccaataaacttaacattacttctctgggccatacatttttctgcatcagtaaaatgggataagaatatttatttggagctgggagtggtggtgcatgcctgtagtctcagcttcttgggaggctgaggtg

SEQ ID NO: 22039 - DNA, 1470 bp, Homo sapiens
  misc_feature (1)...(1470): n = A,T,C or G
tgcataggcacaatcacataaatatcgcacaaaatatgtcccgaacagaaacccagaggtacaaaaacatatttcactttgtaaagaagtctgtgagaaaatataactctgtgattgtacagacacgtttcctgataatacattgacattcatgaacagtagattgcactgcagtttgtacacattttaagtttcataaacttctccttgattttcaaagagagtacaataccgtctactaaaactcctttttgtttcaactaagtatctcacatatattagtttataataatgtttctattattttttaaagtgttttccattcaaggaaaaagaagtaaattcctatgtcagagtaaccaaggtggttgaagaataggtattagccaaagaggtctagatggtaaaatcaatcttcaagcctcaaagaatctccgtgaacagagaggaatgccaggtgtcacacagctttccttcactctaattcattcttgactagagcctgtatgcctgttccagggacatttgaactcgtaaaggatttcttatgatcttcactaaatacattaagaagaatgccaaccagtgcccttttgtgtactgggacatgtagtcatgtgattaaaacaggtaacatgaactctgactttaaaatgtattgtagatacaaatgctctaagctaggaaaggttttccacatccacagtcaacgatgggaacctttcattcctcagaaataagccctttttaggtcatcgaaaaagagtacaactgctgcagctcatgatgcaatatcttcatgagcccagagcacatacaaatcctaagggaaccaccataatacaccgctaattcctggcaccggaacagatgaaacacactctatcctgcacatacctnnnnnnnnnnnnnnnnnnnnnnnnnnnnnnnnnnnnnnnnnnnnnnnnnnnnnnnnnnnnnnnnnnnnnnnnnnnnnnnnnnnnnnnnnnnnnnnnnnnnaagccccattcctcccgaggtactgtaacaaatctcttcatttttcccaccatacatgaatagctgtcccatatattcataaaacataagaatttttttcttgattaataaacttcattttttagagtagttttaggctcacagcaaaattgagtggaaagtagaagagttcccatagactccctactcccatacacacacagcttcccccactgtcaacatcctgcaccagaatgatgcatttgctataatcgatgaacctacactgacacatcactatcacccagagtccacagtttacattagggttcgataaaataattttttacaacttaaatcccccaataaacttaacattacttctctgggccawacatttttctgcatcagtaaaatgggataagaatatttatttggagctgggagtggtggtgcatgcctgtagtctcagcttcttgggaggctgaggtg

SEQ ID NO: 22040 - DNA, 631 bp, Homo sapiens
ttaaaacaaagttacgtttatctttgtctcacctttccctgaatttcagctcttytgcgatttaaatacaattctttcgctctcatgagttgcagagtctcttgagctagcattagcttaagtttttccaacctgggaattgctgtggcccaggcagcctggccaaatctcttcacatcctgttccatttctttttgcattcctgttggattatgaaaataaaatataattacacctcattaaaaagggaaacattgatcatgagctaattctttttttattgcttccatactacctgcagaacatcttttttaaaagaaattttgttttattaacttttttattattataaaaataatacatggtcattaatatacaattttaggtattcaatttttaaaaggacaataataagtcatgatctcacctagttgaggcaactgcttcttatattttggcacacttgcttccatattgtttctatgtctagctagacagacaggctcatatggatagtttgaccaaaaaaccaggattaccattctgctttatatcttgttgattctgcacaatatatcagacactcttgccatttataaaaaaaatcaagaatcatgcttaatagctatgt

SEQ ID NO: 22041 - DNA, 532 bp, Homo sapiens
ggcatggtggcatgcacctgtagtcccagctacttgggaggctgagacatgagaactgcctgaacccgggaggcagaggttgcagtgagccgagatcgtgccactgcactccagcctgggcaacagagtgagactctgtctcaaaaaaaaaaaagaatactttctaatatttagtgattgtcaaagaaaagctttggcaagattttctaaagaactggacagacaatcctttggcactggaggaggattaagtctttttgagtctgagattctgtaatgctatagaactaggtgctgagctaggtagacactastaattcagaattttaaatcccccattactttggtcaacaaaatgaacaagagcaacacttgacatttgtctcaactttaaaaacaaaaaccagtaagcaacaattaaatggaatagaaaataaaaacactattgagtttgacaaatttattggtactttagtaaagacattcatctcagtcatttctctctcccagcttgaccttaggttaatatttc

SEQ ID NO: 22042 - DNA, 532 bp, Homo sapiens
taataaacaaaaaacaagagaagcacattcaaaatactgatttactttggtagcaaatggtttttctttgaagactaatgaagatagacaagacccattaaggtgaagtggactatttcaaatattcaacagtttacataaaaaaaaaatcttttaagagctaagcgtctgtatccacggatagcaatgcaatacctagtttatgatgacttgaaacaaaacaaatgcccataaggaaaaaagctgtattttatctaaatttactttcagtcaatagttcagtaacattttcttcccaatacaatactccctctctctataaggctgttcctgggagccagacaagtttaggtaataagggagttaagagagttaactgcttgcagttttaaatagacagtaactttgcttccctcttaatgtrctaatagttgtgtctaaaaaaatatgcaattcttaaaaaggtaccatttctgatttctttattatctgtaacctttggaaactaatcacatgaaactacaaaattagc

SEQ ID NO: 22043 - DNA, 526 bp, Homo sapiens
cattccacacaaaattgtttcccataagcattccttttattctctattctatcctaggtctgcctcaccatgagacaggaaagcctccrgtactagctgttgtagcagtgcccttcatccagggcagctaaaggagtcttggacccttgctttctctgggatccctgcccagcaccttcctacagagatgactttaaaaggaaaaaaaaaaaaggaaaaacaacaccccattccaaggagtctggcattcctgaatcctccttccctgctaggtgcctgtcacctgtcttcactgcctccttttccctgtcatgctcatcgcttatggcttctgtccaagcacctgaacagaggactagaacctccactgcacgctggttttaggtcttgatttatgtcagaatcttgcatagcactgctaatgtaaatttcagttttttccctctaagacaaacaccaaaatatccaactttttttggtgggaagagagattgtcctgtgatttctatccatttcctgaggcctg

SEQ ID NO: 22044 - DNA, 526 bp, Homo sapiens
cattccacacaaaattgtttcccataagcattccttttattctctattctatcctaggtctgcctcaccatgagacaggaaagcctccagtactagctgytgtagcagtgcccttcatccagggcagctaaaggagtcttggacccttgctttctctgggatccctgcccagcaccttcctacagagatgactttaaaaggaaaaaaaaaaaaggaaaaacaacaccccattccaaggagtctggcattcctgaatcctccttccctgctaggtgcctgtcacctgtcttcactgcctccttttccctgtcatgctcatcgcttatggcttctgtccaagcacctgaacagaggactagaacctccactgcacgctggttttaggtcttgatttatgtcagaatcttgcatagcactgctaatgtaaatttcagttttttccctctaagacaaacaccaaaatatccaactttttttggtgggaagagagattgtcctgtgatttctatccatttcctgaggcctg

SEQ ID NO: 22045 - DNA, 526 bp, Homo sapiens
cattccacacaaaattgtttcccataagcattccttttattctctattctatcctaggtctgcctcaccatgagacaggaaagcctccagtactagctgttgtagcagtgcccttcatccagggcagctaaaggagtcttggacccttkctttctctgggatccctgcccagcaccttcctacagagatgactttaaaaggaaaaaaaaaaaaggaaaaacaacaccccattccaaggagtctggcattcctgaatcctccttccctgctaggtgcctgtcacctgtcttcactgcctccttttccctgtcatgctcatcgcttatggcttctgtccaagcacctgaacagaggactagaacctccactgcacgctggttttaggtcttgatttatgtcagaatcttgcatagcactgctaatgtaaatttcagttttttccctctaagacaaacaccaaaatatccaactttttttggtgggaagagagattgtcctgtgatttctatccatttcctgaggcctg

SEQ ID NO: 22046 - DNA, 526 bp, Homo sapiens
cattccacacaaaattgtttcccataagcattccttttattctctattctatcctaggtctgcctcaccatgagacaggaaagcctccagtactagctgttgtagcagtgcccttcatccagggcagctaaaggagtcttggacccttgctttctctgggatccctgcccagcaccttcctacagagatgactttaaaaggaaaaaaaaaaaaggaaaaacaacaccccattccaaggagtctggcattcctgaatcctccttccctgctaggtgcctgtcacctgtcttcactgcctccttttccctgtcatgctcatcgcttatggcttctgtccaagcacctgaacagaggactagaacctccactgcasgctggttttaggtcttgatttatgtcagaatcttgcatagcactgctaatgtaaatttcagttttttccctctaagacaaacaccaaaatatccaactttttttggtgggaagagagattgtcctgtgatttctatccatttcctgaggcctg

SEQ ID NO: 22047 - DNA, 750 bp, Homo sapiens
ggtctccctccctccttcagcccatccatcagttcagcgttgtggggtccttaccatggcagtcgtccctccagccctggagatccttcagggaagatgcaggtccatgctgcagggtggactcagatcagcagagacgcacctgacacctggctgtgcagcccaggctgagctgtgtgtggcagtgagaacagaggagaaatgcagggaataaagagaggaagtcatgaccctctttgtggccctggactataggttttctttctaatcaatagtaatccccccctttttttttacttcccccccctttttttttggctacagcgtccacccctgacgtccctgggaacaaacctctgagtctttcctgcctcctcggtgcccattgcatccttggccgtccctctgcaccttaatccctgttcaacgttttgggaacaatgacttatatttgagctttgatttggggagtgggggaggaagctgatatttattcagagactggttatcattcactgcctacgtgacctcgggcggtaatgaaccatctctgagcctcagtttcttcctttgcagcttgttgtcacaaatcccactggtcacagtggttgtggggtcagtggttcctgacacatgggagaggctcatctgtgcttcatttccagaccasgtcagcacatgaagtgtttgggatatgataggatcatagcgttggatgattgatgtgttctctcaagatctcatatctgg

SEQ ID NO: 22048 - DNA, 550 bp, Homo sapiens
ttgtactttgaaaaatgaagaattttactgcattgtggtacacacatccatatccacaaatataagtgccctatgtastttacaatatgctgggcttttaaaaatctactggttggtataatgaagaagacatagggtccagaataagctggatttggcattgattctaaactcaaattcttatcaaccccatgactttgagcaaattatttcatctctctgagcagggccaggactaaggtggtgttaaggaagcatctagggtgcaaaatttaaagagacaagcaggaccctatagtatcctcaacttttgtatacagagcatcttgtttgcctcaccctcatgctgtccatgtgtctgggcctcagaatcataggaacagagacatttaaagcacctactgcacaacatagcgcagccacttagtaaatgctgaggtttgtttgtttgtttgtttgtttgttttgagaaggagtctcactcttgttgcctaggctggagtgcaatgacatgatcacggctcaccgcaacctccgcctcccagattcc

SEQ ID NO: 22049 - DNA, 550 bp, Homo sapiens
ttgtactttgaaaaatgaagaattttactgcattgtggtacacacatccatatccacaaatataagtgccctatgtactttacaatatgctgggcttttaaaaatctactggttggtataatgaagaagacatagggtccagaataagctggatttggcattgattctaaactcaaattcttatcaaccccatgactttgagcaaattatttcatctctctgagcagggccaggactaaggtggtgttaaggaagcatctagggtgcaaaatttaaagagacaagcaggaccctatagtatcctcaacttttgtatacagagcatcttgtttgcctcaccctcatgctgyccatgtgtctgggcctcagaatcataggaacagagacatttaaagcacctactgcacaacatagcgcagccacttagtaaatgctgaggtttgtttgtttgtttgtttgtttgttttgagaaggagtctcactcttgttgcctaggctggagtgcaatgacatgatcacggctcaccgcaacctccgcctcccagattcc

SEQ ID NO: 22050 - DNA, 1946 bp, Homo sapiens
aactgctgggcccaggaaggatagcagcagcatgaggggttccattagccacaaactcacggcatggaaccttcacccacctcgcccctcatctgctgtttagcacctggcacgccgtgtatacttactgattattacattttaatggcaaattatagtggcaaacgtatgcatctttgcacaattgttgtacagcatgatgaacaagtcattaatagtaaagaataaatgtgaaagtgagaaaaatctgactgccaaagtttttactccttccttccctccccagacttttaaatgaaagtttagggataatcccttagttgtcctgctagtaggacttgcaattaaaagaattgggccaagaacacttctacgcttctccttttaggtttgggtgtaaattcggggtatttctcactgatgaaagcctggtgcagggcagaccgtgggaagctttcatttccggaatggaccatcaacatcccttggagaagaattctcttctccagacccagacctggtgtcctggcacccattgggcaagtgggtcctagaagacaaacctggtcagagcctggaggctgcttagcattccccacgcacattagcagctcggagagctcaggaagccgcagcccctccttgcctcaccagcctggatcaggacagcatcccctggaagacacacagggcctggcctctgattacccagcctggagggaaagctcaatcgagcatcatgtcacccggtgcccccatgcagggtggcactggtgagacccccaagccaatgataccacctcacaggagtgcaggcccattgtggccagatcatcttgacttttcaagataaatcagaaatcgtatttccatgagatatccctatttgcaagtgatggtgactaaattagaagtttttgaatattgtaacatgttcgtaggctgtttgtctggtttaaactctatctggaggaattcaagctagacttcaggaataacttcttgaggcaaggattttgagaccttagggaaagaaggacgtcttgggggtattctgactgttgtcctcctggaagggaagaacagagaactagaagactgcccttagcgaagttcaaagcacctaagcccgggaccctcagcaagtgttcttgagtcacagattctccctgaggcgcctctttctggctccatagaatggctgattctgtaactcggtgagtttgctttttttttttcctccatcacccaggctggagtgcagtgaagctggagtgccgtggagcgatcactgcaacctctgtctcccaggttcaagcaattctccttcctcagcctcccaagtagctgggattacaagcatgcagcaccacacctggctaatttttgtgtttttaatagagacggcccgaagtgctaggattacaggcatgagccaccgcggccagccataactctgtgactcttgttacaaaggccttatattttgctctttgagggtggttttggtttgatgcctgttggttgccatcttttaactagggatgttttatcaaaatgcccagccaaagtgtccaaacaaattataccttaaagtttgaaaatgtctggcacttctaattsaatgcctgttgtgccaggcactgggctgctgaggaactgagtcccgtccctgcaggctagctagagaacacacacacacacacacacacacacacacacagagtggtcttacaagtcagttttatattctacctatatgcaataaaggtattattatgttgaggtgccttgatataaaaatttttcttaaaggagaggatgcctaaaacaggcattacctgaaacctcctctctccagcattggttgtcttctgtcatgactcagggttttcactgagaatgggatggaaatgtggtctaaagatagggccaatgttgggact

SEQ ID NO: 22051 - DNA, 1946 bp, Homo sapiens
aactgctgggcccaggaaggatagcagcagcatgaggggttccattagccacaaactcacggcatggaaccttcacccacctcgcccctcatctgctgtttagcacctggcacgccgtgtatacttactgattattacattttaatggcaaattatagtggcaaacgtatgcatctttgcacaattgttgtacagcatgatgaacaagtcattaatagtaaagaataaatgtgaaagtgagaaaaatctgactgccaaagtttttactccttccttccctccccagacttttaaatgaaagtttagggataatcccttagttgtcctgctagtaggacttgcaattaaaagaattgggccaagaacacttctacgcttctccttttaggtttgggtgtaaattcggggtatttctcactgatgaaagcctggtgcagggcagaccgtgggaagctttcatttccggaatggaccatcaacatcccttggagaagaattctcttctccagacccagacctggtgtcctggcacccattgggcaagtgggtcctagaagacaaacctggtcagagcctggaggctgcttagcattccccacgcacattagcagctcggagagctcaggaagccgcagcccctccttgcctcaccagcctggatcaggacagcatcccctggaagacacacagggcctggcctctgattacccagcctggagggaaagctcaatcgagcatcatgtcacccggtgcccccatgcagggtggcactggtgagacccccaagccaatgataccacctcacaggagtgcaggcccattgtggccagatcatcttgacttttcaagataaatcagaaatcgtatttccatgagatatccctatttgcaagtgatggtgactaaattagaagtttttgaatattgtaacatgttcgtaggctgtttgtctggtttaaactctatctggaggaattcaagctagacttcaggaataacttcttgaggcaaggattttgagaccttagggaaagaaggacgtcttgggggtattctgactgttgtcctcctggaagggaagaacagagaactagaagactgcccttagcgaagttcaaagcacctaagcccgggaccctcagcaagtgttcttgagtcacagattctccctgaggcgcctctttctggctccatagaatggctgattctgtaactcggtgagtttgctttttttttttcctccatcacccaggctggagtgcagtgaagctggagtgccgtggagcgatcactgcaacctctgtctcccaggttcaagcaattctccttcctcagcctcccaagtagctgggattacaagcatgcagcaccacacctggctaatttttgtgtttttaatagagacggcccgaagtgctaggattacaggcatgagccaccgcggccagccataactctgtgactcttgttacaaaggccttatattttgctctttgagggtggttttggtttgatgcctgttggttgccatcttttaactagggatgttttatcaaaatgcccagccaaagtgtccaaacaaattataccttaaagtttgaaaatgtctggcacttctaattcaatgcctrttgtgccaggcactgggctgctgaggaactgagtcccgtccctgcaggctagctagagaacacacacacacacacacacacacacacacacagagtggtcttacaagtcagttttatattctacctatatgcaataaaggtattattatgttgaggtgccttgatataaaaatttttcttaaaggagaggatgcctaaaacaggcattacctgaaacctcctctctccagcattggttgtcttctgtcatgactcagggttttcactgagaatgggatggaaatgtggtctaaagatagggccaatgttgggact

SEQ ID NO: 22052 - DNA, 1102 bp, Homo sapiens
agttgtctcagttaacaaggacaggtttatgctgcagtgacaaacaagatcccaaattcttgtggcttcacacatctggcaccacctcatcttccagccttaggagtcatcttttagttccttgaaaactctttacagttttctgttggggccttgtcatatactattcccctggaatgttctttcctatcccctccctttcaccttgctaacttgtgcccatccttcaggtctcagcagaaacatcacttccttggggaagttttctccaacacccacactacacaggtgtcccatctacactcctatgactttgtggtacttgtctcacttcattttccactgccttccccacaaggcacctgcacaagggcaaggaccgtaccactgtacctatgtcactcattgctgtggtcacctgcactctggctgcctaccttaactacacattagaatcacctgaggagcttttaaagccacaatgcaagactccaccctaggccaattggatccaaatccctggggtagggccagacatcagtggagttatatatacatatatatattttgtttgtttgtttgtttgttttttgagacagagttttgctctgtcacccaggctggagtgcagtggcgcgatcttggctcactgcaagctccgcctctcgggttcacaccattctcctgcctcagcctcctgagtggctggaactacaagtgctcgccaccacgcccrgctaatttttttgtgtttttagtagagatggggtttcaccgtgttagccaggatggtctcgatctcctgacctcatgatctgcctgcctcatcagcctcccagagtgctgggattacaggcatgagccactgcacccggccatcagtggatatatttttaaagcactgcagagaattctgttgcatcagcttgagaaccactgatctgccttgtgcttcacatttaaaacttttttttaatgaataaataaaccccaaaaaattaatctccctaagcctccctagaagataggatggtaaggatattttcctaggtaaaaatatgttaatttcatatttcatgaaatttcatgtttcatttcaatc

SEQ ID NO: 22053 - DNA, 663 bp, Homo sapiens
tggctaccaaagtattttaatttatcttaaaacaagtaaagaatagcaaatttttctcagttaaaatattttccatgtttggagtcgcatagatttctggctgaaaggagagagcttagaaaacttttattttatttttttttttktgtgtgtgaaaagctgaaatataaattactttgttatgattcctgcagtaaagcttgagaagctgtattgaactcgctgcagtgactccatctctccatttctcctcaacatcactttttttgagtgttttttcctggccatagtgtggcattgctgttacatgaattagaggtgcatgggagatttaggatttaaaaataatctcttctaaaaaatgtatattatgatctaaagtacaaatctgattatatcctagactttcaaataaaattcatgattaaaaactatttgtcaggagtctgaaattctcacagaggaacacagctctaaactgtgaactttagatattgtcactcatttggttacaatgttactccgcgcctgtgatgggagctccagccttcactcagcagaagtcacactttcacacatcacagatataaagagccagggctgctcggtgatgggagtggaaaatggaattattgttaaataaatgagccattttaaaacaga

SEQ ID NO: 22054 - DNA, 526 bp, Homo sapiens
ttgccagtattttactgaggatttttgcatmaatgttcatcaaggatattggtctaaaattctgttttttggttgtgtctctgcccggctttggtatcaggatgatgctggcctcataaaattattttgattagtatcataggggtattagattttaaataacaaaatatgattcattgatgcttgtgtgtaaggtgtttaactaataaccttttttttatgaggactgaaggtggtctgggttactattataaagtttgaagatagaagccgggtagacctgaattttctctgtgtaattgggcagcagggggcagggaaagcgtgcatgtgagagcatggggaccaaaggcagtaaatctgaggaacatattgtgtaggagcaaaaagagaaatcttggttttgggacaatgcagtgaagtgttttcattaagcaatttaataaaaaaatcccagttattttgtttgtttttgctatttgaagtgtactgttatctgccttttatatgtcccctaaaatatcag

SEQ ID NO: 22055 - DNA, 561 bp, Homo sapiens
gactacccagtccttcaaaagagaagagatacatgaatgttcaaaaattcatgtcttccaaaccacatccagagtcatggctagagtgtggcagtaaatcctgcaaaaatgtaaactttccggtttgctttttattaagaaattggcagtctgtgttgaccaaagtaataaaaagacaatgaccatttttagttatttgctacagatgtatacactctgcaaacttcctttggtatggtaatttcagttgggctggaatcttaaaatactgatttttacataaaaccctgattgcacatggcacaaaatgatgtactgcacaaagttgggcacactggcatcacacagacaacaatatatgtgtgtggcgcttggctgtattaaaacagtcatccttggtgtatccatttgagatgggctcatatgtaagctkcattttagctatttcaatttatcaattattatattaaaaatcattgacaaattaggttttggtggaaataagatatcttattctacttttaattaacagtactctttccaaagttaagacaaaatatt

SEQ ID NO: 22056 - DNA, 626 bp, Homo sapiens
ccactatgcccacaggtacacacatacacacacacacctgctaaaatagtatttatctacagagagaagggtgctatgcatgtcagaaattttatccttcaatattaatgcactttttctggtaactttaagcccctcggtggcttgctatatgacttaggaataggaaagggaagtgagaaaaattttatggaacacaggtttggtatctacttgttcctttccccttctacataacactwgtctctaaaggaagaacaagactgaacggcagaggcagaatgcgttcttcagcggaataaatctttccattcttttcagaaaataacttaaatgtgtctgtcttcaggtcgaggcatgaatatgacttgttctttgattaacggggctgacatccagccaatgtaagtactacctaccttcccactccctctcatcgcttctgcactgcagaggtagcacaaggaaactgcatgtactttgtaagtattttctgttcatgaactttggaaacactgagtgagctttccatttaatctacattaagttgtaagcatcctgatataggaaacaccccaactatcaccttctcaatcccttagagtgaaaataaaagataaacttcg

SEQ ID NO: 22057 - DNA, 597 bp, Homo sapiens
ataatagcaaagccacctacacctggtgtgcagaaattttgactacatgctttaagcagaattcaggggagcagtttccagattgctatgcctgaagttttactgtgcaaagggtaaatattcacaggtgccatggaattcaatacaaggtaaatgatcataatccattcggcttcaaatctctctgggtttactgtctctgatgaacctgacagaatcaagaatttgtgtgtattgcagacttaatctacattcagggttatctttctttgtgtctggctaaggcagatatctattttcaacagactctggccagcattccccattatttcttatagcagattctatttactgtcagtgacatttgaatgtaacatctagataggggctgcggaagtgtaatccacattatcctaatggcagtcctgaaattgcagaagaggagtgtgataagtgttacattacagagaggagagacaacaagtactgtgagtgacaccgacaggcattaaggcattcttcttcttagtgttccttcccaawaggggcggtcttgagtctttttggttttttgttttgagatagggccttgctctg

SEQ ID NO: 22058 - DNA, 505 bp, Homo sapiens
  misc_feature (1)...(505): n = A,T,C or G
taattgacctcaatgcagagaggctgagcaggaccgagcagctggaatcctggacgtctgattgctttggatgtagctaggaggggtggttccctcctagctatttgaatctataaatggcttcgcagtgagcagggtgaaggagttcarccctgcgcagatgagaaccccagggctccctgcccaggatcaccaggcacttgggaggcttagtgagttcccaggttcctgggcagcctccgcttaacatgcctgttgtgaatatacagagcattaaagaggaggcctgggaagagggggacgtgcagtgacaccgcttcctcccagccagagacccaagcagatgattcacctaaatgaatcaggaatggctgcagaaggaactgctccacccatgcccccagnnnnnnnnnnnnnnnnnnnnnnnnnnnnnnnnnnnnnnnnnnnnnnnnnnnnnnnnnnnnnnnnnnnnnnnnnnnnnnnnnnnnnnnnnnnnnnnnnnnnt

SEQ ID NO: 22059 - DNA, 756 bp, Homo sapiens
aattaaccagaactctcagggaatttaacgtcctggttaatggaatctcttcattaatgaggacaaattgaaaacccttgtcaagatacagagtcatagaacattatgggtggaagagaccttggaaattggttttcaccaactccctcactatcttgctggcagaaggtgaggctcagaaggggaaagtggcttgccctaggccctaaggctaattgagggttcaagccaagacctcagcccataaatcacctgcccaactctcttgtgagactgggttgaatcttagtgaaatcacacataataacccttgggcttgcttcttaatatraaagcacagcatttagcttgtctattgccatttgctttttcttatagctcagtaaatttggttttacagaatttagaacaaacaccaaagatctactggtagcatcaaaaggttggtgtggtgtggttgagcatctttctctctgtctctctctccgtctctcctcttcttttttttttttttctttgagacagtctcacactgttgcctaggctggagtgcagtggagtgatctcagctcactgcaagctcccaggttcacaccattctcctgccttagcctcccgagtagctaggactacaggtgcctgccgccacacccagctaatttttttttttttttttgtatttttagtagagacggggtttcactgtgttagccaggatggtctccatctcctgacctcatgatctaaccaccttgg

SEQ ID NO: 22060 - DNA, 1805 bp, Homo sapiens
  misc_feature (1)...(1805): n = A,T,C or G
ttgtcccttatttagtgttcatttctgtaatggttttgctttcatgcttggacttgtaatcactgattatatatttaagttatacatttcagagacgtgtttcctcttaaggagactatttctgactgggcacagtggctcatgcctgtaattccagcactttgggagaccaaggcaggtggatcactggaggccaggaggtggagaccagcctggccaacatggtgaaacaccatctctactaaaaatacaaaactcagccagacacgatggcatgagactataatcccagttactcaggaggctgaggtgtgagaatcacttgaaccggggaggtgaggttgcagtgagcagagatcatgccaytgcgctccagcctgggcgacagagcgagactctgccaaaaaaaaatatagaaactagatctttctacatgtcagaagacagacagttcaacagtttctctgacatatatcttaattttacctacttaaatgtgtaagtaaacttattttttcttatgatgctacacctttgtaatagaaaatatattatgtatgcaggaaatggaagaatttatccagagctcaggtaaaaatggtgttgtggtgttttctctgggatcaatggtcaaaaaccttacagaagaaaaggccaatcttattgcctcagcccttgcccagattccacagaaggtcagtacagcctggaatcctggtacacagctttttactaatgggagagacaatgcagctagtaatgttctttccatatgaaaatcaaaactcattatacactgagtatcactagtaacagttgtaagtaacgttgtgtaatatattaaaattgtgtacattagcacattgaatcatttgcctactgagccttggcattattttagaaacacatacttttttgaagtcatttatttttaatggaatagaaatgaaaactttaagcccctactgaccttttactatttgaaattttttgttctccactgactactttcaaaagttttgaagtttgttagctccatggtccaggaaaagagagtgtaaacacaaagcagggagaaattatgctaaaaatataattcgaatgtctagggtttattacaactctatcaaagtgtagttggttttaaaaatagaaagcctcaattcacttagcctttctaagttgaatatttttttagctaaaaacaattaaaattcaaatattatagtccaacaacatgcaatttctgacttatggtgtttcaattaannnnnnnnnnnnnnnnnnnnnnnnnnnnnnnnnnnnnnnnnnnnnnnnnnnnnnnnnnnnnnnnnnnnnnnnnnnnnnnnnnnnnnnnnnnnnnnnnnnnggttgggaccacaggcgtgtgccaccatgnccagcttttttttttttttttactnnttgatagagagtagggggaatctaactttgttgccaggtaggtctcgaactcctgggctcaaccgatttgcccaccttggtgcccaaagtgctggggttacaggtgtgagctttttttttttttttaagagacagtcttacttcattctgtcacacaggctggaatgactttctaaaactgcagaaagcagaacatattccttgctgtttataatactgtggtcataccaaagggaaagagtattcctccttaaataaaattacaaataaaaaatttatgttttactcttactcgtaaaaggtattgtagaatacaaaacatttttcacactggttttgtctttggcttttataatccacacttcacaagaaaaaatgca

SEQ ID NO: 22061 - DNA, 1805 bp, Homo sapiens
  misc_feature (1)...(1805): n = A,T,C or G
ttgtcccttatttagtgttcatttctgtaatggttttgctttcatgcttggacttgtaatcactgattatatatttaagttatacatttcagagacgtgtttcctcttaaggagactatttctgactgggcacagtggctcatgcctgtaattccagcactttgggagaccaaggcaggtggatcactggaggccaggaggtggagaccagcctggccaacatggtgaaacaccatctctactaaaaatacaaaactcagccagacacgatggcatgagactataatcccagttactcaggaggctgaggtgtgagaatcacttgaaccggggaggtgaggttgcagtgagcagagatcatgccactgcgctccagcctgggcgacagagcgagactctgccaaaaaaaaatrtagaaactagatctttctacatgtcagaagacagacagttcaacagtttctctgacatatatcttaattttacctacttaaatgtgtaagtaaacttattttttcttatgatgctacacctttgtaatagaaaatatattatgtatgcaggaaatggaagaatttatccagagctcaggtaaaaatggtgttgtggtgttttctctgggatcaatggtcaaaaaccttacagaagaaaaggccaatcttattgcctcagcccttgcccagattccacagaaggtcagtacagcctggaatcctggtacacagctttttactaatgggagagacaatgcagctagtaatgttctttccatatgaaaatcaaaactcattatacactgagtatcactagtaacagttgtaagtaacgttgtgtaatatattaaaattgtgtacattagcacattgaatcatttgcctactgagccttggcattattttagaaacacatacttttttgaagtcatttatttttaatggaatagaaatgaaaactttaagcccctactgaccttttactatttgaaattttttgttctccactgactactttcaaaagttttgaagtttgttagctccatggtccaggaaaagagagtgtaaacacaaagcagggagaaattatgctaaaaatataattcgaatgtctagggtttattacaactctatcaaagtgtagttggttttaaaaatagaaagcctcaattcacttagcctttctaagttgaatatttttttagctaaaaacaattaaaattcaaatattatagtccaacaacatgcaatttctgacttatggtgtttcaattaannnnnnnnnnnnnnnnnnnnnnnnnnnnnnnnnnnnnnnnnnnnnnnnnnnnnnnnnnnnnnnnnnnnnnnnnnnnnnnnnnnnnnnnnnnnnnnnnnnnggttgggaccacaggcgtgtgccaccatgnccagcttttttttttttttttactnnttgatagagagtagggggaatctaactttgttgccaggtaggtctcgaactcctgggctcaaccgatttgcccaccttggtgcccaaagtgctggggttacaggtgtgagctttttttttttttttaagagacagtcttacttcattctgtcacacaggctggaatgactttctaaaactgcagaaagcagaacatattccttgctgtttataatactgtggtcataccaaagggaaagagtattcctccttaaataaaattacaaataaaaaatttatgttttactcttactcgtaaaaggtattgtagaatacaaaacatttttcacactggttttgtctttggcttttataatccacacttcacaagaaaaaatgca

SEQ ID NO: 22062 - DNA, 1897 bp, Homo sapiens
caccccacttattgtcgataatcttttcttgaaaataacatattctgccctaaagtgctcacagtgagtctacttcccattattttaagtgggaaacgttataatgtgttatcaatttaaaacccccttctagttatttttttgagacagtctcattctgtcactcaggctggagtgcagtggcacgatcttggctcactgcagcctccgcctcccgggttcaagcaattctcctgcctcaccctcccaaagttctggcattataggcgtgagccaccatgcccagcctactttgattctttctccacagttttctttaatacttcaactttttggggattcattatgtgaacaatagggaaaaataagagcttattgtgaaaggcactgtagaaacttgttcagaataaatgaataatagcagagaatggccacttgtccctctcttagttctagcagcagttaagatttgttgatatatagtgaacttttgaaaagcctaagtgtgagtctgacattataccaattcagaatgtaactcgaaaatgtactcatgcattgttttgtttaaaatgttatgttgaaatttggagacagaaacataaattttcctatataaacattgaccagaaacactgggtatagagagttatctttggtctgtaatgactatatagtaaaagccaagaggcattctccaagggagtagtattctatgaagtatgctattatttattgaagtgcatgcatacattgcatacttactaagtgtatgcatatgtatttttgtaatagagactttattaaggatttagtaagaaacaaaggaggtttatgaaacataacacctagcataattaatataaattcccatcagacatcactgtcttctatatctctctttgtctctctcttttaatatactcgttgatgttttgagattttactgatttggaaaaaaaataaaatcaagaaaatcatgaaaaaaattaggattgctagcatagaaaatacagttgttgccgggcgcagtggctcacacctgtaatcccagcactttgggaggccaaggcaggyggatcatgaggtcaggagatcgagaccattcctggctaacacggtgaaaccccgtctctactaaaaatacgaaaaataagctgggcatggtggcgggcgcctgtagtcccagctactcgggaggctgagggaggagaatggcatgaacccggaaggcggagcttgcagtgagtcgagattgtgccactgcactccagcctgggtgacagagtgagactccgtctcaaaaaaaaaaaaaaagaaaagaaaatacagttgttactgaacataaattcactttttatcaccacgaagtgccaggatatgaaattcatcacgagaaattctaggtattttggtaagagtgctattttaacgtaagtaccacaaagggaactataatgaaaaaaatggaatgagtgtaatgaagtcatccatgttctcacactatagataaaaccctcaaatctctgatgtagataaccagaagaaggagattcattctgtgaaaaataaaaaaagttggatgctaaagtgggtaaggacagatttgaatcagtaatgtgctattacaataagaagagtcacacatgaattgcactcaactttgatttgtgtagagacaactggtcattttaaaggaaagtgaggaaactgggagaggttgagtgaggctcagagttagctaagtgaaaagttccagatagtgggaaggggggattggtccatgtggaacccacctgggtgctctagctggtatttatcaaaattagtctcctaccttctcacagagactgaaagactgaaaggccctgttttcagctcttggttggaacaaaca

SEQ ID NO: 22063 - DNA, 1251 bp, Homo sapiens
tctcactatgctgcccaggctgatctcaagcccctgggctcaagcgatccacctgcctcggattcccaaagtgctgggattacaggtgtgagccactgtgcccagccaaaattttatactttttcttttgcttgcctatgttgttgcatttttwaaaaaaataatgcactgatttcataactaaagaaaattcattttaagggggaaagtattaatgatgatttgtttcactctagaagaaatgccacctttaaaaagctttttatttaaactataacaccaatgaaagtataactctacagtataattaatatttgtagagagtatcaattttcaacttcaccttctattagatgattgatattatggcctgaataacaggcatttcagctggagttagcagcattccccctctgtaatgtatcgtccatttaccaatggtcagatgccaaacaacagcctctcagaggagatgtgaagtagctgtgttatcatgaaggagaggtagggaagaatatcctaccgctagatagaaagctatcagcccataaaaagtttctgctcttttgggatccagaccatgaacttggagaaggaaaggctttgaggaacatatggaaaccttactatagaatatggagcaattaaacggaggtaaggcagctgtttatgatttttggggacttatgcagctcactgacattctaatagaagctgtggctcctccttctataaaattcacatatatgcataagttttgcatgcagtttctgaaactatcacaaacctcatgaagtgaatagaccctgggttgcaaaagaacctctggaaaaaaaaaaaggaatgtaaggatttctgcttctcatacatgaaatgatctgcagatgatagatagccaaccctggaacaaaggtctggatgcagaatagagcaatatacaaaaatcagatgagggaggtaagctatcagataagagatcaccatgtaactggtatagaaaacactttctgatgggcagtcagcactgataggacccaaactggtcattccagttgtgcaacacaggctgaattctctgctgccacatgcttctttggcaaaaactgggacttatgagttgaaacagagagatctagaaggatacaaagaatgtgggaaggtcccccaggaccttcagaatcatttgccactgtacttctctactggacaaatatgatttatcttgacatgactgagctggacaatggttgg

SEQ ID NO: 22064 - DNA, 524 bp, Homo sapiens
cccccactggacttccgtgaggcttggataagcccatgtgaggtccccctaaaccctgttcacagctttaacacaagggcttgggggaatgggacccacggaataagttttggtgagataagggaggctggaagcaactgtggaaggaagccgctcctacctgatgaagaaagaaggttggacccgagcatgtgaggtcctgtccaactccaggattctggctgggtgaacagtacagtggacaaacagacatgccctcagcaatagttcagtctcctcccttctcctcattcaccctctgccttttcctcatgttccctaaacccccgtgctctaccattctgagccctcccctctgcctggacacctccccatgcatccccaccaccatccctcataggggttaagagttcctggctctttctgactgcacacattatttatttttayagcacttcttctgtcctaccaatcatgtgctctgcaccaataggaactgactgcgtctcagtccattttgtgac

SEQ ID NO: 22065 - DNA, 781 bp, Homo sapiens
tatatcataggacttttgaaaaaattaaatgagatccacatgcaaagaacctagaacaataaatgaccagtaacagttattattgtatcagcaatacctgacctagagttgagtttgtttggcttttagttgactgttaagagaaagcatggagccacataaagcatatctttattagaaaagaggatgaggagaagggggaaatttctgtgcccaaaggttagcaaagcattgacatatggtttttgcattcagttgtattacagctaacgcccctcagtaaaacatctgttggtttgctctgtgtttgtgaggcccgccaggcactgtggggggtaacacagggttaccatcagaatcaactcagattaaggggtcgtgatgtagtgcatggaaactagagcccttgagayggtgaatgatgaccaccgtgagagcgcctctgtcaggcactcattgctgtccccattttacagatgaggaaacagggtctgagaggtcgggagacttgcccagggtcacacagctagaagatgggagcgagaccacattttcctgagtttgtacatttattttcttccctcgaccacaggtagtactttcttttttttttttgagacagagtcttgctctgtctcccaggctggagtacagtggcatgatctcggctcactgcgacctccgcctcctgggttcaagtgattctcctgcctcagcctctcgagtagctgagattacaggcatgcaccaccacgcccagctagttttcgtatttttagta

SEQ ID NO: 22066 - DNA, 781 bp, Homo sapiens
tatatcataggacttttgaaaaaattaaatgagatccacatgcaaagaacctagaacaataaatgaccagtaacagttattattgtatcagcaatacctgacctagagttgagtttgtttggcttttagttgactgttaagagaaagcatggagccacataaagcatatctttattagaaaagaggatgaggagaagggggaaatttctgtgcccaaaggttagcaaagcattgacatatggtttttgcattcagttgtattacagctaacgcccctcagtaaaacatctgttggtttgctctgtgtttgtgaggcccgccaggcactgtggggggtaacacagggttaccatcagaatcaactcagattaaggggtcgtgatgtagtgcatggaaactagagcccttgagacggtgaatgatgaccaccgtgagagcgcctctgtcaggcactcattgctgtccccattttacagatgaggaaacagggtctgagaggtcgggagacttgcccagggtcacacagctagaagatgggagcgagaccacattttcctgagtttgtacatttattttcttccctcgaccacaggtagtactttcttttttttttttgagacagagtcttgctctgtctcccaggctggagtacagtggcrtgatctcggctcactgcgacctccgcctcctgggttcaagtgattctcctgcctcagcctctcgagtagctgagattacaggcatgcaccaccacgcccagctagttttcgtatttttagta

SEQ ID NO: 22067 - DNA, 523 bp, Homo sapiens
gcacttacgcgacaggtactgcactggaatgtgaggatccctccacgaaacaaataaacaaaaccactggccccttcccttacggaggtatgactttggtaaggaagggatattaagaaacaaatgactacaattcagtctgacaagcaccatcagaggtaagatcagaggacccaccctactcttgggagctgggaagctttcccagaggagggacattctaagatgagctcttaggggtggtgtgaactagcagcaaakactggaggaggaaagagggaagaaaagaagatttcacaaaaagaggttagtatatgcaagagtttagaaatgagagcatatgtgacttaaaaaaggagaaaagggaagtttggcatggtcaggggtgatgaggagaggctgagagagagagttggaaatgcaagcaggaggacctggagggcctgggaaactgtgtggtgagctgctgatgggctacaaacagaaaggtaaaagaatctaagcttgtgatttagaagcttcc

SEQ ID NO: 22068 - DNA, 523 bp, Homo sapiens
gcacttacgcgacaggtactgcactggaatgtgaggatccctccacgaaacaaataaacaaaaccactggccccttcccttacggaggtatgactttggtaaggaagggatattaagaaacaaatgactacaattcagtctgacaagcaccatcagaggtaagatcagaggacccaccctactcttgggagctgggaagctttcccagaggagggacattctaagatgagctcttaggggtggtgtgaactagcagcaaatactggaggaggaaagagggaagaaaagaagatttcacaaaaagaggttagtatatgcaagagtttagaaatgagagcatatgygacttaaaaaaggagaaaagggaagtttggcatggtcaggggtgatgaggagaggctgagagagagagttggaaatgcaagcaggaggacctggagggcctgggaaactgtgtggtgagctgctgatgggctacaaacagaaaggtaaaagaatctaagcttgtgatttagaagcttcc

SEQ ID NO: 22069 - DNA, 598 bp, Homo sapiens
atttttttagagataaggtctgtcgcccaggcttgagtgcagtgatgccatctaggctcactgcagcctaggctccagtcatccccccacctcagcctctggagcagctgggaccacaggcacagrccaccaagctggctaattttttcattttttttgtggagatgaggtctggctgtgttacctaggctactcacgtaatctgaaaacgaatttccttttctaaagcgatcttttctaaagatccttttctaagatgtactacttttgagaacagctacactatagtctacgttgcttttaatgaatgttaccttcccatcctaaaccgggaaggcctccttccagaccaagacagctcagtcacagcttcctcctttggaggaccaagacaggaaggtgggcatccatccagcgctcaggccccagaagcccactttagactaggtggtcacatttccgggcagctcctagcacaggaagcacgtggccagaccagcgcagaagaaatgtctgtccgcagggacaaggggcggggctctgcggcacaggatgaatgagcaattccgggcgcgcgctcttgcgccccccggcggtg

SEQ ID NO: 22070 - DNA, 550 bp, Homo sapiens
ggtaagtaacgcactagggcggggccggcgctggagcctcttaagtagcggctgcggaggggcgggcgggcacaggcggtgccgcggtcgctggcccctcctccggccccgcgcgcccactccgcgcccggcctggccgccgcagaggcgggctccgagccccgagccccctcccctcgcgcggccgcggggtggggtctgccgcgcctgcgggcarcgcgcgccagtactgcagtgtgcggcgcatggctgcgagggcctgccgaggggcgggcgcgagtcggaaagacaccgaccagggaatgggcgacgaggcttgccttaattcggaggaaacccaggacttgagagagccatacaatttgaaagacgaagcaccgtgaaatgcagaaagttgtggttcggatagctcagctgattaatttcatgttgccacagtttgtcagtgagttttgcctttttattttctcagttcctttaaaggcagtgcattcggtacttacctgataatgtgaaaaacgcgagctttagaaaaccgaataggtgtaca

SEQ ID NO: 22071 - DNA, 302 bp, Homo sapiens
agcccaattccagaaactcttcttttcaactcctctgaccttccacttgctctgctgcagcccaatatgagtccaggggcactaacccctaagtgaggaagaaaactgattgcaaaatttagcaccaaagctatagaaagktttgaggtttcaataaaccgtaaggcagtgggacaggaaagagattagaaagcagagagtgagggtgaatgagggtccgccatcagagtagccataggctgtttgcaaagaacctgttcttttctaaatctttctgttcctgccgaaggaggagtaggtag

SEQ ID NO: 22072 - DNA, 302 bp, Homo sapiens
agcccaattccagaaactcttcttttcaactcctctgaccttccacttgctctgctgcagcccaatatgagtccaggggcactaacccctaagtgaggaagaaaactgattgcaaaatttagcaccaaagctatagaaagttttgaggtttcaataaaccrtaaggcagtgggacaggaaagagattagaaagcagagagtgagggtgaatgagggtccgccatcagagtagccataggctgtttgcaaagaacctgttcttttctaaatctttctgttcctgccgaaggaggagtaggtag

SEQ ID NO: 22073 - DNA, 944 bp, Homo sapiens
tatcccagctagaaggcaacttcttgaaagcagaggactggatttcacagatgtttggatatctcccagtatctggcaccaagartcttggatatcactcaagcttgcactaacaatcttggatatcccatagtgcctttcagtaataatcttggatatcccaccatgcctttcaccaggaatttcccatgtgcttcatcatccttggatctccaagaataactcatcttggctgggcctgggaccagttctctggcctttctagagttgtagacattggattctggggtacgaggcaatattagcagttggcttcttggatgatttcctggaaaagcgcacattgcaatctgacttctagagtgaaattcagcaatcatacactttaaaaaaaaattggggtaaaaaacacataacataaaatttaccatcttaaccatttttaagtgtacagttcattagtgttaagtatatttccattgtgaaacagatagcaatcatacagtttttaatttcaaaaaatatgttagctatccagaatatatgacagactctcaccacttaataaaaatagaacaagcaataataacatccaaacatgagctaaagatttaaatggacatttcatcaataaagatacacagatgaccaataaacacgtgaaaagatattcaacatcattagtcattaaaaaaaagaaagttaggccgggcatggtggctcactcctgtaatcccagcactttgggaggtggaggtgggcagatcatgaggtcaggagttcgagaccagcctggccagcatggtgaaacgctgtctccactaaaaatacaaaaaattagccgggcacagtggcatgtgcctgtaatcccagctacttgggaggcggaggcaggagaattgcttaaacctgggaggtggaagttgcagtgagctgagattgca

SEQ ID NO: 22074 - DNA, 597 bp, Homo sapiens
gggcttagtgtacaactttgcattatttcaaagttgaacatataaggtgacaagttgtgcagtagttgtaagtatacggctttagggtggtagaactttgctatttattgagaagcctgggcaatttttcttagcttcggttcttttttttttttttttcccatgttacatgcaaataatggtacagtatagagttgtcatgaggattaatgagataatgctcaatacatcttagctctttttattcaaattatttgagttctaatgtcttaattaggtgaccacaaacaatgtggctaaatatttggttggtgcaaaagtaattgcagtttttgcaattaaaagtaatcacaaaacttgaatcactcrtatttcttcagtaaaaaaagaaatgaatatctgcaaaatggggttaatgagagagtattgtggagaggtggagaaaaaacacatacttttaaaagaactaagtctagcacatagtagacctgcaataaatcttggttctcttttactagcatacctcaccggcatcttagtattgatggctttttaaatttatttttcttactctgaagtacaaattatataagagtt

SEQ ID NO: 22075 - DNA, 525 bp, Homo sapiens
ccaccttggcctcccaagcagatgggaccacagcaacgtgcctccacatccagctcattgtaaaatttttctgtggagacaaggtctccctatgttgctcaggctgktctcaaactcctggcctcaagcaatccttccacttcgcctcccaaagtactgggattataggcatgagccaccgcacccggcccatgtacacacttctgattcagtacaataaagagaaaatgctcataaacacaccacccaaccaaaccagactgactgcgggctcttccctggtccctcagctccatctgccaaacaaaagccacctgagactctgcaaagggtgccatttgcaaatatcatgcactgtagggaacattggctttaaaaaataataataaacatttcgagtataccagtcggtgcattgtggaataaactcgcatcttcatcatctctgatcgttgctctgatgccccactaaggcagggagcacaagacgcgctcgccggggcggggccgcgtacctgtagcacc

SEQ ID NO: 22076 - DNA, 525 bp, Homo sapiens
ccaccttggcctcccaagcagatgggaccacagcaacgtgcctccacatccagctcattgtaaaatttttctgtggagacaaggtctccctatgttgctcaggctggtctcaaactcctggcctcaagcaatccttccacttcgcctcccaaagtactgggattayaggcatgagccaccgcacccggcccatgtacacacttctgattcagtacaataaagagaaaatgctcataaacacaccacccaaccaaaccagactgactgcgggctcttccctggtccctcagctccatctgccaaacaaaagccacctgagactctgcaaagggtgccatttgcaaatatcatgcactgtagggaacattggctttaaaaaataataataaacatttcgagtataccagtcggtgcattgtggaataaactcgcatcttcatcatctctgatcgttgctctgatgccccactaaggcagggagcacaagacgcgctcgccggggcggggccgcgtacctgtagcacc

SEQ ID NO: 22077 - DNA, 595 bp, Homo sapiens
cagtcctccaggggtaacaatgcctctgatgtcccctggtgccccgggagtgcactggtgttgtcaggtgagactgttttagctgagatttctaytgtacccaactgacctgacagctctgtataaacttcttcttgggatgcaggaaacgggctataggtgtatcctaatgatcctacgaggctgtggctggtgcatatttcaaaatcatcttccagagcaatatgaatcaatagctaatgagccatctatttttgccctccaatgactattcttgtaaggtgggaaaggatgtggcttcttaaaatgaaaaaggcatcacagccctttggtatctcacaccatcaaccttccttcccctcctgtatgagcagcagcatggtcaggatggtgtatagcttggaggagggaaagtaagggctgctctggggcagggagggtgactgagatcagtctcaccaggtagtcccctccttggagagagaccctagagccgcatggtctgggttcagattccaacttccctacttagcgctggtaagatggtccatgcagccaccctttgccttagtttttccatctgtgaaatgggaat

SEQ ID NO: 22078 - DNA, 595 bp, Homo sapiens
cagtcctccaggggtaacaatgcctctgatgtcccctggtgccccgggagtgcactggtgttgtcaggtgagactgttttagctgagatttctactgyacccaactgacctgacagctctgtataaacttcttcttgggatgcaggaaacgggctataggtgtatcctaatgatcctacgaggctgtggctggtgcatatttcaaaatcatcttccagagcaatatgaatcaatagctaatgagccatctatttttgccctccaatgactattcttgtaaggtgggaaaggatgtggcttcttaaaatgaaaaaggcatcacagccctttggtatctcacaccatcaaccttccttcccctcctgtatgagcagcagcatggtcaggatggtgtatagcttggaggagggaaagtaagggctgctctggggcagggagggtgactgagatcagtctcaccaggtagtcccctccttggagagagaccctagagccgcatggtctgggttcagattccaacttccctacttagcgctggtaagatggtccatgcagccaccctttgccttagtttttccatctgtgaaatgggaat

SEQ ID NO: 22079 - DNA, 595 bp, Homo sapiens
cagtcctccaggggtaacaatgcctctgatgtcccctggtgccccgggagtgcactggtgttgtcaggtgagactgttttagctgagatttctactgtacccaactgacctgacagctctgtataaacttcttcttgggatgcaggaaacgggctataggtgtatcctaatgatcctacgaggctgtggctggtgcatatttcaaaatcatcttccagagcaatatgaatcaatagctaatgagccatctattttygccctccaatgactattcttgtaaggtgggaaaggatgtggcttcttaaaatgaaaaaggcatcacagccctttggtatctcacaccatcaaccttccttcccctcctgtatgagcagcagcatggtcaggatggtgtatagcttggaggagggaaagtaagggctgctctggggcagggagggtgactgagatcagtctcaccaggtagtcccctccttggagagagaccctagagccgcatggtctgggttcagattccaacttccctacttagcgctggtaagatggtccatgcagccaccctttgccttagtttttccatctgtgaaatgggaat

SEQ ID NO: 22080 - DNA, 816 bp, Homo sapiens
tgcaatgaatcttgctgtttgggagggctctgtcgtataaatggaagctggctcttataaatatttggttaattrgctgtactatctcaaataaatgctttgctctcggtgtttctggtggttaacagtttgggaagcagtttttatatgcattagccagtggctgaaatgtaatcagcgctaaataaaagttgattgaattgaattgagttatccaatttgattttcacatggcctatgaagggttaggtttttgtcagagggaaaagttgccttttaaaaataaaactcggccagacgcggtggctcacgcctgtaatcccagcactttgggaggcagaggcaggtaaatcacctgaggacaggagttcgagaccagcctggccaacatggcaaaatcctgtgtctactaaaaatacaaaaattagttgggcatggtggcatgcgcctgtaatttcagctactcagtaggctaaagcacaagaattgcttgaacccgggaggcagagtttgcggtgagccgagatcgtgccactctactccaggctgggtgacggagtgagactgtgtctcaaataaataaataaataaatagaaataaaaataaaagtcacatgcccgtagtgactgaattcaatcactatgaaaggttatacaatccaggttagtttcctgctcgtttcatgcccccattcactctccagaggggtccgttgtcaacccatccacccagaaattccccacctacacaaacacatgcaaatatctttttgcaaaaaaaaaaaaaaagctgtctatcatcaccagtttttgcat

SEQ ID NO: 22081 - DNA, 816 bp, Homo sapiens
tgcaatgaatcttgctgtttgggagggctctgtcgtataaatggaagctggctcttataaatatttggttaattggctgtactatctcaaataaatgctttgctctcggtgtttctggtggttaacagtttgggaagcagtttttatatgcattagccagtggctgaaatgtaatcagcrctaaataaaagttgattgaattgaattgagttatccaatttgattttcacatggcctatgaagggttaggtttttgtcagagggaaaagttgccttttaaaaataaaactcggccagacgcggtggctcacgcctgtaatcccagcactttgggaggcagaggcaggtaaatcacctgaggacaggagttcgagaccagcctggccaacatggcaaaatcctgtgtctactaaaaatacaaaaattagttgggcatggtggcatgcgcctgtaatttcagctactcagtaggctaaagcacaagaattgcttgaacccgggaggcagagtttgcggtgagccgagatcgtgccactctactccaggctgggtgacggagtgagactgtgtctcaaataaataaataaataaatagaaataaaaataaaagtcacatgcccgtagtgactgaattcaatcactatgaaaggttatacaatccaggttagtttcctgctcgtttcatgcccccattcactctccagaggggtccgttgtcaacccatccacccagaaattccccacctacacaaacacatgcaaatatctttttgcaaaaaaaaaaaaaaagctgtctatcatcaccagtttttgcat

SEQ ID NO: 22082 - DNA, 816 bp, Homo sapiens
tgcaatgaatcttgctgtttgggagggctctgtcgtataaatggaagctggctcttataaatatttggttaattggctgtactatctcaaataaatgctttgctctcggtgtttctggtggttaacagtttgggaagcagtttttatatgcattagccagtggctgaaatgtaatcagcgctaaataaaagttgattgaattgaattgagttatccaatttgaytttcacatggcctatgaagggttaggtttttgtcagagggaaaagttgccttttaaaaataaaactcggccagacgcggtggctcacgcctgtaatcccagcactttgggaggcagaggcaggtaaatcacctgaggacaggagttcgagaccagcctggccaacatggcaaaatcctgtgtctactaaaaatacaaaaattagttgggcatggtggcatgcgcctgtaatttcagctactcagtaggctaaagcacaagaattgcttgaacccgggaggcagagtttgcggtgagccgagatcgtgccactctactccaggctgggtgacggagtgagactgtgtctcaaataaataaataaataaatagaaataaaaataaaagtcacatgcccgtagtgactgaattcaatcactatgaaaggttatacaatccaggttagtttcctgctcgtttcatgcccccattcactctccagaggggtccgttgtcaacccatccacccagaaattccccacctacacaaacacatgcaaatatctttttgcaaaaaaaaaaaaaaagctgtctatcatcaccagtttttgcat

SEQ ID NO: 22083 - DNA, 816 bp, Homo sapiens
tgcaatgaatcttgctgtttgggagggctctgtcgtataaatggaagctggctcttataaatatttggttaattggctgtactatctcaaataaatgctttgctctcggtgtttctggtggttaacagtttgggaagcagtttttatatgcattagccagtggctgaaatgtaatcagcgctaaataaaagttgattgaattgaattgagttatccaatttgattttcacatggcctatgaagggttaggtttttgtcagagggaaaagttgccttttaaaaataaaactcggccagacgcggtggctcacgcctgtaatcccagcactttgggaggcagaggcaggtaaatcacctgaggacaggagttcgagaccagcctggccaacatggcaaaatcctgtgtctactaaaaatacaaaaattagttgggcatggtggcatgcgcctgtaatttcagctactcagtaggctaaagcacaagaawtgcttgaacccgggaggcagagtttgcggtgagccgagatcgtgccactctactccaggctgggtgacggagtgagactgtgtctcaaataaataaataaataaatagaaataaaaataaaagtcacatgcccgtagtgactgaattcaatcactatgaaaggttatacaatccaggttagtttcctgctcgtttcatgcccccattcactctccagaggggtccgttgtcaacccatccacccagaaattccccacctacacaaacacatgcaaatatctttttgcaaaaaaaaaaaaaaagctgtctatcatcaccagtttttgcat

SEQ ID NO: 22084 - DNA, 816 bp, Homo sapiens
tgcaatgaatcttgctgtttgggagggctctgtcgtataaatggaagctggctcttataaatatttggttaattggctgtactatctcaaataaatgctttgctctcggtgtttctggtggttaacagtttgggaagcagtttttatatgcattagccagtggctgaaatgtaatcagcgctaaataaaagttgattgaattgaattgagttatccaatttgattttcacatggcctatgaagggttaggtttttgtcagagggaaaagttgccttttaaaaataaaactcggccagacgcggtggctcacgcctgtaatcccagcactttgggaggcagaggcaggtaaatcacctgaggacaggagttcgagaccagcctggccaacatggcaaaatcctgtgtctactaaaaatacaaaaattagttgggcatggtggcatgcgcctgtaatttcagctactcagtaggctaaagcacaagaattgcttgaacccgggaggcagagtttgcggtgagccgagatcgtgccactmtactccaggctgggtgacggagtgagactgtgtctcaaataaataaataaataaatagaaataaaaataaaagtcacatgcccgtagtgactgaattcaatcactatgaaaggttatacaatccaggttagtttcctgctcgtttcatgcccccattcactctccagaggggtccgttgtcaacccatccacccagaaattccccacctacacaaacacatgcaaatatctttttgcaaaaaaaaaaaaaaagctgtctatcatcaccagtttttgcat

SEQ ID NO: 22085 - DNA, 1156 bp, Homo sapiens
ttttaaagtgtttctgacatcaaaggtgaccgctgggcttcaggaaaagagttcaaagtaagattgacttcgtgattgagatattcataagactcacactgcaaaggtaggttgggcattcttccactgcccaagatgcaagcgaatgatgcaggcagattccaagctgagtttgctgagataagggcctccaaggaactgagttccggcaacatgcattgtgagtacccataccatcaggtctgtctttgtattctgttctctgaacctaaaatgccccttcttcagttctctattaaaccctcttcacctgcacatgcttcaatactcatctcaaatgaatccatttctggctggcagagtttttcatctatcatttttttctccctgtcttatagcaaatattggatcctaaccttagttattttcacatgtaactcttttttttaccctacgatccttggcaacaggggatatggcttacttatttctgtgtctccacaccttgcttagcatagagccaaaccaattttttttttaattatcatacttcaggtttagtagtatctgcaaaaaaaaagtattctttatacagtattatctaagtggaaattttattttaaaattcaatagaaataatataaattagattttttttaaatctcaatatgatggaccaggttggccaaataccatccacagtgagggttattaaacggtagattcaaacagcagcatggtccatcagaaataatactttattcatttacttcaccatttattgtgcacctactatgtgccaggctaaaatcataagcagcttacattttacaaagggawgatataatatgcagctgcaaaatgccagcaagaaaaaaatataattttgtgataaaagtctgtaatcaagtgagtaaagtagaatattataaaaggcatcagggagatggtgaatttggagctggattttgttagctaaacacatattgtccaagccaacagcaaagggaaaatttgggccatcttagctacattaaatggctacacagtccatgtcataaatgcaattataagttgatggtggtctatgtatttggaaacactgactcaatcttcagcaaaagtggtttgaaaatgaaatgggaaaatacactaa

SEQ ID NO: 22086 - DNA, 1156 bp, Homo sapiens
ttttaaagtgtttctgacatcaaaggtgaccgctgggcttcaggaaaagagttcaaagtaagattgacttcgtgattgagatattcataagactcacactgcaaaggtaggttgggcattcttccactgcccaagatgcaagcgaatgatgcaggcagattccaagctgagtttgctgagataagggcctccaaggaactgagttccggcaacatgcattgtgagtacccataccatcaggtctgtctttgtattctgttctctgaacctaaaatgccccttcttcagttctctattaaaccctcttcacctgcacatgcttcaatactcatctcaaatgaatccatttctggctggcagagtttttcatctatcatttttttctccctgtcttatagcaaatattggatcctaaccttagttattttcacatgtaactcttttttttaccctacgatccttggcaacaggggatatggcttacttatttctgtgtctccacaccttgcttagcatagagccaaaccaattttttttttaattatcatacttcaggtttagtagtatctgcaaaaaaaaagtattctttatacagtattatctaagtggaaattttattttaaaattcaatagaaataatataaattagattttttttaaatctcaatatgatggaccaggttggccaaataccatccacagtgagggttattaaacggtagattcaaacagcagcatggtccatcagaaataatactttattcatttacttcaccatttattgtgcacctactatgtgccaggctaaaatcataagcagcttacattttacaaagggaagatataatatgcagctgcaaaatgccagcaagaaaaaaatataattttgtgataaaagtctgtaatcaagtgagtaaagtagaatattataaaaggcatcagggagatggtgaatttggagctggattttgttagctaaacacatattgtccaagccaacagcaaagggaaaatttgggccatcttagctacattaaatggctacacagtccatgtcataaatgcaattataasttgatggtggtctatgtatttggaaacactgactcaatcttcagcaaaagtggtttgaaaatgaaatgggaaaatacactaa

SEQ ID NO: 22087 - DNA, 550 bp, Homo sapiens
atggctgcatagtattccacggtgtatatgtgccacattatctttatccagtttattattgatrggcatggaaattgttttttagttattgctaataatcaataaaaatgtattgactgactgactgactactgtctgctgggctcagtgaaaaaatgagataagaatccttaccttcgtgatgattccacacacaggatatacaaataacaaataagtaacaatatcatatgatgtaacaaggggaggtcaaggatgttccacgattaactactagagaagtggcataaagacaatgcttacctgcttaccttatgaatccacaaaacaaagaggcctggcatggcacagactgttcaacacagatgcaacttgagcaggagctttcaggtgatttgaaggctggagaaaagtaggaagccattcctgttgggaaaacttcatgagtgaagataagatttcagaaacaatctaaggtgggtggatcatttgagcccaagggtttgagaccagcctaggcaacatggaaacaccatgtatcaaaaaaaaa

SEQ ID NO: 22088 - DNA, 550 bp, Homo sapiens
atggctgcatagtattccacggtgtatatgtgccacattatctttatccagtttattattgataggcatggaaattgttttttagttattgctaataatcaataaaaatgtattgactgactgactgactactgtctgctgggctcagtgaaaaaatgagataagaatccttaccttcgtgatgattccacacacaggatatacaaataacaaataagtaacaatatcatatgatgtaacaaggggaggtcaaggatgttccaygattaactactagagaagtggcataaagacaatgcttacctgcttaccttatgaatccacaaaacaaagaggcctggcatggcacagactgttcaacacagatgcaacttgagcaggagctttcaggtgatttgaaggctggagaaaagtaggaagccattcctgttgggaaaacttcatgagtgaagataagatttcagaaacaatctaaggtgggtggatcatttgagcccaagggtttgagaccagcctaggcaacatggaaacaccatgtatcaaaaaaaaa

SEQ ID NO: 22089 - DNA, 550 bp, Homo sapiens
atggctgcatagtattccacggtgtatatgtgccacattatctttatccagtttattattgataggcatggaaattgttttttagttattgctaataatcaataaaaatgtattgactgactgactgactactgtctgctgggctcagtgaaaaaatgagataagaatccttaccttcgtgatgattccacacacaggatatacaaataacaaataagtaacaatatcatatgatgtaacaaggggaggtcaaggatgttccacgattaactactagagaagtggcataaagacaatgcttacctgcttrccttatgaatccacaaaacaaagaggcctggcatggcacagactgttcaacacagatgcaacttgagcaggagctttcaggtgatttgaaggctggagaaaagtaggaagccattcctgttgggaaaacttcatgagtgaagataagatttcagaaacaatctaaggtgggtggatcatttgagcccaagggtttgagaccagcctaggcaacatggaaacaccatgtatcaaaaaaaaa

SEQ ID NO: 22090 - DNA, 578 bp, Homo sapiens
catagcaggtactggacgttttttgagaaaaagcactctgcccaaataamtttgtagtttgaggtaatcaaaggtgtaaaacaaagtaggaaatgccattagaacagggaagtgctgcgctgattcaaaaaaggtagctcttatttccagtggttgtctggtagagtttatcagagagctgaattttgagttaggccctgaagaataagtagaatttggacatgtgagactggggggttgagaaggagactggaatagcaaagtcactgaagcagggaatgttgaatgatcaaaggaccattaaatagtttagtgtgtttagatcagagatctctcatggaagacgatggaaaacaaaacaaacgtgtaagtttccaccactttttagtaatgttatttcactttccttctcttcttttaaggtaaggtctgtggaaaaatattgccttcaccattgctggcagagaccagtgaggccatggttccatttgtttctgatacagaagacagtggcagtggctttgagcttaccgttactgctgtacagaagtcagaagcaggtgagtgtttcaggtatt

SEQ ID NO: 22091 - DNA, 546 bp, Homo sapiens
tacccaaaagtgatagatacagtcctaatctctgaacttcagcaggagacatttattataattataataaactaccactaatagctcttgcaatacagctttaagaatctatatctacttatagacatctgcaatttaataaagatatttgaccttaaacatacacagaagggataatttgatattcttcagaggccagcaggcgcgtgtattccgctgcttagtgccctcacagttagyatttggctcatctttaacttgcatttcttttctgcctgctgcctacatttttctcagccatgtgctaaccaatataactgaatcctccttttatctatatgatgccacaggataatgctttctataattaaatgaattacatatacatgcaaagctaaatattaaaagaaaaaaataagatacttctaagcatgaatttaattgagcaatattttataaatatataaaattaatgtataaggttatataatcatcataatttaaatatgctcaatataaaaactttagacatatctacaaagccat

SEQ ID NO: 22092 - DNA, 520 bp, Homo sapiens
gctgtctccttgtggttaaatgaggattaatccaagttatctagaaaatagaaatggaaacaaagtgaaaatgataagggaattaggaaaatgaaatcttagatcgactatggtgagggaataggacaaatgaggcatgaaaggaataaatacaagagttggcaagatgaaagtggatcacagcttctgagaaaaacacagctagtattttggctatgtgtggggttgccaattaaaacacaagacactaagttctttttgaattagataaatgyccagtaaaaataaatctagacttagtaaaggagatgggtttttttccttaaaaagatgattgcaatagggaaaatgctctaaactctgaaatctgcaagcatagcaagatcaataagaatttttttttctttattttagttgggacaggttatcagggataacaaaaaacttttaagagtaaatctacggagattgagcagacagcatggttgccattgtatgataggaaatgtatgtcaatgtg

SEQ ID NO: 22093 - DNA, 565 bp, Homo sapiens
ggaatgcagcaattattctcgtgaatgtgcaacatgtcacagtgtctgaagctggacagatttgtgtctgtcactgctttcaactgaggctcacttggcacaggtctgctgacacacccatctcggaggcaatctaaacataaaaacaacatgatttagatgtgttcatgcatttattacatagaaacagaagatccccacatctagccgggatggcaaccataaaagcactggagttgacycaagccatggctcaaaccgcaaaacacttaggagccaggtgtccacagcatcagtgggcgctttaaaccccagcaagttcagcactttccccctttctaacatgactcaggccttcccaaggaggatggagagggagaaactgagaaacaagagtgtgtcctaaatagtcagagataaaggtgagattatagcattccagaagccacaccttcttctcttctgtataatcccaagtcttctagcatgtgagggttacaggcatcccagcagcacggcacacgtggaggcctcggctcctgtggctctccggagctgtccatgg

SEQ ID NO: 22094 - DNA, 589 bp, Homo sapiens
agattcatcttaaagatggtcagcaaatgacatgtgccaaagcccagtagttttgcacctagactttctagagtctacagaagacaacacacatttacaaattgtttatcttagctaagtccttagaataatagtatctaggaagaaggctgtagtttgaatatggcaaatgttctccattttcagtttaataaaagtaatgtcaatttttaaagaacagctagagcttacatatgcaaagtatcagttactaagtaagacttctgaactgaatttcatagcctttcaggaactttgtacacctcgtttcttctagcacagatacacctgttgctattacaggactcttaggtattcctaaatgaataaaaagcataacgtcttatcactgaaaagggacttcaagagatcactgagctcttgtctttcagtagggtttgtcatgagaagtatctctccagttctgaaaaragatattaatcactgtcctcaacagactccataaataaaaaatcaaaatgtgtaatcatatccacatatgtagatatgcagactataggttaagctgaaaataacagtttttatctca

SEQ ID NO: 22095 - DNA, 475 bp, Homo sapiens
atgtttcaacatctgatgtttgaggttactggatgaacgatgataaaaatacgggccatayacaaggaatcatgaacgtatcaaatagccaaaaaccatagtttactcataagaagtaaatctggcaacaccaccttttaggtagtaagacatgcatgcctaattttaagtttaaacatttagttagttagatgtttttctacttgtttgcttcttctttaatttttttttaaaaggagactctgcaagtaatacttgtttacttctgattccttattacagaaattccttattataaatgattaatgaagtttccttgagtttaattagaattagtaaccaccacataaataaatcttaatatagatttagctcctgaaggaatgaactttcagcaaatcttgaatgttttgcattatggcaaattaaaatcaggtggcaaaagcatccataattaatgaaaatcattttaaaa

SEQ ID NO: 22096 - DNA, 1811 bp, Homo sapiens
aatatctataggctcttctggctctcagagcctatggggaaggtttttgtttcattccagagacccttatgaaaagatacctccctctcttatttcctttccccacctattcatctcgttcatttaatgaacactgcctaggtgcatatcttgtgctgggtagtgatgaagaggcagggtctttttccaggcactcacagacttgagaatgggaatcctgtaatccgggcactaagtatgatggagagggaactgttcacacaggaggctgtgagggcacacaggaggcctctaagccagcctggggtcaagcagacttcctggagggggcactgctagctgcagggtgggataagagttatcgaggtgaggataggagtgggtggcacagtgggggaggctgttccagtagggggaacagcatgtgcaatgactaggaggtgaatgaggcacatttgggaagctaactgcagaagaggcatgggcagcacaggcatgaacaggcccttccggagctctggccctgacctagtgctgttgaggacaaaagatccaggctcccgccaaggctctcattctgccccgcagcctgtgatcctaagcaagtggcttccctgccaccagcctcagttttcttgtgcgtcaaacgggcctacagttctttgaccgactccttggggcaactgtaaagccctaatgaggcagaagaagtggatgtcccttggaaaagcccagagtgcagtactgagtgatgggctggagacagtccccggcagggcggggtcatccccactcttgcctttccccacagcaccataaagctggaaagggacgggaagaggcagcctccagcacgcaggctggaggaactctctgcaagcggctcttggactctactcctggcagcaaaggcaactccttttctgcctccttggaracctgtgcaaagacaaggcctcccagcccaacagcggtcctcgcgtttgcccagaggatttcaagagctgccaggaaaaaaagccctgcctcgggctgtacaggagcagcagcaaatatttactgactgctgcgcggctgctccaagaggagcgtttctgggactgagtagaggagacacttagagggcccaggcctcagcccggccgatggtgcaggcctcaccggatgcccactggatcctgagcactgcgcggcaatggtccacgtgtctggccggcgttcctatccatcccctcaacctcaaccattccacacctttattgttttctgtaagacccaaaacagaagacttcagatgctttgagaaaatgaaaccaatcaggaataatccttccaattcccattctctccttctctaagccacactcaccttcctttccctctgccagggcagggagaatggtcacctccacccaggtggctactccttgcacaactccaggaggcgccattcccatgtggcctgtgccccagaactgtgtaatgcggttcctgcgctcccgagcccatgtttctaccaccctgccctctctgggcttggtttcacagcaccccacagctgggttggcaacacttgcaacggccccagtgctcacgactccattccatcctggttctctctgtacttctctcactgccccctatctgtcctgttggtgggctcctctttctcctgcccagtcaatgtgggagccctgggaaccatgcccttggccctcttcttctcacccacagacagatcatccaccctgatggttttggtaactacacaatgctgaccactctggaattgccacttttgcccagatgca

SEQ ID NO: 22097 - DNA, 1811 bp, Homo sapiens
aatatctataggctcttctggctctcagagcctatggggaaggtttttgtttcattccagagacccttatgaaaagatacctccctctcttatttcctttccccacctattcatctcgttcatttaatgaacactgcctaggtgcatatcttgtgctgggtagtgatgaagaggcagggtctttttccaggcactcacagacttgagaatgggaatcctgtaatccgggcactaagtatgatggagagggaactgttcacacaggaggctgtgagggcacacaggaggcctctaagccagcctggggtcaagcagacttcctggagggggcactgctagctgcagggtgggataagagttatcgaggtgaggataggagtgggtggcacagtgggggaggctgttccagtagggggaacagcatgtgcaatgactaggaggtgaatgaggcacatttgggaagctaactgcagaagaggcatgggcagcacaggcatgaacaggcccttccggagctctggccctgacctagtgctgttgaggacaaaagatccaggctcccgccaaggctctcattctgccccgcagcctgtgatcctaagcaagtggcttccctgccaccagcctcagttttcttgtgcgtcaaacgggcctacagttctttgaccgactccttggggcaactgtaaagccctaatgaggcagaagaagtggatgtcccttggaaaagcccagagtgcagtactgagtgatgggctggagacagtccccggcagggcggggtcatccccactcttgcctttccccacagcaccataaagctggaaagggacgggaagaggcagcctccagcacgcaggctggaggaactctctgcaagcggctcttggactctactcctggcagcaaaggcaactccttttctgcctccttggagacctgtgcaaagacaaggcctcccagcccaacagcggtcctcgcgtttgcccagaggatttcaagagctgccaggaaaaaaagccctgcctcgggctgtacaggagcagcagcaaatatttactgactgctgcgcggctgctccaagaggagcgtttctgggacygagtagaggagacacttagagggcccaggcctcagcccggccgatggtgcaggcctcaccggatgcccactggatcctgagcactgcgcggcaatggtccacgtgtctggccggcgttcctatccatcccctcaacctcaaccattccacacctttattgttttctgtaagacccaaaacagaagacttcagatgctttgagaaaatgaaaccaatcaggaataatccttccaattcccattctctccttctctaagccacactcaccttcctttccctctgccagggcagggagaatggtcacctccacccaggtggctactccttgcacaactccaggaggcgccattcccatgtggcctgtgccccagaactgtgtaatgcggttcctgcgctcccgagcccatgtttctaccaccctgccctctctgggcttggtttcacagcaccccacagctgggttggcaacacttgcaacggccccagtgctcacgactccattccatcctggttctctctgtacttctctcactgccccctatctgtcctgttggtgggctcctctttctcctgcccagtcaatgtgggagccctgggaaccatgcccttggccctcttcttctcacccacagacagatcatccaccctgatggttttggtaactacacaatgctgaccactctggaattgccacttttgcccagatgca

SEQ ID NO: 22098 - DNA, 1582 bp, Homo sapiens
gccacctggggctgggctggggcaacaggtgagatcaactaccaaagaggagaaaaaaagggaagaaggctgggcgtgggggctcaagccaggaatcccagcactttgggaggccgaggagggcagataacttgaggctaggagtttgagatcagcctggccaacatgacaaaaccctgtctctactgaaaatgcaaaaattagccaggcatagtagtgggtacctgtaaccccagctacacaggaggctgagacaggagaatagcttcaacctgggaggtggaggttgcagtgagccaagatcgtgccaccacactccagcctaggaaacaagagtgatactctgtctcagaaaaaaaaaaaaaaaagaagaagaagaagaaggaagaggaggaggaggcggatcaggagagaggtgagggagaggtgagggagtaaaatctgcaaaagaacaaaaaatcagaggagaagcaggtggcaataagggagggcatccgtgtctgaggggcccatagatcagatctatagtgttgggaccaccgattgtcttagagcaggcccctgttatcacaggtcggaaactcgaggaagtgtacgtaagaatgagcctgcactgattattttactaccctgtgaaaagcctgtcttccaaattcacttgtactgaaggaaaacatagtgagacactcaaattacctcactaccatggaggggaatgaagatatcgaaggagaacctgaaagcaagtttcaaaaggagaaattgtccccatgcaccgtccttcttaccctcaggtaaagaggggatccgcggctgaaactgattgatggggtgtggtgtcgtatcgccctctacccccaccttcgccttctggcctttctatccaaaaagcggatgggagcaacccatmtagacacaaaattccttgtcttcttcgggggagaaaaatcagctatagaaatgatggtggaacatttgacttctccatgtgaggattccatgctgggctcctgacacaactcatccctctgctgctctcttttctggtcagtagatgtgagagccccaacaagtcccaagaggatgggctaccaggcccaccccagactgtgttgctgggaaacacagacgagggaccatcagcccttttcaagcttctatccaccaaaggccttgcctctgagggctgcctgaaagcccagctgcttccctgcattggtcctgcaaggacaaggattatgctgctagtgtggtttgcagggagtgaccattagcttccctagggtctctaatctgcaacccctggctgcagttgtggcccaaagaggtgacggcagcacgtctgtgtgaagggcagagtggagcagataccgagatgacccaccctgagatcaccaggacgccattccaggagtcccaccagctctgcaccggcagccgtagccaggaccctgggggatgtgtgtcttccccttggggactttccagctaacccctacggtggccctgccagagcctcagctgtgtttttttgttgttgttgttgttgttttgcctctgctttggggcagggaaggggttt

SEQ ID NO: 22099 - DNA, 1579 bp, Homo sapiens
tgcaaaatcaacctatccattccatttattaaatagcgaagtctaagcaatctcatagtagtcctctgcatggtacctagctgtgtttcccttgaaaacgtgaacacttacaacatggtgtagttgttccagtactccagggagccttggcccacagtttgggaaccagggccttagcaatttcctctttcggacaattgcaactaatttggaatgctatttagttcagcctcctggctcccgrccacttcttcctagggaatttcctcctttaattgctggacagaaatgctggtcccagtagcactgatggccctgcacatgaaacgcagcaagccttgatgctagttgaactaagagaaaaccaatatctccaaatcttaaaaacagacagacatgtttaagcatttggtgtaaatccatgaagagaagcttaagtctggaaaatacaatagaggttccatgcatcctgggagccccagcaagcagctgacaccatgttgagtagcgctgcctgcccagagagcctccctggggccagagttcatgcactgacatccagggcacaattctgttgtaagtcagcttaggcaaagcatgctgggatgatgagggctttctcgttttaccacatcccagaagaaaaccatgttttaaccacagtttggatggtgttttgttccattattaagggcaaagcaaagcttttaatcttagtaactggacaggaaaatagaaaatacaactatattaaaaatgtaccttgctgatagaaatagtctagtagttactaataggaaaaataagtaaatagaaaaagaagagagaaggaaacccttcaagttacaaggggaaaaaacgagcaataaaagtaattttataaaatgctaaaagatctcttcttacaaataaagaaaatgctactgaggaaaaaacacacacacacacacacaggaaaatccaaccacatcaccacgtccacctgctcttgggctgcctggtgcacctgagaccccacggagttgtttcatgtgtccccaccatgactggtgcgcactctcctgactgatgtcacccgcagaacagtgggagatcctacttcctctagaggctttctctgaacagtgatgtcccaaatgcagcacaggaaagtgggactaactcataacagagtccaggtaatgctcaggcaagaacaatggtgctctgaccttcggggtactagaaagggagaccacaatgaggcccggatgaagaccagggatttgtctgtgagatgacagtgaaagtggcctaggagtggggatggaagatatgcacgttagagagggaaggacaagggggcactcactcctttggctcttgtacagccagtgcaaggggccaataaagacagatccatccagtgagcaggttggggcttggggccccttttgtccaagtatattagtcagggttctctagagggacagaactagtaggatagatgtacagatgaaggggagtttattaagaagtactgactcacacgatcacaaggtgaagtcccacaataggccatctgcaagctgaggagcaa

SEQ ID NO: 22100 - DNA, 558 bp, Homo sapiens
acataattgtaatttccagcaaattgtgtattgcacttatctgttaaatatttttcatcaaaacagtagagcagcacgtttaacttaattaatttagagaaaatgtctgccaaagaacttcactggcaaagccagttcttaattgtgaagcaataactaaagtggaattttctgtgaggaaaaagaaaactgtgattttgtttttcaatttcaataaatatgtaaatatgtatccccactatcatctcacttccaaattctaacatacataagtaacacatggttttcaggagatagatcaagtcacaggggcctacccatcagtctttcagtctttcaacctagattaggaaaggcactttctgcttcaatatttcatacattgatgccttcctgratgcatcttatgatgctccattattatcaattctcaaattgtttatttgtatgagaccccagagggtttcacatcctggaataatgctccatagtaatttcaaaagagggaaagaaaaataaagtttctgtaaagagagatatggggaaaaaaaagaggca

SEQ ID NO: 22101 - DNA, 684 bp, Homo sapiens
gaagaattaagccaagttatttatggcagcgtagttttctctttatatgaccagctgtctcctttttttctgatgccttttcttgtttttgcaaaagatcacttaagaccttgacagcatcattaaatttattatcttgtaaaaagctctataacttaaagcctctaggcttgtgtgatgtctttttataaaatacattcctctttcctgtcagaaagttgaaagtatttsgccattctagagatcagttttccaattttcagtagactgaagagagctttgttctctcaaagctcctcgcaggatttgatggttcacacacagttgctgggagaatcataggcctttacaatgggaagtagcattggaatcacagccatcaataccttgaaggactagagaaacatccctagaaatctgaagcttctacttcgtgtcacttgcgccgtgaaccagcttagtcgcctgctagggagaagagtgctgcctccaccgttaaactgtgcccttagagccatagcatgtcagcatctctcaggttctcaaaggcagttagacttcaatctggtgtttcagacactttgacccctaggctgttactttatccacattcgttaggatacagcctagcctgctgtttccctctctgcaaattgcatgaagtacatttcaattgagctttac

SEQ ID NO: 22102 - DNA, 550 bp, Homo sapiens
tttgctcttcgtgcacatggtacttgcgcctcgacctgcagttacaccagtcgcatcatctgtacttgccagtactgtctgttactcgtctaggtgctcagttagtcagtgtttgtgttctgttttcatttctcataaagcagtcccacaactgaaggtttttcccgagagaactgaacagtattgtaactaaatagatttatttcaagcttttcgtagcarctggccggttagctcagttggttagagcgtggtgctaataacgccaaggtcgcgggttcgatccccgtacgggccaggattgaaacttttcgaaagtacgattactgcactccgttttagagccaagtaacgtctctggggaaaaacagcgccacatttccaatcccagaacagggagcgtattggagcgcattctaaagtgggcgtgtcttgagaggaagggattgagagaaaccggggttgtttcgtgatctttgcttctacatcttatggccacaatatatggctcctgaacttactgtgtgaactgtaaacaaaaggctttggg

SEQ ID NO: 22103 - DNA, 550 bp, Homo sapiens
tttgctcttcgtgcacatggtacttgcgcctcgacctgcagttacaccagtcgcatcatctgtacttgccagtactgtctgttactcgtctaggtgctcagttagtcagtgtttgtgttctgttttcatttctcataaagcagtcccacaactgaaggtttttcccgagagaactgaacagtattgtaactaaatagatttatttcaagcttttcgtagcaactggccggttagctcagttggttagagcgtggtgctaataacgccaaggtcgcgggttcgatccccgtacgggccaggattgaaacttttcgaaagtacgattactgcactccgttttagagccaagtaacgtctctggggaaaaacagcgccacatttccaatcccagaacagrgagcgtattggagcgcattctaaagtgggcgtgtcttgagaggaagggattgagagaaaccggggttgtttcgtgatctttgcttctacatcttatggccacaatatatggctcctgaacttactgtgtgaactgtaaacaaaaggctttggg

SEQ ID NO: 22104 - DNA, 648 bp, Homo sapiens
atgaaaggaaaaaatagcgggctctctttcaatgctgtgtaatttttttttttttttaccttttgtagtcatttttccaccaagaaaggcatcttcctttggtatagagttctatgtaattattggttatgtgctaatacttaatattgtatttggctttcacagataaaaccaacctataattaagtaattcagaaccactgaatttcttaagtgagctgttctaaggaattctaaaccttttgcctttaactgtgaaaatactgtctaatttttctgtctcaaaggacagctttccaattttcttactagctatttaagtatcatatgatgatccatgtggtcactgtagtggtcattcaacagttactagaaygattatatttacttgaaaagttgttttctaggagagacttcgactattcatatgtttccccatcttttctttttcttctttttcacaaatcttttaattgtttttccttccttaaactacctgaaattttgtggtaagccacattttggatcagaatttgttagatggctttatttatagcacaacttattgttctattacccaaaaaaataggaataatgtattttacattactaaaactttataaagtaaataaaccatagtaagacatt

SEQ ID NO: 22105 - DNA, 482 bp, Homo sapiens
tggaaaacagaaattgagtccaggtctagatatcaagaagcacaaagagatccasaaaagaccatggagaattcaaagaccagcaacaggcttcaaaagccttctatgaatagggcatgtaaggatttgctgggggcaagggtgggtttgagagctggagatggagatgaaattagtgaacaccatgcctctctcttgtactaaagaggccgcagggaagacaaagctcagttgtattcaacaaaggccactcaggtagcaccataaaggaagagctgtaacacggacacgggagtagtggaatcagtcaagagggaatttcaaaggtcaaagatgaaaggctggctgggcgcggtggctcacgcttgtaatcccagcactttgggaggccgaggtgggcggatcacggggtcaggagatagagaccatcctggccaacaaggtgaaaccgcatctctactaaaatacaaaaaattagccgg

SEQ ID NO: 22106 - DNA, 530 bp, Homo sapiens
tgattatggaggatgagaagcccccacaatgcgccctttgcaagctggwgatctcagaaagctggtggtatgtttcttttcaaagaaggaaggagaaatgattgattaatttattaagggttgacacaagaaacccttatgtctcgtgttaggcaagagaaaaatttatctttttctggagtccacaactcactcttgagaaccaggaaaactgatggggtaagttctagttcaagtctgaaagcctgagaacaaagagtgcagctgacgcaagtcttgatcagagggcaggagaagtccaatgtctcactttgctcagttgggcaaagagaaagaagtttccctttctctgccttttgttctattcgacctgcaatagattggatgatgcccatgcacatcgggaagagcaattttctttactcaggctatggattcaaatggtgatttcttccaggaacatcctcacagacacatcgagaaacaatgtctagctagctatctgggcactctgtagcctagtcaactaa

SEQ ID NO: 22107 - DNA, 530 bp, Homo sapiens
tgattatggaggatgagaagcccccacaatgcgccctttgcaagctggtgatctcagaaagctggtggtatgtttcttttcaaagaaggaaggagaaatgattgattaatttattaagggttgacacaagaaacccttatgtctcgtgttaggcaagagaaaaatttatctttttctggagtccacaacycactcttgagaaccaggaaaactgatggggtaagttctagttcaagtctgaaagcctgagaacaaagagtgcagctgacgcaagtcttgatcagagggcaggagaagtccaatgtctcactttgctcagttgggcaaagagaaagaagtttccctttctctgccttttgttctattcgacctgcaatagattggatgatgcccatgcacatcgggaagagcaattttctttactcaggctatggattcaaatggtgatttcttccaggaacatcctcacagacacatcgagaaacaatgtctagctagctatctgggcactctgtagcctagtcaactaa

SEQ ID NO: 22108 - DNA, 530 bp, Homo sapiens
tgattatggaggatgagaagcccccacaatgcgccctttgcaagctggtgatctcagaaagctggtggtatgtttcttttcaaagaaggaaggagaaatgattgattaatttattaagggttgacacaagaaacccttatgtctcgtgttaggcaagagaaaaatttatctttttctggagtccacaactcactcttgagaaccaggaaaactgatggggtaagttctagttcaagtctgaaagcctgagaacaaagagtgcagctgacgcaagtcttgatcagagggcaggagaagtccaatgtctcactttgctcagttgggcaaagagaaagaagtttccctttctctgccttttgttctattcgacctgcaatagattggatgatgcccatgcacatygggaagagcaattttctttactcaggctatggattcaaatggtgatttcttccaggaacatcctcacagacacatcgagaaacaatgtctagctagctatctgggcactctgtagcctagtcaactaa

SEQ ID NO: 22109 - DNA, 535 bp, Homo sapiens
aaaaaaattagtatgcctattgtgatactaaatgaagactggaaacaaaaataaacaagatgcagtgctttccactgaatatctcagagtctggtaaggaaggtatataaatcattaaccacagtaccctgtgatgagtgctaattaggggatatacttgatctaacctattcacaccatcttattatcaaattcaagaraatacaaaatgactaccgaaggttagagactcttttaaggacatagttaacttttttttttaatccaaatgaaaccgatgatctttcttctagggcattatcatgaggttctaactccatgtactaatcaatatttttcttaagtgtgagaacagaagaaagaaaggctagacttacaaggaaggaaaaagggactcaaaggcaaaggccatgatttaatttttcaaaaaatcggtggagcacagtgtctcaaacctgtaatcccagcactttgggaagccaagatgggaggatcacttgaggccaagaatttaaggcctgactgggcaacatag

SEQ ID NO: 22110 - DNA, 535 bp, Homo sapiens
aaaaaaattagtatgcctattgtgatactaaatgaagactggaaacaaaaataaacaagatgcagtgctttccactgaatatctcagagtctggtaaggaaggtatataaatcattaaccacagtaccctgtgatgagtgctaattaggggatatacttgatctaacctattcacaccatcttattatcaaattcaagagwatacaaaatgactaccgaaggttagagactcttttaaggacatagttaacttttttttttaatccaaatgaaaccgatgatctttcttctagggcattatcatgaggttctaactccatgtactaatcaatatttttcttaagtgtgagaacagaagaaagaaaggctagacttacaaggaaggaaaaagggactcaaaggcaaaggccatgatttaatttttcaaaaaatcggtggagcacagtgtctcaaacctgtaatcccagcactttgggaagccaagatgggaggatcacttgaggccaagaatttaaggcctgactgggcaacatag

SEQ ID NO: 22111 - DNA, 535 bp, Homo sapiens
aaaaaaattagtatgcctattgtgatactaaatgaagactggaaacaaaaataaacaagatgcagtgctttccactgaatatctcagagtctggtaaggaaggtatataaatcattaaccacagtaccctgtgatgagtgctaattaggggatatacttgatctaacctattcacaccatcttattatcaaattcaagagamtacaaaatgactaccgaaggttagagactcttttaaggacatagttaacttttttttttaatccaaatgaaaccgatgatctttcttctagggcattatcatgaggttctaactccatgtactaatcaatatttttcttaagtgtgagaacagaagaaagaaaggctagacttacaaggaaggaaaaagggactcaaaggcaaaggccatgatttaatttttcaaaaaatcggtggagcacagtgtctcaaacctgtaatcccagcactttgggaagccaagatgggaggatcacttgaggccaagaatttaaggcctgactgggcaacatag

SEQ ID NO: 22112 - DNA, 535 bp, Homo sapiens
aaaaaaattagtatgcctattgtgatactaaatgaagactggaaacaaaaataaacaagatgcagtgctttccactgaatatctcagagtctggtaaggaaggtatataaatcattaaccacagtaccctgtgatgagtgctaattaggggatatacttgatctaacctattcacaccatcttattatcaaattcaagagaatacaaaatgactaccgaaggttagagactcttttaaggacatagttaacttttttttttaatccaaatgaaaccgatgatctttcttctagggcattatcatgaggttctaactccatgtactaatcaatatttttcttaagtgtgagaacagaagaaagaaaggctagacttacaaggaaggaaaaagggactcaaaggcaaaggccatgatttaatttttcaaaaaatyggtggagcacagtgtctcaaacctgtaatcccagcactttgggaagccaagatgggaggatcacttgaggccaagaatttaaggcctgactgggcaacatag

SEQ ID NO: 22113 - DNA, 660 bp, Homo sapiens
tgctgcactccatttgtattaatcttactgaagcccctttctttggctaaacactcccaccctgcaaaggatgcttaaacagaatgcacgccaactgagggtcctctactgacacaggcccccaagatccacctggaggcttgtggctccctcggtgtttctgccaactgcccagattctccccttgcctgactgtgacgggatggctcaggcaccacagctgtgtgttrgaggttggggggtcccacctcctccttcagcttccagcagccaccaccgctctttgtaaggagctgagagggtgatagggaacaagtgtctgtcttatggttttccaaagcaagggattttccaaaactcctgcccattttacccttggttttcccagaaatggaaatgtctggaagggcacagggagatgattgatacaggagacacaaagaaacattaaatgctgcaagaatgcatttttaatccagttcaggtgttgcttctaaagatccactttccctaggttcatttatctttgttttgatgtatgaacctaataatcgctttctctatctgcgaatcaatcaatctatctgtctatctaaccatttatccatccatccatccatccgtccatccatctttatctttatgtcttattacatcacc

SEQ ID NO: 22114 - DNA, 671 bp, Homo sapiens
ttgtatttttagtagagatggggtttcaccacgttagccaggctggtctcgaacttctgacctcaaatgatctgcccacctcagcctcctgaagtgctggaattacaggtgtgagccactgcacccggcctgggctttgtattctaatctggaaactggacatcataatttcagagggttttgtaggggttatataaaagagcaggctatccatgttaccatgttttcttctatcaaagtgcttattgtccagttgatggactggtatctatgccatcaaggtcatgggcaatggggggtgcctcatgggcatgaatgtggatgagtcagcccgcacgcccatgctctgtgcactccttcacccccagcagctgccactggacagccctcaggcttaggatgggtacatcagtggtgcagtcctccctcagcacagccctacacccagaccttggcccacttgaatgaatagccttgtagtccccggtacctagggtttggtctgaggggaagtacaggctctggtaagtcccttggcattgctccatgtgtaggggtagcaccaggcgaggaccagagcaggatcctctaaagcacaggcgggcaggggcctctgytgcctggagctaagagtggtactggctgggaagacataatgcaatagcatctaa

SEQ ID NO: 22115 - DNA, 554 bp, Homo sapiens
taactaaataaaaatataaatgagaagaaaatctgccaccaaacatggcaaaaaatttatgttaaactcaaagaacaatgatcctttccaagtactctctggtttatattcttttactgtgtcaaatgaaacctctggctcataatttttaaaacaaaagacacagattctccatggaaaatctatgtgtaaattaacgtcaccaattctttattgacttcatcacaaatgccatcaatgttattattttaaaaaaatagcaagttgacttgccacttataaaactaatttgataaggtacagatggtatgctcttatgtctaccaatgatacacatgctcgaaacttaacaaatcagrcaacaagatcacatcacataaatacagtgattttatttacatttgagtaaactaaaattaatttagccaaaaatatttattgagtgactactattgtactattttatacactagaaatcaaagaaatttattgatctacagaattttgattctattttggggaatacattaatttaaaaaaatacatatattgta

SEQ ID NO: 22116 - DNA, 522 bp, Homo sapiens
agttaacatatacaaggtgcttaacactgtgtgtggtaccattaagtactcaacaaataatagcaattattgttatataactttggcccaattttgtaaaaagtctttagcttgaagtacccaaaaatacttgtatcatccttgaaaggcaacttttaaaaatcacagtgagacagccaaatgcctaggcaaataaaaaggggtccccagagaatctctgacccgccccacaagtgtttacatcagatgcttttgtgcagatgagagaacctgcccagagccttgtctgaacatgcccacatgcgcactgggggaatggggtggagccacgggcaagagggaggagcctggtttcttcytgtgtggtggcctgggattcaatctgggaggtggggggtctgtcagcaagactccatcttgctttgctgagttgtttttttttttttcttcccttttcgcccagtaaaaccctgttctactcacccttcagtgtgttcgcatgcctaaattttcctggtcgtg

SEQ ID NO: 22117 - DNA, 529 bp, Homo sapiens
tatcacaagtacaccaagggggaaaccaccccccatgatccaatcacctcccaccaggtctctctctctctcaacacctggggattacaattcaagatgasttttgggtggggacacaaaggctaaccatatcagagacctacctacttactgatgcgttcgaaacgaggcctactccagtactgagcccggcctctcaagctttggcttgagttatgctttatggatgctccctcaggcaggcagcacctagatacttgctcaaatcaggagtgctcagttttacagtcaataaggccctctcattgtactggtttccttcactgctataataaattgccacaaatttagcagcttaaaagtaacataaatttagttatcttgtagtcttggaggtcagaaatccaaaatgggcctcactgggctaaaatcaagatgttggcagagctgtgttcttttctgaaagctttaggggaaaatccctctccttgcatttccagtctctagaggctgcctgcattccttggtg

SEQ ID NO: 22118 - DNA, 1402 bp, Homo sapiens
actaggggagggattgcgttaggagaaatatgtaaatgtagatgacgggttgatgggtgcagcaaaccaccatggcatgtgtatacctatgtaacaaacctgcatgttctgcacatgtatcctagaacttaaagtataataaaaaaagttctttgaaatctctttaaggcatactttttgctactattaaatgatgtaaaatatgtgttctagttagtattatggttaattgcaaccaacagaaaaccctagtacagtagcttcaaacatacaagcttttttttttccttctctcatatggagataggcagtgtgggctggtaagataattcaggatgttacgttcatcaggtacattctgggttttgcccgaccgttcttgttgacttctgtcctcatgatgccaagatggttgtctcacctcaggcctgatttactgctttcatcaaattaaggggagagcaaaacatcacagagagggactgatgaaggtgcatacctgctgactccatctttttaaacgtttcctgggaagcctaacctagtaacttccactcatattttattagccacaccaggatatttggccacttctggcctcaagagagtctgaggagaggggtgttttaactgggcacatggctaccctcagcaaaacaagaattctgttaatgaagaagaaggggaaaatggattggtatagtcaactaccatgttatatgaaacacatagcacacagtgcctgcacagaacacctcagtttagccagatattccccataatggaaagtataatcccaccacctcatctttgatttttttttcctttgtttcactcacagaaatatctcttattttttttttctcccagacaagatattcatagaaaaaatacgagttggaagactaaaagcgatcctgtgatccaaattttacaaaaacaaaacaaaacaaaacaaaactaagactaatactcagagtctacatcacaactggttcttactcatccttctagattcagcataatttcacactacttcaaccatcacttkttggtcactttatccacaaattataaattttctttaaaatcaatcgtatcaactgtagaatttaaatatttaaatgtctttaactttttaaagttttagtcatatacatatagggacaaggagtaagaaggtattaacaatgtatttgtacttctgttacaatgtttagatttccaaaaaacatttatgtatccattggaacaaaaaaggaaagaaaataaatagaaatattcaacacaatcaaatataatagcaaggtttgaagaatatgaaatagaagggaatttacacatttcaggggagaaaacaagctgttatttccttgaatatatcttttggaatccacatctg

SEQ ID NO: 22119 - DNA, 634 bp, Homo sapiens
ctgtctgcagactagtaattattggaataaaccaaggtctttcattctgtaatttgcttcattggtttgattactaagtatttcttgagtcattaatatggactcttaactgttccaggtgctgaggatatgtgtgcatagccaaactggacgaaccctaaccctcatgatgcttccattcctataggagacaaaggaacatgtaaaaacggtgaaacgctaccatgactataatagtagcatgttataaggcaaaaggaggaaaaagtctcttgtgtctagtagtccagaggacactgaagatgctatcygaacagtaatttgaagcatcatgaggatatactggaagaggaagaaagtaacaccatgagagaacaatgaaactggaagaaaatagaggataggaagggaggtctcagcaaagtctgtgtatattgaagtagaaataaaagaggaaaaaccctggagaattttgtcaccagacattgtaattatgtttttagatgatgtcacatgtgtggcatttttccagggataggttcaagatgggactggaccatggaagtagctaccaacctatagcatagatggaagttctcaaatgagtaaggtcaggctattgggtgggtttaca

SEQ ID NO: 22120 - DNA, 634 bp, Homo sapiens
ctgtctgcagactagtaattattggaataaaccaaggtctttcattctgtaatttgcttcattggtttgattactaagtatttcttgagtcattaatatggactcttaactgttccaggtgctgaggatatgtgtgcatagccaaactggacgaaccctaaccctcatgatgcttccattcctataggagacaaaggaacatgtaaaaacggtgaaacgctaccatgactataatagtagcatgttataaggcaaaaggaggaaaaagtctcttgtgtctagtagtccagaggacactgaagatgctatctraacagtaatttgaagcatcatgaggatatactggaagaggaagaaagtaacaccatgagagaacaatgaaactggaagaaaatagaggataggaagggaggtctcagcaaagtctgtgtatattgaagtagaaataaaagaggaaaaaccctggagaattttgtcaccagacattgtaattatgtttttagatgatgtcacatgtgtggcatttttccagggataggttcaagatgggactggaccatggaagtagctaccaacctatagcatagatggaagttctcaaatgagtaaggtcaggctattgggtgggtttaca

SEQ ID NO: 22121 - DNA, 575 bp, Homo sapiens
cactaatcttattttatttatcagttgtttttcatactctgtcttctggaaacactcttcttttgccttctgagacatgacaatatcctagtttcccttctttctccctggttgttctttgcaggcacttttggggctcaagtcttcttggctcaagcaataaatgttgagttcctcaaggctaatttctgggctccttcttttcatagattcttcctaaatgatctcattcacttttgaggtttaatgaccaactatacatcaacaactcccagatttccagcccagcttgtatctgccttacaaactataattgtttattgccattgattgatttctctcagatgtctctgcctctagaaatcctacaccaaattctccaaattccttaccaagccctgcagcatatccaccwatttcagtaaatggttctgccatgtatccaggtgctcaccacgaaaatctaagcaatatcctcaaagtcatctaaaactcaacaccagtaatgaataaactaccaagtctgtttactgtaatgtctgggtatttctcaaatctatcattactgctctata

SEQ ID NO: 22122 - DNA, 493 bp, Homo sapiens
aaaaaaacggaacattgcaaatcgtgtttaactacagaaggttcttaaactttcattgatacagtggcaattcrgtttgctgacaatgcattagaagggaatgcattcgaagaatagctagaaggaaaaaaagttcgacagttattttttaaaagcagtttagaaactaccacacttaactaaaaacaaacaaaaaaacctacaaatacttctcatctcactgaccccctttgtccacagctaagaatagcagcagaatgctatgtcactatacatagaaaggagacaacctgaacctaaatggatgcccactgcagagacaacaggtccaacctgatggtgcacaccctgagctacagctccttcaaaagttatcttccctcacagcctcaacaccaggcaaggagcattaagagtttgtctctgttgttttgttcttccaaactacagatatatacagttgagaactcagaatttctagccaataaccaca

SEQ ID NO: 22123 - DNA, 603 bp, Homo sapiens
agtttgggagcaggaattgctggtatttccctcccttatatcaggagccagtatgtgctcaggcaaagcaggctagaggtaaatgctgtgcccctgcaggtgaggcctgctcttctctagagctgcctatgccaagatagtcaagtttcttttaggccatttggtcaactgacttccagcctttatgattaataaaggtaataatttgacatctcttgccatttatctctagctccactttgttccaacctgcatgggaaaaagaaacttactaagttgcctaaaattccaattattttaacctgggatagtctagactttctttcatcctacaatatttactttaagrcaataataaatagaatctttttagaattattgtttaaggcactactctataagcaatatgtgagaaccaactttatataagacttggtctccaaaataaaataatttgctctttaataaaggaaagaagctctctctccacttaacactcccttacccctttctattctgatgctctgacacttttctgtccagcagagctgggtgttatcccagctatgctaattaccagctatgtgaccatggccaaataac

SEQ ID NO: 22124 - DNA, 556 bp, Homo sapiens
tgttgtccacaaacagttatcgattcttgwtaattcctctttgccgatatcccttgaatatgtcccttcatttccatcatcagcattggtgcttgaagaccatctagactattataatatggtctcagaggctgtacctgctgccagtgcctctgttccacactcaatgacctggctagctgtcctgaaacaccactttgattatgtcactccattgttttcaagattagtagcttgcaaggttaagctcaaagttgttaggtagacatttcaaggcctttaattggctgctcctgaacctgtgttcagttactgttcttccaaaagcctctgccccgaccaagcaggttttctccttttaacttaaatgatttgaacctctgaatacacagaatttttttctttttgcctactccaatccttcattttaaacctcattaaaatgacacctcctctgtgaatccttctaaaacagtttcagtttatggtgattatcttttgagtttctgcaacatatactatctgtgccattcacttagaaatgtattatatactg

SEQ ID NO: 22125 - DNA, 524 bp, Homo sapiens
tccaaactatttgccacatagtacttttttcttaaaaacaaaaaaattattacaggctgggtgtggaggctcacgcctgtaatcccagcattttgggagactaaggagggaggatctgttgagaccaggagttcgagaccagcctgagcaacatagggataaccccatctctaccaataaaaaaaaaaaaaaaaaaattagccaggcatggtggtatgcacctgtagtcccagctactccagaggctgaggtgagataattgcttgagcccaggatttggaggctmcagtgagccatgattgtgccactgcactccagcctgggcgacagagcaagattctgtctcaaaagcaaccaaaaaacaaaatttattacagaaaatttcaaacacaaatagaagtatatagaaatctcaaaaaaggccgggtgcggtggcttatggctgtaatcccagcactttgggaggctgaggctggcgggtcacaagttcaggagatcgagaccatcctagctaacatggtgaa

SEQ ID NO: 22126 - DNA, 616 bp, Homo sapiens
tataccatttgtaccagtcagaatgacaattattaaaaagtcaggcctcggatttctggactgatagtgagcactggcttcaacttaaagtcaccaacctcaccagtccctaacaagaaagtcagcctgtactttgaagttttgaagccagccactgacatcttttccctagctatgacagtcctagatgacaccatcttccagtagaaagctgtttcatctacattgaaactctgttgtttacagcagctacactcatcgattaccttaactagatcttctgataacttattgcagcttctatatcagcawttgctgctagtgggtggtttcttggcccacctgaagggcagacagcttttgcttctacttgcccatcagaaacatgattttttgcctggagtcagaatgaaaaatattcctatccttcccccatcagcagatggcttttccttctctctctctcccttaggacaagtatatcatgtgcaaggattggaagacaatatttttaaactcaatcctccccagtttgagcttagatcaaggcaataagaatcaaaatcccagaagcctttctggtatgtcattacacatcactttgaaaggtgcatgc

SEQ ID NO: 22127 - DNA, 1194 bp, Homo sapiens
cccttttacctataatcagtatagcggaaggataagatgtaaaatgtgttcactggtttattwgtttgttatactactgacctcagtcaatcacccggtgatgtttctgggcaatacaaaaatatcttcttccttctatcccgtgatagggggtattttctaagcctcagacatgagcccccactttttttcctctctcttctttccttggtgaaccaattctacatactgatgatgcctaaatctaatacatccaccttgacctcataaacagaatccacccccacatatttcattgtctgtaggacattttcctttggacagctcatcaatcaattcaacaagcccaaactaccttgttatcttaccttcctccaaaaaaatatctgagccacagctgcaacatcctaactttttccagtacatcattaatctcctagtcacatgtcagaaaactcactccttccactagaacataaactgtcacctcatcaatgagggccaccttgactactccatttaaaatttcatctctatggccccagcattcttgattcccccttaaagtgctctgtttgttcccagcatttattgttttctagtatgctacataatttacctatctacttattatttctcattctgtccccaaatcttactagaatgtaagcaccactgaagacagagacttctgttcacagatatcatccctgtgcttataacagtgcccgacatacagtaagtgctcaataaatatttgttcaattaattcattcactctacaagtatatacttaatataacaaataatgtaacttaaaataccttactcctctaattggaatttacactctgtgaagtagaggtctttgacttctttgttcactgctgtgtccccagaatctagaatggcaccaggtagcaaaggtgttcaataaaaatctgttgaataaatgaacgaatggataggaactcattgagtaccttttagtaccaagtactaagtgaggtgcttggggattctagatattttaaataactaactatgatgcaatgggataaatataaataatagaagtaggaacaaaatggcatgggaactcaggagcaatggcactgaagatcattcttcacgcctgagtctgaaagaagacacagatgtttatctgctccctgtgccaggtaaagggccaca

SEQ ID NO: 22128 - DNA, 539 bp, Homo sapiens
taagctcctgatcttatgaattttctgtttcttgcagccaagtctaaccctaactaagtatagtatttaaaaaagtgttatttaaagtcatcttgagtctcaggatagttaccagtaacagttctggagggaaaatgcatatttgcaaaaaaaaaaaaaacacggaacagcaagtgtatatcacatctttgtgtatctcacatttgtgaacctcaaaaatccactgggcagaaaaaggacagatagtaaattatcaaggtacatacaagaacaagacacagagagattataagacaggcccgagcttataaaatccactcttctttttagtgagaacctacatggactgtttgccttacctcagcatgagagcttttattcccttaagtaaagttgcgaaacagtccaagtgggctctggcagtgtttcatcagttagcgaagtctgcagtagagaaagaatatgaaaaaaaataaagaaaggaagaaatgctttcagttctctgaattctaygatgcagataaagttggaaagaaagg

SEQ ID NO: 22129 - DNA, 529 bp, Homo sapiens
accacaaataagaatagtatgcaataaactacgtgggaaaaaaaaattaggaatttttctacctccaaatgtgatgtgttcatttattttgacaaytgcaatttagttttaattattcatcatatggtagtgaatatgctacacagtatttcataaagaaatgaaaacttaggccggctgcagtgtctcacacctgtaatcacagcactttgggaggccgaggcaggcagatcacttgaggcaaggactttgagaccagcctggccaacatggtgaaacctcgtctctacttaaaaaatgcaaaaatttagccaagcgtggcggtgggcacctgtaatcccagctactcaggaggctgatgcaggagaatcactgggaactgggaggcagaggttacagtgagccgagatcacaccactgcactccagcctggatgacagagagcgagactcttgtctcaaaaaaaaaataaataaataaaataaaaagaaaagaaaagaaaagaaaacttaaatctgtaatgggaagt

SEQ ID NO: 22130 - DNA, 529 bp, Homo sapiens
accacaaataagaatagtatgcaataaactacgtgggaaaaaaaaattaggaatttttctacctccaaatgtgatgtgttcatttattttgacaattgcaatttagttttaattattcatcatatggtagtgaatatgctrcacagtatttcataaagaaatgaaaacttaggccggctgcagtgtctcacacctgtaatcacagcactttgggaggccgaggcaggcagatcacttgaggcaaggactttgagaccagcctggccaacatggtgaaacctcgtctctacttaaaaaatgcaaaaatttagccaagcgtggcggtgggcacctgtaatcccagctactcaggaggctgatgcaggagaatcactgggaactgggaggcagaggttacagtgagccgagatcacaccactgcactccagcctggatgacagagagcgagactcttgtctcaaaaaaaaaataaataaataaaataaaaagaaaagaaaagaaaagaaaacttaaatctgtaatgggaagt

SEQ ID NO: 22131 - DNA, 529 bp, Homo sapiens
accacaaataagaatagtatgcaataaactacgtgggaaaaaaaaattaggaatttttctacctccaaatgtgatgtgttcatttattttgacaattgcaatttagttttaattattcatcatatggtagtgaatatgctacacagtatttcataaagaaatgaaaacttaggccggctgcagtgtctcacacctgtaatcacagcactttgggaggccgaggcaggcagatcacttgaggcaaggactttgagaccagcctggccaacatggtgaaacctcgtctctacttaaaaaatgcaaaaatttagccaagcgtggcggtgggcacctgtaatcccagctactcaggaggctgatgcaggagaatcactgggaactgggaggcagaggttacagtgagccgagatcacaccactgcactccagcctggatgacagagagcgagactcttgtctcaaaaaaaaaataaataaataaaataaaaakaaaagaaaagaaaagaaaacttaaatctgtaatgggaagt

SEQ ID NO: 22132 - DNA, 548 bp, Homo sapiens
atggattatcataaagaagacaagtttgcatatctgaattcaattaacagtgrtacttgtttgtgatggagttggggtttcatttaactccatctcattaatttatgcaaggaccaaatttgtttagtgtagtttatttgttagaagaagctagcgggcagaggattcatcaaaataataaccaaaacactcagaaaaatcaatagctacttttcaactcctgatctttgtcctcacccagagtgagttctaaacaaaattgtgcaggttatcattcctggatttcgcgctccctctcacacacaaatcctgaagagcattatcatacccattggttcgttgtgcagtggatcaccgaggcatttctttatgtgtactctttggcctaccattccgttctaatggacagtcatagttcatagtgagtttgaagtctttcttctagttaatctgtcaatttttctcacacagtgcagctgctgtgaaagaaattggagctgttacactttgtgctttggtacagtttgtaaaatgctaggtaggagaca

SEQ ID NO: 22133 - DNA, 548 bp, Homo sapiens
atggattatcataaagaagacaagtttgcatatctgaattcaattaacagtggtacttgtttgtgatggagttggggtttcatttaactcmatctcattaatttatgcaaggaccaaatttgtttagtgtagtttatttgttagaagaagctagcgggcagaggattcatcaaaataataaccaaaacactcagaaaaatcaatagctacttttcaactcctgatctttgtcctcacccagagtgagttctaaacaaaattgtgcaggttatcattcctggatttcgcgctccctctcacacacaaatcctgaagagcattatcatacccattggttcgttgtgcagtggatcaccgaggcatttctttatgtgtactctttggcctaccattccgttctaatggacagtcatagttcatagtgagtttgaagtctttcttctagttaatctgtcaatttttctcacacagtgcagctgctgtgaaagaaattggagctgttacactttgtgctttggtacagtttgtaaaatgctaggtaggagaca

SEQ ID NO: 22134 - DNA, 548 bp, Homo sapiens
atggattatcataaagaagacaagtttgcatatctgaattcaattaacagtggtacttgtttgtgatggagttggggtttcatttaactccatctcattaatttatgcaaggaccaaatttgtttagtgtagtttatttgttagaagaagctagcgggcagaggattcatcaaaataataaccaaaacactcagaaaaatcaatagctacttttcaactcctgatctttgtcctcacccagagtgagttctaarcaaaattgtgcaggttatcattcctggatttcgcgctccctctcacacacaaatcctgaagagcattatcatacccattggttcgttgtgcagtggatcaccgaggcatttctttatgtgtactctttggcctaccattccgttctaatggacagtcatagttcatagtgagtttgaagtctttcttctagttaatctgtcaatttttctcacacagtgcagctgctgtgaaagaaattggagctgttacactttgtgctttggtacagtttgtaaaatgctaggtaggagaca

SEQ ID NO: 22135 - DNA, 679 bp, Homo sapiens
tgcatgcatgttttgcattgctttgaatatttgagcaactgcacccagatataaattactgaatagctaatgatgcaaatattgaaacaatgcctatatctgtgagttaaaagaaaatcagaccccagcaaattgctaatggtaaatgtctaattgctaatggtatcagtcttatgagtgaaatggagtctacatagttgatccagkgatcacacagccagattgttcattcttgttgtcgtgtctggttgacacagattatcgtccaactcttttgagtgtaagcattaatatcaattccaaatatgggtaaagataatcttggggactctggtatgtactgctagattgtctttgaaatttgttcttcactttttactttagtaaaagacctctaaattttagccagacttaaggctgtctgagaaaaataaaagcgtacatttccagccttccatgaagctacatgtggccatgtggcaaactgctggccaatgagatgtaagtaaaagtgatgtaggcaactccccagtatttctgcagcagagactggagggcattgtgctcttccttctcccattctccacctttccagttaaaatgaatacatcatggagaaaattgaggtggtcattttggacaaggaggtgacttttagaatgaaagtcaactataataa

SEQ ID NO: 22136 - DNA, 679 bp, Homo sapiens
tgcatgcatgttttgcattgctttgaatatttgagcaactgcacccagatataaattactgaatagctaatgatgcaaatattgaaacaatgcctatatctgtgagttaaaagaaaatcagaccccagcaaattgctaatggtaaatgtctaattgctaatggtatcagtcttatgagtgaaatggagtctacatagttgatccagggatcacacagccagattgttcattcttrttgtcgtgtctggttgacacagattatcgtccaactcttttgagtgtaagcattaatatcaattccaaatatgggtaaagataatcttggggactctggtatgtactgctagattgtctttgaaatttgttcttcactttttactttagtaaaagacctctaaattttagccagacttaaggctgtctgagaaaaataaaagcgtacatttccagccttccatgaagctacatgtggccatgtggcaaactgctggccaatgagatgtaagtaaaagtgatgtaggcaactccccagtatttctgcagcagagactggagggcattgtgctcttccttctcccattctccacctttccagttaaaatgaatacatcatggagaaaattgaggtggtcattttggacaaggaggtgacttttagaatgaaagtcaactataataa

SEQ ID NO: 22137 - DNA, 573 bp, Homo sapiens
atcactaagtgaaagaagccaatctgaagaggctacatactctgtgattccacgtatatgacatctggaaatgacaaaactatggagacagcaaaaagatcagtggttaccaggggttgagrgtcagggtttgggggatggatacgtggagcacagaggatttttaaggcagtgaaactactctgtatgacactataatgatggctatgtgtcattatacatttgtcaaaacccatagaatgtacaacagcaatagcgaactctaatgtaaactggggactttgggtgattatgatgtctcaacataggttcatcggcagttaacaaatgtacccctttggtggggctataaatgtgtgggggcaagggggtctatgggacatctctgtaacttcctttcaattttgctgtgaacctaaaactgctctaagaaaataacgtctttttaaaaaagtaggcattttatagcataggctaaaactgcatatgcaaccatgatgtaattctatggatacacacacatcataaggaaatgttctttggcggggtctaaaaaagtcttataaaatgaaa

SEQ ID NO: 22138 - DNA, 573 bp, Homo sapiens
atcactaagtgaaagaagccaatctgaagaggctacatactctgtgattccacgtatatgacatctggaaatgacaaaactatggagacagcaaaaagatcagtggttaccaggggttgagggtcagggtttgggggatggatacgtggagcacagaggatttttaaggcagtgaaactactctgtatgacactataatgatggmtatgtgtcattatacatttgtcaaaacccatagaatgtacaacagcaatagcgaactctaatgtaaactggggactttgggtgattatgatgtctcaacataggttcatcggcagttaacaaatgtacccctttggtggggctataaatgtgtgggggcaagggggtctatgggacatctctgtaacttcctttcaattttgctgtgaacctaaaactgctctaagaaaataacgtctttttaaaaaagtaggcattttatagcataggctaaaactgcatatgcaaccatgatgtaattctatggatacacacacatcataaggaaatgttctttggcggggtctaaaaaagtcttataaaatgaaa

SEQ ID NO: 22139 - DNA, 573 bp, Homo sapiens
atcactaagtgaaagaagccaatctgaagaggctacatactctgtgattccacgtatatgacatctggaaatgacaaaactatggagacagcaaaaagatcagtggttaccaggggttgagggtcagggtttgggggatggatacgtggagcacagaggatttttaaggcagtgaaactactctgtatgacactataatgatggctatgtgtcattatacatttgtcaaaacccatagaatgtacaacagcaatagcgaactctaatgtaaactggggactttgggtgattatgatgtctcaacataggttcatcggcagttaacaaatgtacccctttggtggggctataaatgtgtgggggcaagggggtctatgggacatctctgtaacttcctttcaattttgctgtgaacctaaaactgctctaagaaaataacgyctttttaaaaaagtaggcattttatagcataggctaaaactgcatatgcaaccatgatgtaattctatggatacacacacatcataaggaaatgttctttggcggggtctaaaaaagtcttataaaatgaaa

SEQ ID NO: 22140 - DNA, 573 bp, Homo sapiens
atcactaagtgaaagaagccaatctgaagaggctacatactctgtgattccacgtatatgacatctggaaatgacaaaactatggagacagcaaaaagatcagtggttaccaggggttgagggtcagggtttgggggatggatacgtggagcacagaggatttttaaggcagtgaaactactctgtatgacactataatgatggctatgtgtcattatacatttgtcaaaacccatagaatgtacaacagcaatagcgaactctaatgtaaactggggactttgggtgattatgatgtctcaacataggttcatcggcagttaacaaatgtacccctttggtggggctataaatgtgtgggggcaagggggtctatgggacatctctgtaacttcctttcaattttgctgtgaacctaaaactgctctaagaaaataacgtctttttaaaaaagtaggcattttatagcataggctaaaactgcatatgcaaccatgatgtaattctatggatacacacacatcatarggaaatgttctttggcggggtctaaaaaagtcttataaaatgaaa

SEQ ID NO: 22141 - DNA, 1178 bp, Homo sapiens
gaattggatttcacagctccctgctaggaaaacaagcagtcacaattttctctggtagtaacgggacacttacaggataaaaagatgtatgcataagaatgttcatcctagtgtggtttcccctaatgaaaaagtagaaatatcctcaatgtccatcaataggcatcttgatgtccatcaagaactttaggatatatgcatgctttggatactagacagccactgaaaatcaagcagaaatgactctcattaattttgttacatatggtaatgatattggggctatataggaaaatgtccttacttatttagaggtacagacagtccccgacatgattttttgactttatagtggtgcaaaacagctacttgtgggggctgaggcagaagaatcacttaagccagggaggttgagactacagtgagccgagatcacaccactgcacttcagcctgggtgacagagtgagaccccgtctctaaaaaaaagaaagaaagaaaggaaaagaaaaacaaaaatcataaattgaaaatgcactttttatgtgtgagatagggtctcactctgtcacacaggctggagtaaaggagcgcaatctcagctcacttcagcctcgacctcccacgctcaagtgattctcctgcctcagcccctcaagtggcggggaccacaggcmtgcaccaccacacccggctaatttctttttacttttggtagagaggtttcaccatgtcgcccaggctggtctcaaactcctgagctcaagcaatccacccgctttggcctcccaacatgctgggattacaggtgtgagccactgtacccggtctgcacttttgacttacaataacttcaatgtactatggttttgcatatactaaaatacttaggcacaatgtagtataataaagaatatatcaagtcttcatcccccattcctggcacagtgcttcaaatgctcttgaaattttccaagtgatggcaatgcctttgttacagtaatgaagtgactctgtgcagacccctagatatcttcaggatgaggtttggtgaccagaaagaccaaccatgtgtttagaaggttgggactctgggccccttggaactctggtaggaactctaggagagagaggagcttaagatgagttcaatcatgtggtcaattgtttaatcaatca

SEQ ID NO: 22142 - DNA, 592 bp, Homo sapiens
tcatatatatataatcatatatatatattttttcccctgggccactaccacattcataattttataatgtatttcatgtgatataaagttctcccacacatatttgytttatttagctatcccataagaaacttactgccttctcatgatacattaaattggctttcacagggatttttaaataaactaatgaggtttcaatctaactaggagatatccatctggaatggaaagaggtgtaaatgacctttaagacttcagcaacccttccaaacaactactaaaatttacataaatgtttgcatgtaatgggtgaagagtttgaacaaatatcccataaaactgtttaccataattgactttttatttaaaaaattacacggagcaatttccagcttatctttttttataaaagtactgcctatatcaaacattttatatcacgttaattccattgaagagctgcctttttctgttaaggtactgattccaattgatgggatacatgcccttaatacagaaagtttccattatttattcaaatatcaaaattaagattattgagaagtttattgctttatggctgggcaag

SEQ ID NO: 22143 - DNA, 1304 bp, Homo sapiens
tactataaacctgcttgtttgaactagttcaagtgagtctctgtttttttgtgaccaaatgagtaacaaaaatgattctctgcattaatttaatggttgtagagatgtaaaagaaagaatgggtttaaggtgtagaatcaaaataccttagaaatccaaaagacatggatgatagggagaaggaagagtcagagatgagtcccaaacccttgccaataggtaacacagaagacagaacagggattgaaagaaacatattgaagtccaggttagacatgttaagactgtggtgcctgtgattttttgttattgttgttttttggttttttttttttgagacagggtcttgctctgtcaccaggctggagtgcagtggcatgatctcggctcactgcaacctccatctcccaggttcaagtgattcacctgcctcagcttcccgcatagctgggactacaggcgcacaccaccacgatcagctaatattttttgtattttagtagagacagggcttcaccatgttggccaggatggtctcaatctcctgacctcgtgatcagtcctccttggcctcccaaagtgctgggattacaggcatgagctactgtgctaggccaactgtgagatttttaatggagatgcatattaaaaagttggatatgtaagtgtggactcactttcatgtgctactcttttttttttttttccaggaaagaaggcttagttgatataaaaatcttacattcaattatttatgattaaggattttgacaattgaaggtttaactggtaaattsacatagactgcatcaaactaatataacatcatgctattaatgaggtttcattcctttaaaataacctcgttttggaggcacaaattttgaagaattagtcatgaatttatgatgtctccaaggtaatttaggtgtggaagtgcacagctagactctctaaatatcatctttggttctattgcattggaacacttataaaccaatatctttagtgtattttggctttcctctcagtgacccaagtggcaaaaagatctattagctaaataagcacacaaggttgcttcttggtaaattaaacatatgaatctaaataatgtattttccaaaaccccactgaagctatagtaaaggaatattatgaaagacatgaacccacaagtcaaaaggaatcagagtggagacaacagcaacataattttggaaaatgaaatgatggataagtggtaggcattatagcaaacttatgaaaactctatactaaacttgtgttgcaaaaggtaagaa

SEQ ID NO: 22144 - DNA, 544 bp, Homo sapiens
cccgccacttttggaggcagaggcaggaggatcacaaggtcaggagatcgaggccaccctggctaacacggtgaaaccccgtctcyactaaaaatacaaaaaattagccgggtgtggtgctgggcacctgtagtcccagctactcgggagactaaggcaggagaattgcttgaacatgggaggtggagcttgcagtgagctgagatcatgctactacattccagcctgggcaacagagtgagaatccatctcacaaaaacaaaacaaaacaaaaaaaaaggaggcaatggacttgagcagtaatgataaatttgagttttgagaggcaagaaaaggaactattgacttaagcctcttttctgggaccactggtactttgttatcctgcctgacacttatagcaaaattaacatatgtctaggctaaataaacatattaaggaggagatgatatatgaatataaagtatattaggggaggcagaccaaatagcttcaacatttatagtaaaacaaaatacaacatcattggtagcaagtgagaga

SEQ ID NO: 22145 - DNA, 550 bp, Homo sapiens
aattttatgtataagagattcagagaactagaccaggtaacactcagaatatacacattattaaggagaaagcaaaaaataaaagagaaatcagtaaacacacaaatmttcccattgacaaggttccctttctgagcttcctttcactttacttctgattttcttctcatattatgtgcttcaggtaattctgcacattttcttctcctgaagagaagccatcaccagaagaaaaagccatgaggtctttttagagagaagaaattcacaaatactgttaggcagggaggcagtcaacaagcacttactgaatccctagccccctaagcactgtactaggtgcttagaactgagtccctcctgctattcagttagaaggatggaaaagctatgacttctagtattagcactgacctagttaagccatgaataaagaattaaaaggttttcatcttccaccatacaagttaagaaaacaaaaccagaaaccttgatatatgtttttcagcccaatgcattatggtttcacatatgtttcagctcttattga

SEQ ID NO: 22146 - DNA, 656 bp, Homo sapiens
acacacacacacacacacacacacacayatgtaattctattagtgtcttctgaatacaatatctacatgtctgtgtatctatagtgatatcccagaatttcaaaatcagatgtaaacattataagaaaaaaacaattgactgggcccggtggctcatgcctgtaatcccagcactttgggaggccaaggcggtggatcccaaggtcaagatatcgagacaatcctggccaacatggtgaaaccccgtctctactaaaaatacaaaaattagctgggcatgatggcacacacctgtcatccctgctactctggaggctgaggcaggaggattgcttgaacctgggaggtggaggttgcagtgagcccagatcgcgccactgcactctagcctggcgacagactctgtttcaaaaaaataaataaataaataagagtatctactgtaagaaagaaattcattacagacccacattctccttaatcataacaaagaaaaggttgaagcaatggctgtctacttcaggaaaatgagttctacagctgctaaggcaatgagaataggtactttgaaaactgggtacttacttctttagggggttacatagttatacatgcttcctacgtgccatattctgttttgagcacatcacacatat

SEQ ID NO: 22147 - DNA, 660 bp, Homo sapiens
ttgcagtttgatctcagactgctgtgctagcagtgagtgaggctttgtgggcatgggaccctctgagccaggggtgagatataatctcctggtgtgccatttgctaagaccactggaaaagtgcagtattagggtgggagtgtcccgattttccaggtactgtctgtcacggcttcccttggctaggaaagggaattccccgamcccttgtgcttccctggtgaggcaatgccccgccctgcttcagcttacactccgtaggctgcacccactgtccgacaagccccagtgagatgaacccggtatctcacttggaaaggcagaaatcacctgtcttctgcatggctcacactgggagctgtagactggagctgttcctattcagccatcttggaaccttccaactgatgctttgttttaaacaatttcaattgttttatgtaggtgaatttaattcaatatgaaagacatttgctctccagatttgcaattctcagttcttacccacacttctgtttcagaaaaaaacagtgctaaccaatagccatgtggactcagtcataaagttttgaaagaagatggaaactcagtgatcatttctattaaaaaaaaaaaactttccctgaaacattacaattatcatcatctactatgcattag

SEQ ID NO: 22148 - DNA, 546 bp, Homo sapiens
tcaatgacagataaaaagctttgcctatttaggtgattttgactaattgtccttgagaataaaagtgagaacagaaagaccaatttcttaggaagaaataaatgcatctgtgtttaagaattagtttttcagtgtaactggttggttttggccactgagctcacgagatataaacatgagatggtttattttctccaaaatggttaagaacagtgttctaccaaaaccttttcctctgggtggcaggctccccaatggcatcttagtctaactaccattttcagttacatttaactattaaaacagtcttatcctagctttgaaatataatcctgtttatttaaaattgttattttatatttaatttaaaatgctttctggcttgaccacaggtggacttatggttctagtatcttggagtggaggggccctcttatcccttgtatatgcaatctttagttcgggggcagggaagagacagaagaagataatttcttataagactgtgtatgttsagttgactgtcggtgatgataaggtttctat

SEQ ID NO: 22149 - DNA, 552 bp, Homo sapiens
tcttacacatattgattgacgtctcatgtctccctaaaatgtataaaagcaaactgtgcccccgaccacctcgggcacatgcctcaggcccccgtccacctcctgcrcatgcctcagcccccgaccacctcaggcacaagtctcaggacttcctgaggctgtatcatggatgcatccttcaccttgccaaaatactttctaaattgactgagacctttctcagatattttgtgctcacaagcctttgagctaagaatggtttttatatttttttaagggttgtaggaaaaatgagatggagacagggacagagaagaagtggggaagagagaagaaaggaggagaaggaagagaagaagaagaggagaaggagtaagatgaggaggaggaaacagtaatctttgtggctttcaaagccaagatatttatcatttggtcctttacagataaagcttgccaactcaagttcatgaccatctctaattcttttaaatatcaagtcatgatgtgtattaatataaagattgcatattaaatgcatcttccatagac

SEQ ID NO: 22150 - DNA, 345 bp, Homo sapiens
ttgtgttgggacagctgtgcgcatcggcgtcattgatatgatttgaatttggtgctatctggtgtggctttgtaactaaagtcataaatagtggagaaacgatgtgtctggttctaaattaacagtgggactgggtgcagtggctcacgcctgtaatcccagcactgtgggaggccaaggcaggcgaattgcttgagctcaggagttcaagaccagcctggcaacatggtgaaaccccttctctacaaaaagtacaaaaatcagccaggtgtggtggcatgtgcctgtggtctcagctactygggaggctgaggtgggaggatcacttgagcccaggaagaggag

SEQ ID NO: 22151 - DNA, 572 bp, Homo sapiens
tagcctgcttttgcttttggtctcctaagcgcgagatcttgatgtctacctagaaatgtcactgacgtaggagaaagggattttttttttgcttttaccatgaagggttgtcatgggcctgtgtgaaagamattaagtaaattagatatcagccccaaggaatgttaatatctgagatttatactggagtagttttcgcttcccaatttattttcttttaaatacttaaaacatttggtttttaagctatttatagccaacctttttttaaaaattaatgtttaaaatgtttttttccccccaatctatcatggttgactgttagacagttggatggctgtgtggttttcaaagctgaggtcaagtttgaatgagctcatttcagatcactctagattttctgaggctgacagtgtccttgggacaccatgtttggggaatgtgtttttgcagtttacgaagcacccgctgctcagagagccgggaaacctttccttctcttttcttggagtctagttgccatggagattgtcactaaattatggacgagggagaggcgagccggcacttgg

SEQ ID NO: 22152 - DNA, 572 bp, Homo sapiens
tagcctgcttttgcttttggtctcctaagcgcgagatcttgatgtctacctagaaatgtcactgacgtaggagaaagggattttttttttgcttttaccatgaagggttgtcatgggcctgtgtgaaagacattaagtaaattagatatcagccccaaggaatgttaatatctgagatttatactggagtagttttcgcttcccaatttattttcttttaaatacttamaacatttggtttttaagctatttatagccaacctttttttaaaaattaatgtttaaaatgtttttttccccccaatctatcatggttgactgttagacagttggatggctgtgtggttttcaaagctgaggtcaagtttgaatgagctcatttcagatcactctagattttctgaggctgacagtgtccttgggacaccatgtttggggaatgtgtttttgcagtttacgaagcacccgctgctcagagagccgggaaacctttccttctcttttcttggagtctagttgccatggagattgtcactaaattatggacgagggagaggcgagccggcacttgg

SEQ ID NO: 22153 - DNA, 572 bp, Homo sapiens
tagcctgcttttgcttttggtctcctaagcgcgagatcttgatgtctacctagaaatgtcactgacgtaggagaaagggattttttttttgcttttaccatgaagggttgtcatgggcctgtgtgaaagacattaagtaaattagatatcagccccaaggaatgttaatatctgagatttatactggagtagttttcgcttcccaatttattttcttttaaatacttaaaacatttggtttttaagctatttatagccaacctttttttaaaaattaatgtttaaaatgtttttttccccccaatctatcatggtygactgttagacagttggatggctgtgtggttttcaaagctgaggtcaagtttgaatgagctcatttcagatcactctagattttctgaggctgacagtgtccttgggacaccatgtttggggaatgtgtttttgcagtttacgaagcacccgctgctcagagagccgggaaacctttccttctcttttcttggagtctagttgccatggagattgtcactaaattatggacgagggagaggcgagccggcacttgg

SEQ ID NO: 22154 - DNA, 633 bp, Homo sapiens
gccatagacacacaccagagtcagataagtttagatgtgtatcttagctttgtgtttgagggtgggtatttttttcccacactgttctagtttgctcaattataaagtggacaataataatagttatctaattgtgtaaattagatcattatgtcaatgaaaaatgtgtgcatgtgagtccctcaaagttctaattcccttcactgattctcatcttgttaaccagtatttttagtgcaaaatacataggaacaaaaaaacatttccaactatagtacaaacaacttctaactgtgtgacattaagcaaatgatttaaagcattaagattattttgaggttgaaaatgacaaaattgtaaacatgcgtatacagggatgatagtgttatggtctggcrttttgagagacagccagccaactgatgaggctctccagaactgataagcagttattcaggttgacaaagagaggctagagaacagactttagtgcatgtattttatcacagtagccagaaactgattttgtgtgtttgacggactttataagttacttttaataatatttaaccaaagctttggaaatagccacagtagcatgttttccttatctgaaatgattatgttatcctg

SEQ ID NO: 22155 - DNA, 631 bp, Homo sapiens
aaaaagaaaaataacactttatgacaggactgggctttgcacaatccggtcctatttggcttcatggctgactaatgaaaattaaatctctgagtataccgagagcccagatttttaaattctgttattttatgtcaagccaggacacagaaggaccataaacactaaaatgagagttcttaataccagtaaaatttgttcatggtgcatttgttctgtgaagtcttctctgacccctctactcctctggactcgtctaaagccacactactcacacggttctctgcctgagctcaacagtatcagcagcatgtgctggagtcacagaagctcagtatgaaatcctgcctctaccacctgtttcctacctgatcatagaagagtcacttaaactcccttcgtcatccttttcttatctttgaaaatagtaaaacatagttttaagagtagctaggagaagagatactgtgcaccgtgtaaattttcagatatataaytgatgttcaatattgccatgctgcttactattgtaatttgtttctctctttgtaagtcacgtgcagaccaaactatagatcaacatattctcagaatgtaaggaagtgttgggtgttcaatattattttaccga

SEQ ID NO: 22156 - DNA, 546 bp, Homo sapiens
aaccaagtgtggccagtgctccaggctctcctaacagcagaggaatgagagagttctatcataattctgcactggagagataagttggaatggcttctaaaaaaataaagatgttttgaaaatgaaagttttactttttaaagaaatatcaatggcattttataatcttagccaagtatgagaataatgaaattaatttatattttaccacccatcattcccagaaacatttttatagttacccttcctagaagttccaatgacatgttcaacagcttattttcctgtactgctgctaatatgcataccaagaaatgtctttctttgtttggttcaactgattgtataaagccttcttgattatattactcagaattgtaactgctgyttcctgggtgccaaggacctttatgaagaagttaattagctatttccttttaaaggatgttcagacatctgcagagaataattaatccagtgttgtgtttccagtgtatatatatcacataaaagtagacaagaatgatttttatgttagcgatgtct

SEQ ID NO: 22157 - DNA, 517 bp, Homo sapiens
ttacaatcatggcagaagggcaaagggaaacaagcacatcttcaacatggtggcaggatagagagagagaaaaaggggaagtgctacacacctttaaagaaccagatcttttgagaactctatcacaaaacagcactagggcaatggcactragacattagaaaccacccccgtgattcaatcacctcccactggaccccacctccaacacttgagatcacagttcaacatgaaattagagttgggacacagccaaaccatatcaccccaggaggcagtgtcttcgggcagtggcaggcacagggatgccatagtacatggaagtcaggaggggtgaggaaagtccacaataacctggacgtggagatgcactcaggcaaaggctccatttcacacagccttccttgcaggaaagtgtggtcctgtgactaaattctgttcagcagaacctcagtggaaattgtgttaaatttttgtaaactgtccttaagtggagtgtgtgctcatcctttctcct

SEQ ID NO: 22158 - DNA, 552 bp, Homo sapiens
aaaattcatatcatattacttaaaatttcttgttatttctaccacattacagtgcctgatgcaaagcatcatataatgtcatggttctaagaactttttaagatcatctggtccaagatctcagccgggtagtcttttattccaactattgtcaaagtaaccctgatgtccagatatggctatctctggagaaatatcactcataaagcaagacaaagaaaacagtgtgtgycaggtttattgtttttttccatatacagtgaagggcatcagctgtgttttccactaggttatataattttccacctgacagaaaagtctcacagtaggtaatattgttcaggttttttttttggaggcaagggaaaagagtaattaaaataaggcaattctaaaactctagtgtaaaaatacttttttttccttttgtcaaaacatcttatagactttgtaacttcagaaatgcttacctaagcaaaaagagaacatcataaggcaaactgctacaaaactaaccaagaagtaaatactaatatgtagagtaatgtagta

SEQ ID NO: 22159 - DNA, 505 bp, Homo sapiens
ctaaataactactatttctgattcttattttttgtaggccatctttttaaaagaatctatgctattgctatgtgatatttcagagaaatctttttgtgttttagaacmggtggcaataaggaatattgttatagtttgaatttaaatgaaatattaatctaaataatccttcttgaaacatatttttttttctgagagacagtgtttgatattaaaactcagatgaatagaaccaatatgtgtgctacttattctgctgcgtgtgtctgtgtgagctgtgtgcttatatagtcagggtttcttctgctcagtcattaaggaggatatattatattcccatttcattcatatgttgtcaggatgaattgacaaacctctttttccttcttccataatacctacccaatgcagttccaagcatgggaacttacaatttattatagacatttctgattataataaagtactgagtctcctgttttgggtatacattgtctttgattca

SEQ ID NO: 22160 - DNA, 569 bp, Homo sapiens
gaggcaggagaatcacttgaacccggaaggcagaggttgcagtgagccaaaatcacgccattgcactacagcctgggcgacagagcgagactccgtctcaaaaaaagaaaaaagaaatgtctacaactaagtggagaaaagagagaaatcaataaaaaacaaacatactgaatagaagaaacagaactgggacatggagctaatgagaggttattacaaagaaaagggaaatcaatggtcttaaatcactgtagaaagctccaggaaaatgaaaactaagcaaacaaccaatgaaaacaggtaggaaatcagtgacaaccatgaaaagaacaactttagtagaaagctagggtagaaaacaaactgcagaatccacatcactagtgagaaatagacactgagtccaaaaagtctggctacaagcaaaaggaaaagaaacaggagcatgaaagaaaagtctgcacaaaataaggatgtgtacgcttacagaaatatgtctatgcccctaaataccatgaggacacaaatccagcttaggcacacagaagtggcactgtgcccaasgcaaa

SEQ ID NO: 22161 - DNA, 533 bp, Homo sapiens
cttgactcttccctttcttcaaggtctctatgattcaaagctttcccttcaggaaagacctggcctttttttytttttgaagggcttacctgattaggtgaagcctacctggaaaaatcttgtttttggttaactcaggtaaaccaattagggaatttacatgagtctgcaaaaacccctgtcctgtgccacgtaagcagcctcctcataagagcagaatcccatggtattcacaaagtcccacccacactcacagaggggatatacaggccaaggtagaattctgcctgtcacagttcttctatttctttctggagttcacacatgagattttaacgaatcagagaacgatatttatatacgatgtgatgcagggatcccacttcatttcccactataggataaataattgtgcaagccccatttattgattagttcattctttccttagtgacctgctgtgccaccttgagatatgccaggtgtaaccatatatgtctgtttctgtttctaaggtgtatttacttcattgg

SEQ ID NO: 22162 - DNA, 533 bp, Homo sapiens
cttgactcttccctttcttcaaggtctctatgattcaaagctttcccttcaggaaagacctggcctttttttctttttgaagggcttacctgattaggtgaagcctacctggaaaaatcttgtttttggttaactcaggtaaaccaattagggaatttacatgagtctgcaaaaacccctgtcctgtgccacgtaagcagcctcctcatmagagcagaatcccatggtattcacaaagtcccacccacactcacagaggggatatacaggccaaggtagaattctgcctgtcacagttcttctatttctttctggagttcacacatgagattttaacgaatcagagaacgatatttatatacgatgtgatgcagggatcccacttcatttcccactataggataaataattgtgcaagccccatttattgattagttcattctttccttagtgacctgctgtgccaccttgagatatgccaggtgtaaccatatatgtctgtttctgtttctaaggtgtatttacttcattgg

SEQ ID NO: 22163 - DNA, 533 bp, Homo sapiens
cttgactcttccctttcttcaaggtctctatgattcaaagctttcccttcaggaaagacctggcctttttttctttttgaagggcttacctgattaggtgaagcctacctggaaaaatcttgtttttggttaactcaggtaaaccaattagggaatttacatgagtctgcaaaaacccctgtcctgtgccacgtaagcagcctcctcataagagcagaatcccatggtattcacaaagtcccacccacactcacagaggggatatacaggccaaggtagaattctgcctgtcacagttcttctatttctttctggagttcacacatgagattttaacgaatcagagaacgatatttatatacgatgtgatgcagggatcycacttcatttcccactataggataaataattgtgcaagccccatttattgattagttcattctttccttagtgacctgctgtgccaccttgagatatgccaggtgtaaccatatatgtctgtttctgtttctaaggtgtatttacttcattgg

SEQ ID NO: 22164 - DNA, 688 bp, Homo sapiens
gccaataccaatcgaagctataatctctctcagatattttgatcattgatccacagtcagaagtgtatttctattatggcctgggagggatgcacctacacacagccttactgtgtgtcacacattgttatttttcactgttctatttcatttaaaaatgtatcaacccactaaatcaattctctgactgtggattgtgattaacagtttgaaaagccccaactctagcccctttttggcacaaactttaaaacaaaacaaaaaaatgtcaggaagttcttcctcagactagtttaagtttcttgggctatcgggttaattggatttgtrtcgctgaatatgtcctcagtggcagatgcaccagcatatccgatctgtgaagggtataaaaagtggactcctgcaggcccacattcaaatgctgactctctggcatgttagctatgtgacttctccagatcttggtctataaaacagaagataattccactcacccctctggcttgttacaagggacctacctggtactggttctgtctttctcagcagaggggctgtgggcatgggaggaagggagacaagtctggtcatgtggcacgaccagtttacgcaacacaagacctgtggtagccaattccacccctcggcctgctaccatgttaagtgattcgaaatccttcaaatcttt

SEQ ID NO: 22165 - DNA, 498 bp, Homo sapiens
atcctccctgtgagcattggtttcagagcctagtaagagtccatggttgaacccccagccaatgtccatcccccatcccaatgtaccgaccctttcatctcccctcaccccaccccaccctgttctctgctttcgattttaggagygtttctctaccttatctagtgtttagttttgagagtggtttagtgaaaactcccgctaaaattctgaagcgattagttgcaaaccaggcgtgaataacctgtctctcggagaagggtcacccgagcgttttcctcggacgggtgcaattggggctctacaaggtttcaaagcgcttccccgcactcaatgaaagggcgtcatttggtacacaccgaagcccacccggggagcagagaatgggcagggcaccgttatttattaccccattttacagatgatcatacgcagctggcgctcccagactccccagaatgctacggattcactggagctaaatgctcactttcactg

SEQ ID NO: 22166 - DNA, 574 bp, Homo sapiens
tgatgcgatctcggctcactgcaacctctgcctcccgggttcaagcaattctcccgcctcaggctcccaagtagctgggattacaggcatgcgccaccacgtccgggtaatttttgaattttttagtatagacggggtttcaccatgttggccaggctggtctcraactcctgacctcaagcgatctgcctgcctcggccccacagagtgctgggactacaggcatgagccactgagcccggcttgcagtgtgcttttagacaacagaacaaacagatgatatgggaaaagggctcggattcacctggcttcaaatcctggtgctgacacccatagctctgtggccttggtcacgcctcttatcctctctgaacctcagtctcttcttcaaaacatggaggatgaccctccctgagggccttgctctgaggcgtaaaataatgaatagaaggtctggcactggggctgatgtatagctggtgccccaaaccatcagcgtcactctgatgattgttgctaaaataaccagctcaccccatgggtgagtgcaggaacagaccccaaaaacatcttt

SEQ ID NO: 22167 - DNA, 558 bp, Homo sapiens
ttgttttcaaacactawggtaaatctggagaattttggaataaagttatttcttaggaggtcacacagcctatttgattgagaattgactagaaatcataaaatggtttggtagactaagattaatcaactagttaccaagagtctatattggtaaacaattttgttgatcagaagatgagcatgaaaatagtagttacctaattgtactcaaagatgtattatgatgttgaaaaaagccatatgcattaaaacattttgtatacattaaagcatattcacattttataatcaatgccaaatactaaaattatagcattcagggttttgggggattcttgagaaaagtttgtaagtagcttcataatttaatattcaggttcttattcagtaatattttatttgctgtcttctggataggcacactagtggagcaaaacaagtgacgtaagatccaaacaattgaaaagataagagattgaactttaagatttttgtatgtgtgatgcatctctgttcacagttatttgcaattgccctattccaattctgttgctaa

SEQ ID NO: 22168 - DNA, 1287 bp, Homo sapiens
actgcttactgggtgccacaagccaagaaatttgggcactatctacttgctaaggaaatggattatctcttagagccttgagaaaaaaatatacactgataacttaatattagggcttctaacttctagaaacgtaagacaaaaaaaataggttttcttagacaccaaatttttcacaatttgttagaacaatgataaaaatctaatacaatcctcaaatagccataatcataattttcattgaatagcaaaaatagtggagaaagcaagctgattaattatgattttagtctatggagccataatactggcatttaaatctcctctccatgacttcctagatgtgtcacattgacaaatatttccctgtctgtacagtagaaataataatagtacctatcttataggatttttaagaagactaaatgagttaataactttaacgctgttagaatggtatatgtaggttctcataaagtctaaactgccattaatcattctattatcattattattgttataatcatcatttgcccaatttttattttattttattttattttttattattatactttaagttttagggtacatgtgcacaacgtgcaggttagttacatatgtatacatgtgccatgttggtgtgctgcacccattaactcgtcatttaacattaggtatatctcctaatgctatccctcccccctccccccaccccacaacaggccccagtgtgtgatgttctccttcctgtgtccatgtgttctcattgttcaattcccacctatgagtgagaacatgcagtgtttggttttttatccttgcaatagtttgctgagcatttgcccaatttttaaataaaatatctgaattttactctatagtggctatttgatggagaggatatcaaaatatcttttaccaaatatctgactttgaggagcttaaaatcatgagagagaggtagagaatgcacctcatgtactacagrgcagaataaaaaattgtggatattatcaatgtttttctctcttaccatcctcctgcttctgaatctggcaagtttaatgggtggcatattgtgtatctgtctttcactgtacaaatgtttcaattgtagtgcacttttgacccagttatatgaggaaaatttcctttaaatagaaatataaattgtttgaggagaaacaggagtgttggctctgctatgtgttggattgctttccataaattcctgccattatcacattgcttatctattgtcacatacattatctgatacagaca

SEQ ID NO: 22169 - DNA, 546 bp, Homo sapiens
tttttttttttttttgataaatagttgaattgaaattaaaaggcaaagtccctccctcctgaaagagactgccagaaatcagtatgatacttacttattcctcattgtctaacagtgtttggagattgttaatcatatgtaatataatgttccaatattatttttggcattatataccaatagctattttctgtacaataaactattcattattatgccttaaaaaacattagccacttaaaactttttgttaaaatttggggaattaactcttcttgtgagtaaagtattaacaaacctccttctgtatggaaagattacaatgggttagccttctactgctgcttctgataaaagtaaaaatgatccctgattggtaacctaccttgggactgggaagagtgtggatggatcataaatactgctggragctatagctttgggcttcccatagcatatttcttcttactgggtatgtccctccttgtgtttaacacctgacctgtctgttttggagctggagaattgtctctgaactcctactga

SEQ ID NO: 22170 - DNA, 585 bp, Homo sapiens
tgaatttgatccaatagtttaaggaataggtaggaaaatttggtttctatttttcgatttcctgtaaatcagtgacataaataattcttagcttattttatatttccttgtcttaaatactgagctcagtaagttgtgttaggggattatttctcagttgagactttcttatatgacattttactatgttttgactwcctgactattaaaaataaatagtagatacaattttcataaagtgaagaattatataatcactgctttataactgactttattatatttatttcaaagttcatttaaaggctactattcatcctctgtgatggaatggtcaggaatttgttttctcatagtttaattccaacaacaatattagtcgtatccaaaataacctttaatgctaaactttactgatgtatatccaaagcttctcattttcagacagattaatccagaagcagtcataaacagaagaataggtggtatgttcctaatgatattatttctactaatggaataaactgtaatattagaaattatgctgctaattatatcagctctgaggtaatttctgaaatgttc

SEQ ID NO: 22171 - DNA, 585 bp, Homo sapiens
tgaatttgatccaatagtttaaggaataggtaggaaaatttggtttctatttttcgatttcctgtaaatcagtgacataaataattcttagcttattttatatttccttgtcttaaatactgagctcagtaagttgtgttaggggattatttctcagttgagactttcttatatgacattttactatgttttgactacctgactattaaaaataaatagtagawacaattttcataaagtgaagaattatataatcactgctttataactgactttattatatttatttcaaagttcatttaaaggctactattcatcctctgtgatggaatggtcaggaatttgttttctcatagtttaattccaacaacaatattagtcgtatccaaaataacctttaatgctaaactttactgatgtatatccaaagcttctcattttcagacagattaatccagaagcagtcataaacagaagaataggtggtatgttcctaatgatattatttctactaatggaataaactgtaatattagaaattatgctgctaattatatcagctctgaggtaatttctgaaatgttc

SEQ ID NO: 22172 - DNA, 585 bp, Homo sapiens
tgaatttgatccaatagtttaaggaataggtaggaaaatttggtttctatttttcgatttcctgtaaatcagtgacataaataattcttagcttattttatatttccttgtcttaaatactgagctcagtaagttgtgttaggggattatttctcagttgagactttcttatatgacattttactatgttttgactacctgactattaaaaataaatagtagatacaattttcataaagtgaagaattatataatcactgctttataactgactttattatatttatttcaaagttcatttaaaggctactattcatcctctgtgatggaatggtcaggaatttgttttctcatagtttaattccaacaacaatattagtcgtatccaaaataacctttaatgctaaactttactgatgtatatccaaagcttctcmttttcagacagattaatccagaagcagtcataaacagaagaataggtggtatgttcctaatgatattatttctactaatggaataaactgtaatattagaaattatgctgctaattatatcagctctgaggtaatttctgaaatgttc

SEQ ID NO: 22173 - DNA, 522 bp, Homo sapiens
ataatattgtaaaaaatacttcatacccttcattgtttgggtttcatgtcttcattacattccytttacttcgtattatcttttaagattttgtagaagaatttcacttgggtaactgtaggcttaaatgatgcaatgctttctggaatccaggggtgactgacacacagaggtgactcagacatgaaatgttcaacaaaattctaagattgtcttttttttaaattgtaaattcttaaacattcataaaagtagtgagattagaataatgaaatcctgtgcttctaatgactgttaacacaagtgaatcttatttatcctatccactttattaaaaatttagttatctattatttaaaataatatattagcttattttaaagctaatcccagatattatgtttcattttgcatgtctgttgctgtcttggtaggaaaaattttaaaacataaattactatgacataatgatatctaacaaagttaattatttaagaaactttcaaaagttgctttttcatg

SEQ ID NO: 22174 - DNA, 530 bp, Homo sapiens
tacttatgttagaacaataggacttgaggtcarctcaaaatgtaatctaaatccagtgaattgggtgtaactttttagacatatacaaatttaatttaacattcattctgggaaaattgcagagatattttcacttaatgaaaaaaattaatcggtgttcaaatttaaaataggaaactgtttcacatttattccttaagacattttggttcaacaaagggaaaataagcagcacaattgggatacacatctaataaaatataatgcttatgttttatataaatggtaaacacattgaaatattagaaatgttcataaagttggaaacttatacttaaaagtaacagtaaaaaaagcaatagtagtgatccacaattctacataataaaattatgatttttacaaagtatggccatggatatttaattatttgcaaaataataatgaaagattagatgtagcaaaggcttaagtttcaagtacaagtgacatgctatttaacaaggtcaactttaggaattaatggaaaa

SEQ ID NO: 22175 - DNA, 570 bp, Homo sapiens
acacacttaacatctttcacagaaattaactcaaaatggatgatcaacataaatttaaaatacaaactataaaactgtagaagataagctaaaataaaatttaaatgatccyggaaatagtaatgactttttagataaaacaccaaaggcatgatccatacgagaaataattgataagttggacttcattaaaattaaaaactcctgccttatgaaagacaatggcaaaagaattaggataagtcacaagcagtggtgactgaggtggttggggcaagatgcatgaggaggttgcttggaagggatcaaccaggggacatggcatcagtggctggaggcagcacttgagcttgaaagatggtgcttgtgaagactctggctgcttctcccctccccaccagtagtaatttctggagaaaacacattcacagttagtactttctacagatgctaacatttggtgaacagttgctcttggtcacaagatttagaagacacaatatccatcctcctagattggttctcttttcatatggatcttctgtttctatgattttttaagagaacttt

SEQ ID NO: 22176 - DNA, 570 bp, Homo sapiens
acacacttaacatctttcacagaaattaactcaaaatggatgatcaacataaatttaaaatacaaactataaaactgtagaagataagctaaaataaaatttaaatgatcccggaaatagtaatgactttttagataaaacaccaaaggcatgatccatacgagaaataattgataagttggacttcattaaaattwaaaactcctgccttatgaaagacaatggcaaaagaattaggataagtcacaagcagtggtgactgaggtggttggggcaagatgcatgaggaggttgcttggaagggatcaaccaggggacatggcatcagtggctggaggcagcacttgagcttgaaagatggtgcttgtgaagactctggctgcttctcccctccccaccagtagtaatttctggagaaaacacattcacagttagtactttctacagatgctaacatttggtgaacagttgctcttggtcacaagatttagaagacacaatatccatcctcctagattggttctcttttcatatggatcttctgtttctatgattttttaagagaacttt

SEQ ID NO: 22177 - DNA, 509 bp, Homo sapiens
taccaaaaatatcgagaacgaatctttatatatcactgctgtccaaggacttaacaatttataagctaattcaattcagtaatttgggtagcatcttccaaagatggagaatgggctccttaagaaagctaaaatgaatgaacctgtgtctgagctcaaggtgccttcattttgtaatatctagcatgtaccaatttgagaagacataatttaattgtgaatatatgttacctgaatgtaagtagataggctaaaactgtgttttactgtattgaaaaagagctgagtgatattttattatttattttaaaaatatccatgtggtgttgttgagaacatctatttttaattatgcctatagatagaaacaaaacagtgtcatttatcattaactttctaagatggttatatgttttaaatgtaatttttctcgtctttttctcattctcttcagatagatgattgactgatagatgcatagacagakagatagataatagaactgtaca

SEQ ID NO: 22178 - DNA, 1242 bp, Homo sapiens
tgctggtgggaatataaattgattcagctactttggaaaactggtgcccaccagtgaaaaagatacatactctattatccagcaattcttctcctatgtatatacccaacagaaatgagtgcatatgtatgccaaaaagcatatactagagtgtttatagcagccctgttggtaatagtcaaaaactggaaaaactcaaatgtccatgagcagtagaatggataaattgtggttatattcatacatcagaatgttctactattacgtatttttatacaccaaaaagagaatgaatgccctttacatgcaacaacatgatgaatgtccaaacatcatgttgagcagaataagccagacacaaaagagtcactactttactgattgcattgatagaaagttcaaaagaaggcaagagagtttaccttttgcagcgagtattaactggttgactggaaggcaacaaggaagaagcttcttgcattctggaaatgttttctgtttttgtttttgtttttgttttgttttgtttttaaagaccggatctctctctatcacctaggctggaatgcagtggcatgttcatagctcactgcaacctcaaactcctgggctcaagtgatcctacagcctcaacctcccaagtagctgggattacaggtaaacaccactacacccagctctattctttcccccggcccctgcagacaccacagtgatttacagctctattcttgacttagggtgttggttccatggggataactcattgctgaaatccatcaagtttggtatacttaatgtttatgcactttactatatgtaagttatacttcaacaaaaatgtttaccaaaaaatccaataagtaaaccttttctttcatatttagggatgttcacttactgatcattcattgtgctgtgcattttccacccacatgcaatacttgaataattaaatttctttttaaaatatacctttcygttgatcctgctagctagtggcctttttcccctctttttttaaatatcaaaattccttaagagagctgtctggactcattgtttccaattactctcctctcagtcactcccttttttggaagtgaattttttttttttttttggaaaggttcaaacatatacaaaagaagagaaaattgtagagtgcacatcacccagattcgacaatcataaactcatagtcatgattcatccataccccatcccacacacactcccatt

SEQ ID NO: 22179 - DNA, 539 bp, Homo sapiens
aaaattagtcaggcatgatggctaataggattgcttgagcctgggaggcaaaggttgcagtgagccaagatcgtgccattgcattccaacctgaacgacagagccagaccctatctcaaaaaaaaaaaaaaaaaaaattaaaacttttttcaaccatttaaaaatgaagaattattcttaacttgcaggtcagacaaaaacaaatgatggaccagatctggcccctgggttgtagtttgctaatccctgatttagcgtaagtactcacaagatatttgtaaagtaaaagaaaacaaaagataggaaaccaccgacatttctatcaaaagatgataaacaaatgttaaaactttgaaacaaaggaacattgaatagttatgtaaaagaatgggttrgttctgctttggtagtgaaagggaggaatctccatactgagagctgggggaacaaaagagaaaaaaaaacagtaggtatatgatactacaatattttacaattatatgaaaatattattaaactaaatacaaatatatgtgttc

SEQ ID NO: 22180 - DNA, 519 bp, Homo sapiens
agcccccatcactggagggatgcaagcctagrgtggccatttgtttgggatgttcaggctctgttaagggccctcccaggcagacccttggtgctgaggcctctcagagaacccctgaggcccaggacccctcatgaacctgtggatgaggaagggccaaccccgtactgagtgtacccattgtttggaaatagagtccctgttgtcaacttctttctcctgttacatctgggtttacaatcaggattgaggttctggctcaggaaatgttcatggcagcatggaagcatagcccctaaagggcttttagaaacatgaaggccaaacatttattttagaagagatcgaatggaagtcttgagaggtttggattctggctctcttgtttagcagcagatgtatgaccttgggcaagacacttgacctctcagaattgcagtctctcgagtcagactgcctggcttcaaatgccaggctgtgactttatcatccgggtgatcttggctaagttacttaact

SEQ ID NO: 22181 - DNA, 525 bp, Homo sapiens
tggaatgtaatctctaaagccttggaatattttgttcaacaagagtattttgtttacataagggtcttggaccacaccagacagtctatastaaaatgtaattagtgttggggctttggaccatgtggtatctgcttgagctctagaagagctggcgacaaatgtcaggcacacagccagtcacccatagttttgtgatcaaccaacaaaaacactgcatgtcaaaaatcaggtgagctgccctggttagcaatattccctgtatgttatcatactttgttgttggcagaggacaagtagaagaagcttgtgcctgatgttccctgaactttaccctatgaactttttccattgttgattctaatctgtatccttttgctgtaataagccataatcatgaataaaatagcttttctctattctgtgagtcctctacctaatcattaaacctaagtgtggtcatagggaaccccaaatagaaacactaatgtttaagataccagatagaaccaactacatggggca

SEQ ID NO: 22182 - DNA, 613 bp, Homo sapiens
tacctcaataaacctgttacctttaagagggggaaaggcaattagtttagtgcgtagcagkgtaagaacttacaggatgatgatgattggcaagccttgtagaaaatctttatggtgcctaaaactggggcaggaaacagctgtaactctgtcgatctgttgtagattctatcagtgacttggacggtagaaacctgttggatattttttcttttttctttttaaattttacattgcaggtctcattagcagaaaactgctggatttgtatgaaagcaacaacacaattggtttcatactagcaacgtaaggtgaatttgaattcaatctgacgccaagctttgtgttggttgaggctcgcaaagatataaagctccctaccctccaagattctgctttctggcagcagcaatagatgattaaaccgcaaaccctaactacagtgacaacaaaaagtatttggagcacaaaggacaaactgctctgcctgagggtaggggcttgtcaatgatttaggagcaagaccaactcaactgggtcctcaaagataaccaggatttttgcaggctaagaaaagcctagggggaaaactagctcaaaggcaaagaggtct

SEQ ID NO: 22183 - DNA, 613 bp, Homo sapiens
tacctcaataaacctgttacctttaagagggggaaaggcaattagtttagtgcgtagcagggtaagaacttacaggatgatgatgattggcaagccttstagaaaatctttatggtgcctaaaactggggcaggaaacagctgtaactctgtcgatctgttgtagattctatcagtgacttggacggtagaaacctgttggatattttttcttttttctttttaaattttacattgcaggtctcattagcagaaaactgctggatttgtatgaaagcaacaacacaattggtttcatactagcaacgtaaggtgaatttgaattcaatctgacgccaagctttgtgttggttgaggctcgcaaagatataaagctccctaccctccaagattctgctttctggcagcagcaatagatgattaaaccgcaaaccctaactacagtgacaacaaaaagtatttggagcacaaaggacaaactgctctgcctgagggtaggggcttgtcaatgatttaggagcaagaccaactcaactgggtcctcaaagataaccaggatttttgcaggctaagaaaagcctagggggaaaactagctcaaaggcaaagaggtct

SEQ ID NO: 22184 - DNA, 605 bp, Homo sapiens
taaaacttccaataggtaatttttattgactttaagatttactaattttcagatattaggcactcagtaattatttgtggaatgaataaaataaatgggaaaaatatttctttatttgaatatttaggagaatctcccaatattgaatagtgagcatttaatctrcttcagagttgtagtattttttgctgacggtgtactcttctctggaagtaccacgtaacagtgaaattccaagttgccacgatcttgggagaaggggacttcctccagaaagcatggagcatggcagatggaatggactttagtgtaagccaattccagatcaaaattcaaccccaccctgagctgtagctaattcacttctctctgagctttgcttctgtcatctagaaaatggagcaacagtatcttaaagtgttcttataagcatcacttcagatctaacatttaattaataatcatcttttaaaattctgctttgtgtctttccataaatgatttgcagtgccttacaaaagtgcacgtaatgcaaagtggaaagtaagcgttgataacaaagagatttttttaaatgttatacatattgatatacagattctctc

SEQ ID NO: 22185 - DNA, 544 bp, Homo sapiens
catattatatatacatatatatatatttttttaattaattwatttatttttttgcccaaactgaagtgcagaccgcaacctctacctcctgggtttcagcagttctcccacctcagcctcctgagtagctgggattacaagtgtgcaccaccacactcagctaatgtttgcatttttagtagagacagttttgcaatattggacaggaaaaggtacagtaaaaatatggtattacactcttgaactcctgacctcaagtaatcctcccgccttggcctcccaaagtgctgggattacaggtgtgggccaccaagtctagcctaaaaatatattttaatacttctttcaccgtaacagatgttcttgcacactctttgggggtatgaacactctttacactaatcccacaagaagcagctaaaggagaaggctagtcaagaaaaaagtcagcaagaagcaaaccaaaggacttcaagcactcagagtccccaaacacagagcagctggcctcgatttaacatcataatcagacatggggctttac

SEQ ID NO: 22186 - DNA, 721 bp, Homo sapiens
gcaaaggtggggaagccctcaaccctgcacttactggcctcaggtcccatatttcaagcctcgccctgcagactctctttcactggctgagctgcagtgttgactataaaagctctgctcctctcttctgaggaaggaacttacctgaaagctcctcttcagtttgcgcaagatttcttgtaggagtagcctttcttaagaaactgcaaggctccacctcttccttttctcaatgccgtctggttctgtcaatcccgtggcactaagcaacaggtctcaactatgtctagtggaatgcctttactctttagtgttaaatttgtgtgtgtttcctctcttgccgaggtcctacaaaaactgtgttttttccaatccatttcccagagaatccgaataagagaaaataagaatatatcacagctaaggaacattttggtcatctgctcctactccttcattttaaggaagtgaagtgaaaccaagacccagagggggaaaatcagttatacaaggttacttaacaaaattcattgtaaaacytgagttaaaactctattatctgacttcccatgatatactccttccattgaaccatgttgctttttccttagggatcatacacatggtccttctgagtattccaagcttgcctaggtgttttctctctctctctcctaatacttgggctgaaagtctctatagcaaacctatgggtcattaa

SEQ ID NO: 22187 - DNA, 616 bp, Homo sapiens
tattcttagcaatgcctagtcaatgtgtatatacaatttttaatttgaggggatattgtcaaattgctatagtagttagtcaaattaaatgtacttgtatactatgacctggtaattctactctaagtagatagatttagatatagtgataaggatatagacatatcaaagaaatgctcacacatatccataaagggatatgtacaagagtgttcattatagttttgttwttttattttattttatttgtactgtctttgtttggagcagcggtgagaagttggtgttggtgatagatcctcattgggagggttcttagataaaccgtggtggatgttcaccatgggattttgtgcagcagtttgaagcaaatgtatgcataatgatattgtaaatatagtgctgagtgaaaaaaataagatgtatgccataatgctacttttgtacattaaaaaaaaaaatccacaagaaacactatctcacattttgcaaaaatacatgcaaaatgacacccattaaacaaacagggagggattgcctaggagaggtgggtagacgggtataaagaggaatgactcaatcaatcaagcagcggaggggagaagggggacatgat

SEQ ID NO: 22188 - DNA, 616 bp, Homo sapiens
tattcttagcaatgcctagtcaatgtgtatatacaatttttaatttgaggggatattgtcaaattgctatagtagttagtcaaattaaatgtacttgtatactatgacctggtaattctactctaagtagatagatttagatatagtgataaggatatagacatatcaaagaaatgctcacacatatccataaagggatatgtacaagagtgttcattatagttttgttatkttattttattttatttgtactgtctttgtttggagcagcggtgagaagttggtgttggtgatagatcctcattgggagggttcttagataaaccgtggtggatgttcaccatgggattttgtgcagcagtttgaagcaaatgtatgcataatgatattgtaaatatagtgctgagtgaaaaaaataagatgtatgccataatgctacttttgtacattaaaaaaaaaaatccacaagaaacactatctcacattttgcaaaaatacatgcaaaatgacacccattaaacaaacagggagggattgcctaggagaggtgggtagacgggtataaagaggaatgactcaatcaatcaagcagcggaggggagaagggggacatgat

SEQ ID NO: 22189 - DNA, 1065 bp, Homo sapiens
tctaaaagtagaacttctagaaaatttttagagagtaggacttaaaccttgagctcaatggaacttccttctcctcctactcaaatcttggtctcaggactcacctatttggacagctgagttgagagtctgacataaattcacctgcctagccaccagcaaggtacctacaaggaagcacagggctgccccatatcctctccaggatatcctttccgggccctccatactgggggaccttgcctagagaagtttatctcatagaatttcctatgaggaggagattaaagactatgatcctgcaattcccccgagagaacacagagccaagaaactaagaaacgatgtcatgtgtgaactgcatatggcatttaacactgtcccccatccactattaaatgtggttccatgaaagtcaggtcctcaacagtcaggttagctagtcctcccactttggggaggggcaaataagcaagtggagagagaagatggaagtattgtattctttctttaccagtcaaagtgcaaacatgagaaggagagtataactgttcctcctctcagttggaatttccttactgggggaattcaggaaacaggaacataaccagtaaaagaaactttggcaagaccttcctcagaatgtttcaagactgggagagaacaacatcccaagtggggcagaattttaatttttctctcttgaaatgtttccaaccttggaactgcattcatggtaagatatctgattgatcccatcctgcagccttctttgttggtcctgggggtgggtgggcaaaaaataacacccctccstatagaaggccatgttttccctgatctgctggaaggtgaagtgatggcccaaggcctaacagcagggtcctcaccactgaggaaaagagagaatgttctgtagattttcccgagactgacatatataaactgtgaatcattcacttgaggacaggatgggaagagctgatggaagccaagtgggagagaaagtacaaaggaagatttccagagataaagagaacaactcctcagtgagccggcttggag

SEQ ID NO: 22190 - DNA, 526 bp, Homo sapiens
tatttcagaaatctattgctgccccaaaatttgatggctgacaacaagaatctacttatttaggtstttttggttttatctcaacagtgttttatggatatctgtgtagagatttgtacatatatagattcattggtagatttatcccaactatatgtttttgatattactgtaaatggtatgctttttaaattttatttttaaattatttgttaaatatatttatttacatatgtatatagaaatattgatttatatataccagcaacaaatcatcagctctgagattctgtttcaggactctattgctgcccccaaatttaattgatttttatagattgaatttgtatctagtaacttcaccaaactcacttactaataatattttatagattctcagtctgtcttctcaccatcaactctcagctggtgagatcacaaggaagatgcttgatatatcttttaggtttcttaggttgtaagcaacagaagtgactctgactagcttagatataaggtagaatct

SEQ ID NO: 22191 - DNA, 526 bp, Homo sapiens
tatttcagaaatctattgctgccccaaaatttgatggctgacaacaagaatctacttatttaggtctttttggttttatctcaacagtrttttatggatatctgtgtagagatttgtacatatatagattcattggtagatttatcccaactatatgtttttgatattactgtaaatggtatgctttttaaattttatttttaaattatttgttaaatatatttatttacatatgtatatagaaatattgatttatatataccagcaacaaatcatcagctctgagattctgtttcaggactctattgctgcccccaaatttaattgatttttatagattgaatttgtatctagtaacttcaccaaactcacttactaataatattttatagattctcagtctgtcttctcaccatcaactctcagctggtgagatcacaaggaagatgcttgatatatcttttaggtttcttaggttgtaagcaacagaagtgactctgactagcttagatataaggtagaatct

SEQ ID NO: 22192 - DNA, 565 bp, Homo sapiens
tcccacatccattacagacatcactaatcaatcatggaacattttttttctactaattcctatggtagcctcataatccttgcaaaggattcaaacagcccttattgttcaacaggaattagaatgagagttaaaatgtatttgtatctcctctctatgccttcatcaatacacagctaagaaaattttaataatttcatgtaagatgtttgtagactattctatttatgttatagttattttaacagcagacttccatgcaaaatgtggtcatatatatgtatatatgacctcattccttagttttagttttcaacctcaagaatcaaatttgcttcaacataatacacatacagaattctataaatcaccaaaacctaatacctcaacctcatataatgtatcgactttagctctttggattctatcaagcttcttccaaaaaatctcarctgaggaagttggtatttgaattgtttcaacttatgcttatttattgtggtaattataaatatttttaattttcttattcattctacaaatattattattattatttgagatg

SEQ ID NO: 22193 - DNA, 485 bp, Homo sapiens
tgcttgttccccaagaaccctgttagttcaaggtcaccaggttctcccagtcaccaccacccttgctgggggaagtaaggtatggtgatggataggggaccttttttctatcttcatcacactccttgcctctcctccactgtcctactgccctgcagagtatatgaagaaatcccaggacatttagccaagattcctctcccaaagtgggcagctacccatagctacacacataatgccacaattatccattcttgtgggctgacctaagtggatcttttrtgaagtcctcaggtcagagaagatgagttgggttgaagttttaaggggatacttgtattattcctttgggtagattcttgatctcatccttgctttctcccagatcacgtgaatctctccccatcaactttcagtttatttcagaaattcctcctcctctgaggagcgctctgggactaacattccagaagaagctatactct

SEQ ID NO: 22194 - DNA, 563 bp, Homo sapiens
tgggaccacaggtcttggcagaggatgtggccccagcctccagcgtgggaccatgtggaaccaagggcccctctgggcaggctatgaggtacccttgtttttctagaatggatggtgcccacgcacactggacccaggcttcagagcctcaagaaggcaaggagggaatgagctttgcaggaaggcggcagaaacccagggcctcagctcagcagctgggacatgtagtcactaggctggggggcctggggcagacggcagggctgggcctcctgcttgctgtccctgcgggaagacaggccctgatctcctgtccccaggcccctggtgggacaaacaccccagcctgagcctgcttgggactgggacaccctccaacactctgtgactgggatacactggggccaccgcctctcagctgatgaaggtgaycataatgcagtctctctgtgcctcagtttactcctctgtaggatggggactgtgacaatgcctgtctgttgcagtgctcagcaggcagctgccggtgtcacaactgtagtgggcaggccagggactgaggc

SEQ ID NO: 22195 - DNA, 553 bp, Homo sapiens
gttttatttatagcattttggggcacaggaaattgtccttattcaatgtttagaaagtaagtttattatccttttattctgtgtcttcctttgatgtcagtacactaatttaagataccaagttattcagtaaaaaattttactttaagaaaaattctactcataatacayatagaaaattgatagtgatggggaacaaaatttgaaatttcctattcttcaaaccttaaaatcatcaataaacatgtttcagcatatttctcccccacattttaatatgtatatttttctgcatatttttaataatgccaagtttacaattttctctttcacttttttccctaaacattttcccatttcattagtgatggctgtctactacccaaccagggacactcaccatgactattgttgtaaaattgtcttgcttctattttttccaattataattaatgccacaataaacatctttgtatataatcttcccttatcccagggagtggattatttccactggacacattcagacaaaatgggattctgagtcaaagga

SEQ ID NO: 22196 - DNA, 553 bp, Homo sapiens
gttttatttatagcattttggggcacaggaaattgtccttattcaatgtttagaaagtaagtttattatccttttattctgtgtcttcctttgatgtcagtacactaatttaagataccaagttattcagtaaaaaattttactttaagaaaaattctactcataatacatatagaaaattgatagtgatggggaacaaaatttgaaayttcctattcttcaaaccttaaaatcatcaataaacatgtttcagcatatttctcccccacattttaatatgtatatttttctgcatatttttaataatgccaagtttacaattttctctttcacttttttccctaaacattttcccatttcattagtgatggctgtctactacccaaccagggacactcaccatgactattgttgtaaaattgtcttgcttctattttttccaattataattaatgccacaataaacatctttgtatataatcttcccttatcccagggagtggattatttccactggacacattcagacaaaatgggattctgagtcaaagga

SEQ ID NO: 22197 - DNA, 553 bp, Homo sapiens
gttttatttatagcattttggggcacaggaaattgtccttattcaatgtttagaaagtaagtttattatccttttattctgtgtcttcctttgatgtcagtacactaatttaagataccaagttattcagtaaaaaattttactttaagaaaaattctactcataatacatatagaaaattgatagtgatggggaacaaaatttgaaatttcctattcttcaaaccttaaaatcatcaataaacatgtttcagcatatttctcccccacattttaatatgtatatttttctgcatatttttaataatgccaagtttacaattttctctttcacttttttccctaaacattttcccatttcattagtgatggctgtctactacccaaccagggayactcaccatgactattgttgtaaaattgtcttgcttctattttttccaattataattaatgccacaataaacatctttgtatataatcttcccttatcccagggagtggattatttccactggacacattcagacaaaatgggattctgagtcaaagga

SEQ ID NO: 22198 - DNA, 602 bp, Homo sapiens
gtattaggtagcttggagtaaagatgacttgattgaaacagaggggaaaagggacatttccacgtacttagaaaaatcacacaaaaactgtattaggtagcttggagtaaagatgacttgattgaaacagagggaaaaagggacatttccacaggttgtaattaatggcccaggrcagaggacctatataagctattagctaatgcattttgatttttttttttcatttttctcttttccctctttgtgggaggttgctgtcttcctttgagggaagtaaatatgacacctcagaaatgtatttaaaataaaagactctcaagtgacaaaaaacatattgactttattagaggtgttcaaatttcttcaagaaaaggcacattacatattggtaatgcaaacagttctttcacatggaatctgtgtccttcatatttttgaaaaacattttggcaaaggcttattggctgaggctccccagtcaaggccattaggagtggaggtgggtgaaagaaaaaaaatgggaccctggagtaaccattgccatgttggagtttaagaacatcactatcatggggatagggaacatgatggttgaaaag

SEQ ID NO: 22199 - DNA, 602 bp, Homo sapiens
gtattaggtagcttggagtaaagatgacttgattgaaacagaggggaaaagggacatttccacgtacttagaaaaatcacacaaaaactgtattaggtagcttggagtaaagatgacttgattgaaacagagggaaaaagggacatttccacaggttgtaattaatggcccagggcagaggacctatataagctattagctaatgcattttgatttttttttttcatttttctcttttccctctttgtgggaggttgctrtcttcctttgagggaagtaaatatgacacctcagaaatgtatttaaaataaaagactctcaagtgacaaaaaacatattgactttattagaggtgttcaaatttcttcaagaaaaggcacattacatattggtaatgcaaacagttctttcacatggaatctgtgtccttcatatttttgaaaaacattttggcaaaggcttattggctgaggctccccagtcaaggccattaggagtggaggtgggtgaaagaaaaaaaatgggaccctggagtaaccattgccatgttggagtttaagaacatcactatcatggggatagggaacatgatggttgaaaag

SEQ ID NO: 22200 - DNA, 602 bp, Homo sapiens
gtattaggtagcttggagtaaagatgacttgattgaaacagaggggaaaagggacatttccacgtacttagaaaaatcacacaaaaactgtattaggtagcttggagtaaagatgacttgattgaaacagagggaaaaagggacatttccacaggttgtaattaatggcccagggcagaggacctatataagctattagctaatgcattttgatttttttttttcatttttctcttttccctctttgtgggaggttgctgtcttcctttgagggaagtaaataygacacctcagaaatgtatttaaaataaaagactctcaagtgacaaaaaacatattgactttattagaggtgttcaaatttcttcaagaaaaggcacattacatattggtaatgcaaacagttctttcacatggaatctgtgtccttcatatttttgaaaaacattttggcaaaggcttattggctgaggctccccagtcaaggccattaggagtggaggtgggtgaaagaaaaaaaatgggaccctggagtaaccattgccatgttggagtttaagaacatcactatcatggggatagggaacatgatggttgaaaag

SEQ ID NO: 22201 - DNA, 511 bp, Homo sapiens
gcagggaagggccagaacccaacttgggtctcctcagtcccagtcctgccttcttttttattattattatttgagaccgaatctcactctgtctcccaggctggagtgcagtggtacaatctcggctcactgcaacctccacctcccagattcaagtgattctcctgcttcagcctcctgagtagctgggattacaggcgcctgccaccatgcccggctaatttttgtatttttagtagagacggggtttcacctgcattgtttacccctgctcttggggacagttcccaagcaacygagtatttctgagaatcatgtgcagacaatagccagtcagcgtgtgttgcaggaaggcagcacattagcgataggaaatgcagtaagtacagaatgggcacaaatggccaggtaatggaaagtgtggtgattagaggttttctgttttgttcttggtggaattgactcattgtcctctctgtcttgcttttgtcattatttactccagtgctct

SEQ ID NO: 22202 - DNA, 1113 bp, Homo sapiens
ttattgcaagtgtaccgctgaacagaaaagcaaatgtagaaaacggaattttcaaaacaattctggctgaaaatgtttcttaactgctgacagccaatgaatcctcagatctgggaggcacaataaattctggaagaaaaatgacaagagaaggaaggactaaaatatacgaagaaaagcaaataaataaataaaattgtgggtaaatctaaacagacactgatattctgaaacaataacaagtagaaaaataaaaggaatagaactaaaatactagaaactaaaacagtgaaagataaaagcaagtcaggagagttaaaggttcttaaggccttgtatatttcaggartgtaaaataaactaattttcaggactgctgcctggtacatatgttaaaacttgaagcaaaaccactaaaataaatatttaaagtgtacaacatcaaacagaaaaataaggtaaaaaaagtttaatcaattaaaagaggaaaatctgaagaacagaaaaccaggataaattatacataagagaatgctgaaaatcaatccatatagaataataattgtgacatgtaaataataaagaaactaccaaggtagagctatgaaaaggaatcattttttaaaagacacaatctaaagaaggcaaaataaaaggaaaagggctacaaagaacagataggaaaaatagaaagaaatgacaagatgttggatttaaatccaaatatattgataactaaattaaacacaattgattgaaacattccaattaaaatgaaccgattggcaactggattgaaaagcagtcaccaactatagtctatgaacaataaatgtttttctctatattaaaaacaataaattgtaaaataaaatttaaaaatatgtgtaacaacattaaataagaaatacttagaacaaaaatcttcccattcactgatgaatggggcctaatgtaatcaacctgtcaccaggtagctggctgatcaccatgaagaatggtgccatgtaaaagggttcagtgtgggtttctgttgttggcagactgggcacttaatggtggccacagtcatacaaggcttagtgaatgggaatccatattgctgaacccatg

SEQ ID NO: 22203 - DNA, 1113 bp, Homo sapiens
ttattgcaagtgtaccgctgaacagaaaagcaaatgtagaaaacggaattttcaaaacaattctggctgaaaatgtttcttaactgctgacagccaatgaatcctcagatctgggaggcacaataaattctggaagaaaaatgacaagagaaggaaggactaaaatatacgaagaaaagcaaataaataaataaaattgtgggtaaatctaaacagacactgatattctgaaacaataacaagtagaaaaataaaaggaatagaactaaaatactagaaactaaaacagtgaaagataaaagcaagtcaggagagttaaaggttcttaaggccttgtatatttcaggagtgtaaaataaactaattttcaggactgctgcctggtacatatgttaaaacttgaagcaaaaccactaaaataaatatttaaagtgtacaacatcaaacagaaaaataaggtaaaaaaagtttaatcaattaaaagaggaaaatctgaagaacagaaaaccaggataaattatacataagagaatgctgaaaatcaatccatatagaataataattgtgacatgtaaataataaagaaactaccaaggtagagctatgaaaaggaatcattttttaaaagacacaatctaaagaaggcaaaataaaaggaaaagggctacaaagaacagataggaaaaatagaaagaaatgacaagatgttggatttaaatccaaatatattgataactaaattaaacacaattgattgaaacattccaattaaaatgaaccgattgkcaactggattgaaaagcagtcaccaactatagtctatgaacaataaatgtttttctctatattaaaaacaataaattgtaaaataaaatttaaaaatatgtgtaacaacattaaataagaaatacttagaacaaaaatcttcccattcactgatgaatggggcctaatgtaatcaacctgtcaccaggtagctggctgatcaccatgaagaatggtgccatgtaaaagggttcagtgtgggtttctgttgttggcagactgggcacttaatggtggccacagtcatacaaggcttagtgaatgggaatccatattgctgaacccatg

SEQ ID NO: 22204 - DNA, 1100 bp, Homo sapiens
cattctgggagattcgcaggtcccaggcagccgtgaccctggcagggagatggaaaaatttagtctcgggacgagaaaccgaggctgtggccaaccccatctaattatctttcactaactttgtgatgtttggagaatgtcacactggctttgagaatgtctcagttcttgggtcctgtgttccagaagaacctattaattgatagaggggcgggggagggtggtgtcttagctcctattttatttatttatttatttatttatttatttatttttgagacggagtctcgctctgtcacccaggctggagtgcagtggcacaatctcggctcactgcaacctctgttttgtgggttcaagtgattctcctgcctcagcctcccgagtagctgggatcacaagtgcgtgccaccacgcccccactaatttttgtattttttggtagagacaggtttccctatgttggccaggctggtcttgaactcccgacctcaggtgatccacccaccttggcctccaaagtgctgggattacaggtgtgagccaccgcacccggcccttagctcctatttaaatgtatatatatatttaggttagttaatttcagagatggcaaaacaaaaagaaaatgtgtgtgcatcggagggaacctttgatccacagccaccggcctgtgcttggagacatttctggctcgtcttcaaaattctgtgctaattgacatttgtctgtttctctgtgaagcccgccatccccaggtcattaggacattgggtctgggctgtagtttctctcccatcagggccagacactgcagcaatyatcataaaagacagtcggataaggaacttgctttgtaggcttaactaaattattagactcctcttgtgaccagaaagactctccttttatttggcactgaaaagttctcaggcatgtgtctgcacagaacaaaaggcgcctagacatctttatttgtgcccaactcctttccctaccccaaaacgctatctagaagtaaaagatgacacatgcattacagaaacaaaatgactcccctgacaatgggagccgcagtctggaagatacatctgaaaaga

SEQ ID NO: 22205 - DNA, 1040 bp, Homo sapiens
ctgtgtagaatgttttttttctgatttcttcacatacgatagaaaaaaaaacccaaaaaaacatgtactaggatttcaatagaagcaatgggtgatctaaaaagatgaaagagcaaccgcatgcgccctacagctaccgctagattttatggggaaagcagctggcccagtttgcagctaggagaaatgtcaaacacatgaagaaatgagaagcaaagaaaaaccatgaggcatgaacatttcatggcaatcacgatgtcctggtttgtgagataatgggatagaggagtagaaaacaaggagaaagatgagaaggtacaaagtggttcaagtcaaacagctcaactgaacttttcttaatggaatatttaaaaagtggtacattaaaaaacttcccccagttcacatcaaaaattctctcttcaggactaagttgggtagagactgttcaatgtgcctagatatcttcagaacttatatattttctgttttctacgtatgttgaagggcagtgccaaatgatgtgtaattatctaggttgtaaaaataaaacatactcccccttcccttgaggataaaaaagcattgtggtrttagcacttttttcttggatcattgttcagaagatgtttaagcccctagacacccaaacttttactgtcatgaacagcaagagaaaacgtagagctcgatttactcaatggacaaaaatgctcaaaagccaaattatggcacaatttagcagccacattcttaaccagtacagacttttgacataccgatccctctccagtggcaaccgagaatgtgtactttgaatgatgccatttgaaatgaccactcattactctgcccagacacacttttcattgattcttcggagggcagttccaagagattctctggggctttctctgcatcatgagacacagtgcagttctgcccttgaccttcctgcagtttgtcgcctcttcctcatgatctcagaggaactttgtctcaggccagctgtttgttccttgggctctttcatttcccct

SEQ ID NO: 22206 - DNA, 1040 bp, Homo sapiens
ctgtgtagaatgttttttttctgatttcttcacatacgatagaaaaaaaaacccaaaaaaacatgtactaggatttcaatagaagcaatgggtgatctaaaaagatgaaagagcaaccgcatgcgccctacagctaccgctagattttatggggaaagcagctggcccagtttgcagctaggagaaatgtcaaacacatgaagaaatgagaagcaaagaaaaaccatgaggcatgaacatttcatggcaatcacgatgtcctggtttgtgagataatgggatagaggagtagaaaacaaggagaaagatgagaaggtacaaagtggttcaagtcaaacagctcaactgaacttttcttaatggaatatttaaaaagtggtacattaaaaaacttcccccagttcacatcaaaaattctctcttcaggactaagttgggtagagactgttcaatgtgcctagatatcttcagaacttatatattttctgttttctacgtatgttgaagggcagtgccaaatgatgtgtaattatctaggttgtaaaaataaaacatactcccccttcccttgaggataaaaaagcattgtggtattagcacttttttcttggatcattgttcagaagatgtttaagcccctagacacccaaacttttactgtcatgaacagcaagagaaaacgtagagctcgatttactcaatggacaaaaatgctcaaaagccaaattatggcacaatttagcagccacattcttaaccagtacagacttttgacataccgatccctctccagtggcaaccgagaaygtgtactttgaatgatgccatttgaaatgaccactcattactctgcccagacacacttttcattgattcttcggagggcagttccaagagattctctggggctttctctgcatcatgagacacagtgcagttctgcccttgaccttcctgcagtttgtcgcctcttcctcatgatctcagaggaactttgtctcaggccagctgtttgttccttgggctctttcatttcccct

SEQ ID NO: 22207 - DNA, 1040 bp, Homo sapiens
ctgtgtagaatgttttttttctgatttcttcacatacgatagaaaaaaaaacccaaaaaaacatgtactaggatttcaatagaagcaatgggtgatctaaaaagatgaaagagcaaccgcatgcgccctacagctaccgctagattttatggggaaagcagctggcccagtttgcagctaggagaaatgtcaaacacatgaagaaatgagaagcaaagaaaaaccatgaggcatgaacatttcatggcaatcacgatgtcctggtttgtgagataatgggatagaggagtagaaaacaaggagaaagatgagaaggtacaaagtggttcaagtcaaacagctcaactgaacttttcttaatggaatatttaaaaagtggtacattaaaaaacttcccccagttcacatcaaaaattctctcttcaggactaagttgggtagagactgttcaatgtgcctagatatcttcagaacttatatattttctgttttctacgtatgttgaagggcagtgccaaatgatgtgtaattatctaggttgtaaaaataaaacatactcccccttcccttgaggataaaaaagcattgtggtattagcacttttttcttggatcattgttcagaagatgtttaagcccctagacacccaaacttttactgtcatgaacagcaagagaaaacgtagagctcgatttactcaatggacaaaaatgctcaaaagccaaattatggcacaatttagcagccacattcttaaccagtacagacttttgacataccgatccctctccagtggcaaccgagaatrtgtactttgaatgatgccatttgaaatgaccactcattactctgcccagacacacttttcattgattcttcggagggcagttccaagagattctctggggctttctctgcatcatgagacacagtgcagttctgcccttgaccttcctgcagtttgtcgcctcttcctcatgatctcagaggaactttgtctcaggccagctgtttgttccttgggctctttcatttcccct

SEQ ID NO: 22208 - DNA, 1362 bp, Homo sapiens
cccaaccccaaaggacacttagcaatatctggagatatttttgtcacgagggagggtggcgctactgccatccaataagtagaggccagggatgtcgctaaacatcctacagctcacgggacagccccacaacaaagaattaaagtcagaggcactgactgaaaaaccctcttctaggctagagtctacagtggtgaatgagtccctgtcctcacggtacttacaatcttgtgggaagacataataaaagtgaaataaatagaataggtcaagagcattatacaggaatacaaagcaggtcagggagtgagagtgcctggcagggagcacctacaggcaggattgtctacttcagcagaaggaagcgagggaaggagaccaagagacgtcagcaggaggagtattggaggtgatggggaaagcaagtgcaaaggccctggagcaggtgtgtgtgcagcacatctgaggacagaaaagcatggcttaaaagtgagaatggggctgggtggggtggctcacgcctataatcccagcacttcgggaggccgaggcaggtggatcacttgagttcaggagttcgagaccagcctggccaacatggcaaaacccggtctctactaaaaaaaaaaaaaaaaaggaaaaattagccgggcatggtggcacacacctgtaatcccagctacttgggaggctgaggtgggaaaattgcttgaacccaggaggtggaggttgcagtgagcagagattgggccactgcactccagcctgggtgacagagtaagactctatctcaataaaaaaaaattaaatagaaaaaaagaagaagaagtgagaacgggccaggcacagtggcacatgcttgtaatcccagcactttgggaggctgaggcgggaggatcacttgaggtcaggggtccaagaccatcctgggcaatatggtgaaaccccgactctactaaaaatacaaaaaaaaaaaaaattagttgggcatggtggtgcatgcctgtagtcccagctactctggaggctgaggcaggagaatcgtttgaacccaagaggcagatggagactgcagtgagcagagatgtcgccactgcactccagcctgagcaacagagcaagactccatctcagaaaaaaagtaagaagtgagttggtgtagagtcgggtgtaacatacatgccatggctccggcaaaactcttccccttcccacgcacaaccgtccctgctactcctgcagaaaacattgcatagtaaggaccataaagcgtcacccagccgtggggagggacagtgctacggggagccactgtgccagrtgccaggatggcagggtcacctctgatgtaagaatgcccgg

SEQ ID NO: 22209 - DNA, 1362 bp, Homo sapiens
cccaaccccaaaggacacttagcaatatctggagatatttttgtcacgagggagggtggcgctactgccatccaataagtagaggccagggatgtcgctaaacatcctacagctcacgggacagccccacaacaaagaattaaagtcagaggcactgactgaaaaaccctcttctaggctagagtctacagtggtgaatgagtccctgtcctcacggtacttacaatcttgtgggaagacataataaaagtgaaataaatagaataggtcaagagcattatacaggaatacaaagcaggtcagggagtgagagtgcctggcagggagcacctacaggcaggattgtctacttcagcagaaggaagcgagggaaggagaccaagagacgtcagcaggaggagtattggaggtgatggggaaagcaagtgcaaaggccctggagcaggtgtgtgtgcagcacatctgaggacagaaaagcatggcttaaaagtgagaatggggctgggtggggtggctcacgcctataatcccagcacttcgggaggccgaggcaggtggatcacttgagttcaggagttcgagaccagcctggccaacatggcaaaacccggtctctactaaaaaaaaaaaaaaaaaggaaaaattagccgggcatggtggcacacacctgtaatcccagctacttgggaggctgaggtgggaaaattgcttgaacccaggaggtggaggttgcagtgagcagagattgggccactgcactccagcctgggtgacagagtaagactctatctcaataaaaaaaaattaaatagaaaaaaagaagaagaagtgagaacgggccaggcacagtggcacatgcttgtaatcccagcactttgggaggctgaggcgggaggatcacttgaggtcaggggtccaagaccatcctgggcaatatggtgaaaccccgactctactaaaaatacaaaaaaaaaaaaaattagttgggcatggtggtgcatgcctgtagtcccagctactctggaggctgaggcaggagaatcgtttgaacccaagaggcagatggagactgcagtgagcagagatgtcgccactgcactccagcctgagcaacagagcaagactccatctcagaaaaaaagtaagaagtgagttggtgtagagtcgggtgtaacatacatgccatggctccggcaaaactcttccccttcccacgcacaaccgtccctgctactcctgcagaaaacattgcatagtaaggaccataaagcgtcacccagccgtggggagggacagtgctacggggagccactgtgccaggtgccaggatggcagggtcacctctgaygtaagaatgcccgg

SEQ ID NO: 22210 - DNA, 759 bp, Homo sapiens
tctcagtctcatttagcaagtagactgatgttgctctggtgggatctggtgtgtattataaatactttaaatattctttgaacctacttccctgtgttttttctcccaggttgtttggtcaacatttacatagtactctttgcagcctccatagcaaaactaaatcctgttttcatgttgcagtgataaacttgaccagtctgatataataaagctttttaaagatcctatgtatttccatgtctttagttagaagtattcacttaaaaatctttagtwgtcaaatcctcggtaattatcttaagatggtatttaccttacagtcagccttcgatattctgtcagtagaggggagggatattataattcaaaccaattgagaactgtgttattgatatataaattggggatctattatttgatgttctttggcagatttgccttctccacctagtgggtttaatattaagacgaacttaatatataaactggtggctgacaagagaaaagatgtctcaggagaggagtggggttatgtggattgtcctggattggtagccttttcgttgcttttgttgtaagaagtgattacatcgttatggactatttcagctgccgagaatggtggtattttgctttgaatgctaacttgtatgagatcagagagcagaggaaacgttgcacctgggactttatgttgcaccgcgctcgtgatgctgtatcttacactgacaaatatttcaacaagttaaaaggagg

SEQ ID NO: 22211 - DNA, 521 bp, Homo sapiens
catcctcctgcttcagattcccaagtagctgggactataggtacgtgccaccactaatttttttcaacaatttttatagagacaggatctcactatgttgcccaggctggtcttgaacccctggcatcaggtgatactcctgcctcagtcttcccaagtgctgggattacaggtgtgagccaccacacccagactggaccagatttttagaggagtctgaactcagtgccactcttggctgctttgctcattaagaaaatggatgtgccccttttcatttgtaaggatacttaggaagtggcaaagagcaccaactcagagccttgagacctgtggccccacgacagctccatcatggccttgctacatgactttggataaaccaacaacccaaccatggaaactggaaaagtcatcaaaaactccgacagtgaatgacagtcttggaccattaagttttttgcaaatctggtcaaagcaatgtatccaaggwctcccaggaaaatgcccatagaagcaat

SEQ ID NO: 22212 - DNA, 1177 bp, Homo sapiens
ctcctctctctctccccgtttggtgggaacatctcaaggtagcaagattgaaaggcagttgccacagaagacgttaaaacatactttaagagatgaatgtgtcacttctcccaggagcagttgcttttaaagagaagatagaagaaagccactggtgctggctccccaccccctctgcccccagcctctctttctctctctttgttattctgagacagggtttcagtctatcaccctgactggagtgcagtagcataatcatggcttactgcaacctcgaccttacaagctcaagtgatcctctcacctcagcctcctgagaagstgagactacaggcatgcaccaccacatctgcctgattttttcctttttttttttttgagacggagtctcactctgtcgccaggctggagtgcgatggcacaatctcggctcactgcaacctccgccttccaggttcaagtgattctcctgcttcagcctcctgagtagctgggactacaggtgcctgccaccatgcctggctaatttttatatttttagtagagatgaggtttcaccatgttggccaggatggtctcgatctcttgacctcgtgatctaccagcctcggcctcccaaaatgctgggattacaggcatgagccaccacacccagccttttttctattttttatagagatggggtctcactatgttgcctaggctggtcttgaactcctgggttcaagcgatcctcctgccttggccttcccaaatgctggggttgtagacctgagccaccatgcctggtcatctttccccagtcttagcatgtggatgtgagagctggaagattcccaaagacctggccggagactcctgtttgaaggaggagagggaagagccttaaggggttcccaaggttgcacatctgggcagggacagaacatcagacacattgtacggctgcaacaggctggcactgctgacatcacagacatcaggacagaccaggaagacacccatcaaattctgggctggaagatacggaatactctgactttacccaaggctgagccttcctcagaagctcctgagaagaaaagaattcaggggcctcatgaatgaggctcagaaatttggtgcaataatcaccaatgagccccaacccagggaagtgtaacgtatcacccca

SEQ ID NO: 22213 - DNA, 1177 bp, Homo sapiens
ctcctctctctctccccgtttggtgggaacatctcaaggtagcaagattgaaaggcagttgccacagaagacgttaaaacatactttaagagatgaatgtgtcacttctcccaggagcagttgcttttaaagagaagatagaagaaagccactggtgctggctccccaccccctctgcccccagcctctctttctctctctttgttattctgagacagggtttcagtctatcaccctgactggagtgcagtagcataatcatggcttactgcaacctcgaccttacaagctcaagtgatcctctcacctcagcctcctgagaaggtgagactacaggcatgcaccaccacatctgcctgattttttcctttttttttttttgagacggagtctcactctgtcgccaggctggagtgcgatggcacaatctcggctcactgcaacctccgccttccaggttcaagtgattctcctgcttcagcctcctgagtagctgggactacaggtgcctgccaccatgcctggctaatttttatatttttagtagagatgaggtttcaccatgttggccaggatggtctcgatctcttgacctcgtgatctaccagcctcggcctcccaaaatgctgggattacaggcatgagccaccacacccagccttttttctattttttatagagatggggtctcactatgttgcctaggctggtcttgaactcctgggttcaagcgatcctcctgccttggccttcccaaatgctggggttgtagacctgagccaccatgcctggtcatctttccccagtcttagcatgtggatgtgagagctggaagattcccaaagacctggccggagactcctgtttgaaggaggagagggaagagccttaaggggttcccaaggttgcacatctgggcagggacagaacatcagacacattgtacggctgcaacaggctggcactgctgacatcacagacatcaggacagaccaggaagacacccatcaaattctgggctggaagatacggaatactctgactttrcccaaggctgagccttcctcagaagctcctgagaagaaaagaattcaggggcctcatgaatgaggctcagaaatttggtgcaataatcaccaatgagccccaacccagggaagtgtaacgtatcacccca

SEQ ID NO: 22214 - DNA, 537 bp, Homo sapiens
ccctggcaccagctgtgaccaattattatttcagcgacacactgtaacaaccacctgaccatctgatggtcacctgacattcctgggttggggwctctcctgccctgctcatgcctgcccgactacctactgtaacacaactatgtgccaggcgctgtgctaagtgatacatacagtggtgagcaagacgttccaaggtgctcatagtagatgggagtgtttccacacacacattatcctgctcccagccttccctccagtcccagggttcccaagctgtgcaccaagctggaattggcattagacacagcaagtcctactgggaaatggctaggaggctgacaaatcctgctgttttggatcttgcaccagattcttggcactatggtgcacagaaacagagaaaagggtgcttttagcacagttcgcccacctggagttgctggaattttctaacaccccaccatacttcctccaactcatagatcagcctacaaagtgaaaatccacagttaaaggcccagttcttaaaccatt

SEQ ID NO: 22215 - DNA, 537 bp, Homo sapiens
ccctggcaccagctgtgaccaattattatttcagcgacacactgtaacaaccacctgaccatctgatggtcacctgacattcctgggttggggactctcctgccctgctcatgcctgcccgactacctactgtaacacaactaygtgccaggcgctgtgctaagtgatacatacagtggtgagcaagacgttccaaggtgctcatagtagatgggagtgtttccacacacacattatcctgctcccagccttccctccagtcccagggttcccaagctgtgcaccaagctggaattggcattagacacagcaagtcctactgggaaatggctaggaggctgacaaatcctgctgttttggatcttgcaccagattcttggcactatggtgcacagaaacagagaaaagggtgcttttagcacagttcgcccacctggagttgctggaattttctaacaccccaccatacttcctccaactcatagatcagcctacaaagtgaaaatccacagttaaaggcccagttcttaaaccatt

SEQ ID NO: 22216 - DNA, 537 bp, Homo sapiens
ccctggcaccagctgtgaccaattattatttcagcgacacactgtaacaaccacctgaccatctgatggtcacctgacattcctgggttggggactctcctgccctgctcatgcctgcccgactacctactgtaacacaactatgtgccaggcgctgtgctaagtgatacatacagtggtgagcaagacgttccaaggtgctcatagtagatgggastgtttccacacacacattatcctgctcccagccttccctccagtcccagggttcccaagctgtgcaccaagctggaattggcattagacacagcaagtcctactgggaaatggctaggaggctgacaaatcctgctgttttggatcttgcaccagattcttggcactatggtgcacagaaacagagaaaagggtgcttttagcacagttcgcccacctggagttgctggaattttctaacaccccaccatacttcctccaactcatagatcagcctacaaagtgaaaatccacagttaaaggcccagttcttaaaccatt

SEQ ID NO: 22217 - DNA, 573 bp, Homo sapiens
agtgtgtatagccaatgtgggggaggaaacacccatggcctaatgtcatatcatttcattaactcagtaagacttaccctagctgtatcccaaataaccaactctcataactgtattggacaattcatcaaatgcttatgggtgacattgaatggttgtgactgtgcactgtatataaaacccattactgatgaaggaagtgactattactaaagcaagtgggaatagcaatcagcaattggacaaattcaaccatgaatttcatagacaaagcaactgtgggttcaagcatgtcatgggaaacaattgcttggcttaacacaattcatgagcaaaatcaacttgctaaaatgcaggccatttggccctgagggctggagagaaccattatattgctgatgatatttgttgttgaacttggatctctttcacacgscatttgacaatgggctcagagtccatgggtccctagttgacttttcaaaaaggaaggaatgtttcagtgagacagttaattagctttttgtcttctgggtttactgatgtcctcccactgagtggtaagtttctggg

SEQ ID NO: 22218 - DNA, 647 bp, Homo sapiens
taacaagacttttttttgtatatcctagtaaactactctttatttatctggaattcaaatgtaactaggtatattttctattttagacatgaagggctgattttttagaaaaatctaattttaagtcatggatctcaacaattctggcatagtgcagtaaaaatacatactctgaatatttcaaaaataagttattagttttaatgatacatcttaagaggtaaagcattataaaaaatktaataattataattctaaaatataattgaaatatgtattgcaacagcctttaatttggattgaaactttaattcaatttatattactcaagttatgtttgcactgagtagtatagtgttattaggtccaatgggagactattttcgaatagggcagtgtagtggaaaaagcattgaaattcaagtagtgctgactgggagttaatgccatactcctgctgtgtgaccttcaggaaggccacctttcacttttccatttgcttatttttaacagtgtgtgtgttaacacatcatatcgcttttatgacaatgaaataagacaattgtatttactcaatttagagacttgcaaagggcctggaacttagtaagtgcttggtaaatattattttccttctctctctctct

SEQ ID NO: 22219 - DNA, 647 bp, Homo sapiens
taacaagacttttttttgtatatcctagtaaactactctttatttatctggaattcaaatgtaactaggtatattttctattttagacatgaagggctgattttttagaaaaatctaattttaagtcatggatctcaacaattctggcatagtgcagtaaaaatacatactctgaatatttcaaaaataagttattagttttaatgatacatcttaagaggtaaagcattataaaaaatgtaataattataattctaaaatataattgaaatatgtattgcaacwgcctttaatttggattgaaactttaattcaatttatattactcaagttatgtttgcactgagtagtatagtgttattaggtccaatgggagactattttcgaatagggcagtgtagtggaaaaagcattgaaattcaagtagtgctgactgggagttaatgccatactcctgctgtgtgaccttcaggaaggccacctttcacttttccatttgcttatttttaacagtgtgtgtgttaacacatcatatcgcttttatgacaatgaaataagacaattgtatttactcaatttagagacttgcaaagggcctggaacttagtaagtgcttggtaaatattattttccttctctctctctct

SEQ ID NO: 22220 - DNA, 504 bp, Homo sapiens
aatatcacacttctctggcatcaaaagcctgtccccaaataggcacataaatattaagctaactaccagaagtacacactctaatgcttatgcattttgccaatatattagaaaatatttatatttttttcttattaaaactagaatgcctagaattaaatctgtttccactatttcctatccatgtaacctaagttgcttaatttctctgtgcctcagtttcctcatttcttaaatggggataataagagaactacctcatgaggttatgaggattaagtgaattaatacgtttaaggtgcttagracagtgccatgcacataagtatcatataaatattggatttaaaataaaataaatgataatacatatatagatatatagatatttctcaaataagattggaacatttttaacgataaaaattaacctatgatcattagatataaaagatcattctagaaccaaagttatttgggactaatagaactagagactgcaaa

SEQ ID NO: 22221 - DNA, 949 bp, Homo sapiens
ggtaaaaacagtttcctacattattttaaacgatttgtgctataaaatagtatacagtcagctatgtaatgttttactattgattacctagtattcagttayagggatttttaatttttatttatctttttcctcacaacttttgacattttcctggtcactaatgcctgcaggagacagtgaggcgaactcaagttaatcaagtcactgttcagtttttagtgcctttatgaggagcaggactttaaaactattgactaaaattaggctttctgggttatttatggattttatttaacatatttctttcccttctgcatatgcagtttgagagcagactgcatatattgtatttacactgaagagaaagttgaacaaatcaattcatggagataagagaaaatacacatgtaaaacaaatattgtcacagaaacaatagtcttatttcttgttgaaaattatgacggaattcacgaaatagaaggatgatagcttatctgtattttgtacttttttagtggggcatgaaagagctggtgtaaatggatcatagctttaaaatagaactgagggtatgaataatatttaaggaaacttgaagtcagtatgtctaaatagagaatcactgacaattatgtacttaatggtcagcatatcatttaatcacagatgctcttgacattgtttatgaaaatgagtcatgtagtaatttgtcaaggtcaagagtttgagccctgggccctataaggggtatgagtttgaatttaccctccacccttcactcacacctatgagctatttattcattattctctgctattctactatatgcacagttgctctcatttatatatcattccgtatatgctttttgttgttgtgttgttttatggcgctaaatgatctttggaagttgtatttgccatgatatttgtaggtaaggaatct

SEQ ID NO: 22222 - DNA, 563 bp, Homo sapiens
ggtgctggtgggaattcagatcacttagatggttacatagtagtgcagggaggcaaagaggctggaggaaaagcaagggagctattcgtagccagtgcctcctactccactgaatgctgcccaatggaattaatagagactgcttctggtttgatgcactgctgcctatcctaaactagaaccataacttaattgatattagtcatacattatatctgattacctctagaagaaattgtcataagtgcacattagtgaggagtaaggaaggcttttgctaataacactacatttcagactgagttaacaattaatcatctacccctgacttttactaaagggtaagtcatctatttcatatggaacaacaaagacactatgcataatttcttaagaaaggaagcccaaaaatgttatatgtcagattttgaagcatttgctttcaacctcaagtttcatttatctcacatgcttaaattactcctaacgcagtgattgtcaaagtgtggtctcctgacsagcagtaacagcatcacctgtgaacttgttacaagtgcaaattc

SEQ ID NO: 22223 - DNA, 519 bp, Homo sapiens
aataagaaataaaatctgagtagtttaaagtctgagattgggaggtttttaaaattatctcagcataatctagcctgatataaactggatttcaaaactgatttcattctaagtagtttcatgttgcactaaaatattaagttatactttgtaagatgtattttgatccaaggatatatatgagtcatataagttatataagcrtaagaatttcctcccagtatcactgcacctttgacagaagccacataggagctagttccaacttgctcttttaaataggaggcagaaatacagaattactataaaaaagggagattcaaatgtcctgaaacccagaatgagtctgtcagacttgtagctacattaagcaaatctaaaagtttagtcttcttctaagcatgtacaactttccactcgcgcacagaaattaaggcaagaaagggtagaacctttcttcaaaagcagcttggagtctcatcttcctccaccaaaacagtatcaattactagttgactc

SEQ ID NO: 22224 - DNA, 715 bp, Homo sapiens
tttgtatttttagtaaaggcagggtttcaccatgttggccaagctgatctccgactcctcacctcatgtgatttgcccgcctcaacttcccaaagtgctgggattacaggcatgagccactgcgcccagccctcaaattacttttaagacatctaatatgtttgcttctttgcttagagttacctgtatcttccctgttgatttccttttaatgtaagccctcatctatctatactttaatccctattatagggctccccaaatttagagatttcactgaaaagtcttcagtttttttgccacatccatttaatctccgttattatacacaattcttttttaaaaaaacgatggattagttggatttttattattattattattattattattattattatactttaagttttagggtacatatgcaccatgtgcaggtttgttacatatgtatatatgtgccatgttggtgtgctgcacccattaactcgtcatttagcgttaggtatatctcctaatgctatccctccccactccccccaccccacaacagtccccagtgtgtgatgttccccttcctgtgtccatgtgttctcattgttcaattcycatctatgagtgagaacatgcagtgtttggttttttgtccttgcgatagtttgctgagaatgatggtttccagcttcatccatgtccctacaaaggacatgaactc

SEQ ID NO: 22225 - DNA, 546 bp, Homo sapiens
gtggacaaatctcaatccagaagttagtagaggtaaataaagaggattgttttgtgctttcaattaccgcaattttgattgagcaattcctggcaactattgatcccctgatcagtcctgagaatgctctaggtcacaattataggtatacaaggagatatcatcagttccttttcaaaaattatgacccaacagagctatgaaagaatttcattttccattttcatctccaaagattgtcaaacagtgcaaaactgttcaaacatctgttgttttttctaattataagcaaaaattatctccactgaaccccaactctaagtgtgtgkgttgttcggtgggggcacaggggaagtaacctgtaagccttaggtttgagtaacttgtatcagtttatttagttcagaaaagtttggaatatagtgcgtttccctgagaagttcagttggttccacaaaacacagggttgcatagtttcagctcttcatttcaacacacgaccacagtgaggcaacaccctacgttttcagccttctcatttatatt

SEQ ID NO: 22226 - DNA, 523 bp, Homo sapiens
tgaaaagtgttatttctatgttaacaaatcagacatgccttcaatttaaaagatcttaaatacaagtacatttttttttaatcagataagcactgcctcctgcaattatttattcagttggttaaatcttggctyctggtaatctttgctcagaggaatttttcaatccttggctattgttctctttatagttattatgtttacctcttactccatgtgttgtattctttcgagggttttaaatgctttccagccgttcctttcatgtcagatgatttccatcatggtcagacaaggaaaccaatactgactatggaattgctgatggtggttatatgacgctaaaccctagtgaacctattgataataacaacatctacttgactctttgttccagcaattacatcaatagtggtaactgagattaatgttatgctatttggtcacattcttagcttgctgagagaatgaccaaaagaggggaattgttaatgcaaagttaaaataggtactaggcctgtaa

SEQ ID NO: 22227 - DNA, 523 bp, Homo sapiens
tgaaaagtgttatttctatgttaacaaatcagacatgccttcaatttaaaagatcttaaatacaagtacatttttttttaatcagataagcactgcctcctgcaattatttattcagttggttaaatcttggcttctggtaatctttgctcagaggaatttttcaatccttggctattgttctctttatagttattatgtttacctcttactccatgtgttgtattctttcgagggttttaaatgctttccagcmgttcctttcatgtcagatgatttccatcatggtcagacaaggaaaccaatactgactatggaattgctgatggtggttatatgacgctaaaccctagtgaacctattgataataacaacatctacttgactctttgttccagcaattacatcaatagtggtaactgagattaatgttatgctatttggtcacattcttagcttgctgagagaatgaccaaaagaggggaattgttaatgcaaagttaaaataggtactaggcctgtaa

SEQ ID NO: 22228 - DNA, 523 bp, Homo sapiens
tgaaaagtgttatttctatgttaacaaatcagacatgccttcaatttaaaagatcttaaatacaagtacatttttttttaatcagataagcactgcctcctgcaattatttattcagttggttaaatcttggcttctggtaatctttgctcagaggaatttttcaatccttggctattgttctctttatagttattatgtttacctcttactccatgtgttgtattctttcgagggttttaaatgctttccagccgttcctttcatgtcagatgatttccatcatggtcagacaaggaaaccaatactgactatggaattgctgatggtggttatatgacgctaaaccctagtgaacctattgataataacaacatctacttgactctttgttccarcaattacatcaatagtggtaactgagattaatgttatgctatttggtcacattcttagcttgctgagagaatgaccaaaagaggggaattgttaatgcaaagttaaaataggtactaggcctgtaa

SEQ ID NO: 22229 - DNA, 555 bp, Homo sapiens
aatggacaggcaatggagaaaaagagtatatgcagggagtagtaaaattccttgctgtaatcattgctgacaaccagctatamacctccttctatactaggtaatctatactaatacagcctcatttttgcatcagctgatttaaattgggatctatccagagttctgatgactgcagatcatacgtgtatctgtgaaactgtatcccattcggacgttatcattaggggcatgtcttagtccatagagttttttgtaacagaataatacagattgggtgtcttcaacaacagaaatctatttctcatagttctggaggctgggaaggtccaagatcaagattgctggcagatccaaggcctggtgacagttcactttctggtttgtagatgattatctactgttatatcctcagatgaaagggagagagagaaagtgaaagagagaaactctgtcatgtctcttcttcttataagggtacagatcccattcattagggccccaacatcctgacctaatcaacctccagaggcctcacctcaaaatactatcatg

SEQ ID NO: 22230 - DNA, 709 bp, Homo sapiens
caatattaaggatcaaaatagtgttcgctggatactctttcttttgattattctgaaatttccagagtacacattaaggaaatatttttcctgagaacttattttaccttaagtgacaacttgttaaaagttaatattaaatagtgcatcaggctgaattctgtgtgtgtgtgtgtgtgtgtgtgtgtgtgtgtgtgtgtgtgtgtatatatatatatatatwtatatttttttttaagacggagtctctctctgctgcccaggctggagtacagtggcaggatctcggctcactgaaacctctgcctcccgacctctgcctcccagcttcaagtgattctcctgcctcagcctcctgagtagctgggattacaggcatgcatcaccatgcctggctaatttttacatttttagtagatatggggtttcaccttattgaccacgctggtctcaaactcttgacctcaggtgatccacacacctcagcctcccaaagtgctgagattacaagcatgagccactgcatctggtctgaattatctttaataattatatgtgaaaagagatacagtactagttacacatgcatcttgtcttgtacagaaaatgattatcttgctcacaactactgcatgacttaaatttattaagagtaatctctatttctgatacagattaataacaacttttccattctaagatcttctat

SEQ ID NO: 22231 - DNA, 709 bp, Homo sapiens
caatattaaggatcaaaatagtgttcgctggatactctttcttttgattattctgaaatttccagagtacacattaaggaaatatttttcctgagaacttattttaccttaagtgacaacttgttaaaagttaatattaaatagtgcatcaggctgaattctgtgtgtgtgtgtgtgtgtgtgtgtgtgtgtgtgtgtgtgtgtgtatatatatatatatatatwtatttttttttaagacggagtctctctctgctgcccaggctggagtacagtggcaggatctcggctcactgaaacctctgcctcccgacctctgcctcccagcttcaagtgattctcctgcctcagcctcctgagtagctgggattacaggcatgcatcaccatgcctggctaatttttacatttttagtagatatggggtttcaccttattgaccacgctggtctcaaactcttgacctcaggtgatccacacacctcagcctcccaaagtgctgagattacaagcatgagccactgcatctggtctgaattatctttaataattatatgtgaaaagagatacagtactagttacacatgcatcttgtcttgtacagaaaatgattatcttgctcacaactactgcatgacttaaatttattaagagtaatctctatttctgatacagattaataacaacttttccattctaagatcttctat

SEQ ID NO: 22232 - DNA, 709 bp, Homo sapiens
caatattaaggatcaaaatagtgttcgctggatactctttcttttgattattctgaaatttccagagtacacattaaggaaatatttttcctgagaacttattttaccttaagtgacaacttgttaaaagttaatattaaatagtgcatcaggctgaattctgtgtgtgtgtgtgtgtgtgtgtgtgtgtgtgtgtgtgtgtgtgtatatatatatatatatatatwtttttttttaagacggagtctctctctgctgcccaggctggagtacagtggcaggatctcggctcactgaaacctctgcctcccgacctctgcctcccagcttcaagtgattctcctgcctcagcctcctgagtagctgggattacaggcatgcatcaccatgcctggctaatttttacatttttagtagatatggggtttcaccttattgaccacgctggtctcaaactcttgacctcaggtgatccacacacctcagcctcccaaagtgctgagattacaagcatgagccactgcatctggtctgaattatctttaataattatatgtgaaaagagatacagtactagttacacatgcatcttgtcttgtacagaaaatgattatcttgctcacaactactgcatgacttaaatttattaagagtaatctctatttctgatacagattaataacaacttttccattctaagatcttctat

SEQ ID NO: 22233 - DNA, 709 bp, Homo sapiens
caatattaaggatcaaaatagtgttcgctggatactctttcttttgattattctgaaatttccagagtacacattaaggaaatatttttcctgagaacttattttaccttaagtgacaacttgttaaaagttaatattaaatagtgcatcaggctgaattctgtgtgtgtgtgtgtgtgtgtgtgtgtgtgtgtgtgtgtgtgtgtatatatatatatatatatatatttttttttaagacggagtctctctctgctgcccaggctggagtacagtggcaggatctcggctcactgaaacctctgcctcccgacctctgcctcccagcttcaagtgatyctcctgcctcagcctcctgagtagctgggattacaggcatgcatcaccatgcctggctaatttttacatttttagtagatatggggtttcaccttattgaccacgctggtctcaaactcttgacctcaggtgatccacacacctcagcctcccaaagtgctgagattacaagcatgagccactgcatctggtctgaattatctttaataattatatgtgaaaagagatacagtactagttacacatgcatcttgtcttgtacagaaaatgattatcttgctcacaactactgcatgacttaaatttattaagagtaatctctatttctgatacagattaataacaacttttccattctaagatcttctat

SEQ ID NO: 22234 - DNA, 644 bp, Homo sapiens
gctgtccataaccaatcagactgatagcaggtcaattcttcgtttgcatagaagtgtaactttgtaacttcaccctagcaaaaagcaaccaatcagatatttgcacaggagtgtgacctttgtaacttcagcctctggttggctactttctgcaaccaatcagactgattgtgggctaccgctttatttacatgaggtgatcatgaaatagccaatgggaaactgttagggggtatttggatccacgcagattctgtatctgggcccctgagcagctgctcggatcccctcccacactggagtgtactttcattttcaataaatccctgcttttgttcttttgttgcttcattctttctttgctttgttgggctttttgtccaattctttggtcaaaacgccaagaacctgggcaacttgcagtcacgaccctctactagtgacatattgatttataaaattaaatctaagtttaatctctagatcarttattgactaggtgcaatattgttctttactactattattccattaaggttgcagaagcatccttactatcagaaatgtttgcattttagtagacaaaataaaatcatacataaaaatcattaaaacaattttgatgttctttatgaattctatta

SEQ ID NO: 22235 - DNA, 578 bp, Homo sapiens
ttttcaatgtaataaaaacattcttactttctatgcagttttcagataagatcaattgttttatttatctcaaatactaacaaggattgagctgccaggagacttcagcactcagggacccccaagttggttttttccctgggacccagccaggtggtatttcacacattttaggagaagccacacaagctacttctttggagttaaaccaaggaatgtatccaaagagaggtggattttttttgttttgtgttcatatgatttattttccttcacaagctgtaaaatccttcacatctcactgatgggggaaaaaaaaagaatacaattcaatgatatcagaatgtgcamaatcttttcagctgaacccaaactgctttcatgggtcacatttctacttacctcgggcttctgtgttttctgtccgtctctcaccatcccaacttatggtgaataaaatcttcatgcagtgaacatattaattatatgaattgcatcttcatgtaagttgtgtgaattctcaggtcacatctgtggaacgccaaggccaaaaacacccaactccacagggatgttgt

SEQ ID NO: 22236 - DNA, 548 bp, Homo sapiens
tgctgccttggcctcccaaagtgctgggtttacaggcgtgagccatcacgcccggacttgttctgttttctagctaaatcttttttttctagcaaagcattttctaaacctgttgttagctctcaactcattttataaattcaactttgagccatctcaagagtgtcagtccttcagttaaacaaaatcagggtgtaattcaatatggagaaaatttaagtgagtacaataggacaagaaaataaaaggagatcagaaagacgagttaagtacaccagtggaagaaaatctgggtattcacatggaatcagaggctcatggaagcatcaattcagacctggctgtattacatttgtgactaatctaatatttctactaaacacactttatagctgtaagkaaggactctgtgagagtactgtattccactttttgtttctcacttttaaagggacatataaaaatggaaatgttgagacaatgacaactatgattaagcactcagaaaacattcctccttggagcaaagtctaaaaaagttgaaatgg

SEQ ID NO: 22237 - DNA, 548 bp, Homo sapiens
tgctgccttggcctcccaaagtgctgggtttacaggcgtgagccatcacgcccggacttgttctgttttctagctaaatcttttttttctagcaaagcattttctaaacctgttgttagctctcaactcattttataaattcaactttgagccatctcaagagtgtcagtccttcagttaaacaaaatcagggtgtaattcaatatggagaaaatttaagtgagtacaataggacaagaaaataaaaggagatcagaaagacgagttaagtacaccagtggaagaaaatctgggtattcacatggaatcagaggctcatggaagcatcaattcagacctggctgtattacatttgtgactaatctaatatttctactaaacacactttatagctgtaagtamggactctgtgagagtactgtattccactttttgtttctcacttttaaagggacatataaaaatggaaatgttgagacaatgacaactatgattaagcactcagaaaacattcctccttggagcaaagtctaaaaaagttgaaatgg

SEQ ID NO: 22238 - DNA, 416 bp, Homo sapiens
  misc_feature (1)...(416): n = A,T,C or G
gcaggaaggtacctcaggtaccaacaattgaagatgatgctaaagaacactctttggttgatggttttcaggccgttctgatcattgtaaatccaggctgcaaatttcctttaaagctgtcctggccaggcgcggtggctcacgcctgtaatcccagcactttgggaggcygaggtgggtggatcacaaggtcagcagattgagaccgtcctggctaatatggtgaaaccccgtctctactaaaaaaatacaaaaaattagccaggcattttttgcgggcacctgtaatctcagctactcgggaggctgaggcaggaaaatggcgtgaacccgggaggcggagcttgcagtgagccgagattgtaccactgcactccatccagcctgngtgacagagcgagactcagtctcaaaaa

SEQ ID NO: 22239 - DNA, 579 bp, Homo sapiens
tactcatgaattactacattcatcttagcattattattataactctttacataagatgtaaaaaaattacattatattttttgaaatagggtctcaatctgtagctcaggctggaatgcagtggcatgaacacagctcactgcagctttgacttcttggactcaagctattctcctgccttagcttcctgagtagctgggatacaccacttcctgagtagtggcatacaccactacacctggctacattttgattttttttattgagacagagtcttgctatgttgcccagrctggttcagaacacctgggccaagcgatctcccacctcagcttcccaaattgctgggattagaggcatgagccactgcagcaagcaagacattacattttatgtgaaaattcataacagtttaagacagttttatttatactcccatttttgtgtgatatgttttcatatacgcgtgttattaacattaaaatttatttttgtcatttttcttttaaataattgtcttttaaagaattaagaaaataaaaatacaattatttatatttatccacttatttttaactt

SEQ ID NO: 22240 - DNA, 579 bp, Homo sapiens
tactcatgaattactacattcatcttagcattattattataactctttacataagatgtaaaaaaattacattatattttttgaaatagggtctcaatctgtagctcaggctggaatgcagtggcatgaacacagctcactgcagctttgacttcttggactcaagctattctcctgccttagcttcctgagtagctgggatacaccacttcctgagtagtggcatacaccactacacctggctacattttgattttttttattgagacagagtcttgctatgttgcccaggctggttcagaacacctgggccaagcgatctcccacctcagcttcccaaattgctgggattagaggcatgagccactgcagcaagcaagacattacattttatgtgaaaattyataacagtttaagacagttttatttatactcccatttttgtgtgatatgttttcatatacgcgtgttattaacattaaaatttatttttgtcatttttcttttaaataattgtcttttaaagaattaagaaaataaaaatacaattatttatatttatccacttatttttaactt

SEQ ID NO: 22241 - DNA, 579 bp, Homo sapiens
tactcatgaattactacattcatcttagcattattattataactctttacataagatgtaaaaaaattacattatattttttgaaatagggtctcaatctgtagctcaggctggaatgcagtggcatgaacacagctcactgcagctttgacttcttggactcaagctattctcctgccttagcttcctgagtagctgggatacaccacttcctgagtagtggcatacaccactacacctggctacattttgattttttttattgagacagagtcttgctatgttgcccaggctggttcagaacacctgggccaagcgatctcccacctcagcttcccaaattgctgggattagaggcatgagccactgcagcaagcaagacattacattttatgtgaaaattcataacagtttaagacagttttatttatactcccatttttgtgtgatatgttttcatatacgygtgttattaacattaaaatttatttttgtcatttttcttttaaataattgtcttttaaagaattaagaaaataaaaatacaattatttatatttatccacttatttttaactt

SEQ ID NO: 22242 - DNA, 579 bp, Homo sapiens
tactcatgaattactacattcatcttagcattattattataactctttacataagatgtaaaaaaattacattatattttttgaaatagggtctcaatctgtagctcaggctggaatgcagtggcatgaacacagctcactgcagctttgacttcttggactcaagctattctcctgccttagcttcctgagtagctgggatacaccacttcctgagtagtggcatacaccactacacctggctacattttgattttttttattgagacagagtcttgctatgttgcccaggctggttcagaacacctgggccaagcgatctcccacctcagcttcccaaattgctgggattagaggcatgagccactgcagcaagcaagacattacattttatgtgaaaattcataacagtttaagacagttttatttatactcccatttttgtgtgatatgttttcatatacgcgtgttattaacattaaaatttatttttgtcatttttcttttaaataattgtcttttaaagaawtaagaaaataaaaatacaattatttatatttatccacttatttttaactt

SEQ ID NO: 22243 - DNA, 513 bp, Homo sapiens
tttctccttctctctctctctctgtatatatacatacatatatatgaatatttggggtacttgtctctatgtattcctatatatatgtctgtgtatgtcctgttggttctgctccttttgagatccctaactaatacagattttggtattgagagtgtttttagagaaacagaattttaaaaatggattttgtaaattagtttgayggtttctggaattggctgtctaatctgattagatttaaaggtgctaataactttatttccagaagtaaagagagaactgatagttcataacaaggtctagcaataaagatacataaaatgttactattggatactcctaatcaactacttataaaatgcaagagtttgggtgactgtgcatgtgctacttttgaatatttttggcaaactaatgagtataatgagattggctgattgcttctaatgttactagacaaattgggtaaagaaaaggatgaggtcagacatttgaattaccagctcaagt

SEQ ID NO: 22244 - DNA, 513 bp, Homo sapiens
tttctccttctctctctctctctgtatatatacatacatatatatgaatatttggggtacttgtctctatgtattcctatatatatgtctgtgtatgtcctgttggttctgctccttttgagatccctaactaatacagattttggtattgagagtgtttttagagaaacagaattttaaaaatggattttgtaaattagtttgacggtttctggaattggctgtctaatctgattagatttaaaggtgctaataactttatttccagaagtaaagagagaactgatagttcataacaaggtctagcaataaagatacataaaatrttactattggatactcctaatcaactacttataaaatgcaagagtttgggtgactgtgcatgtgctacttttgaatatttttggcaaactaatgagtataatgagattggctgattgcttctaatgttactagacaaattgggtaaagaaaaggatgaggtcagacatttgaattaccagctcaagt

SEQ ID NO: 22245 - DNA, 552 bp, Homo sapiens
tactgcagacctattgatgaacaagtttggaataatctctgttaaggaaaaatcarttgtcctaaaggagtgatttgcaattccagccttctagaactctggagtgctcatagtcattcattcattcaacatttatcaagcaccagttatgtgcaaggactgtgcaagattctggggatagagcatgcagctaaaaaaggcccctgtcccaatgagtcaaaggtatatcaaaactctgtaagtgaaatttgtttgctatactttaagagtgggggaaggtatataaatagaataaaataattataataaactgttaccaccagggtatctcaattgcaaagataagttgaaaatcacctctctaaagaagagagagagtctaaaggaatctgcctgtgtcatcatcaagtcccatttgctatatcccaaaggagtctctttatactagattttcaagtatcccatcataagagttaaaagtcattaggtccaaatgtgttctttattgtttgagggttttcatctatgtgtatttttactacctggggtttg
